United States Patent Application Publication US 2007/0016974 A1 - sequence listing, part 4

SEQ ID NO: 19390 - DNA, 472 bp, Oryza sativa
  Clone ID: uC-osflcyp051d04a1
gaaagttgtaaaattcgacactactgttcttgacctttattcagattttacagcgttcacaaatgtatacaacagttaaatgccaagacttggcatacaggacggagcttttattcatgctggccttcaccaccggacacgattccaacgaggtgattcggatacgttagatatcctctcgcacggcacagccttctagccagccaagattgaccagagaattttccaaggagtctagttggtctgcatcatgctgcattagccggccaataatcggtgcatggggacctgatttttatttgcttcctgtagtagcaatctgagaagaaattgcagtgagctgtagctttatcatcttcggaaaatgatggttataaccgagcttttgctaatgcggcaggtttgaagcttgcgatcccagttatttctctaccagtcaccaggctgttgatgtcgtatgtgccttcgtatg

SEQ ID NO: 19391 - DNA, 474 bp, Oryza sativa
  Clone ID: uC-osflcyp051d06a1
atccccaaccaatccccaattatatgagcctgattgtgcaaagcatggacacactagtttccagagcatactacattctggtgaatagccgtgaattacaaattatgcaaaggagcatcataggaagtttacacgcctaggatgccagtcaaaacacacataaacatatatatagacaaacatttgacagttacattacagaagaaatctatctgaagaaacatacaaacagcatggcactcgaaattttaaaaagacaatatttttcaccgacactctgactatagcatctttcagagatgacagcagcatcacacacaagacccttaatcgtccttgtactaatgtgattggttgatcaggcaagatgcaaagtagccttgatcttctcgagtaactgcatcagcttcaatcagcagacttgacacctgaaagatacacccgagattgtatgacactagtcccaatcaagaa

SEQ ID NO: 19392 - DNA, 349 bp, Oryza sativa
  Clone ID: uC-osflcyp051d07a1
gggcaacaattggactcaaaacatccaagtttttaaccgaatagaaataaacgagttttaaacgactaacatagtgcacattgggagcagatattaacggtccatgcaacgagtaccatggccgggggcaaaacttaacgaacgctaagatatttcaaatgcagccagcataaccaccacttcaacgatgctcattttttcttggggggaggcttggtcaccttggcaccgggtgggtcctttttttccacgttcttgatgacgccaacagccaccgtttgccttatgtcacgcacgggaaaacgaccaagaggggggtactcagagaaggtcttcacaaccatgggct

SEQ ID NO: 19393 - DNA, 181 bp, Oryza sativa
  Clone ID: uC-osflcyp051d08a1
ggcttctcttaaaagaaaatttatactaaattcatcaactgtttaccatcacatggattaaacaccaaccgaattgcgagaacaagaagcaaaccatctcagtagatcaagcctcaggcgccggctgcgagaggccggccttggcgagcagcttccccatcgcctcaggcgagcacacctg

SEQ ID NO: 19394 - DNA, 457 bp, Oryza sativa
  Clone ID: uC-osflcyp051d10a1
cattgtcgacggattcagatatgctctaggcatcatattacatgagtacgtgtgtatagccggagatcttgcattcacgtgccctgtctcaccgtcaccgaacgatagaccgattagtgaagtagtcctcttgcaacaacggcaggtcggagcgcgagagaacacttacgtgcagcttaacacggacacacaaaaaaaaaaagaaaaagaaagaacatgcacgaaggaacgaaagcgcttagttgccgcctgactcctcgcaacccggtggcttatacgcgatgaagctgattaactgcacctgcctaacgttgtcaaagccaatgatgcgaacgaaggcatcagggtatgccttctttgcctcctcgagctccttaagcacttgggtggcatcggtgcatccaaacatgggcagttttcacatggtccagtacctacccgcatagtatccgggtga

SEQ ID NO: 19395 - DNA, 474 bp, Oryza sativa
  Clone ID: uC-osflcyp051d11a1
ggaaaaatcatcaagacgatttcagcatgcatagacttgaagtcacgacacatacgcaacagctcagctgtgctaagctcagcacgacaaaaaaaaaaaacaaaacaaaaaacaacaacaccaccgcggaactaaaaatagttccagcctgacgcaaaattatggatcaatataataaaggaaaagaataaaaaggacagtcagcatcatcgccgtttgagtaactattatttgcttaaaattaaaatatctaagaaaaataagtctagacaatttattattgggaattccagcggttagggccaaggaccagtagagttacacgtctgcaactttagaagtcgggggcaagccatgcgataggcttgcttactttgagaaaaacttctggctaacagattcatagctcgggacatgaataacgtcaccccatgatgccagtgtaaggggtgatgaaatgatcttcttggcaga

SEQ ID NO: 19396 - DNA, 470 bp, Oryza sativa
  Clone ID: uC-osflcyp051d12a1
aaccaacccccaattatatgagcctgattgggcaaagtttggacacactagtttccacagcatactacattctggaaaatagccgtgaattacaaattatgcaaaggcccatcctttgaaggcttacacgcctaaggcatgccagtcaaaacacacataaacatttctatagacaaacatttgacagttacattacagaagaaatctatctgaagaaacatacaaacatgcatggccctcgaaattttaaaaagacaatatttttcaccgacactctgactatcgcatctttgagagatgacaggagcattacacacaagacccttaatcgtccttgccctaatgtgattggttgatcaggcaagatgcaaaggagccttgctcttttagagtaactgcatcagcttcaatcagcagacttgacacctgaaagatacacccgagattgtatgacactaggcccaatcaag

SEQ ID NO: 19397 - DNA, 343 bp, Oryza sativa
  Clone ID: uC-osflcyp051e02a1
gttatatattcataatatatccattcacctgacaggtgtgcacaagacctgcacatgtaatacataacatatgcggtacaatacttcatatatagtactgcacatattattcagagggcacaacaatgtataaaagttgcgcgatttttcacccaaagcaacaagctaagcatatgctacatgctcttaggacaggttgatcaagaagatcatggcagcttagctagcaaattaaaggctcttaattaggccagcacagtttcagtgggcattacgatgttggcagccgatgtggcgttgagcatccaggtgctgaacggatggaagagcacctcggaagggc

SEQ ID NO: 19398 - DNA, 143 bp, Oryza sativa
  Clone ID: uC-osflcyp051e03a1
tttttccttcttttttgtattccaacccttttttttttttttttggggggcgattccagcacaggatacatagtatagtatctaccgcccggggacaggaaaagggtgggcttttttacataataggaaaaatatattccctg

SEQ ID NO: 19399 - DNA, 395 bp, Oryza sativa
  Clone ID: uC-osflcyp051e04a1
gattaaagacctttgttcatgttgggatactacatcactacatgccagtttttattggtagtactaactgatcgaacgagcatgcaataggataacaagtccatgggatcgatcgatcactcagttagctagctggcgaagatgcgctggttgtagcagtggaggttgctggcgtagcctgctccgagcatgtcgaagtagcgcttgtagtagccgatgcggccgacgttggcgtcggtctggccgacgccgtactagatgccgtcgctgatgatgttggtgatgacgccatacccggggacgcggtgagggttgggaacacgtcctaggtgttcacccatcaccgtttcgatccctaaatgcccgcgccagggggttcgtcgtgttcagccttt

SEQ ID NO: 19400 - DNA, 468 bp, Oryza sativa
  Clone ID: uC-osflcyp051e05a1
gtgagcatacagttttgcaattcagctcagaatggcatatgtaccaagcttgggggggagtatcaagcaatgcacagcaaaatgggaagatatgaacaatcatggccaacgaggggctaacaacagtttagcacagtacaaaaagtaaacacacataacaggaatatgcaatgcaatggaaccggagtatactgacaaaccaatcattaaccagagaactacttattaaccagctactaatagtcttctccatcgtcgttctcgtcgtctgcaccctcggcaccgacttcctcatagtccttctcaagggcagccaagtcctcacgggcttctgagaattcaccttcttccattccctcaccaacgtaccagtgcacaaacgcacgcttagcatacatcaagtcgaacttgtggtcgatgcgcgagaaaacctcagcaacagcagtgttgttgctgatcatgcacact

SEQ ID NO: 19401 - DNA, 422 bp, Oryza sativa
  unsure (1)..(422): unsure at all n locations
  Clone ID: uC-osflcyp051e06a1
atcccttacaagcgatatatatttcataatgaacataaatctgcttctacaatatactccatcagtaacatgagcaccaaccacaaggtttattagagacaatgccagccccatgctaggacaagcttatttcagctgttcttcctcttcatcttcttcatcatcgncctcctcttatcgccataatttatcgccattttcgcatacgtccataagattatacctatttctttccccagttctgaaatgtccaaacatctatgtgtttacaaccacgcggcgttcttgatcggcgtgacgacggccttgacctgcaggtagttcttcaggctgtcgatgcccttctccctcccgattccgctctgcttgtatccgccgaacggggatcgcgggtcgaagacgtcgaaacagttcacccacac

SEQ ID NO: 19402 - DNA, 353 bp, Oryza sativa
  Clone ID: uC-osflcyp051e07a1
aagcttggcaaggaaagtcaagtcaaattcctaggacagaaagggaaacttttgtttcggcaagatgggtgacacgagaaagacatcttgggggcatcaaaattttatgaaccaaggtttcaaaaccctgaatatctccccatatacattttaagggggtgggaaaaccttttttcctgcaccactttttgaccctgccggaatgacctttagcacattgaaccccacgggttttgacaggggcccgcactggccaatgatccccggatttcctttcttaacacggaagcacggggaaatgggggccggaattttggggggcctttttttgcacctttgggcctttttggcca

SEQ ID NO: 19403 - DNA, 416 bp, Oryza sativa
  Clone ID: uC-osflcyp051e10a1
aagccacaaaaagaaacaattcattccatgatattcattagaagttctggcttacatcaacttctgtagaatacaaccaccatctcatactaaataaagagagatgtgaaggcaggacagggaaaaaaacaaccacagacccatcatgataaccctaaacaaagagcaacagcaattcagaactgttaatctttcacctaaagttagttttgaccggagactatcaccaaccaaaagcacactggactgctaaaattagaataaaatcactcttaattgccagagaagaaacccttcttcctcgctgggctccgataaattagtattcgctattaggagaaagaaccgcaccaccacccatgatcccttaccatgtggatgggtgcaggatgagaaacacccctcctggttttttc

SEQ ID NO: 19404 - DNA, 223 bp, Oryza sativa
  Clone ID: uC-osflcyp051e11a1
ggagaataccagcccttgttgcttaacattcaaatatggccatttgtccatccccttttaaaaagtttaaaccttttctgggtcccaaaattttttaagaatgaactttgcctcgcaacttaactacgagccaatacaaaaactttttaccaaatggattcttatttgcgtgcgccccctattgcacaacattttatagaaaatcgtgtgcacgcctcttttt

SEQ ID NO: 19405 - DNA, 465 bp, Oryza sativa
  Clone ID: uC-osflcyp051e12a1
aggggccgccctccttttttttttttaacctttttttgccatatatattttataatgaacataaatgtggttttacaatacactccatcagtaacatgagccccaaccacaaggtttattatagacaatgccagtcccatgctagggacaagcttatctcagccggggcttcctcttcaggttattcatcatccggctgcttttatcgccataatttatcgccattttcgcatacgtacatgggagtatacctatttctttgcccagttgtgaaatgtccaaacatctatgagtttccaaccacgcggcgtggtggatcggcgtgactacggccttgacctgcaagtagttcttcaggctgtcgatgcccttttccctcccgattccgctctgtttggatccgccgaacgggatcgcggcgtcgaagacgttgaagcatttcacccacacggtcccgaccctgag

SEQ ID NO: 19406 - DNA, 132 bp, Oryza sativa
  Clone ID: uC-osflcyp051f01a1
cgcccccctttttttttcaactttttatattcccccccacaaaaaaaaaaacaccatgggggggctatataaaacaaaacaccacccaaccccagcgggaatgaacaaataaaagggccccagccccaaaaa

SEQ ID NO: 19407 - DNA, 321 bp, Oryza sativa
  Clone ID: uC-osflcyp051f02a1
gaaaaaactgctttaattgaagaattccgagaacaggtccagcctccgggattgcaggaatcccgactagaagttgggaactcccaggggcaagtttttaagggcctccaaaaaaaaataacagtaacatgggaacaggtttatattttcctgggggcgcgggaaagtggcaatgggggaggccctttttaggaaggctttggggcctttaaaaaagttttcgggacctgttagggggacgcttttttcttttcccggggtggcccgaacacccccgggtctttcttgggggggttcgagaggggcccctcggaatccacg

SEQ ID NO: 19408 - DNA, 383 bp, Oryza sativa
  Clone ID: uC-osflcyp051f03a1
caattgagccggaaagatcatttacaccatgtcattggagtggcagctatgcttgatcatttacaccatgtcatcctatctaagacatttgaattacatttgtgaatataaattgcgaccaagagaagattccacgaattatgtacacatgcactgtgatcagcaagaccagaataagaactgacctgtaaatgtactgtaaagtgtaaacacctaactgctggatatcctttctgtagtatagacttctatctagttcagagcaagccatctactaaaacatatgcttctctgatgggggtctctgcacgtcagatcaggtgtaagatgtggatgcctgtactggagcaagagagcataagttcatggcaaattagagcccc

SEQ ID NO: 19409 - DNA, 414 bp, Oryza sativa
  unsure (1)..(414): unsure at all n locations
  Clone ID: uC-osflcyp051f04a1
ttnncaattaatgggcatatcaaattataatctgtcttgggtatgtacagttcttataaaatgccactttcttttgggaggttggtttacacactgatctggagtagcagtttcctggaagaacagatagctgatgcacactacgttcatgacaaaacagatcagatttcagaactccagaaaactggcaggcacacgcctcattggactaccccctctgcctgtctctctttttatctctctgcacaattatgctctgtattcgtctccacaatcggctattttatccataagatttcttcccttattcgatgcttcagtgatgctggtcatgtcctctttatttaattcaagcgagaagatggccgcggtgtcttttatgtgttcagagagttccagtcttacacccaccat

SEQ ID NO: 19410 - DNA, 435 bp, Oryza sativa
  Clone ID: uC-osflcyp051f06a1
acgatacatcattaattcgatcatcccttggatgcggcctgcggcttacattaaatctcgatccaaagaagcaaagatgatgacagacagaaattaattaagctagaaatctcctcgatcgatcacacacacacacacaattaaggtacatacatacatgcactgctgcaactgcaactgcagggtcggtgcgtggctactacaagtgtacacatggtacgttggttggcaccatctcgatcgtgtcgttgtgctcacttgccggggacgaagttggtggcgtatgcccaggcgttgttggcgacggggtcggcgacgtggtcgaagaggttctcgatggggcccttgccggtgaccatggcctggacgaagaagcccaacatggagaacatggcgaggcggccgttcttgagctccttcaccttgagctcggcg

SEQ ID NO: 19411 - DNA, 347 bp, Oryza sativa
  Clone ID: uC-osflcyp051f08a1
gggggggaacctttcaattctttttaatccggtatatcaaggctaggaacaaaaaacctggaggccccccaaaccacaagcatttttgtatatcccttttgggcacacaaaaatgacaaattggggagagcagtttgaaccccggggttcacaaaagggtggtgctttaaaacccccccatggggcctcgggggatagccccaaattttttgacttcccgccctgggccaaagattaaaaccccggctggggggccctttgcccccccaaaatggttttcaacattgcaagaagctttcacttccattattgggagatccctttttgccaaaaacaccccccatttt

SEQ ID NO: 19412 - DNA, 407 bp, Oryza sativa
  Clone ID: uC-osflcyp051f09a1
gggggaaagtttattaataaaactcaataaaccattatgacagaaaattggcacacttgatgtgccaatttggtggaactcttatgaaatactactgtaagaacccttgtgttaaaaaccgatttttaagcccccatcagcctacaaaaacaatgggatggtttaataagccataacacaccagatcccgccacaagggcaggggatcaaagtacgtgacatttcaagaaagttgattcaaaaggtcggctcagctactaaaagttgaaataataatccgaactcaagaaacccatgtatcataacgggtaatcaagcctgggaaccccggggaaccatctttggccacttggagggttgatttgagtaaaaatcacctcccaagtttcccctataaaactaaagct

SEQ ID NO: 19413 - DNA, 332 bp, Oryza sativa
  Clone ID: uC-osflcyp051f10a1
aaagaactctccttgaaaatttgggaattggacccgcaccgattcagatgcagatgaaacactggtgattcccactcagattacacacaatacaaatcccccggcaaactgcctaaaaaaccaccaaattgattcaaaagtaaaacgggtttgagggatcttcccaccgagactgactaaacctaaccacagacaatgggatccactggacccagattattcaaaaacagatggttatgacggcatcgtcctcgcaaccgaagggaacttgcagctatggatatcctaacttcccgctggcaagctgggtgcggatgaacttggcggccaaa

SEQ ID NO: 19414 - DNA, 403 bp, Oryza sativa
  Clone ID: uC-osflcyp051f11a1
agagggaaataattcccttttcaaagggagatttcatttactgacagcaccacatggtaagcaaaaagaaaaaaaaaagacccaaaatggaacacacactcgtcattacactcagggttggtttccttccaaccctagtactatctgcctactaagctgaactttgtttaaaaccataccctagtatcatcagagcagttttttcaagcctttgagtacttggagctccacataggtaccttcagagcctcgtcgtcgcctgcgttgcccccattttcagcagtgctcaaagagtccgagatcaaggggcccccttcgcttttttttaccccggattaggtggggggaggcttccatgggttttgggggagcccttttttgccaaaatttgaagtccatttcc

SEQ ID NO: 19415 - DNA, 149 bp, Oryza sativa
  Clone ID: uC-osflcyp051f12a1
ttcttctttgtgttttaacccccttttatctttttctttaccgggagggggcctggcgtgagaaatccatcgctgtactctttatcactggagaatttttttaacaagtttttcgtcccataacaggggatgatctttcgcctatatcc

SEQ ID NO: 19416 - DNA, 325 bp, Oryza sativa
  unsure (1)..(325): unsure at all n locations
  Clone ID: uC-osflcyp051g01a1
tcgcgatctttatctagaggctgnatantgccgccagggcacagaagagggtgatcctgttccaggtgagacagtagaggagagaccaatggaggagacgatccgtgtgactcgctccaagctaaggaggcgtactgcttttgaggatcctgcaggaaattaacagcaatccattctttttgttgcatgttgtgctgttcattttctttttaagttttagattgtcatgttgtttggtgcatgtgggaaatgtgttggtctaattgatcgttctgttgcccaagagtttgtcacattaataactttataagtattttttaaatgc

SEQ ID NO: 19417 - DNA, 463 bp, Oryza sativa
  Clone ID: uC-osflcyp051g02a1
tcatcctttgttcatgaattaatttttatcgcaccaccaatagaagtccttgggccgccgatgacaatcaaccgatcaccacatgctcggaaagcaaggccccacccattcattgacacagaccgttcaggcaacttaccaagagtgatccattgattgtttcgcttgtcatacttctttacatccttttcactataatcagcagcataaagctcattgttaacaacagcaataagtggaggagcaccagtcactccgttgagacccttagacatgttttcgatcaccctccaagatcgactcttcaggtcatattccttaccgcatgtcaacacctttttgttgctggcaacaccaccaaccacatagaacttggcatccatgaacaccccggagcacatttttcttgccccaatcatgctgggaagggggtgtccaagaatgtgtcttcgagtcgtacatt

SEQ ID NO: 19418 - DNA, 213 bp, Oryza sativa
  Clone ID: uC-osflcyp051g04a1
agaaacaaccccactttttaaaaaggaaaaaaaaagaggtttttttccccccggaatttgagggggaaactctagctccctttttccccccgggaaacaaacggcttccccccccccccccttaggtaaggggatacacccggggggccccccccccggtttcccccccaaaaaccccctcctttgggggggaaacaccgtttcccccccccc

SEQ ID NO: 19419 - DNA, 445 bp, Oryza sativa
  Clone ID: uC-osflcyp051g05a1
atgattccacattactatttttttaacacaaaacattattaagttgaacaacagtgaagtaaacaagcaacatgcttccttattcagctccaatgtcccagaagcaacaatagcagtttggatctgtatcaggcaatatttgtgcaagtttctgccttctgcatgttttatttgtggataaaagtaggactaaagaagtagaaatgacagtacccagaagcgaggtagatgatcgtccacaagaatagccatcaaggagagccaaaaccaccaccaccaggagtgagaatctgaagaatctcaccagcattaaccataacagtgttcttccctccaaggtaaactctacgaccatctttcttgacgagatagtttgcaccacgggccccatttttttctcccttcagtcccctgggagcatgcacccttttttccgaaagaatgc

SEQ ID NO: 19420 - DNA, 375 bp, Oryza sativa
  Clone ID: uC-osflcyp051g06a1
gggacgaaaaagcacattcatcatcatcatcatcatccatgtatgtaccaagaatcgagaacaaatttctcacaacctcatcaccatgcacccaataacagcacggagagaccgaaattacaaaatcaaaaatcaacaaggaaggaagctagagagagcacaccgtggtgaatcctcccgccatcgagcacaccagcccgatctggccgcccgccgcaaagcagaggccacccgctgcgcccctccatggtcacgccgccgggagaggccacccactgcaccgtccgtcacgccgccggggaggcctcccgccgagcccacaccgtggggaggccccccgaagctccctccccatgtgaggccgccggaggagtg

SEQ ID NO: 19421 - DNA, 440 bp, Oryza sativa
  unsure (1)..(440): unsure at all n locations
  Clone ID: uC-osflcyp051g07a1
aactgcattgngattctacttaaaaaaggtttcatcagtccatcaaaattcaccagcttctgagtgcattaaataaacattcacataaaggtttaaacaaatcaggggagcttgatttcgtatacagagatgagctccatcagtttgcattatttctgtgaaagaaatcaggaaactagtgcaggatcgtcattgacagtgtcctaagccgaagctgccagtagctccctttcggatcgctcacggattctcctttccagttctggcctgaagtgcctgataagtccctgcacaggccatgcaacagcattcccaagggcacaaatagtatgcccttcaatctgcttagtgaccttctgaagcatattaatctccttaagcttcgcgttacctactttgagggcgttcatgaacattcccaggcacccctgtttccttcc

SEQ ID NO: 19422 - DNA, 71 bp, Oryza sativa
  Clone ID: uC-osflcyp051g08a1
gaaaggggcgggttttttttgtgtcaccaatgggtatcgagtttagcacagcgggccccccccaaactgaa

SEQ ID NO: 19423 - DNA, 130 bp, Oryza sativa
  Clone ID: uC-osflcyp051g09a1
ttcatctttaataaattaccacccccttcataattctacctttgggttttttttttttatatatatttttcctttaggaaaaacgaaacctacgccgcccaaatccgggcctttggcaccaaaaccgaaa

SEQ ID NO: 19424 - DNA, 251 bp, Oryza sativa
  Clone ID: uC-osflcyp051g10a1
atggtgtgttttttttttttattttaagggaagggctttaacaatttataaccaggggcagatccatttttacaatggttaacgaataagggggtcttttgaatattgaaaaatttttttcccaaatgggcatttccttgtccccaaaagcaaaataattttttgaaaattccaggaatttaggaaatgttacacctggggtgaaaaacaaaaaacctcttgctaaattattaagggccccctccactttt

SEQ ID NO: 19425 - DNA, 425 bp, Oryza sativa
  Clone ID: uC-osflcyp051h02a1
actctatgtttatctgaatctaaattaggaatacatgaaaaacttcacatccaggacagagttgcagggatgatacaattacaaatgcacataaagtactacgtttggatccagatccaaattcaagataaatacaggatatgactggtaatctagcattgaaccatgaccaacatatatgtcctcaatacaacaggcaattcaaaattgaacaataattaacagacttcttttcaaataaaacgaaaggcagaaccattaaaagctatttgcaatctttcccttcagcaacagtaagataccagcatgggagcaacgttgaatgaggctaaatccttagcaaagcacaaccagaaatgctccctcgacaatgtgtcattggtgatcctggtagccaggttgggctttcacttgtaacatttaag

SEQ ID NO: 19426 - DNA, 406 bp, Oryza sativa
  Clone ID: uC-osflcyp051h03a1
cacttccggaaaaacaaaattatcaaaagcttcagtgcctccgtcctgaagttacaagaccataatttcaacatgaatacaacggaagatcatccccttatcatctaaccacagattcccaacagtttttgttccttccaaatgtcgaactagaaatcttatcttttaaatctaaatgaacctataagggaaagacaggcctttcccctcgaaaaaaaaaaatcagaatcaagctgcttcccgggaatgatcgagtcacttcctcttggactctggacagctttatatggcactcaaaaagaacagcatgtgaccggcccaaaaaaaacaccactaccagcaactccctgctttgctgcaccaggggttaaaacactttttaccgggaggagctaccaaaaatact

SEQ ID NO: 19427 - DNA, 87 bp, Oryza sativa
  Clone ID: uC-osflcyp051h08a1
tcaaaaacaattatccagaatggaaatcctttctcgccaatctgcattaaatgaattggccaaccctgcgggcgagaggcttttttt

SEQ ID NO: 19428 - DNA, 201 bp, Oryza sativa
  unsure (1)..(201): unsure at all n locations
  Clone ID: uC-osflcyp051h11a1
agccagcataaatggcttccaagntggaagttggaactccaaacagagtaaaggttgttacagcagcagcagtgagcacctaaccgagtaaatctgcctagctagcccctgctgccatttttgtcatagtccaaaactgatacaatccgtctctcgcttgttttatttacagcattcatattattactacaaaccacgccc

SEQ ID NO: 19429 - DNA, 448 bp, Oryza sativa
  Clone ID: uC-osflcyp051h12a1
ctcattttatgttttaaccactcctattaccacaactttttaaggagggaattgagtagcaatactttcaccccaaaatacagtttagcgacaatatcttagaaaagccgcttgctttgccgccatggctggcaagctgagcagagcagctaacacaaagaacacgagatcactataaaccaaacggcaacgaacgaagaaaatacagggttttttttgtctgaagatacacgaagcggttcgttttcttttatttttagtctcctctcctcctcgatgatgggtgtatggcaatggcaatggccatgggatcttggcttaattgatgggaagggggcttcgccttccacttcttgaggcaaactagcttgggggctatgagctttgccctggcttgatccaaggaacaccttttttgattttcctccagggggacctttagcttttt

SEQ ID NO: 19430 - DNA, 531 bp, Oryza sativa
  Clone ID: uC-osflcyp052a02a1
gtaaccaaaatctgtaacacctacacatctgttgattgcatgagaacataattacaggtttttcctccaagaactgcagccgactgtcatgttacatacaagatcgaagaatcaaatgaatgaacaaatgacccacacacaacaatgttggcagttagcttgatccctcgctgaagttttttcagctcttcatattctacaaaactgaatacaagtttgggttgatgcctttcatgtgtcttctctcttcatgtaatgtattgtctaccctacgcacgtacagtagtactgcatagtgcagaagctgttttggggcttctgcacctcaattctgcatccctcttatggtagcctcgatgcggaaggttgatgagagaattctaaatagcccatcagggttatctgcatgaacccaatgtccagcattttcaagcacgtgcatttcaactcctccacccttatctgcagccagttcctcaacagtttgaattttctggagaacatcaagagcccatctatgcaaactttttt

SEQ ID NO: 19431 - DNA, 386 bp, Oryza sativa
  Clone ID: uC-osflcyp052a04a1
atacccccgtgttataacccccggggagggataacaactcggggcgggtactgatctacagtgaacatataccaagcttaactcataaatttcgagcttagttccccaaatattaaacccaacccacaaaaattgtggggccgttatccaccccaaattcacattatttttcgagtcctatgtgaagagactcttgcatacatttactctctgcgatctcacctgcaagaactgcatggcatttgagaacaaatcatgtcacacccatttttttgaaggggaaactacatcagggaaatcatcctgttcaaacaaactgaacatatgctactacaggttgtgtcaagtcaacaggttattgacctcctataccaaaaagggctcaa

SEQ ID NO: 19432 - DNA, 417 bp, Oryza sativa
  Clone ID: uC-osflcyp052a05a1
aaaaaagggaaaaaaatttttttttcgtgaaattttccccccttttttgggaaaaatttttcaataaaagaaaaaaaaaccaaaaaacaaaatttggccccaaaaaaaaaattttttttctttaaaaaaaaaaaggggtttaaactttttttaggcccccggtcccaattgtggaaaaaaatggcttttttttttttcaaaaaaaaaaaaggtttctcaaatttcaaggggggggaaaaagttttaaaaataaaaaaattttttttaccccccattttcgagaaaaattcccccctttttttggggaaaaaaaaaattttttttgacaaaaaaaaaaccttctctttaaaaaaaaaaggtcctttaaaaaaaaaaaaattgtgccccccgggggtcccccccgtaaatcccgccccc

SEQ ID NO: 19433 - DNA, 460 bp, Oryza sativa
  Clone ID: uC-osflcyp052a06a1
gggtcaccaagtgaacttattccttgttaacaaatccgtgtagtactaccttacaattaacgattaatccatgatgcgtggaccatcttattacaactgggcctccaccaaatcccttttgaccaatcgtgtcggcccacacacacaaaacaaaagcaaaaaaaagcccattgagcaacgagcccatagaagtagtaacaataacaaagttcacatttcacaagcattttacttgtcgaaggccttgatctcctccttgaacgccggcaggtggtcgtcctcgacgcactgcgtcatgatccgggcgccggtcttgggcaccggcggcgcgccgatgatggcgacggccatgaacgggtagtacgcgaagggtatgacgtgcgacggcggcccccacccgtagttcgcctacaggaaccccagccgcgttccgtcggagacgaacagggaaacgtacgtg

SEQ ID NO: 19434 - DNA, 533 bp, Oryza sativa
  Clone ID: uC-osflcyp052a07a1
aactataacataataatgtgtccgatcttgctcaattacaacatcatcaacatcaaacacagagaacgaggggtcggagccatacattatcatcttgggaagtgtttggtctgttactggggctagaaaggaactcttcaaactaaagtgcaaattacaaatattccaaaatttggactaagagaatcaagttctaaatactggacaggaagacagttagcttgacatcatgatttgatcgcatgcctgaagggcctggtttgcatagtatcttacatccacatcagggtcctcactgagttcaacgaggcatggtttcacgttcttctccacaacagattgatcaaggatcggtataagtgcctgcagaaccttcgcaacattgaatttgatgtttggcactctgtcctttgaggaattaatcacaacagggagcagctgttgacaagtgatttcggcacccatgacaggggccagcaatgaaatagcttgcaggatggtcatgcggtagagataatgcgggttgcttatct

SEQ ID NO: 19435 - DNA, 515 bp, Oryza sativa
  Clone ID: uC-osflcyp052a08a1
ttttctttgatatacccccgaaaaattgcttgaatttctaggggatcagattgcatcaaagatgacagtgatgatgtacaatgggctagtatgctagtatcagaaggccgcattttactagagaatcctaccatttcttattatcgatctcctttacagcatcctttgcaagtcgtgttacatatgaagcatcaatggctgtaaataatagcccgatgcccagtgtcagtggctggctgcttcctcccaaaccgatctctgactcatcttgaattatagcttgtccaaatgcaccagcactgacataggcccatgatcctggaagcattcctaaccaactttccaagacataaggcatgaacttcactgaagtcaagccatacaagaggatcccaagagagaaaggtaatatgggactaagccctaacagagtaacatccttaaaaccattttcacctattgctttcgcaaatgccagaaacttttttgtttccttcaaccaatttgagaattcc

SEQ ID NO: 19436 - DNA, 383 bp, Oryza sativa
  unsure (1)..(383): unsure at all n locations
  Clone ID: uC-osflcyp052a10a1
ctcttttttttatccaccccancaaatttattttttttggggggtttttttaattttttttctgggtttaaccaaaaaacgggcgatgggtgaatacaaatacgggggggaaaggaacactttggaaacaatatgcgcattacagaggctggtaaaggcgaagccccaaaaccgggggggcaggacgaacaaaaaaaaaggttacacaaaaaagccaaaatgcaaaccattcggaccgaccaaagaagaggggttttgaaccttccggggggggccatgcaaaaaaaaggccgaacaacaagatgggtgcccccaaaaataaaggaaaaggcctggataatgcacaaaagaagggtgaagaaaaccccaaaatgggacctttt

SEQ ID NO: 19437 - DNA, 470 bp, Oryza sativa
  Clone ID: uC-osflcyp052a12a1
aatctcaacatagatccacccacttccatttaacgatttcattttgcctcagcgcaccacatagttcctcaatcgtttctaatgcatactacacagagatattccctctgttctcaacaggggctccacgaactaaagtagttaaagttatcaatgatggacaggtcagatctcatcgtcttcggtggcttcatcatcaacagcagagctgttcccgttagcaggctccaattgcttgccattggaccctggggacttgccgttggacttattctttgttgttggttctttgcccttctcggcttgctgcagctcgaggcccttagccgacagcctccgcctactctttgagttcacggcttcagctggttcttcagcagtagaattatccacttccattggactagatgctggaggaatcgcttgcccattctggacaggatccaatgaggatgggggatcagaatgat

SEQ ID NO: 19438 - DNA, 528 bp, Oryza sativa
  Clone ID: uC-osflcyp052b01a1
acatccaacaggcaacagatatattcatacataaaaggagacccactgagtggcaactgacacgatgagcatcgcagcagtgttgtgcaacatcacaaagcatatagcatgaggatttactccaggtaggctgatcagcaaatagccatatccacttcagttgaaccaaacagttctgcgttcctctcaaacaagaacagaaaagaaacaacacatgctaagagagattatgctttgctgaatcatgatgatcaggtcaggtttctttcggggcgcccttcttcgcggcctcggcggcagccttctctgcttcaatctcagccacgtactcgtcgatctcagcctcctccagctcgcggaggccatccttgtgtgtcatcaccgcaatctcgatgttcttgccaccgctctcgacaacctcaaggagggctcggatggcaagcttgatggtctccttgccggaggtgtccttgtaattcttctcgaggaactcgcgcatggagttggagttgcggccggtggcgttgg

SEQ ID NO: 19439 - DNA, 479 bp, Oryza sativa
  Clone ID: uC-osflcyp052b02a1
aacacaacaatagcactgtatatctgcaaatgatcgatgaatcagagagcatacatatatatacacacgcacgcatgcttagactttacataatagccccacaaatgaactaaacaagacttcaaatggcactctaatataacgcacggttttatcttcacatgaacccatcgatttgatccatccgaaacgaataattattccaagccactcaggcagcggtggaagccgctgctgcacgagcctgcagcttcttgccgagctccaccgccacaccagcgtccggcaccacccccttggccgcctcggcctccacgaaccgtttcgcccacgccgccaggagcggggtcttgccggcgtccagcagcgccacgccgaacaacctgcggagcgcctcgaaccagtgcaggttgctcccgagcgcgaggtcgacgtacccgatggagtcgccgccgaagaacgccttcccgcccgggcac

SEQ ID NO: 19440 - DNA, 438 bp, Oryza sativa
  Clone ID: uC-osflcyp052b03a1
ggggggcattatcccaaacaggggatttttttttaaaaaggaacaaaaatttgtttttacaatatcctccatcagaaacaggggccccacccccagggtttattaaagacaaggcccgccccatgctaggacaagctaatttcagggggttttcctttaaatcttcttaaaaaaggccctccttttatggccataatttatggccattttggcatccccccataaaattatccctatttttttccccggttttgaaaggcccaaacatttatgggtttacacccccccggggtttttgatcggggggaccacggccttgacctggagggagtttttaagggtggggatgcccttttccctcccaaattccgttttgtttgtatcccccgaacgggatcgggggtttaaaaacgtttaagcatgtcccccccccgggcc

SEQ ID NO: 19441 - DNA, 400 bp, Oryza sativa
  Clone ID: uC-osflcyp052b04a1
aaaacaaacattgagcatgcatgccccttattcgcataaattattattagtgcaaaatgttacatgaaaagatcttcaatatactgttacacctttcaccggagaagattacgtgtttcctgcatttagttttcggtatagatcttactgccagagtatgctccattggactgaccaccatgatgattttgcaccactgctttgctttgcatttctcttagaaaactgccgctaatggtggcgcacgtttgagaattggtcgaccgagtcaccccgctcaaacacagctgctgcccccatgccagatccaatgcacatggtgacaacaccgaatctgcagtccctgccccggcgcttcatttcattcagaagagttgcgacgcaccgggcacctgttgca

SEQ ID NO: 19442 - DNA, 554 bp, Oryza sativa
  Clone ID: uC-osflcyp052b05a1
tatgacgttgtatgctggcgtccgtcggctgggaggctcctgagcggcggccctccttttttttttttttgttacacaacgataataatatattaatttattacattacataaaaacatctatcagagacacacaacgataatataataacttattacagtgcagaaaaaacatatatcagagacaacgataatataactagatagatataaaagcagtcgggaaaccaggcggcagtaacccatcatggtgcagtgacctatttatgccccgaaacgaaattttttcttcaccctccatgtgggcaactccttacatgatatcttccctttgttccagtatgcaggagagcaacaggttatgatatggcacatgatgctataaggacctggaatatctttttcttctgcaattactccatctgttgcttgtgataatgtgccattactgaggtggtattgactaagatagattttggtgtctggcatgacaatggtgtcaggaacaatggtagggaacgccttagagctgacacagagtgacctcctaccaat

SEQ ID NO: 19443 - DNA, 463 bp, Oryza sativa
  Clone ID: uC-osflcyp052b06a1
gcggtggcggcggcgggcttggtcaggttccgccacgtggcgccggcgttcgccacggccgactacgcggaggccgccgcgccgacgctggtgaccgcggcgggcggcggcggcggcggcgaggtccccgcggtggcagcgtccggggcgcagagggcgtcgtcctgggaggaggacgactgggagttcgcggactggagggacgaggcggcggcggagcccgaggagacggctgacgggaagccgaggctggagttcgcgccgacggcgcgggaggaggccgaggaggccaccaccgagctcaaggacgccatagacagggtatatttttctgaggctcccatagaaattgtgaaagaacaggataaagatcttagcaagctgggagccgatgcaaaattaccgctagccaggacatgtgatgcaagctttacccttgtgaaacaagcccagaagcacaggg

SEQ ID NO: 19444 - DNA, 513 bp, Oryza sativa
  Clone ID: uC-osflcyp052b08a1
tttttgttttttttaccattttccaatcctatacaagaaagtggatatttgatcagtgtacacgtaatatgtatcgttcccctagtccccgactgttttatcgggagattctcccaggaagacagtttgataagacattgtaaaaaattaccaaagaggtaaattccctaaaccctggctgtgtgctcaggaatgcacataactaccggacatactgactagaatgaacaagtcgatttgaggaaaaatagtactgatctataatgcagactaccgtcccatgctactggagcatagactcgatgcgtccgaccttggcgtacacctccacatatcttcttggcttaggaaggaatgagctgctccggttttagcttgccccatgcccgattcacatggaggtacttcctttatcgtgtgataattcagagagcagcgagcaaactctagcctcttcggcccaatcagattcagtaggaggggtataccatggccgacaaatgtgggagctgg

SEQ ID NO: 19445 - DNA, 406 bp, Oryza sativa
  Clone ID: uC-osflcyp052b09a1
gggaaaaaaaaattcccccaaattccattttgttaaaaccatggttctacaagggtcaaacccaagacccaccttagattccccccctcctgggtttccccgggctttccgggggaatatatccaaacccccctgcctgggggggggggggaaaatctaaaagggggggataagggggggcccatccacatccaaccttatttaaaggggggtaatcagggctttccccataatacgggccggggccaaacccaaacaggcgggcggacagaccacggtaattatgcccaaagataaaggggcttcccgcagggtgggcttgataagggattttttgggcttggggggtggggcccccccatgaattgaggcatgtgggtgggcccccccccaattttcccctaca

SEQ ID NO: 19446 - DNA, 500 bp, Oryza sativa
  Clone ID: uC-osflcyp052b10a1
caagggtaacctaaggatcacaattatcaaaactagggtagcacaccagcgttgttgagttatgacaacagccaaacatgttgtgaaatataatcctattcccaacaaaaataagaaataaatagaacagctgattgactgactactccagttactaacacaatcagactcaataaggaacaatagattatcttaaattttctctcaagctttttttgcggatagtgctaaaactagaaaagacaatctccaacccctcctcctaacttggcatcaggcttcttttccatcagatgatgcccctcgtcttcatgagattttatcacctctcggaactggctgtcaccctctgcattatcatagactctgctgcctgaatagcttctgatgttccagttatcgtcactttcctttcagatgtgccagcaatgaagtcacccctatcagatatcttgatcctggcaccactagcctgaatgatctctgtaatgttccttccg

SEQ ID NO: 19447 - DNA, 443 bp, Oryza sativa
  Clone ID: uC-osflcyp052b11a1
aaaaaaaaaccaaaggggctctcaaaattcaaatcgggaaaaaggggcccaaaaaaatgggggggcgctatagaaaaccaaaaccaaatcccatttttccccggggggaaaaaaaaaattttaccccggggggccaaaaaaccccccttttaacccgggccgggaaaaaaaaatcggcccggaacgagggggcccaaaaattggggggggcaagaaaacaaggcacaatttggggtgggaaagattaggggaaaagggaaaaaaaaaaaactcccgcgggttaaaaaaaaaagcaaaaagggggcgccaaaaaaggggccccccaaagggcttttttgggatattcttcaaaagaaaaggggttatcccccaccgggaagaaaaaaaaaagggccccagggggggggggaaataaaacaaaaaaacccccgggggccgggggg

SEQ ID NO: 19448 - DNA, 329 bp, Oryza sativa
  Clone ID: uC-osflcyp052b12a1
ggggaacaataataacggagatgacattttggtatgggtatccaaactacaccaccgcctaaaggacaagccactgatgaacacagcccagcatatcctacgcaccaatttcaccagacaaacagacacatagtcggggacgtacaacaattaggagtactacgttacacggggacactgccacgctctagctagggctggtcatccaccagctgcctgaaatttatcggcgcagcgaagcggaccgagccgttgtatatggccgcgggggcgatcttggacgtggcgtgcgtcgggtgcagcaggtcccacaagaggtagtcgtgccg

SEQ ID NO: 19449 - DNA, 539 bp, Oryza sativa
  Clone ID: uC-osflcyp052c04a1
accaggcaaaaaaaagggagctagtacaaagcctcaatacacactggagtaaaaccagcaacggcatctgcgctccacatctcgcgatgtgcagcggtctgagataaacagtttctatgtgatggaacttaaaagtctcttttattcaaaaacacgggagcgggcaatcgctcactatctgtccctctgggtattgcttagttttagttgaggcatgagtaagcgagcgtcttctcctccgacagctcctgggcagtcgcgtccatctccttccttgagaactcgtcgatcgggagaccctgaacaatcgtccattcgccaccactgcatgttactgggaacgagtagatcagaccagcaggcacaccatacgaaccatcagagtacacacccatggagacaaatgttccctcaggagtgccaagaacccagtcacgaatgtgaccgcatgcagagctggcagcagattagggcactggattgcttcctcgccttgatgatggccgcaccacgctgctggacggtagagatgaattccg

SEQ ID NO: 19450 - DNA, 514 bp, Oryza sativa
  Clone ID: uC-osflcyp052c05a1
acatcaatcgttttgcaacatatacttatacagaagaaattctccaagaaaatctgttcgagaaaaaagaaaccggaaagagttaaaagcacaaatgttagccctgccccccagcgcatgcagcacgcccaccctgatcaggtgtcctgcacgtctcagccatcacacatatttggtacacacacgaacgtacgcatgcatgaatgtcacctcggatcctctcgtgcaaatctcccatgcacacgtccatgcatcgatcccacccttcacgccatgtagggggctagggtctttagaccttgaagccgaggaagtgcggcgtgccggtgaacttgagccaggtcccgccgtcgacgaacggcccggcggtgaactgctcggcctccttctggccgatgacgcggaaccccttccagttgacgcgcttgctggtgccggcgccggggccgcggttgttgaactcggcgtaatagagcgtgttgagcgcgaattcgccgttccatggcatgtagcc

SEQ ID NO: 19451 - DNA, 435 bp, Oryza sativa
  Clone ID: uC-osflcyp052c06a1
tttttttttttttttttctttctttattttattttttaatttggtgggttttaaataatatttttttgggttttataagattttagtacttttttacatagtgtttattcctcacccaagacccccctaacagagaggaaaaaaaaagaccggggggaaaaaacccggaaaaaggggggggcaaaaaaccttgcaagacccaaaagagggggggggccccaaacaaacggggggaaaaaaggggggcaaagttaaaaaaagggaaaaaaagggagcccccccaaaaaaaaaaaaaaaaaacggggggggggaaaaaaaaaaaccggggggggcccccccccaaaaaaggggggggaaaaaaaaaagagttctgggcggaaaaggggggaaaaggtttttcccccagggaaaaacgggggggggcgagcctcccac

SEQ ID NO: 19452 - DNA, 407 bp, Oryza sativa
  Clone ID: uC-osflcyp052c07a1
aaaccaaaaaaaaggggggttcatttttttttttaaaaggaggggaagatttttttttttttccccattaccaaagcttaagcaataacagttaacaacccctcctcctcctttggggaaaaaattaaaacacaaaacccttttagggtcttttttttaggaaaggtgcgtgcatgggcataaaaggcaggggggggcaggtaaaaaaaaacaatggtgggggggggggaaacaaaaccccttttggggacaggaaaaaagcctccgaaggggggttttttgggagaagggttttcccccttggggggtctaaccacctcccaaggaaagattgggttgcctcttccaaagggaccgaaagccccctttttggggggagggcccgttgcccctttttttgggggcaa

SEQ ID NO: 19453 - DNA, 495 bp, Oryza sativa
  Clone ID: uC-osflcyp052c08a1
atagcattcttacaggcaaaggaggttctaggcttatgtcacgagatgagcacattcttacagcttagacataaagacatattctccactagtacaaaacaaagggaaacaaaaaggccttggcacgcagattacccccaacacgccacaggagaaaaagaactccactatcacagaaaaagaacagcatcacaatgatgagaagcggcatatcagggtcagttcagtccagctccatttccattcctatgtacatgcagggaagtgagtacagaaaattgtcatagattcggatggctcccacgaggaggaaaagcacaggtacattcagcaggaggaaagcacagcgtaagaaaaaaaaacttagcaaatgctccgactttcgaaagcaaaaacaccacccggtaaaaaaaaagaaaagaaggaatgccggtgggttaaaaccaacaggtccagtggcggtacccggaactgtaaacaggaagcaaggggggg

SEQ ID NO: 19454 - DNA, 339 bp, Oryza sativa
  Clone ID: uC-osflcyp052c09a1
caaggaaaattggattaatcccacccggattgggttcacaagaggacggccccccccagttcaccacggcaaataaccccgggcgaaaaactgaaatcgggggaaaatcccccggtttgggggaaaggcacaaccgttgtttagaatttttttggcccctaaaaaacagggtattaccgggtcttggaaaagagttttttgccagacgggggatttttactttggccctccaccaagaaccccttccccatcttaataacgggtggcagcataatcatcggaatcggggttaggcccacttggaaaaggaggagcggcaaaccgggccaaaggggcctt

SEQ ID NO: 19455 - DNA, 535 bp, Oryza sativa
  unsure (1)..(535): unsure at all n locations
  Clone ID: uC-osflcyp052c10a1
ataaatgntagatggcaccggattattttttttcccctggtgctcttacaaatggagagaatggaatgagttgcacgacatttattacataaataaccgttgatactcggtacgtgtccgatcgtctaccaatgtcggcgatgtagtagtagacctttattgatggttggtgtgtggctcatgatgcgattacctgcataacagccactttgaaggattcatccatcaacttaaacttgtcagctggggcggcatcgaggacagctttagctgctttcttgtaggcaagtgaagttgcagcaactttcttctcatctccttgggccatcccgagagcagttatggcgaagattctccgcttccacgtggcagcttcaacttcatccttttttgctggtggggcagcagccacaacggagtcggcggcctcgttgatggcctgagctgcctcatccaagcgcttatcgacaggggcgaggagggccttgttgaagctcttctcgacgggggcgtcgcattccacttgcactaacac

SEQ ID NO: 19456 - DNA, 375 bp, Oryza sativa
  Clone ID: uC-osflcyp052c12a1
agatgaactagtattagacgaagttctggacttctggtttactaggaacatagaaaacatcagatggaggatgagttacaaacatgggagttaaaattgaaatgacacgtgcaggaggtcttgttgatgaatggcacaatcgaacttatttcttctttccgccggctccctttgttttcttgttagcgactgctttggttggtttttctgaagtgtcctttcttttcagaggcactgatgtgctaacaactggcttgaagaaggattcgagccttccttgggaagatttgttcttggcaaatttaatcttctctatggcctttgtcactctatcttggttgaaaccattttctttcaccagaaactctacaagac

SEQ ID NO: 19457 - DNA, 349 bp, Oryza sativa
  Clone ID: uC-osflcyp052d01a1
gggggggaccaatttatcagattccctttaaaaacaaatttggggggtaaaacgccggggtttttgttttgaaatcacccaccccaaggaaaggtgggggacttttacaaaaaaaccggtcggggggggggggaagaaaatattccctttgggttaagggccggggccattgggatgggcccaacccaaaagggaaaaaaaaaataattggcattttatttttgggtatataaaaaacaaaccccaaaaaaaaggtggattcattttttttggggggaaatccaccagggggagggggggctttaggctaggggcccccaaatttctggaaacctgggggcttgttggg

SEQ ID NO: 19458 - DNA, 523 bp, Oryza sativa
  Clone ID: uC-osflcyp052d02a1
cgatcatcccatgactcgaaggcgcgacgatgaaatgatgaaacaaatatgattatgtgctgcgctacatgtcggcggccctggtgggcctcgccggccgggatccggggcgggtgcggcggcggacctcgcggatggggacgtcgtcgacgaagaagacgatggcggcgcgcgtccagaggatggagtagcggtggaactccgtggtcgggtcgaaggggagcaggtagcgctcctccctcccccggctcacgctgccattgccgtacacgttcgtctgcacccgccatggcttcccgcggatgttgcccaggaactcgaagtccagcttgtcgtgccgtttctcgatcacgttgccgttcgatgtgtagaaggcgacgactacgccggcggtggagtcggaggggagcttgatggaggcgctgaagaagccgtgctggtacatggacgacgacatgaacccagagccggtggagcggtcgaggaggaggcttgcggtgcggtcgtcggcggagcggaggat

SEQ ID NO: 19459 - DNA, 436 bp, Oryza sativa
  Clone ID: uC-osflcyp052d03a1
actcatataaatgcttaactgaaccaaacatagtactgcatgggagtaatagaagtacacaaggaaggaaggaccaggcctaatacttgctgatccatccaacaacttatacgatccattatctaagaaaacagcttatacaatcaaacaaaaacttcttaagaccaatccaagaactagaagaaaatacagcaagcattacaaactagtatgtaagctacaggaggttcttacttaaaaaccttaacaaccttcttaacctgaaaggctaatacgacttacttaaccacgcgaaatcaagatcgagcaagaagtttggatggattagggcttactctaatatggcaactaaaccaaccaagacaggggccgagaggtagagatccacaagagatttttaagtatgaatgtctttatacttagaactaatccaatc

SEQ ID NO: 19460 - DNA, 530 bp, Oryza sativa
  Clone ID: uC-osflcyp052d04a1
aagtcacaaggttgtaagtaacattagatgaatgaagatgtacatttttcatgtttttggacagatatgcttagattctgccttttacggatacatccatgctattttgcaagccatgtaactgatttataattaatgcagcctctccggtggttccatgacgatcatcgcattactcgttatcatcatcagccaggtcgaactgcttgagcagcgcgccgcagatgggcagtgggatgtccttgaggtagccgagtgggttggctaagcgcaggttgtcacagatgccgacattcctggtgagcaaaacacgggcacgatccctttcggcctcgatttcagagcagtttgcaagggggctgtggacgaggacaacctcgcagatgtcctcctcatggctgtccttgagctcaatcttgtatgtcccggtctcatcagtcacaccgtcaatcgcacgctcgaccttgtcggtgccaaagtgcttgcactccagcctgaccttggcacccttgatatactcggtgacattg

SEQ ID NO: 19461 - DNA, 515 bp, Oryza sativa
  Clone ID: uC-osflcyp052d05a1
accagttggatttcgtgtttgatacaaaagttaagatggacggattcacaagagagcaccctttacttaagctttacattacaaggccaaccagcagctgcctgccggccgaccactgtgtgcgcacgcgcgcgcaataatcaaccaatcacacacagtacgcacgcacataaaaaccacccatagccttcacgtacgcccggacgcacgcaccggttcgggccaagctcaagggtagatggttctcgggatgatgatgtcgccgatgttgttgtgccacgggcccgagaggtggctggccaggttctccagtgggccggtgcccgggtacgccgactgttggacgcaaaaacccacaaaagccagcatggccaatcgcccgttcttgatctccttgagcttgtactcctcgaacttgacggggtccttggagaagccgagggggtcgaaggcgccgccggggtacttattcttctcggggcccttctccatggcgcgctggtgctcggcgaagg

SEQ ID NO: 19462 - DNA, 501 bp, Oryza sativa
  Clone ID: uC-osflcyp052d06a1
gaattctgaggtagattatattaagaagcctggcacgcatgaggagatggagcaggagtacatgatgagatcaccatgatgatagatgatccatccaagctagctagggatccatccaacattgatcgacacacgcacacactgacaacgacgacgacggttttatttaggcgtcagagcaaaaggcaaggcctgcctacatataagctgggtactaatgcaagcaaattaaggcctcgatcaaagctctgatcgacagtagcagcatccatacgataaatcctcatgcagccgggcgacgacgacgatagattcagttgcaggagcagcaggagcagccgctgcagctggtgccacacttgcaggtgttgcagccgcagccgccgttctcgccgctctccaccgccatctccattcctccagagctcgccttgttggatggagcaccgaggacgaaggtcttggtggtggctgtggcctccacatcagggaacatcttgc

SEQ ID NO: 19463 - DNA, 415 bp, Oryza sativa
  Clone ID: uC-osflcyp052d08a1
atctaacaactcaagattgaatcatacgtaagtgcttgctgatacaatatcaacatggagggtacattgccggttccatatgaacaaacataaaaacaccgaaaccccatatggccattatgccgatcctagcctagcttggcgaggacatcgccaagagcagatttggtcaacgtgtagtacttctccgcctcttcggggctcttgatcttggctgcatggtcaagcccgccaatggtggcgaagagcttgccggtgaggtccttgaggcccttcttctcggccttgggcttggagttgatgacggttttgaggtcgtagcgcaggtaggaggccctgaggcggaggtcgtccctgacgaacggccactgcttcttctcgatgagcggcttgaggttgatgatgacctgggccg

SEQ ID NO: 19464 - DNA, 527 bp, Oryza sativa
  unsure (1)..(527): unsure at all n locations
  Clone ID: uC-osflcyp052d09a1
caaggacggcttaaacatttatcatttgaaaggccaactagtaccaagtttaaacacttaacaactggaatagccattcacttgaccgattgcagttagctaaggtaaaattcaaacaggggcacagatcaatgtatatataagaccctaaatctgcaagctcctgcaaaagacaaaaggatcaccagcaactctaaccatttctagttctatcattccaaggcttcaatcactaaaaatcttctttggtttgatacccatctctatttctttaagcttcagctccaattccaaccgctcattctccagtttcatcttttcattctccagtctcatcttctccaattccctgtccttctccttgctgaacctcagccacttgaaatgcttctgctcaattttcagcatctgagctttgatcttcaggcggcgtttttcaagtcgaatatcacgcataccaggggtagagggactctnttcagcagttggaccaccagatccctcagagagcaatttgttcatgtcaa

SEQ ID NO: 19465 - DNA, 95 bp, Oryza sativa
  Clone ID: uC-osflcyp052d10a1
agcacgaaagttcattcaggggcaaggctgttttgtataacacatggttctctttatgcgttggatacccaaaacagcttatgcctcacaactta

SEQ ID NO: 19466 - DNA, 528 bp, Oryza sativa
  Clone ID: uC-osflcyp052d11a1
gaataaaacccactgctgaattgcataccgttatcatctatattcttgttttctgatctccaacataggatcatccaggggaaatttagtacacaataatcgccagctaattattataaaaactacccctttccagctgagtgaatcttgttcttgtaccatcacgtacatgtcttgctgacttgtagaaccctatagctccaatagccaaccttcatttttccatttccgatgtcttcccgacgtcctactcaagagccggtgccacctcgggtgggttaccttcaaacacatcagagcctgatgattctgactcttccgggaactcctgtgtttggaccgattccttgtaggaaggagtttctctgaagtctgtcgctccttcgttatacgttgccacagcgaacccacatgcaaccaggccgaagaagacgccgaacgcccacatgtactgtacgaagaagccgagggcgtcccactggggccccttccagaagtcgggcttctccgggtccggcagcttgggca

SEQ ID NO: 19467 - DNA, 520 bp, Oryza sativa
  Clone ID: uC-osflcyp052d12a1
acatccacccctaaacacggtttactgaatttgcactatgcaaaacaacataaatccaagaaagcaggtagtaataatcttaaaacaagcatgatcagacgataaaattattccacacgactccgagcccaaagtactactcttttttggggtgaagatcaatataatcaccagggccatgaacgtcgaataaatcagcccaaaatccattcttcctcctcaggttgcaccccatgtcccggcatagcttatcattgtaccagatgtgaaggaatccaatgcaggatctgcgaaagtaagcacgagaatagcgcttcatgaacttttcccattcctggacatcattctgcatcacactgatgcttggcaacctgaagccaccatccatgaaatgtgcgagccacttggcccttaattttgatgtgtacaggtttgccaagctttttgaatagccgataaccgccagctgcgggatcttagggtgaatgatctccctgcagagaggtatagtgatagatgc

SEQ ID NO: 19468 - DNA, 531 bp, Oryza sativa
  Clone ID: uC-osflcyp052e01a1
atcagacaccatcttaattaattcccactttgcaacaatgaagctgcaatacagccagtaaacaaaaatgactgagctcaaaaacatatacatagatatagatatgtacaacgggcatgcaaatggctagacaaaatcgtcactctaggtttgtggtggttcgtactatctacaaaaacttcaagaaaaaaggaaacataacctacacgggtcctcattttctgtccaatgcacttcctcacattgctagtgactggttgcaaccaggattctcataggagtactgcatgttatttctaactcggcagtgcctccagccattattagcaccattacgctcctcagaatggtactttggtttcatggcctttgagctaatgggaccaactctatctctacccctgctattccttctgctcgactcattggttcgcctttttcagtgaccgtaagaccagccctggctgtcaggtacataacagtttctctttatggttgtcccatgaatctatagctgcagaaccccagccg

SEQ ID NO: 19469 - DNA, 445 bp, Oryza sativa
  Clone ID: uC-osflcyp052e02a1
agcgcggcaataaaacattgcattgaattctgaacgataaacaccaggaaccggcgtttatttgaggcaagccctgcccaaaatctcgcaaaagtactgaaaccttagacatagtacacatccatggcaaacatggatgccaaatgacacctaccgaaaattatcaaattcgaatgcagctgacggcttttcctgctgaagatgcatattttcccctccattacttggatgggctctctccatcgacagccaatgggacggcgctggccaggctgcggtatttcagagcatagaacatctcaatgtaacggggagtctcgcgccttttaagggtgcttacgtacttccagaatccatatacaccagtcaaggtcatcagcctttcagagtacaggttccagggggacttctcgtaaaacctttgcagaccttcctgtgaaaaatt

SEQ ID NO: 19470 - DNA, 508 bp, Oryza sativa
  Clone ID: uC-osflcyp052e04a1
gcctcaaacttctctacatctcggagggttcagacagtacatatactgtattttcatcatttacagcttaggcatatgcaaacagaaaacataactcccaaaagaatcacgctgtgtgaatttttatctgcatcctctccaagtccaggaaaaaaaaggcatgagggttaaagaccagaaagaaagaaaaaaaatcggttattcatctgttaagtctaggcctcctgcaaaacactagttaggcagatataccctggttatatgcagttctacttgtcgggagccacctctggaacggctgagcccttgtgctttggcgtcaattccactaaagatggagcactccgtggccgtgaacgaaatgattcactcaaggaccgcttccacctccttgtgccatttcgcttgctgcttgcgctaataggaagagcagaagaagagcgtgcagtgtcaggagagtctaagtcgatctttgatagggtacgcaaattaacttgacgctttctca

SEQ ID NO: 19471 - DNA, 528 bp, Oryza sativa
  Clone ID: uC-osflcyp052e05a1
cttgaaaatatctaatctagaagggactaccttcctgaacttgcaattgtaagtaggtgatcagattcagaggtagctacatgtttccatgcaaaagcacaagtgtgacattggacaagatgatgtaagatcagatcatgctcttagctttcaggtaattgacaaaaacatctggccggaaaattcatcaagtaacataaaacttggaaggtgaacttctgcccaacaagggaaaagcttttctaacagctgagcctacaggtgaaaatgttttaagaggtattcgcctgggccttgttgaggatgactccttcatacttgacctggaaccacttcatggcatcctccttggtcacccggtgctggatcccaacgcgagacttgcacctccgacgacgggcaacacggtagccagcacgctcaagcacaacatagaagtccattccatagatacctgttgaggggtcgcacttgatgccaagatcaatgtgctcctggatacccaaagccaagcatccggtgtcactg

SEQ ID NO: 19472 - DNA, 111 bp, Oryza sativa
  Clone ID: uC-osflcyp052e06a1
ataacactttttatatttatccttctttataatattggaaaaatggggcactttttaaaaagtatttttcctcattatcccaaggagtttatacattaaaacaaatgttcc

SEQ ID NO: 19473 - DNA, 63 bp, Oryza sativa
  Clone ID: uC-osflcyp052e07a1
tcgcgatctagttttttttttttttctcttttttttttttttttttattttggttcttttttt

SEQ ID NO: 19474 - DNA, 243 bp, Oryza sativa
  Clone ID: uC-osflcyp052e08a1
atcacagggtcagcaatcgaaccacgcgggatggaccccaggcgatctgaaaagatgtttaatatccccataccacatgggcacggaaaggactagaattaactggaaaatgaaaatgccgacatgacgcacaggctggctgacaagatatcattcttacttggacagatggactggcctgccgtggcaacaacgggggagaacaggcatccatgatcgggacctggactggcagacggcccc

SEQ ID NO: 19475 - DNA, 302 bp, Oryza sativa
  Clone ID: uC-osflcyp052e09a1
aaaaaaaaaaaccccggggggggggggggttattttttcccaagggaaaaagggggccctggggccaatataaggggggggggcccacctccagggggggggggggggaaaaaaagggccccccttttccccacccgggataaacaggggggggggggcctgggaaaccccccccccctttttttttaagaaaaaacaaagctccccgggttcccggggggggggggccggggaaccccggggggggaaaggggttctccggggcctgggcccggggggggaacagggtaaaaccccggggg

SEQ ID NO: 19476 - DNA, 533 bp, Oryza sativa
  unsure (1)..(533): unsure at all n locations
  Clone ID: uC-osflcyp052e10a1
agnaggcggcggccttattacatgatcaataaaccacctaattatatgtgaggccaaagcatctaattacatggaagctaaaacgctgtgggatagatatatttacaggcgatgtacactcctgaaaccaactaactcaccaaaagaaaaagaaaaggccactataaacataatcctagtaaatggatttgtactctactgcctaaacactcgatttgctctactcaaaaaaacaagcccaccttatctttcaagctgctcttctttttcgtcacaagttccccctgtctttgaacatcacagctcaggtctttcttctctggtgcatgctcctactgcctttgaacatcacagctcaggtgtttcttctctgttgcatgttccccctgcctttgaacatcacagctcaggtctttcttctctgatgcatgatttgcatcctggacaacctctggtttcttttcataccctgaacatttactcaacagaggaccgaaaaaattgtttacatattctgagcaacatcacatgtt

SEQ ID NO: 19477 - DNA, 394 bp, Oryza sativa
  Clone ID: uC-osflcyp052f01a1
cttaccttgggcaattcgcaacatggatcggataaacaagtaatcatcgactaatcatacaagcatatgacggaaatacctcccataagaagcttatatctctatacaccaaatgcccccctacctattgttccaaaagaattaaaatttattcagcaaccaacaattcatgcaaaaaaaaaaaaaagaattagaaaagtttcttagcatcaacacaggagcagcaatccagctgaggcagatgcagcaagagccaagaagtagccggcaatgccggcgccgcggtgcgacgacggcggcgacgacaagctcttcttctcgaccgccttcgccttggggctcgacgacttcccggggagcgggctggcggcttccgaggccggcttggcgtccg

SEQ ID NO: 19478 - DNA, 370 bp, Oryza sativa
  Clone ID: uC-osflcyp052f02a1
aaaaaaacaacaaagaaaacccacaaccaaatccaaacaggggggcaaacaccaaaccccacccaggggaaacaggggaaaaaagctacacggagaacatagggaaaaagaaaaaaacaccccaccagggggcaaaaaccaaaatacccccggggggggggggtccaaaacaaccctaggacagagtagtatatggaaacaaaaaaggattcccaaaaaaggacctaacaaaacatatcccaaaacacgaggggcacaaaaagaaacccattatccaaaaatccaaaaaaaaaaccaccaagggaccccacaaggggaaaaaattaaatgaagcccccctcggctacccaaaaagggaaaaaaccccccc

SEQ ID NO: 19479 - DNA, 481 bp, Oryza sativa
  Clone ID: uC-osflcyp052f03a1
gttgttaataacttcatttacggtcgttgtttcaccttcatgttcttcaattgcaggaggagcaaggaatgtgaatggaggctggtaaatgccaggacaaaagctagcatacaaaccttgcccagtttcattctacaaggaagaattataatgtttacagctgccacacaaaagctgactatccttacaaacatacaggcgcgtggcaaagtttcaacacaaattgtagatcctcggaaaacttcgttcagctctttgcaccgggtatgatcgcccggacaaagtcttcacatgtagtgtggccaccggagaacacatctggcaacgcacccatgacatcgaaggcctcctgcaagtcctcagatgaggtcatgtcttcgagccatgagagcacgtctttggagaatcctagcatctccttcatgttccccagcttttctttcatcataatctccaagcttcgaggttaccaccacttgat

SEQ ID NO: 19480 - DNA, 372 bp, Oryza sativa
  Clone ID: uC-osflcyp052f05a1
ggggaagccaaggccaaatcgcccgcgtaccaaaaaaggggggggggggaaaaaatataaccgcacccctttgacctggggcccaaaaacccgaaaggggggacctcccccaaaaacagggggcccccggtttaaaaaaaaagggccaggccccccggaatccgaaacccaaaaaaaaaccccccgggggggggcccaacccccaaattataggctgggccccccccccaaagggggggggccccccaaaaccacaaaaaatgccaaacataaagcccacattccccaagggaaaaggtggccaaaaacaaaaaaccccagggcgcttccccaaaaacacgggggttttggcccccgccaaagcagagggcc

SEQ ID NO: 19481 - DNA, 517 bp, Oryza sativa
  Clone ID: uC-osflcyp052f06a1
gacatgtaacacaccccagcaatcatttaaaacagaagtacagagttggcttgttttaacaacatgaaatggtgttagttcagaaaataaaaatagttagctgaaaacagaaaaaaaaaatctatgtttgagattacacaaaatgtgagtgagaacagacacgaatggccacggcacagacgaccttctcaataattaagatacaaagctaatggtcaaaagccaatctaacttgttaaattggtgttacaagtttgcctgtacctgactaatcgactagagtagtagtacacactacacagctgctaactgcatgatcggatcaaaacggagaaaggtttgcagcaacaagtacaatattaacagtcacagttgttgaagcttcatgagataacttcagttgtttctgcaagattatgcatccatggggtctccctgccctcttggtgaatgtacagatgaagcatgcatcactctttggtttttagcagcagcctgggggttatcattatgtgac

SEQ ID NO: 19482 - DNA, 276 bp, Oryza sativa
  Clone ID: uC-osflcyp052f08a1
attctcctgttttttttgacctactagacagggtgtgtatcagggggatgtttttaaatagcaggtggagcaaggaatgtgaatggaggctggtttatgccaggacaaatatattgttacaatttacatgaaatacatatcatcgttaatggttcagattgtacaacccttgctttcaaaaatcttacctgaattttagggtacatgcgcgtggcaaagttttaacacaaattgtaatatcctctgaaaaactgtggtcaactgtttgcacccgtg

SEQ ID NO: 19483 - DNA, 526 bp, Oryza sativa
  Clone ID: uC-osflcyp052f09a1
aatgggggggaacaaacgtagtaacacctactactcatatagcagagcgaaaagagggtagcatacaggctatacatgaatagcgtccaaaaatacacgggactccgacccataaacccagtcactatccgacaccaatcaagcgcgacatcagggacactcgaacacccaagaatcggggcaggactcatgactaacagaacaaaaaaaaacatatggtcttttttttcgccaggaataggcggtattatggggggcaaggtgaatgtggaggactgggaagccaacaccctcacttgcacttgaagccatggcacacggacaggatgatgatgaggatgagcgcgatgatgatgcccaggacgatcagcttgatcttcatgttttgaaaccacatctttcgccgcacctttgtaccctgctgtctgaaatcttgtgcctgagatctcaggttttcagtcttgtcgacaagcagttcaatcttctcaccacggtcaagaaccttctcaatgttttccatcataac

SEQ ID NO: 19484 - DNA, 517 bp, Oryza sativa
  Clone ID: uC-osflcyp052f10a1
aacagcatcatcatgcggcattcacttatcaataaacaggtcacagaactcagggacacccaaattatgaaactacagttaagctatcatcaacatcatccacgctgggaacgttttcctgtaccaggcaaaaagctaaaacacgctgacactcatccagtccacactggctacaactgaacgagccaacagcatcaatgaagttcgttcttttgcctagactgatggaaacgttcccaaattcgggcaaatgataagttaacgcgatcttggacctagcctagctcttcatctgcactgtacaccctccacgttttgactttgcaccagcaatgaagagctgacgccataaacagtgcatctcctcaccacggatggctcgtgtcacagcaattacctcttccgcttttttggctcaaccttagaatcagaatttgatgatgctggatatgaatttgaaggtctcttcgtgccattttctttgacacaatccgggcacaggaaatgatctaatttt

SEQ ID NO: 19485 - DNA, 537 bp, Oryza sativa
  Clone ID: uC-osflcyp052f11a1
cagatcacattgctcctgcaaccaccgaaatcgggttctttcaatcggcgaaaatgagtgttgcttcaagggtgcaaccctcatgcgattgcaacgaacgagaggagcacggtgcagaaggtggctagcccggctcttaggtgcaatcccgctgccgcggtgtccatgctgcttgtgcctgttggccctagcccgcccagcccggtgccggtagtagtccctgttcccatgccggtgccggtggttgtgcccataccagttccaggtgtgaaggttcctggggtcattgttccagttgtgcctcccatggtcggagtggttgatgttccagcaccacttgcactagcagggaaggagcagccagaaacacttgggtcgctggtggtgagggtggcggtgccggtgaagtcccaggtggcgcccatggccctgttcctctggaagtagctgttggcggcccaggagcagtgcgccaccacggtgttggggttgaagcactgcccctgctcgtggatggagttgcagtccgcgcccgcg

SEQ ID NO: 19486 - DNA, 528 bp, Oryza sativa
  Clone ID: uC-osflcyp052f12a1
gatccaaacatggtgttgaactttgcttataacgtttaatataatcatttgcgttccttcaaatcacgcttgcgccacgcaacatcaaaattaagcgttttgtgggagcatgtccacccacatctgaccgtggggaattattgctcaaaccctacgagcaaatctaaagcaccatcttcacaaaatttacggaaacgaagtggttctattcccatctagtagggctccactggtgcacggaatttggctccggcatagacggcagcagcaccaagctcctcctcgatcctaagaagctggttgtacttggcaaggcgctcagatctgcaaggagctccagtcttgatctggcccgtggataaaccaactgccagatcagcaatgaatgtatcctcagtttcaccactcctgtgactggtcatcacaccccagccagcacgttttgacatcttgacagcctcaatgctctcagtaacagatccaatttggttaaccttaaggagaagagcattgcaggcccttgcctta

SEQ ID NO: 19487 - DNA, 437 bp, Oryza sativa
  Clone ID: uC-osflcyp052g01a1
aaaataataataatgtttcactaatttattttcaactgtacgtctgtgcgaaagaaaaaaaaaagcttttctgtggacaaaaatacagtaactagctagttttctatatccacactaaacacatcgaacatactccatccgtcccaaaaaaaaaaaaaactcaacatagaaggggatgtgacccctcctagaacaacgaatctggattatccttaggttgagtttttttttttgggacactgcttactactgagacaagtcctacactcctactagagaggcaaaacctttgctttggttatttaggaaaccatagttattatacttctgaccatgcagcacaggggactgaagatcttataagttggcacggaaatatttccgggactcctgctgttttatgcttgccgccacatgggcgatgacgccggcaccgg

SEQ ID NO: 19488 - DNA, 458 bp, Oryza sativa
  Clone ID: uC-osflcyp052g02a1
ttattttcctttttttcttcttcctcccgtcgtcttcctcctgtcttccagccgagcaaacgagaggagggggaggaggggcaccagggctctggtggttgggaggcggcgacatcggtggcggaattgtgtcccgaacgacgcgcatctggggagggtggtgtccggcagggggaatgagagaggagaccggaacggcgatggccaaaagcttgccccggccggtttgggaagtaacggtggtggctaatcttggaaggggaaaggaaggggaaggttagggaatgggtttgccccatcgaggcgaaaccgatggcgcgagggcttggtcggaaatagtccgaccagggagatcggccggtggccggcattggggactagagagaaggatggagctcgaggctcggatctgggggaaaagaaggggctttgccggcatttataggctgtcaaaggag

SEQ ID NO: 19489 - DNA, 529 bp, Oryza sativa
  Clone ID: uC-osflcyp052g04a1
caacgttccaacaggattgatttatcaattatgatggatcgaatagactgcatttacacaagttcgagccctctggtaagtcgatcaactctaggcaactagctaactaccgatccatggcccgttacgaactaagctaaatctaccattagttaacttgagatcgctaactaactacagtcaccaagaagcatgaaccgtgggaacaatagtggaaataatagaaatgctaaccctactgctaactagctttcttactgcctcctacttctacagagcgtgcacagcatcagcaattcggcatagcctcttagcatgccaagatcaataccacctgaacagcccggtatcagcttcctgtgctgtttcttcggatgaatttgaggaactctcgatgagctcgtcctccgaggcgtcatcttgctgctctactcgtagccggtgagcattatcagcaacccatctagcaaactctggggttgccgtgcactccataagtgcctttctggtggatttctgggtgaagtca

SEQ ID NO: 19490 - DNA, 500 bp, Oryza sativa
  Clone ID: uC-osflcyp052g06a1
cctcatcctttttattcattcctcccagagagacggatccatggaagttttcttgccctcatcaggcaagcagagcacacacacacggtggcaggggaattgctatgaacaagacgctaatcaacatccagagctaaaacaaacaaggggatcaaagcaaatcccgaaaaaaaaaaacacaggggaaagtccacatttttttttcgtccccaacgcctccgggtcaccaccacgtcttggggatttttttttaccctgttctattcgctcaggcgtccacgatctcgccgtcgtcctttgacgccaggatcagctccgggtgcgccgccgccgacgacgtctttttgatcgtgccgtcgatggcgtttggccggccgagcgccttcagcgccaggtgcgccgccttttggccggagatcatcatggctccgaacgttgggcccattctcggggcgccgtcgatcttggggaccttcatgccggtgacgatcatgccgggg

SEQ ID NO: 19491 - DNA, 520 bp, Oryza sativa
  Clone ID: uC-osflcyp052g07a1
ggcaactggaaaggaggaatctcctcttctttttttactgtacatagttcttttatgtactctttcaactcttgaaatcaaatggacagtgctcagatgatttccatcttataggtttttacagacggccgatatcaaaacatccacacaagggtctttcttgaactattgtatacaaatatatgtggtgcccatcctatacagtagaattctatgcacatttcagcatttggtcctacctcagtcagacccgccgcagcacagagagcagcactcgaagcatgcgaggcacgagagcgcgccgcacagctgcaccatgacgatggcgcaccggtcgttcatcttgctgtaggtgttgatgaagcacatgcagcagcagcagtccgtgaggcggctgcagcagccgacggccttgtcgaacatctcgaacctctctggtggtttcgtgtccccgaacccagcggaaaggttctccctcgttgcagctgtgtcaccgaaccgagcgtaatccgttgagcga

SEQ ID NO: 19492 - DNA, 445 bp, Oryza sativa
  Clone ID: uC-osflcyp052g08a1
aatgttcttgggtggttattcttgatttctttttggtggtgaggaaaacaaaccatggtttttgttaaattcaccctaaaaaacagtttaaaaactctttgcgtcacaaccacaatgttaaacaggaggcaacaaaaattggggggggaaaacccagttcccaccggggccaagaaaaacccaaaattaaaggggacccaattttggttaaacaaatgggcgaaaacgggggtcctcccccaaaggttaccgacaaaaaattggtggaccaaaaaatcctcaccaaaaaagtgggggggccaagttcagggtcccccccccagagggacccgcaacccctgaaacgttttgttgggttcccgaagcaaagggagccatatcttgaacccccttgggctccctcaagaccccaaaacaattaaaggccctttgggggggggttttt

SEQ ID NO: 19493 - DNA, 538 bp, Oryza sativa
  unsure (1)..(538): unsure at all n locations
  Clone ID: uC-osflcyp052g09a1
aaccgaacagaaataaacgagagtattaaacgactgacatagtgcacattgcgagcagatattaacggtccatgaaacgagagccatgcccgtgggcaaaacttaacaaatactagaactagatatctcaactgcagacatgcaaaccaccatttgaacgaggctcacttcttcttggcggcagccttggtcaccttggcaccggttgggtccttcttctccacgttcttgatgacgccaacagccaccgtttgcctcatgtcacgcaccgcaaaacgaccaagaggagggtactcagagaaggtctccacaaccatgggcttggtaggaatcatcttgaccataccagcatcaccgttcttcaagaacttgggctccttctccagctccttgccagatcgtctgtcaatcttggtcaccagctcagcaaacttgacagcaatgtgggaggtgtggcagtccagcactggagcatagccgttaccgatctgcccagggtggttcatgatgatcacctgngaggtgaagctggcagcct

SEQ ID NO: 19494 - DNA, 506 bp, Oryza sativa
  Clone ID: uC-osflcyp052g10a1
agcaagtaaatgagtgcaaatgcaccacagttttttgagcttttgattgcatcaaccaaagagattttggcaggaaaaaaaggcattgccagaagttaaggcaagcagggggtgatctcatacaacctatacatgcatctgccacagctatagatgagatcacttctgcgaaaacggaagcaaagaaaggtttgagctttattctgactaaaggaacctagtgttgggtgaaactgactgtacatttgaatgtacattgaaccactgaaaatgtgatggtgagcctaagagagatcagtaactcttgagagatggctgccatggtcatggtcatcactggacctgtggcttgacaatcctcacgttgctatagaagcgcttgaagtccttcatagcctgctcttcaatctggatcgagcgaatcgaggacggagcgtcggcctctggcttgaaccagcggttgggaacattgtccttgatgccaccaacctcaagtgatgtgccct

SEQ ID NO: 19495 - DNA, 426 bp, Oryza sativa
  Clone ID: uC-osflcyp052g12a1
ggggccaaaaaaatccccaaaacccaaaaagccccaactttagaaaccaaacaaaaatggaaaaacaaaatgcctgcgcccccttcccggtcaaaaaacaaacccgggggggacaaaaaatgccccggaactgcaaaccggcgaaacgcaaggtacccaagttcccccatcaaggcccgaccccaaaagagccctcccccccccaagggaataggggcccaccgggcatttaaagaaccacaacccaacccccattataacccggcgcgagggactggaaaaccctttcccagggcctcttggttttcaaggggcccctgggggccttaccaaggaccctattattgggcccaggaatctgggggttaaactcaacccccccctttttaccaaatgagggaaaccgattctcaaactctaaaaaca

SEQ ID NO: 19496 - DNA, 390 bp, Oryza sativa
  Clone ID: uC-osflcyp052h01a1
ggaagggggaaccgggagacgggatccttaaaggccgaaaattaaattggggctacacatggaattttccttttgattttttgggtttaaagcatcaacaaacatgcagggcccagggtggaacaaaaaaaaacaatggtggaaacctgaaacatgtgcagttaacccccggttacaaaaacaatttgggcattccggccttacaggagggttcaaaattggggcccaaggctccaaattttggccccccaaggttcaaacctttggggatccaaccttaggggggggaaagggggggttttttccccgggttcaaaaaccaaaaaggggcattgggggggcttcaatttgggcgactgttaaacacccacgggggaaaaaaaatttttg

SEQ ID NO: 19497 - DNA, 490 bp, Oryza sativa
  unsure (1)..(490): unsure at all n locations
  Clone ID: uC-osflcyp052h08a1
aatctaacatacgcaaactgatattatcacaatgttagccgatgacaatggaaagagtaatctaggtacaagcggatcattgacggtggagacaagacattggctgcaccacaacacccaccagtggcgccaacaaggagcgctatccgttataggacgagagaaaaagtaaaacatcacgatgtgaagtgaaactgaataattctagtagacgatgatgatgatggataggctccttaggacgcccgccgcccttagcgtcttgctgctcccatcttgtccactggaaggctcactngtcatcgtcttcatcctcttcgctgccctcgtcgtcatcctcatcattgacctcggacttggacttgncagattnntnctcgtcgtcctccttttcctccttggcgggtgccttcttggcagtgctctcgcccttgttgtaggcagcaatggccttgttgtactcggccttgagcttgttggccttggctac

SEQ ID NO: 19498 - DNA, 432 bp, Oryza sativa
  unsure (1)..(432): unsure at all n locations
  Clone ID: uC-osflcyp052h09a1
cttcgccgaccacaatatatattaaataaaccgtaagtgataattccacaatggcagtcaccacttcccaaatcaaatcgtccccttgcgcgagcaaatgtcatcacgtaaggatacatgtccactgtttgcgatcagttgcgcaagaacgccaaggccaagccctgaacactgtatagaccgagatgaatctcacacgtttgtacagcccaatcatgattgtatttgaagtagtgagaatgtgggcctcccattgttcacttcctaagctgaacgaatccattctcggttaggtactccacanattcatctattaggtagggccaagcaccttcttcgtcgtagttggataactgtggatcgatcgtcttgacaaattccaacagttgagaccatgtgtccctagaaatggctttattatgccctacctgt

SEQ ID NO: 19499 - DNA, 150 bp, Oryza sativa
  Clone ID: uC-osflcyp052h10a1
tatctttttatattacacccaatttttttttttttctttttggggtttttttataacaaacaacccttatatctcactcttatcacaatatttaaaaaaactaactacaaccattcaacattttaaaaaaataaaaaaccaacctttatt

SEQ ID NO: 19500 - DNA, 258 bp, Oryza sativa
  Clone ID: uC-osflcyp052h11a1
tttttttattattatctttaatttttttttttttttttttgggggttttttttttattttttaaatttatttattaaaattaatttattttaagtattattttatttggtaaaaaaaaaaaaacaaaaacaaaattttcatttatgaaaaataaatataagggggaggagggagttatatgaaaaacaacatattataaataaccaataaaaaataaaaaggggaacaaaatattttttgggaggggagggaagtact

SEQ ID NO: 19501 - DNA, 503 bp, Oryza sativa
  Clone ID: uC-osflcyp052h12a1
tctttttgatgatatccccttttttttgacgaccagcatcgggggagctccataaaatgacagctgatccaaaaaagaaactctcgcgatctccatccaagactacaagctttagcattctttctttcagggaagatcaccaaaacattatttttgggaacctaaatatcaaaacctttgaataatgccctactttatgttcaaattaatatcctggccatgtgcgagagacctgaaagggctggtcaccccccatttatacccctatacaaagcccatctactagcgttttggtggtaccatggatgcaggcgattgcggctgtaccataaacttgagcggcaaccagcccttgaacaggccgggatcagccttccctgtgctggttcttatggcggcttttaaccaactgtcgctaagttggtcgctcttagccgcattcctgatgctctacttagagcccgggagttataatagcccactgttatcccccactacaggga

SEQ ID NO: 19502 - DNA, 445 bp, Oryza sativa
  unsure (1)..(445): unsure at all n locations
  Clone ID: uC-osflcyp053a02a1
tttgttttttttttttttttttttttttttaaaagaaatttggggttcacaaaaaaagaagaggctgggttacatacaaacaccaaaggtttcaagggacaaatcgatttaggtttacagaaacaacaaagggaatcagacgggcagggctccttgggaatgctgctagagcaaaaaatgggggttataactgggaaaaacaaggtccggaaaaactcatacagccggatttataattcttaaaaccttccntataaaggggaggaaatatattgtgcagaaatccatgagactcccatcctgggaccttgccattatgagtccacttgttttccaccatgggagcaccaagggccatttggcttgtgggggtctaaacaaggtccggaagcacctccaccttgggagggcccaaatgccccctaatcggagaaggtggtgccat

SEQ ID NO: 19503 - DNA, 282 bp, Oryza sativa
  Clone ID: uC-osflcyp053a04a1
aaaaaaactaaaaaaaccctttcaaagacaataatttgggatgttttaaacaaggaaaactggttttggtcgaacccccaaaaaaaaagggataagcttcctgccaccgtttttacacacccaaaaacctcaccggacccctaaaaacatgtaaacggggtccatacctaaaatttattaaaacgcaaaagcatccaaaagcccctaatttgtccataggtccccactggttataattaagatttggtttaagccaccaccaaaaccggactttttaccaaa

SEQ ID NO: 19504 - DNA, 422 bp, Oryza sativa
  Clone ID: uC-osflcyp053a05a1
tttgtttacttcggatataaccaaacgcctgtactcctgagctgaaatcacaggtatcagatttgtgtaaaataagggcacaactgaatactcgaactgaagcattataaaaggcgagcagctgcggtttgttatcagcaagcaaacatctggggcattctgctaaaatcaaatttgcatacaagccaaacacatcgccttagcagcagcagcagcagatactctagaggagaacgctcatagcataaaatcactctcgagtcattcaacagcaatggtccaagaaaactaatatcggatacacataaaacgctgaaaaatccatcaccgatgccaaatcgttacgggccaatctctggtctgcggccaagttatgtggagtcggcaggcttcgcctcgttggcctttttggtaggcacatc

SEQ ID NO: 19505 - DNA, 247 bp, Oryza sativa
  Clone ID: uC-osflcyp053a06a1
tttgtttttggaaaactggaaccagaaaacttcgactttgtaggctcggagaaaaatattcactattacaaaaatccatgcaggagtcaagttaaaagaagaaacagggttctgtctttgagatggagtataatttatttaagatcattccctccatcccatcatccatgagtttgcaaacttcagctaacattctaaaaatggggaagcacaagagagaagagggacagcaacttaaaaacgtatt

SEQ ID NO: 19506 - DNA, 285 bp, Oryza sativa
  unsure (1)..(285): unsure at all n locations
  Clone ID: uC-osflcyp053a08a1
agacaagatagttgtaactttctgaaatttactaaaacaaaatcattgtttctcgtctattctattgctcagttaatgttaacagcatatatacccttttggcatgtctaacttgaaccaaaatntcctcaatgtattcttcatactctaaattttgggactttcaaacacggggaaaaacccctgtaagtcttcatattggaaccaagagttttttcttcaagcccataagcgtttcaaccggcgctttaatggccatttctcggaaaaccattctgcatacta

SEQ ID NO: 19507 - DNA, 170 bp, Oryza sativa
  Clone ID: uC-osflcyp053a09a1
gccgccctttttttttgggttttttttcaggtaaagtctatgcagtgtgcatatgtgcattcacagtcacactcacttagtcaaataccaagatcgatcgatcgatgtacaagtggatgcattaattcatcatcttgggtgttcttatatttacaaatcaaccaccatgc

SEQ ID NO: 19508 - DNA, 408 bp, Oryza sativa
  Clone ID: uC-osflcyp053a10a1
tgtgtttttttttttttttttttttttttttttttttttaatcaaccatgttactacccattatccataaatccaatggcaatatactgcatatactaaagtctttaacattgagacctgaatatgaggaaactggactgacccgcaaagccacttatagttatagaccaaatagggaggcctgggattacccactaattttacatataaatggattcacgggtcggacaaattttattacctaaaaataggtaaacgggtgggcccatagcccacttgaatttttagacctgaccctgcatgggccagatgagaaaggattcatgagagcagggacctgatcctgtcaccctgggtcatgacatggctgggggggaattgggggaggctccggaagccgaaaagcgc

SEQ ID NO: 19509 - DNA, 170 bp, Oryza sativa
  unsure (1)..(170): unsure at all n locations
  Clone ID: uC-osflcyp053a12a1
tgcacgtttcgtaagtttggatccccttttcgcccgccttnnttttttgggtttggaaaactggaaccagaaaacttcgactttgtaggctcggagaaaaatattcactattacaaaaatccatgcaggagtaaaggttaaagaagaaacagggcttttgttttttgaga

SEQ ID NO: 19510 - DNA, 394 bp, Oryza sativa
  Clone ID: uC-osflcyp053b01a1
acgggcacaaccaaaatgcataattaacgataccattgttggatacattcttgtctagtacaaaattaatatgctaaagattaaaaacaaacttcgatgttcagaacttgaaacaaaactttcaactttgcagcgatatggcaagaggcttagttcgaagaggctcatgcccaggtcaccattcggactcctcctggggctcttccttcttctcttcctccttggcagccgatggagcagcagcaccactgtcggcggcaactggggcagcaacagcgaacttgctggggtccttcaaatactccttgatcttatcagcatgtgggtacgagtattcggtctccacagcaacagcaagcacatttttgtacccattgaggaacatgtgtggtgc

SEQ ID NO: 19511 - DNA, 141 bp, Oryza sativa
  Clone ID: uC-osflcyp053b04a1
caaattagttttttgctttcattgcaataacaaaaattcactgtttcaagaccgggcagaactgggcaaacaactccaatagaccggtacatcaacaagaggaggacactcgccagcacactcttgggaaaacagagcaaa

SEQ ID NO: 19512 - DNA, 133 bp, Oryza sativa
  Clone ID: uC-osflcyp053b05a1
ttgggtttttttacaattttttttttttctttttttttattaccaaaaatttactgatttaagaccgggggacactgggcaaacaaccccaggagaccagtacgtgaacaaaaataggggagtcgccagcaag

SEQ ID NO: 19513 - DNA, 163 bp, Oryza sativa
  Clone ID: uC-osflcyp053b09a1
ttggtttttttttttttttttttttttttttttttttttttttttttttaacaatatcacttttggactgaaacatgccccaaagggggggccttaattaccttacaaccattttttctactattggtcttatgagaagagaggggaagtccaagcccattac

SEQ ID NO: 19514 - DNA, 235 bp, Oryza sativa
  Clone ID: uC-osflcyp053b10a1
ttgttttttttttttttttttttttagcatccaaataatctgcccacagagattctgctctgctgggtttgcactagcttaccgatttgagtcgatacagtaagggaaaagagtcgcacaagcacttgaagggtacaaggcctgggttccgcaccagaggatataacccaatattttgaaaggaacattctaaatggacaagaaattagaaaccttactagagttattacaggac

SEQ ID NO: 19515 - DNA, 393 bp, Oryza sativa
  Clone ID: uC-osflcyp053b11a1
acgcgcgcagcatgcattttatttaggcacgggccacaattcatacatgtataggggatacgtctcgttggcagacactcacggtatagtagggtagttgggggtacagggatatagtcatatctgcgcgtcttttcatgccgttcgttgacttcgttcacagggtcagggtcgggtaggcgatatcgagggggacgccacacaggccggggccaccgacgtcggggagaatccggatgtagccgcgctcgccccatgactggccccatgagttcttgatgggccagtacttggcgccggaagacgcgttggtgccgtacccgacgacggtgacggcgtgcgctccgcgtgtgccgaacgggcccgcgtaaacgccacccttgtagaactgga

SEQ ID NO: 19516 - DNA, 423 bp, Oryza sativa
  Clone ID: uC-osflcyp053b12a1
ttgtttttttttttttttttgacgcaaaattatggatcaatataataaaggaaaagaataaaaaggacagtcagcatcatcgccgattgagtaactattatttgcttaaaattaaaatatctaagaaaaataagtctagacaatttattattgggaattccagcggttagggccaaggaccagtagagttacacgtttgcaactttagaagccgggggcaagccatgcgataggcttgcttactttgagaaaaacttctggctaacagattcatagctcgggacatgaataacgccaccccatgatgccagtgaaaggggtgatgaaatgatcttcttggcagtagaagaaatgtcattcaaggtgattgcttcaagatctttaccgaaatgctcaatgggtttccttcccccatacgtcaaa

SEQ ID NO: 19517 - DNA, 395 bp, Oryza sativa
  Clone ID: uC-osflcyp053c04a1
aatggaattataacattttgttttcttgctgattgttgaacagatatgtaaccaaatatgttcatatgatattttgccgggacatgacttgtttgcccactcacaaggagaaaatagaacaagaagcaaagtcaagtaggtaaaagacatgtactaattttgttattccttatgccgaagcaatattggatcaaaaatattctccacaatgtcgtggagcttgattgattatatggaatggtgatatgatctctctttgtgaactctgcatcctttcgcttaaaggtcctcggggccattgatatccttgttctcgatcactgctccatctgggatttccagtttgacaccaggttgggctgtgatggtcaccttgcccttcaatgtgatgctag

SEQ ID NO: 19518 - DNA, 118 bp, Oryza sativa
  Clone ID: uC-osflcyp053c05a1
tttggttttttgggattgtcgggctttgtttttttttttgcatttggcccgataaacaaccatgtgtgtccaaacttagagggggggggaccacaagacccggtcaaagtacggacac

SEQ ID NO: 19519 - DNA, 83 bp, Oryza sativa
  Clone ID: uC-osflcyp053c06a1
tttggtttttttagattgaagggaatattattttttttaaaatgttgtaagaaaaaaaaaaaagggaagtataaattaagagg

SEQ ID NO: 19520 - DNA, 136 bp, Oryza sativa
  Clone ID: uC-osflcyp053c08a1
ttgttttttttttgaatggtaactttattatttaattttacaaatggcaaaaaaaaaaccaacaagagtccaagccaacaggaaaatacacaagaacaccggaacaggatagggcgaacgacgcccataaacgaac

SEQ ID NO: 19521 - DNA, 84 bp, Oryza sativa
  Clone ID: uC-osflcyp053c09a1
tggtttttttttttaattgttacttttctctttttattttgcatctggcaagaaacaaaaccaggagacttcatgcggacaggc

SEQ ID NO: 19522 - DNA, 376 bp, Oryza sativa
  Clone ID: uC-osflcyp053c10a1
tggttttttttttttttttctttttttttttttttttttaggtcagacccaaccaaaatgattattaacgcatatggaaaccggaatacaaatctgatcggtccataggagcggaatacggggggaaagaaaaggaaacagaaacaattacaaggtcgaacacccaccaggattcaggtagaggggactacttaaaaccgcacgaggaatcaactgagaagggggtcggggaaccccctggggcctaatatacgtggccattaaatataaaggggatgctgccgcccctagaaggtacaagagggccaagaagggcttcttttttggtggtgttcctgaaactaagctagaatcgccagcgtccatggaaggggcc

SEQ ID NO: 19523 - DNA, 196 bp, Oryza sativa
  Clone ID: uC-osflcyp053c12a1
gcacaaaaatcaaccagttcaaaaggtataccaggtcaaataaacagcaagtaacaaaactccaccaaaaaggcaactgttttaactccgaattcaagtcctaaatagtacttttgcaactgatgattttgcttctaaacattgtgctggtcacttgaagcattttgcatccagcaagtccttgcccttgaacggc

SEQ ID NO: 19524 - DNA, 181 bp, Oryza sativa
  Clone ID: uC-osflcyp053d01a1
ttgggtttttttttttttttttttttttttttttttttttttttttttttttttttttttataattttttttaatttataaaaaaaaataaaattaaaaaaaaaaggtaatgtgaaaaaaaaaagctaaaggataatgaaaaagaaaaaagagaaatggaaaaagaaaaaaaagaggggag

SEQ ID NO: 19525 - DNA, 122 bp, Oryza sativa
  Clone ID: uC-osflcyp053d02a1
ttttgttttttttttcttttccgttttcacgcggcatcagggaccggcccttggcttttgttttccatttaatatgtaaaaagttgagccagtcccaaaattttttatggcaagaatgttaa

SEQ ID NO: 19526 - DNA, 409 bp, Oryza sativa
  Clone ID: uC-osflcyp053d03a1
gagaaacttcacaggttatataaagctaaccttcaatatattgttcattccatctgtgataagattcaacttctgggaactagcaactgtaggccgatgccacgattcaattagtgatagacacgcatgccaatcattaaaaatgaagagcccttgtgatgtaaatgacaatatggctaagaacaacaaaattaatgtctgcatccatttagactgttggtactaggcttagctcattcttcagaacatgaatgcaagcagcaagaaatagtaaagcagcgcagtcgtttattgtacaggtgggagtttctacatttcaagcagcataattatgccctctcgtccgtgactggaacacatgttaaagcccttattgccttccccgccagctctcttgttgtccttcgct

SEQ ID NO: 19527 - DNA, 61 bp, Oryza sativa
  Clone ID: uC-osflcyp053d04a1
ttgggtttttttagattgtcccccttacccctttcctttacatatctgacaataaacaccc

SEQ ID NO: 19528 - DNA, 63 bp, Oryza sativa
  Clone ID: uC-osflcyp053d05a1
aagaggggaaaatcacctatatataaaagaaagggcagaaaaaaaaacaaaaaagggacaagc

SEQ ID NO: 19529 - DNA, 306 bp, Oryza sativa
  Clone ID: uC-osflcyp053d06a1
gaggaagggcggctataaaacattgctttgcattttggacgataaacaccaggaaccggcgattattagaggcaagtactgaccaaaacctcgcaaaagtactgaaaccttagacatagtacacatccatggcaaacatggatgccaaatgacaactacagaaaaagatcaaattcgaatgcagctgacggatttatcctgcgagaagaagcatatatggccccaccattaccggggatgtgcctcagtccatcatacagaacaatgggaacggtgcttggcacaggctggaggtatttgcagagc

SEQ ID NO: 19530 - DNA, 69 bp, Oryza sativa
  Clone ID: uC-osflcyp053d08a1
ttgtttttttgaagaatggtaacgttcctatttaacttaacaaatggcaaaaagaaaacccacatgggg

SEQ ID NO: 19531 - DNA, 109 bp, Oryza sativa
  Clone ID: uC-osflcyp053d09a1
agaatggcaactttcatattaaactaaacaaatgacaaaaaaaaaaaccacaagggtaaaagcagacaggtagagacaaaagaacacgagaacatgagacagaggaacc

SEQ ID NO: 19532 - DNA, 109 bp, Oryza sativa
  Clone ID: uC-osflcyp053d10a1
ttgtttttttttttaattgtttttttttttttttatttaagaaagggccaaaaaaaaaactacaaaggtacaagccaacacgtagataaacaagggcaccagaacagga

SEQ ID NO: 19533 - DNA, 123 bp, Oryza sativa
  Clone ID: uC-osflcyp053d11a1
ttgtttttttttaggagtggaacaatccgattggaatatacaaaggccagataaaaaaacaaaataggtacatgcagacaggaagatacatatggacagcagaaaatggacagggaagaagca

SEQ ID NO: 19534 - DNA, 187 bp, Oryza sativa
  Clone ID: uC-osflcyp053d12a1
cacactttaagagaaaccagacgtcatgtgcacgtgcgcaagtttggggacccgtgagagcgcgccctctttttttttggggtttttttgatttttttttttttccacctttaaacagggtgtactgaatttgatcaatacaaagccaacatatatccaaaaaaagcaagttgaaacaaatgttaaa

SEQ ID NO: 19535 - DNA, 98 bp, Oryza sativa
  Clone ID: uC-osflcyp053e01a1
tttggtttttttttttttttcttttttttttttttttttttttggaaaccggagatggggttattaaaacttagggggggaaagaacatcgaccattt

SEQ ID NO: 19536 - DNA, 103 bp, Oryza sativa
  Clone ID: uC-osflcyp053e02a1
ttgtttttttttttttttttttttttttctttattggaatataggatatttagcctgaattcttacatgagtttcgcaaaaaaaataggcaattatcatccca

SEQ ID NO: 19537 - DNA, 57 bp, Oryza sativa
  Clone ID: uC-osflcyp053e04a1
tgggggttttttagaagctacacatataccaagaaaaacaatataagggaaacaaaa

SEQ ID NO: 19538 - DNA, 70 bp, Oryza sativa
  Clone ID: uC-osflcyp053e05a1
ttttttttttttttaatgaatatttttatttttttttttaaaaattttataatttaaaaaaatataattt

SEQ ID NO: 19539 - DNA, 152 bp, Oryza sativa
  Clone ID: uC-osflcyp053e08a1
gattgaagattcatttttctttgaattttaaccacttacaagaaaccaacccttttgattctatgcttacatttccttacccatttaatcctatagattatataatttcaagacaccacagatacaatatatacaatgagagaatatgatga

SEQ ID NO: 19540 - DNA, 428 bp, Oryza sativa
  unsure (1)..(428): unsure at all n locations
  Clone ID: uC-osflcyp053e09a1
gtataactgggaaccaaatgaatagactattaaacttactgttttttttacagcaataatagaagcaaacaaaacactatcactgtttatcagcaagtgatgtgaatcaccacagctacagaacaagtcactgccacctgtgtttccaatttaacctcttggcattgagatctgaattccttggggaaaacgatttccctgtgattgggagtgcctatgattatgcatgaccacttattcctgtgtctctatggattaccaatctttaaaatctcaaacttatagatggaaaacatggaaccctgctaatcctcgagggttagaacaaaagtaannngcttttctgtgctttgcaaccaaccacaaatccgaacaatatcggncacaaaacaatcccaaatcattcgngcaatatacttgtggagtaa

SEQ ID NO: 19541 - DNA, 277 bp, Oryza sativa
  unsure (1)..(277): unsure at all n locations
  Clone ID: uC-osflcyp053e10a1
aggagtgtaacattatgtcagtaaaacataaaggccaaatagagaacccaagcatgtacatgcagacatgcagtatcttctgtacaacagaacatgacagaaggaagcaagtacaggaaccaatacacgattgcttctactgacatcatacgcaccaagacaaatagcagtaaacagtgtctatgtcgcgtttctgactcaaagctggaactcaacctaatgtaacctncaaaagagaagcgaatttttgaatggacatgttcatcagaatgctttg

SEQ ID NO: 19542 - DNA, 407 bp, Oryza sativa
  Clone ID: uC-osflcyp053e12a1
ttgttttttttcttttttttttttttttttgtttttttttttttttttttttttttttttttttttttttttttttttttttttttttttttttttttttttttttttttcccccaaaaacaaaaaaaaaaaaaaaaaaaaaaaaaaaaaaaactttcttaaaaaaaaataaaaaaaaaaaaccttttccccccccttgtggggcccaaaaaaaaaccccccaatttttcccccccccccctaaaaacaaaaaaccccccccaacaaaaaaaaggaaaaaacaccatttccccaagggaaaaacctttccccccaaaaagttaaaaaaaaagaaaaatttccccgccccccaaaaggggaaaaaaaaaaggaatggcaaaaaaaaaaaggacaaaaaaggccccccc

SEQ ID NO: 19543 - DNA, 389 bp, Oryza sativa
  unsure (1)..(389): unsure at all n locations
  Clone ID: uC-osflcyp053f01a1
gcacaaagaaagtaggcaattcatggaacaagatacagatgatagacaacgtttcagtagcatagcaaccatccaaccactcttagttcagcctttcatttctggggttaaaccttgccggttttggcaggcaaacacagtcaacaacacataagaccactgtgaaaattagagggccttacaagcaccaccatgcaaagcaaatttacaggttgaaaactggggagaaagccaaaaaaaaaganaaaaaaacccaaaagcacacagcgcangnnnngcacactnacnccccatccacggtttagacttgcaatgtacaactgaacctattccaggagccactgaaacaggacaattttatttaccctggatgctgggaccagcaggga

SEQ ID NO: 19544 - DNA, 384 bp, Oryza sativa
  unsure (1)..(384): unsure at all n locations
  Clone ID: uC-osflcyp053f03a1
gtcaaaatatcagaatgagcatatttctccctttctttgcaaaatctgctctcattcatgatatcttagcacaggtacagactccaggattgcaggaatccagacgagaagatgagaagaaccagcgacaagtttctcaacgacaccaaaaaaaattagcagtaatatgggaacatgtatatatanttcctgtgtgcgcgtgcaagtggcactgtggcaggttcttctcatgaggtgctcctggtcctctacaacagcttccgcnacctgctccggtgacccttcttcttcttccctggctggcttctcccncttccggncttcctttnngggctccgcnaccgcgacctcggattcgacggtgttctcgcggcggcggaggcg

SEQ ID NO: 19545 - DNA, 77 bp, Oryza sativa
  Clone ID: uC-osflcyp053f09a1
gtggtttttttggaggtgctgaaaaaacataataagaaaacttgaaaaagcgcattccaaagccaaaggacgggctc

SEQ ID NO: 19546 - DNA, 392 bp, Oryza sativa
  Clone ID: uC-osflcyp053f10a1
gaacttcaccaccggattctttattaatacctggattcaggggaatcacgaatcaccttggcccttacaaactttgggagggggtcaacccacacataagattgatccggatcccaactcacaccaagtccgagcaagttcatgcgcaacattattacaagaccggggcgcaaaaatagacttcaaaactaggaaactgagattggagaaccgtttttatttcagtgaaaattgtagcaccagtggctaaatcatgcgaagaggacttgattgccgacaccaacaaatccgaatcagactcaatatcaaccaccgaaacaccttgcaccagaatggctaataaagctgccagacacgcctttgcttcagccgagatagcattactaacaaac

SEQ ID NO: 19547 - DNA, 375 bp, Oryza sativa
  unsure (1)..(375): unsure at all n locations
  Clone ID: uC-osflcyp053f11a1
aatccaaacagattaatccacatagtaaagtctcaggttttactacaataatgccaatcacggcaagtagcttagcatagtcaagctgacaacatcgggaagatgcatctccatcctccaatccaagcagagtggatgacgagttggttgtgcagcagatgagtgaaaaattctagcatatgaacttcagcatgggcagtcagttgtcccggtnaaaaaaatagctatggctcctcaagggactccttgatcagcttctccgtgagggatttcgggagtcccattacactgtcgatggtgccaacaatagcttccacaagaggtgaagtcagcgggtgctttaccagcaggccaccggcaacatagaagacatcg

SEQ ID NO: 19548 - DNA, 185 bp, Oryza sativa
  Clone ID: uC-osflcyp053f12a1
ttgttttttaataaacaaccaattaaacaaggtacgtttttacacctacacgtacacagtacatatacacttgaaagaaagtgtcaatgatgcgcaagcacaacaatggcggggaaacctaggtagatcgatcgattcctcgtaattatactttgcgtcagaacgctgctgacaaaacttgacgg

SEQ ID NO: 19549 - DNA, 358 bp, Oryza sativa
  Clone ID: uC-osflcyp053g01a1
tttgtttttttttttttttttttttttttttttttttttttttttttttttttttttttttttttttttggaaaacctcgagggtaatcatttcaaagaaaaaccgaaattaaaaaacaaccagaacacagggttttttttggggcccctcacaagggacattgataaaatctggaaaaaacccgaacatatgggggccaaaataacaagggggaacccaacagggggccaaaaggagttaacagcctttgggaaagaagaaacaaggatacacaaaaagggccggttggaaaccctttgtcccccccttattgaagaaacccgcccccaaatgggggaaacaagcaggaggacgggg

SEQ ID NO: 19550 - DNA, 142 bp, Oryza sativa
  Clone ID: uC-osflcyp053g02a1
acactattttgaagagacatactgcacgtgcgcatagcaccgctgtacgtaagtttttggatacctcttttgagacgcgccgccgcctcttttttttttggtgtttttattatttgtttgttctttattgtttcttttgttt

SEQ ID NO: 19551 - DNA, 313 bp, Oryza sativa
  Clone ID: uC-osflcyp053g04a1
ttgtttgtatggacccccgaagggagatctctaaaaaactctactgtgaaaaggcagggccataagcctacagaaggcacagctctataaaaccatatgcgggggtaaggagaaaagagaaaggacaaaatggaccaaaaacagatgcgcttctggagagaatggtaggcaaatcaaaagaaccaaaactttacacctatttgtgaccaatccaattgcaagccctttgatttgattaccaccaagtcaccgggggtcgcaacagcagaattgggagcccgtctcaactggcaaccaggcttcctaaacaata

SEQ ID NO: 19552 - DNA, 277 bp, Oryza sativa
  Clone ID: uC-osflcyp053g05a1
ggaaacctgggacttggatggaagttaccttcccacacccagaatgaaacattgacaaattcccattcaagtttttatttaaagattacacttgaccacagttcatagccttgggggttcagtttgcactaacagggaacaagaaacgggcaaccataaaccattttttttatgacctcatataaaaacctaacccccctttttttacaagataagttgcccaagcaaaattggccttaaggctttgcttctggttttggtagaaacattcttaatt

SEQ ID NO: 19553 - DNA, 346 bp, Oryza sativa
  unsure (1)..(346): unsure at all n locations
  Clone ID: uC-osflcyp053g06a1
tttgtttttttaaaacatgaatagcacacattttactccttgaataaattcacccatatatatgggcagaagcacaatttatttttgcccaattggcacactcagcatcaaaaggtaaaaaatgaaactgaaaataaaatataaacaaaagcttgttgtaagtagtatgtcagtacatttgcaatcatgcacataacatataagggaacaaatanaatcaagaatgagcactgcatgccatgcatggccaacccagtggcagtacgtgttttgtattatattgagaattcaccaaaactttcaccgcggaatcttaattttgaggttaatttagtttgatccctgg

SEQ ID NO: 19554 - DNA, 135 bp, Oryza sativa
  Clone ID: uC-osflcyp053g07a1
tgtgttttaaactgctgccgcaagctcaaggataactatggacaaaatattgatcattacaacaaacatctcaaaaaacacattctatatagaccgtaaataattctgctcgtaaggacataatggcacaacaat

SEQ ID NO: 19555 - DNA, 288 bp, Oryza sativa
  Clone ID: uC-osflcyp053g09a1
tggtttttgtagatacgcaatatgagcacaactatataacttaataagcacattacagcacacacatggccaaggcagttatttgaatcagtctccaacatacttcaaatcatagaccacaccatacagcaaacatagttataaatcattgtccatacgagaggtacagtctgatacgcagccttgtaaataattcttagccattaccttttggtagcaattcccttcttaccaaaacattagccaggacattcaccaggcttctttaattcttgggcacgatacaca

SEQ ID NO: 19556 - DNA, 401 bp, Oryza sativa
  Clone ID: uC-osflcyp053g10a1
aaatatatatactaggaaactagaatgtgttcatatggatttaattacctctaaaaggacaaactattattaactatgtacttatatttgcaaaacgttaaatttccgtcatattccgactaatcatccgtattccgattaatcgtttggcagtactctccccgtccgacatccgtatttcgtcttccataacactgtgtgccacttgattcaaacgctcccaatttcacggttgacccccatcccgtcttcgcagtttctcgccgtaggccgcaatgcttcgccgtctttcgaaaagctgcatgctgcatggaatcgtagtgcgacacatgggcaatgccctcgctggctgggaattgtgcgcttttggccaggaatcgttgccgccactggcagccacc

SEQ ID NO: 19557 - DNA, 200 bp, Oryza sativa
  Clone ID: uC-osflcyp053g12a1
ttggtttttgggcatacaatgtatttttgcgtatttagacttgcagttgcaaaccgaattacatgcgtggtgtagcatagacttacaatattccacaggactgaggctttcactttttgcataccaaccaagtccctgcggttaatacataatgggtcgacagcgacaaaataccaatgtttcatatctcataaaatatg

SEQ ID NO: 19558 - DNA, 442 bp, Oryza sativa
  Clone ID: uC-osflcyp053h03a1
tttgggtaatggcaaaacagaaaaatggcttaactctggcagtctcaagcaattgcttatgagacaatttattcacaatattcagggcataggaatcaagtttaggagcctcaggatcatttaaaaaggaggtaaggttgaggaaagatgaaaatttaaaaaataaaatacatacaatttaaattaattcacgcattccaaatttgtaatgctttcaattgacattctaccaatttacatgccacttcattacgcaacaaatgcataaagttatggatttgccagtgggggctctaaaatttatggccaattcctaaaaattagctttcttgaaaaatcgaagaccaacccccaaactgttttttgcttgaacctgctttctttcattttggacaacctggcgtcaacaactgagacaggtcctgcttcctccaggctgccc

SEQ ID NO: 19559 - DNA, 146 bp, Oryza sativa
  unsure (1)..(146): unsure at all n locations
  Clone ID: uC-osflcyp053h08a1
tagccaccgccctnnnnnnnntgggntaattgcaaaacagaccaaatgtgccaactttggcagattaaagcaattgcttatgagacaattcattcacaatagtcagtgcatatggaaccaaggtaaaggatcaataattgattcat

SEQ ID NO: 19560 - DNA, 132 bp, Oryza sativa
  Clone ID: uC-osflcyp053h09a1
agcaccgacctaagaattcaataagcatcacgcaaatgtttacaaaagattatcattgctctagcaagaatgcccaagacattatggcagaccaaagcttaacatgccaagagttaaactgctattgtaata

SEQ ID NO: 19561 - DNA, 210 bp, Oryza sativa
  Clone ID: uC-osflcyp053h10a1
ttgttttttatgagaactatgtactgtgctgattaaattctctcatcacagagtccttacaagttacaaatgaaatgtaagcattggatctacgtatatatataaaaaagttactagaatcactaaaaaaaatggataggaaatgaagtgacaatgcaatttaggtctagaacttgaaaaaatagcaacatttgtgaccaaggaaaccga

SEQ ID NO: 19562 - DNA, 370 bp, Oryza sativa
  Clone ID: uC-osflcyp053h11a1
ttggtttaacaataaaaagatagcatggaattaaagccgctgctccaatttaccatacgcagcatttgattacaggaataccaaaaaactactaccgatgacaggtattaattattaaaaagcacaggttcagattattgcgacaaaagtttttgatacccgtaagattggacgcttgatagccaaaccacactcagaaccctaaattatgcatacggaggatgtccaatcggatcttcagccaccaccagaggcagatcaatacttgtagtccttgacgtgaaggcttttagaggcacccttgccgagcacagcatcaccctggtatggaccaagggtagcctcagagttggccttgcacctggtgatg

SEQ ID NO: 19563 - DNA, 72 bp, Oryza sativa
  Clone ID: uC-osflcyp053h12a1
ttgtgttttttatttttttattttttttttttttttttttttttttttttttttaaaaaaaaatttataaaa

SEQ ID NO: 19564 - DNA, 498 bp, Oryza sativa
  Clone ID: uC-osflcyp054a05b1
gcagaaaatagcatctttagaaaggcggatttctaaggcaaggtcaaatagtcgaggcatgcatgataatttagaactctcactgccttacattgaaatacctgagcaactcaatgagaaagcgtttcaacttgaggcaagtgagtgccaagagtttctgttgtcagaaagaaccacatttcagcacaacacaggcattgtccaagaaacaggatctcaagctcacaaaggaaagccattgcccagtgatggatctgatgaatttctgaaaaaggcgtcacaggcagagattgatgaactgaagcagagggtatctgaactcactgaagccaaatctcaactagattcttgtaaccataagcttctagaggaaagtacatatgccaagggcctcgcctcagtgaccagtgttgagtcgaaggcactatcagtaaaagtcaccaaactgatgaagcagaacgagaggcttagcagcgaggtggcatcaggaagaaacca

SEQ ID NO: 19565 - DNA, 494 bp, Oryza sativa
  Clone ID: uC-osflcyp054a08b1
gtcgtcgcgctgttcgtgcaattgtggagctggctggatttcgccgacgcggtgctcgaggacctgtatcctctgacgaagctgccaggggacaaggccgtgggatcagatacctctgcggcgggggccggatcaaccgccgacaaggagacctctgcggcggctggatcaaccgccgacacggcgacctctgcggcggccggatcaacctccgcaaaggagacatctccagtagccggatcaaccgccgataagacctatgcagcggccggatcagctcctcctgtcgtcgacactgcgcctgcgcctcccgtgacaacttatgattaattacaaacattcggtatttcatattttggaggatgctaactttaaataacttttccaaaatttttaggacaccaacgaaaatccttacataattttgactaatcaacgttttaaggagtttaacaaatttctatacgtgtaactttttcttacatatttgagta

SEQ ID NO: 19566 - DNA, 477 bp, Oryza sativa
  Clone ID: uC-osflcyp054b02b1
cacggcgacgtcgcgggtgtaccccacggaggccagggacgggaacgctggcgtcttcctgttgaacaacgccaccagcgcgcgcgtcacggccaagaagctcgtcgtccacgagatggactcctcctacaaccaagcctacatggcctagactcctgtgttcttcttcttcttcttcttctccattattacattattgctgcttacttgtaaatcatttttgacgccgccgcctgctgctagctgctggcctggccttcagaattttatctctgtgcttctttttttttttttggctctgctttaattttgtatctcgatcgatctcgaccgatcgattaattactatatctccatgaagaaatgcatggatgatggatcatggatggatcgctccctgagatccaactgtacctaggggatgcagatgccatggtcaagcaatacttctgacaatgattcacgagtcaagattat

SEQ ID NO: 19567 - DNA, 499 bp, Oryza sativa
  Clone ID: uC-osflcyp054b05b1
agggaagtccggagttggaagcgatcgatggcagttactacgacggtacgagttgttgcactcggcgcggtggccgtggtggtggcgctgtcattcctcgccaggagcgcggacgccgactgctactacttctgcttcaaggactgcatggtcagtgagaacatcatggtcgactactgcagctacgcctgcgacaagacgtgccagccggacaagcccacgctgtactcgtggtagttgttgtgccgcctcgccggcgacatggagtgccaactctgctgcgcctagagctcctgccaccgtctccttccggacggcaagggcgccgtggaggcctgcttcgggcagtgctacgacggctgcaagaccacggtggcggccagactgtcgaggcctctccgcgccggccactacgtgctctctagtccccctgatgacgtataccatgatccggaccaccgatacgtgttctctagcccccatgatgacggagaccatg

SEQ ID NO: 19568 - DNA, 449 bp, Oryza sativa
  Clone ID: uC-osflcyp054b10b1
gggaggtgatacggatggagagggaggcggtcatgggggtgctcaagcccaagctcgtgatgaagctcgcctacctcatcgagcatgatttggaccgctctgagttcttgaagctactgttagatgatcgagtacaccatccgagcttggtatcttctccaattcgaggatttaatgcaattgtattctctgcttgatcctgtttctggcgagaagaggctggagcagcagaacctgacacctgaagagattgaaactctggagttcaatttcatgacatatcttttccaggttatggaaaagagcaacttcaagttgttatctgatgaagagtatgatgttgcacaatctggacaatatcttctaaacctttccataaaagttgatgagcctaagctagacagtaagctgctgtcaacatactttaaagagcatgcacatgataatct

SEQ ID NO: 19569 - DNA, 459 bp, Oryza sativa
  Clone ID: uC-osflcyp054b12b1
gccatctgatacaccaaagtcagatgataaaggcgcggaacatgatgagctatgatacaccagccgctttggaggcaaggattcttcacactgactgtagttctctggtgtcccaagcagttaaaatcatattgctggttcagggggcaatgaagtgcagataccataatgtgcgaatcaatcgatgatcaataatcaatggtggtgccattttgcattttgtagggctaactgccgaaaataggttcacgaaggggtctagttggtagtttttcaagaacttgtatacatagaacactgtaatcccaattcgtgtattaagatgttcttcctgggacgctgtaaagtttattggcaactgccagttgaaagctagtattagcaatctggcagcccgagaatcttgtaaaagttggcacccaacatagctcgagaatgtaagatactttggtgttggta

SEQ ID NO: 19570 - DNA, 319 bp, Oryza sativa
  Clone ID: uC-osflcyp054c01b1
gctcctggttggttggtggtggtggtgcgctcttctgggtggggttacttttaaaaattgctgtggatcaagcaaatcaccttcctcgagatctgctggacattgtcgatcaacttggaggcagtggcacgttctccctcacttagttatgatccagagaactacaaatgcggacaacttgactggacaacatgtatccctcctaggggcctaccatgacatttacattccaaactggattcacgcgcactttactgaaggtcaccacaagcatatggatcccttgtattgctgttatgagccaaacagctccttatgc

SEQ ID NO: 19571 - DNA, 518 bp, Oryza sativa
  Clone ID: uC-osflcyp054c05b1
atttgcagagctgcttacaggaaagccactctttcggggggagaaatgttgtgcatcaattggatctcatgactgatctacttggcactccttcagcagaatcccttgctaagatacggaatgagaaagctcgacgatacctgagcaacatgaggaaaaagcctcgggttccttttactaaaaagtttccaggtgtggatcctatggctctgcatttgcttgaacgccttcttgcttttgatcccaaagatcgtccaagtgcagaagaggccctgacagacccctactttaatgggctagcaaactctgaacgcgaaccaatagcacagcctatctcaaagcttgagtttgagttcgagaagaggaaattggccaaagatgatgtccgggaattaatttaccgagagattttagagtatcatccccatatgctgcaggaatatttacgcgggggagaccagatgagtttcatgtatcctagtggggtggatcgcttcaagcgtcaattcgctcatttg

SEQ ID NO: 19572 - DNA, 356 bp, Oryza sativa
  Clone ID: uC-osflcyp054c12b1
ttccgatgcgcgcggacgactcaccacctctggggggggaccttctactactcctaaaccctcactaaaccctagcctcctactgtgcgctctacctctacggggaggacgcgctgcaggatgctcatcgtaacttacgacgcattcgtcgtctcctcatggctccttatagtcgcctgcgtgaacctttgcgatggctctgggagaacctattcgaccggcactgctgcgactacatcggtgctagagcgccagggatttcaagattcatggtattcctaacgtggggcatggcgaccagcgtgggcatggcgtcaccgacactgggcgggccaatgctggggggaggacctctg

SEQ ID NO: 19573 - DNA, 539 bp, Oryza sativa
  Clone ID: uC-osflcyp054d01b1
gctcctgcggtcacgacgggccgttcggcgccacgggcgtgaagcggctgcaggacatcggcatgatcgacgccgtgcccggcatgcgcgccctcgacatgaacaccgccgaggacgagatcgtccgcctcacccgcgaggtcgtccccggcatgatcgtcaccggcatggaggtcgccgagatcgacggcgccccgagaatgggcccgacgttcggagccatgatgatctccggccagaaggcggcgcacctggcgctgaaggcgctcggccggccgaacgccatcgacggcacgatcaagaaggcggcggcggcggcggcgcacccggagctgatcctggcgtcgaaggacgaccgcgagatcgtggacgcctgagcgaatagaacagggtaaaaaaaaatccgcaagacgtggtggtgacacggaggcgttggggacgagaagaagatgtggactttcccctgggttttttttttcggggattgctttgatccccttgtttgttttagctctggatgttgactagcgtcttgttat

SEQ ID NO: 19574 - DNA, 487 bp, Oryza sativa
  Clone ID: uC-osflcyp054d02b1
ggacagcaagctagtcctccatgagaatgttactgttacaccccatcttggagcaagtacagtggtggcccaggagggcgtcgctatcgagatagccgaagctgtcgtcggtgcactgagaggtgagctcgcagcaacagccgtgaatgctcccatggtcccagctgaggtcatgtcagagcttgccccgtatgtttcactggcagagaagctgggcaagctggcggtgcagctcgtcgcaggcgagagcggcggcatcaagggcgtcaaggtggtgtacaccacggcccgtggcccggacgacctcgacacgaggctcctccgcgccatggtgaccaagggcatcgtggagcccgtgtcgagcacgttcgtcaacctggtgaacgccgactacacggcgaagcagcgcggtctgcgcataccgaggagcgggtctccacgagagccccccgcggaggcgccgctggagttcatcaggtgaggctct

SEQ ID NO: 19575 - DNA, 411 bp, Oryza sativa
  Clone ID: uC-osflcyp054d08b1
taagactagtgtctctgatgacaaggacaaaagcaggggctctttgacagcatgtaatggcaacgatcagggtttacaacctcctaagaaagcagcaagaacaggacatggtgcggtaaggggaagacacctgccaaattgaaagcaatgatacatccaatcgaaaacaagaattatacgaatcaaatggatccacagaccaaatagaaaagttaaatgttcgctcatcatcagcaagagcaaaatttatggagaaatcaagcagctcaagaaataagagcaaaaagaccttatggggccgtacttcagcaagaaaagacctgtcagcagaggagattgactattgcagtgatgacgagactcttattgagaagcttgagaacagcaagacagatctccaattaaaattac

SEQ ID NO: 19576 - DNA, 370 bp, Oryza sativa
  Clone ID: uC-osflcyp054e02b1
atgggggacagcgcgaccggtccaagctaccgtcgggaaaggagcgcaagctccgcctccgcctccgcctccgcgatccgcctccgcctcgagcccaaacccacccaccaacccaacccaaatcccatcgagaggaggggacgcggcggcggcggcggatcggcggcggggaaggaaggggatgggatctccaggaaaagaggaggaagcgatatgggctgcttaccatgctgcggagcggaagatgtccgtaagaagaagaagcgcgactatccctacgtcccgatccctgaaccaggtggtaactatggacgtaccaagcccgggcccccaaccccttcgtgttttccccccaccagcagaaatctgc

SEQ ID NO: 19577 - DNA, 457 bp, Oryza sativa
  Clone ID: uC-osflcyp054e04b1
gcgaaagctttggaagcgattcaacatttaaaggagacataccacaatggagtgtgtgatgttgcgattgttgatgatggaaaattgcaagcagaatcagattctggtgaattctgggttctttctggaggttttgcaccaatagggaagaaagctatatgtgacgatgatgttgttcttgaaaccacagcccccaagctttacagcatcaataatggtcaattaaagttagaagacacagttctgacaaaatcaattcttgagaacaataagtgctttttggtcgactgtgggtctgatttatttatatgggttggtcgactaacacaagtggaggagagaaaagctgcaagcgcagcagttgaggaattcattgctactcaaaataggccaaagacaacaagagtaaccccagtgattcacgggtacgagaatcatacattcaagtctaagtttg

SEQ ID NO: 19578 - DNA, 378 bp, Oryza sativa
  Clone ID: uC-osflcyp054e11b1
tctgattctcacagttcagttctaccacgtacaggaggatttgtttgagagggagatgatgacaaggcacgaggaggagcttagctagcctgccatggcgaggcgctctccttgcctcgacgtcgccatgctcctgcttggggcgttggcggtggcgagcgccttcattgatgaagcgctgcctgatggccgggagctcgaccatggtgcccacttcatgagcaagcagggttctgtgacatactagaagctgagctagccggatccgaagccaaagactgcggctgctcctatacccaggccacagcactatcactagccataaccggaggcaataccggcacctgtagctgagcctagacctgtaacaaagctccc

SEQ ID NO: 19579 - DNA, 457 bp, Oryza sativa
  Clone ID: uC-osflcyp054e12b1
ctcgtgtggcggcgcggcgcaccacctcgcggcgagatggcgagctcggcgctgaggcgatccctccgacgcctcctcccttcgagcccccctcccccgtcccccgcctccgtcgccgacgccgcgaccttccgccgctccttcctgtccggtggcggtgacggggtgggagagagcgcggcacaatgtgcgaagaggcggcagtgtggggacgccccaggcccgagcagatctcctggccggccatctcggagctgcccaacaacgtccccgccagatgcgtgtgcgccgctctcagggccaccggactatcaagcggcataaccgcgagcaatactgtcacaggtcgcacactcaagatccgcaacacagtcttccctggacctcttgactgtcaaccgcagcacaacctagctgatcgcgatctggctcttagctactaaggctgcctgctcta

SEQ ID NO: 19580 - DNA, 321 bp, Oryza sativa
  Clone ID: uC-osflcyp054f06b1
gggataaaagaaaaacgagcaaatccaaatccaaagggacggtctcccacccttcccggggagagagagagaggctatgacgcgctgcgccgtcgtcgccgtcgtcgcggccgtgctcctcgtcgccggcgcggtggtggctgtgggtggggaggaggtccaactacctttagactgcacgttgagctgtcccctctgattttggcacaggaggtgcaacaccaggaggggggacttttggggcttaccaagcccattgcgtgatgaaaccatgtgcctcgggaacttcttatgtgttagggcccctgccagaaccatggg

SEQ ID NO: 19581 - DNA, 395 bp, Oryza sativa
  Clone ID: uC-osflcyp054f08b1
tagatgttcttaaggagaggcttcctggtatgggtgagactgcttttatttttggtgggggtgatgtcaccaaggagcccattcctgtcttgcctactgtgcactataatatgggcgggatcccaacaaattaccatggagaggtagagattatgaagggggacaatcctgattctgctgctctgtgggtgacggttgataaagatgcaccacgtacgtgggcctatggcacggcacatgatccccaggagtgcccaacctgacagggttcacacaccattttttttgagaaccgggattctattatgtactgatatatgacacacgaacttaataaggggggaaattgtacccaaaaagctttctgcggacataccccccacggagaggagcat

SEQ ID NO: 19582 - DNA, 358 bp, Oryza sativa
  Clone ID: uC-osflcyp054g06b1
cacccccttgttcagttgacctttgatggagtgttcccaggggcggggtcatacaatatgggtgtatcggttctcgctgaaagagaggaaactcctggcggcctccgcaatatacactgagatggtcaagaacgagttctggcccaatgaggcaaattgctcgctctcgcttcctatggtcttggatacacaagactgggattcagggatcaaggtggggatatgcatggtggataatgggcttccaccattggaggagagtgggaacatgctcgtatcaaagctaaaggatgagaggttacccgaggcatgtaaatatgccagaagacatgattgatcgatgaatccagttgaggtc

SEQ ID NO: 19583 - DNA, 479 bp, Oryza sativa
  Clone ID: uC-osflcyp054g09b1
ggtttataagagaaagagcgcttgtgggaggaggaaaaggcaagaaaagagaaggaacgtgaagagaaagaacggaggaaagagaaagaaaagaaggagaatgaacgcacagaaaaagaaagagacatggagaaagaaagagaaatggacaaaggaaaggatcggtcgaggaaagatgagatggatattgatgctgttgatgcagatagccatggctcaaaagacaagaaaagagaaaaggacatggaaaagaagcataagagacaccaccatgacactgcagatgatgtgagctctgaaagggatgagaaggatgactctaaaaagtctcgtagacatagcagtgatcgcaagaaatcaaggaagcatacccatgcttcggactctgatagtgaaaatcggcacaaaagacacaaaaaggatcgagatagctcccgcagaaatggcacacgtgatgaccttgagatggtgaacttgga

SEQ ID NO: 19584 - DNA, 319 bp, Oryza sativa
  Clone ID: uC-osflcyp054h02b1
ggccattgcatagtttgagaggacggttgccggcttggaagggtgacatttgactaggaagagctttaggggagggaaaaggaaaaccctttctctctctctctctcagcctttctctccctctctcttcttcttcttccttgcaccaccgtgctactcaccgtcgcatcatccactgatccggccggcgatatcacctccatccatgcatcacattacggtcggcgtctgccgctgccactaccaacgcgggtgagatctcaccggtgaagtgcccgccggcaggatgccaggaggagggcccctcaatccccaccag

SEQ ID NO: 19585 - DNA, 327 bp, Oryza sativa
  Clone ID: uC-osflcyp054h05b1
gggtgggagtctcatcacgcaataaattaagtggatggcacgaacattgaaatgtaaaacgctactagctactccctccgtttcataatataagaatttctaacattgctcatatacatatagatgttaatgaatttaaacacatacatatatgcagattcattaacatataaatgaacgtgggcaatgctagaaagttttacattataaaacggaggaaggagaactcatacgcgcacacgtgtatgaaaaagacaaaaaaacagtgatctccgtacgaatatacgtcagttggttgatctttattcgttgaacatgttacacgtc

SEQ ID NO: 19586 - DNA, 525 bp, Oryza sativa
  Clone ID: uC-osflcyp054h10b1
gcggggaaaaggatagacttgctgctgaaagagctgcaggggatgcacatgagagagcatttgctgaggctcgtgaaagggcagaaaaaatagcattggaaagggctactgcagcacggcaacgggcttctgctgaggcccgagaaaaagaagagagagcgagtactgaagcagctgctgagagggctgctaggataaaagcagaacgtgcagcggttgaacgagcaactgcagaagctcgagagagggcaattgaaaaggctaaggctgaaaaggctgccgcagaggcaagagaacggagagaacggtacagatcctctttcaaggagagttttaagtccagcaatctggataatcgacaggacacacagtttcagagagcggtttccagtaacttaatgagaaacccagattcatatagcaaagggcttgaggttgaatcagctctaaggcataaagcacgattagagaggcatcaacgcacagctgagcgtgtgacaaaagcactagctgagaagaactgcg

SEQ ID NO: 19587 - DNA, 418 bp, Oryza sativa
  Clone ID: uC-osflcyp054h12b1
tattctcgaagaaggagaagaaggagaggagcagccgtggcgtcttcggtggcagcggcggcgagcacgttcctggggacgaggctggcggacccggcgccgcacagcgggaggatcgtggcgaggttcgggttcggcggcgggaagaaggcggcggcgaagaaggcggcgaggccgtcggcgccgacgacggacaggccgctgtggttccccggcgcggtggcgccggactacctggacgggtcgctcgtcggcgactacggcttctacccgttcggcctcgggaagccggcggagtacctgcagttcgagctggactcgctggaccagaacctggccaagaacaacgccggcgagatcatcggcacccggttcgagaccggcgaggtgaagttcaccccgttccagccctacccga

SEQ ID NO: 19588 - DNA, 406 bp, Oryza sativa
  Clone ID: uC-osflcyp055a01a1
ccaacctaattaacaaaattttcccccaattggttttggaaaaaaaaacaaaaaacccaaaaaaattaaaaaaacccccccggtggagaaaaaacaaaaaaaccccccaaaaaaatttaaaaacccccacccgttttggggcccttaaacctttttaaaaaaaaaatttgggccttccccccccaaaggggccaaaaaaaatcccccccaattttttttggggggggatacccaaaaaaaaaatttttttaaaacccaaattttttgggccccctttaatttttaaaaaccccaaattccccccaacttttttcccaaggttttgaaaaaaacaaaaaaccctccccaaaatcgggggtcccccacaaaaataaatggaaaaatgtcccccccttttttccccccg

SEQ ID NO: 19589 - DNA, 366 bp, Oryza sativa
  Clone ID: uC-osflcyp055a02a1
acgccttgtttggttcactgtgtgaaggaaattcaattatttttttagtacttgaaaacgaaaagatcccgataaacggagcaggaaggacctattaaatgctaccatagactttacttattaatcgggcttcaatccaggcccttgcaaagctatctacatgaagccatccagatgattatttacaggagatcatgtagtgtccagctactcgggtcgaacgctaaacaagatggggagcaccgtcgcctgcagattgttcaccttacttgtcgtgaccctgcaggaatcaagcgacagcgagcgcaagttctgcagatccttcaggtggcggaggccggcattggatacacgagggttggagac

SEQ ID NO: 19590 - DNA, 385 bp, Oryza sativa
  Clone ID: uC-osflcyp055a03a1
aattacatgaattccagcggcaatgtacccagcttgatgcaacttcgttgccactttccaagccagatctctcccactgtcagtgagtgaacccacgtacagctttcagctacgctatcttacaagtgaagttattacaagcatcacggcgacgatgaaaaaccgctcgtgcctgcttcagagagtgtagttccctggagttgggtattgagcagggaggagacggaggccacctcctcaggtacagggcttataatgaaggggagaacgcatgcgcaggctggcccaaccttgctggccgcaaccctaccatgaattgggcacacagggtgccaggtcttataagcctgcacggggggctagccgcttctgctgcacgcaaccg

SEQ ID NO: 19591 - DNA, 195 bp, Oryza sativa
  Clone ID: uC-osflcyp055a04a1
tttgtgtgcatagaagcagcattgatcaggaatcttgtggtgtacaaaactctttgtaacacttttgagagcacacgcattcacttttcacgggccaccattctgcataatctattccatttgccaaattcatgcataaaaggctcgccctgatttgtgctctagcatgaaaagcaacccccaaaccccaatatc

SEQ ID NO: 19592 - DNA, 419 bp, Oryza sativa
  Clone ID: uC-osflcyp055a06a1
tttttgtttttaaattggcaagggtttcaccacatttatttattggtaatctttattaatcagataatggagagaacactacaggtacatttgaccagaacagttgatgcatggccccccaacttgatttgttatttaccatcaaacatgcattctaaataccaaaattatcaagtgtcacatgcttgagaatcgcactagcatgtaatcttggaaggcttctgcagttaatacagcagatgtcctaccttcaaatgggaacagcttaaatttgcataagccataagatcaagtatacctccaagcttttgataaattgcttgcatatttcaagaataattttgatgatggtatcaaatccatgtattacaaagtatctgaaggtggggggctttctgtatttatctgcctaggaactg

SEQ ID NO: 19593 - DNA, 564 bp, Oryza sativa
  Clone ID: uC-osflcyp055a07a1
agcgaaacatctgttcaactccacagaagcaagcaacaatgacaacagagttctgtctaattgcttgaaatcataaagctcctacaaatccacacttactgaacgtgtggagcccttttttcttaactccctaatgcaagttcgattccgagaacatgacgaaaaccaagcacagctcagcgcatggtaagttggtaactatagccgcatgaagatattcacttcttcctcttctttgggggctgaagtgagtcttcatcatcatcttcctcatcatcctcattgtcctgatcttcctcttcctcatctactccatcatcatcttcaccaccatcatcatcgtcgtcgtcatcctcattgtcatcatcatcgtcatcgtcgtcatcacctccaccaccctcctggccttcaggctcttcctcatcctcctcaccattttcctcaggctcacctcttttcttgttgttatcgatgacttttggattatcatatccctcaccttctgaaacgtcctcttcgcctttcccaaagtcaccatcctcgtccccgtcatcatcaccacca

SEQ ID NO: 19594 - DNA, 553 bp, Oryza sativa
  Clone ID: uC-osflcyp055a08a1
gttccttcccgtcacgccttggagggtacacggagtgaaggaaatacaagtaattttttcagtacttgaaaacgaaaagatcccgataaacggagcaggaaggacctagtaaatgctaccatagactttacttattaatctggcttcaatccaggcccttgcaaagctatctacatgaagccatccagatgattatttacaggtgatcatgtagtgtccagctactcgggtcgaacgcttatcaggttggggagcaccgtcgcctgcagcttcttcacctcacttgtcgtgaccctgcaggaatcaagcgacagcgagcgcaggttctgcagatccttcaggtggcggaggccggcattggatacacgagtgttggagacgttcagcgagactaaagcagttaagccagaaatcagctccagggttttgtctgtcaggttaacgttctgagaaagattgagttgcttcagagctttgagatccttgatattcttcactccagcatcagtaattaacccaccgcagacttcaagagattcaagattctcaaaaa

SEQ ID NO: 19595 - DNA, 365 bp, Oryza sativa
  Clone ID: uC-osflcyp055a09a1
ccccccaatttatttgggatcttaatgttattatggttacagcaggatacagggggcaaaacacaagatgcaatccggggggatatatccattatccatacgaggggggggatttatttaagggccagaagctacaagcagaagcagggctgaaactgctgatgccattagggcactgcttgctagcttcagggggcaagcaaaaactacagccaaacggggctagccattgcccgttttttaagctcctggcacgctgcggggggggccggccaacatccttggggccgcgggggctaaaaggttgccaagcaacccctgtttggggatgagggtgaggccccaagagttcttgccgccgttaa

SEQ ID NO: 19596 - DNA, 191 bp, Oryza sativa
  Clone ID: uC-osflcyp055a10a1
ttagttggagcggccttcctttttttttttgggagcatagtagcagcattgatcaggaatcttgtggtatacaaatttctttgtcacacttttgagtaaagcagctatcactgatcagtgccaaaaagagagagaggaagatctcgccggacattgcgcttttgggggggttctccttgtatgggtggaag

SEQ ID NO: 19597 - DNA, 375 bp, Oryza sativa
  Clone ID: uC-osflcyp055a11a1
gtcctgcaacaaacttattaattaaagcagcaatcattggatcgttaagcaggttacaacccatgctacttacaaagaatttcgtaggaaaagtttgcagccatatacaatacaaatactattagaggtgtaccaaatttatatttgaacagaactcgtgtgcaggtagaattacacaatatatcatatccaaatcttggagaaaatgcatgttccatagtatcagctgcaaactcccaactcccaacttactcagcagctcaagcacgttattgtgaaattgagagatgcaacccttaccttgcaactttacacatacactatgatacaggttctttttgcccattaagcacaggaatcagcatggcaaaagct

SEQ ID NO: 19598 - DNA, 306 bp, Oryza sativa
  Clone ID: uC-osflcyp055a12a1
gcctcatataattttagtttcttacagtacaagttacaaatatgctccctccagtcaatattacttgccatttccgacaagcaaattgcactgagcgcaggtcaattcagctgtcccaaaagacatgtttttccgtctggagggagtattacattgatgtgccaaatggttctacattttgatgcaggacaggtaagttgctatgcaatgatattttcttcatcaactgatagaagcatttgcgctacattctccatggggggacttttgcttcaatcttcttctatgcatgaaacagccaacttg

SEQ ID NO: 19599 - DNA, 499 bp, Oryza sativa
  Clone ID: uC-osflcyp055b02a1
ttttttttgttttttttttttttttttttttttttttttttagaagaaaaacaattcatccattacgctttgatcagcacaggtctaagtacaacacaatgtaagtcttctgacttgggacattggtacccagcaaaacgaattctgatccaagtacagaatggtgatacagccaatcaacaaacaccgggacatgtaaatcctttactgggggataagggataacatctttggtttggaaccaaaatttttatgccaattcagaccacaacgcttggaacaagctcattaatcctggaagaccaactgacatagtgcgatgaccagggtttttgccacctgatggagaggctggaggagagttcgtaggggaattccctgcaaaatattattgtaggacacttatcagaaaaccctaccaatatatgtattaaaattatctaaggaaaaggacgggtgcccaattcaacagattttgttgcgaactggtgtgacttcc

SEQ ID NO: 19600 - DNA, 73 bp, Oryza sativa
  Clone ID: uC-osflcyp055b03a1
tgtttttttttttattttcttctggtctaccatttttttttttttgttttcttttttttttttttttattttt

SEQ ID NO: 19601 - DNA, 415 bp, Oryza sativa
  Clone ID: uC-osflcyp055b04a1
gtccttttttttttttggtttttttttttttttttttttttttttttttttttttttttttttttttttttttttttaaaaacaaaactttggataggggagattccaaaaaacacggtcgggggaaaagaccccggttgggggggaaccaaacccaaaagggggggggaaaaacaccagccctgccaggacttcgggcaaaagggtctggctataaacccccccagaataagggggggcccagctcatgctggggggaaggcctttttgccgcccctggcggcggggggccccgggggggagaccctcgggacggtgaaccccacaggtttcgacagggggccggcctgggcaaagagacaggggcaccctccttgacccggaatcatggggggaccggagcccgaatggggga

SEQ ID NO: 19602 - DNA, 523 bp, Oryza sativa
  Clone ID: uC-osflcyp055b05a1
gcgacgctatactatagctatgacgtggggtgcactggtccgtaacgcttggattgcatttctagttggcggccttcctttttttttttgagcagaagaagcaacaacgctcattgagatcaaggttcaatatccttagcgggacatacgaaaggcagtactcagcctagtcagcaacagcctccatgggttttccatcgagggaggatgaaacaaaagcaaagtacataacccgtattgccttaaacaggtgccaacaccatgaacccatgttaataaaaccaatagtgtgaaactttattatattctaggatttcatggtggcgaccaaagcagcgagaaaccctgagtccccaaggagcagctgttttagagagacgactatgccgaggatgacccattgtgcatatggctattaccaggctggataccattgattagatcgacgggaggtaagctatcaagaacacgcaccacctggctcatccggggtctcctagatgctgaatgtcgaatgcaagct

SEQ ID NO: 19603 - DNA, 380 bp, Oryza sativa
  Clone ID: uC-osflcyp055b06a1
tgtttggtttttaatttttttgggttttttccataaaccatgggttttattactcctacttgtggtacaaacaaacccaagacgacagaacgggccgccaaaaagaagaaagcataccatgaggaaacaaaacggataaaacggtgccccaggtaattagaggagggatagactatgagcacaagggcctccaaccagagggatcaacatatgtactacgactatcccagctagattgggtgaaatcagctgggaaatcttggctaccaaaagccacccggtgaaacagcccgaaacctgccgtgaatgccacagggaacatatgggtgtgaccaggctgaataccaatgcttagaacgacgccagctaagctataaaga

SEQ ID NO: 19604 - DNA, 484 bp, Oryza sativa
  Clone ID: uC-osflcyp055b07a1
tttttgtttttttttttttttttttttaggcacaagggtgtaagtaacattagatgaatgaagatgtacatttttcatgtttttggacagatatgcttagattctgccttttacggatacatccatgctattttgcaagccatgtaactgatttataattaatgcagcctctccgggggttccatgacgatcatcgcattactcgttatcatcatcagccaggtcgaactgcttgagcagcgcgccgcaaatgggcagtgggatgtccttgaggtagcccagtgggttggctaagcgcaggttgtcacagatgccgacattcctggtgagcaaaacacgggcacgatccctttcggcctcgatttcagagcagtttgcaagggggctgtggacgaggacaacctcgcagatgtcctcctcatggctggccttgagctcaatcttgtatggcccggtctcatcagtcacaccgtcaatcgcacgc

SEQ ID NO: 19605 - DNA, 397 bp, Oryza sativa
  Clone ID: uC-osflcyp055b08a1
ccccaaaaccaaggaccagggggggtaaatcatcatacgggaggcccggggtcccataaaaaaaacccctggcccttggacaaaacggggggcctcaccacatggaattaagggggggggttttttaaataccgggggaattggcaacccccccgtggggggtaaccaacaaaaccgggattggggggaaaataacccggggggggccctggtttttcaaacagggggggccccccccccgggggccccgggggggggccccccccaaaaaaaaaccccggggggtccaccagcgtaggggcccccggggggggaccatccccccggaaagaaaaaggggccgaaaccctggacttaaggcccccactggaaaaggaagggggccacaccctccccc

SEQ ID NO: 19606 - DNA, 441 bp, Oryza sativa
  Clone ID: uC-osflcyp055b10a1
ttttggtttttttttttttttttttttttttttttttttttttttttttttttttttttttttttattttttttctcttttcttccgggaggccaaaaaggggattaagcagggccggacccgggggacaacccggaaaacccggcccggcccccggaggggaccccacctccccaaaaggggggcgaaaaaaaaccgggggaaaaaagggccaaagcgggccccgggggaaaaagggaacccgcccaaaattccacaaaacaaacgagccggaagcaaaaagggaaaagcccggggggcccaaagggggggccaacccaaaaaaaagggggggggccaacggccgggttacaagggggaaaacctggcgggccaccgggaaaaaagaaagggccaacccgcggggagggggggttcggcaattgggccccaggggggccc

SEQ ID NO: 19607 - DNA, 514 bp, Oryza sativa
  Clone ID: uC-osflcyp055b11a1
tttttgttgtagaatcaggcacgctcagtgcaatcaatatacacttttcttagtgggacgcatgatatacattactcctagttgacagagatggccacaaaaaagaagaaaacaaaatcagatgaaacaaatccaatgcaacaataccctagctaattagaggagtattagactatgattacaagggcctcgaaccagaggcatcaacatctctactacgactatcccagctagattgggtgaaatcagttgtgaaatcttggctaccaaaagccatccgctgaaacagcctgatttctgccgtgtttgccacattgaacatttcgctcttaccaggctgaataccattgcttagatcgacgtcagctaagctatcaagaacacgcaccacctggctcatccggggtctcctagatgctgaatgtcgaatgcaagctgccgcagcttcgatcattcgaaacatttcagcttccatgaagttcttgtccagcctggatcaatcagcttccccacg

SEQ ID NO: 19608 - DNA, 370 bp, Oryza sativa
  Clone ID: uC-osflcyp055b12a1
tttttgttttttttttttttttgtttttttccataatccatgggttttattcctcctacttgttgttccagcacacgcatcacgtattcacgggtccccattctgcataatctattccatttgccaaattcatgcataaaattcttgcagggttttgttgctctagcatgataagtaaccccccaacccccatatcctttggctctcactatgttatgtacaaactacaaaactgcacatttcctaatattcttgaagactgctgaaaaggttttacaagggcaggtaggtcttgatcatcgttgagccggccggatcagagaggagatgcctgacaaggttcattcgcatttggttcggggcaattggg

SEQ ID NO: 19609 - DNA, 566 bp, Oryza sativa
  Clone ID: uC-osflcyp055c01a1
accaaaaccagtccccaattgaatcaggctcaacttgatgaatcatctaaggagtgatccaacaaaacaaacgtaaatggaaaagcagtgcttattacaggcctaaaataccactcacgctccaatgcaggcatccctctcccttcattattccaagctttgggcacaagaccttcatggcttcatgtatactgttccttggcatcaacgatgacaaaaactcaaaacgcgcggtttgaatcttacaggctctttgctgttgcgatgacgttctccgcggtgatgccatactcctggtagatctttccagcaggagcacttgcaccgaatttgtcgatgccaatagccttgcctttgcttccgacgtacttctgccatccaagagtagaccctgcttcaaggctgactcttgcagtaacagcctcagggagaacactctccttgtactcagccgactgttcatcgaaaagctcccagcaaacaaatgacacgacacggacagtcttcccctccttcctcaactcatcagcagccttggcgacaatctctagttcagagccagtgct

SEQ ID NO: 19610 - DNA, 407 bp, Oryza sativa
  Clone ID: uC-osflcyp055c02a1
ggggaaacagaagacggaaggagagctaccgccaacataacaaaaagagagggtaaccctagtgataaaggcaaagcctaaaccaccaaccatgctactgcgcaggcagctaaagggaaacattataaaacgctacgcagacaacaccaaaaaggctgcaagaaaactgcgacccggaatcaacaccgacggaagcgcaagaccctcagggggaaacctacagggaggtgaccgacgccagaaccctctgccgagggccgcccaaagaacgagggagggtttccacccaaagggcgagaccgaccataggggaacaccctcaaggtggaaacggtgcccacatacttctgacatgccgaacctggaacaccttaaagggctacccccgcaaacccaccaaaggggga

SEQ ID NO: 19611 - DNA, 153 bp, Oryza sativa
  Clone ID: uC-osflcyp055c03a1
tgtttgttaaaaacaaacactccctacctaccaccaggcattctttttattgtgggcgaatttatcaaacatgctttatatacacaccttgtgcgcatatagccggagcttacgttttcacaaaccactcacccaacgtataattgtatgtac

SEQ ID NO: 19612 - DNA, 344 bp, Oryza sativa
  Clone ID: uC-osflcyp055c04a1
ggtgggttttttttatttgcggctttcctttttttttttttgctctttctttttcttcgtgggggtttttgccggcctccaacccagagtgggggcacccacgccccctccacggccaaggcagggggcagcgcacccggaacaccccacaggagacccaagcaacgcgagccgggggggggggtagccggcggtggccggggaggggtgacgggggggggccccccgccccggggaaggccggggcggcccggggggcccttaggggggcgggcggatggcgctgaacaccgggggggaaccccggggggccccttcaccccagggggcagcacggcgccgcc

SEQ ID NO: 19613 - DNA, 460 bp, Oryza sativa
  Clone ID: uC-osflcyp055c06a1
tgtttgtgacttagaagatacgggtctgccacacaacaagggactatcaaaaggacccgacacttcaatatccacgctctccctggtaaaagatgcaccatgccaggagcatcggacatcttgacaagagttagagcatccactagaagcacctgatttactaatgatggccgagggccccgaagcgtgagcaggatatgggcagacctcccggagctcagccccaggccggacgcgctcggcaggcatatcaaagaaataagaaggcaacgccccacgcgataagggcgggcggtctcctggctggctgtccacacatggatcataaggcatggcaacgccaacgctggcccgaatcgtgccttcgacgctcggctgcacaaggtgggacactacgagactggatcttgatgggaaaacattatcatatgtaccatgcaatacataagtggatgcctcg

SEQ ID NO: 19614 - DNA, 420 bp, Oryza sativa
  Clone ID: uC-osflcyp055c07a1
aattagggggaagggggtgaattatttaaggagtgatccaacaaaacaaacgtaaatggaaaagcagtgcttattacaggcctaaaataccactcacgctccaatgcaggcatccctctgccttcattattccaagctttgggcacaagaccttcatggcttcatgtatactgttccttggcatcaacgatgacaaaaactcaaaacgcgcgggttgaatcttacaggctctttgctgttgcgatgacgttctccgcggtgatgccatactcctggtagatctttccagcaggagcacttgcaccgaatttgtcgatgccaatagccttgcctttgcttccgacgtacttttgccatccaagagtagaccctgcttcaggctgactcttgcagaacagcctcagggagaacactctcctt

SEQ ID NO: 19615 - DNA, 215 bp, Oryza sativa
  Clone ID: uC-osflcyp055c08a1
aaaaacaaacataattacgtaataccatccattttttttattgtcgacgaatttatcagatatgctctagatacatatcttgtgtgtatatagccggagctttgttttcacatatcctcacccaacgataattgtagtactcttacaataaaaccggtcggagagggagggaagagattattacatatgtgttaagagcagtggccattgagatg

SEQ ID NO: 19616 - DNA, 138 bp, Oryza sativa
  Clone ID: uC-osflcyp055c09a1
gggggagaggttataaataaccatcgcgggcgccccaaaaagcatatcaacagcagaagggacagcaaaaatgcgccctacaaaagcacacctactcggaactcaccatactcaactaacatcaggaatttcaggacc

SEQ ID NO: 19617 - DNA, 514 bp, Oryza sativa
  Clone ID: uC-osflcyp055c11a1
aaaattcactgggagtatatatttcacaaattgggaaagatgcatggacaccacacggcactatgcttgcttcccatgcttgcgtttggcctatcacgggagcaacttattccatataaaaatatatatcagtctgtacgatccccttagaaactaatgctgtacgatggcgacttattggggttgaacagcccaaagtgcttctcgatctcatccccaggcttgccgttctcgtcgaacatagcaaatatgtaagtctccaacgccctgcgcttcttgggcgtgccgcctcggacatggttgatcagcccctggttgtatgtctgcgcgttgttcacgctggccccaaccttccctccggcggacggccacccgctctcggacacgacgacgctgacgctcggtgtgccggccttctccagcgcggcgtagatggagtcgaccatcgcgtcgaagaggcacgtgtaggtcagccctgtttccgttgtccaccaccgtcgtagccccggctgga

SEQ ID NO: 19618 - DNA, 518 bp, Oryza sativa
  Clone ID: uC-osflcyp055c12a1
gacttagtagatacctcactgccatcatacaattgtctatcaaaatcaactgtcgattcaatatccacattcttccttggaaaagatccaccatgcaatgaactttggtcatcttgacaagagtttgtgtctccactagaagcatctgttttacttgtgaatgcagtggctccagaagcattagcaggatatgggcttacaactcgttgtctagcagctgtccggatgcgttttgtaggaatattaaagaaatctgaaggtctttttccatttgataaaaatggctggtttcctggcttgctctccacatatggatcataaggcatgtcaacaccagtactgtaatgccttgtgccattcatcctctgctgcataaggcgtttctttttgtgactcgattttgatggcaaaccatcatcatatgtaccatgcaatacataagtggatgcctcgacatcatcatcttcatatgcatgtcccctatgtgcatctgcaaccagagcctgttgtagatggct

SEQ ID NO: 19619 - DNA, 97 bp, Oryza sativa
  Clone ID: uC-osflcyp055d02a1
atgggtggtggggggtaataaatttataaataattataaaaaaaacaagcaaaataacctaaaaaaacaaggaaaaaaacatcaatataacaaaatt

SEQ ID NO: 19620 - DNA, 106 bp, Oryza sativa
  Clone ID: uC-osflcyp055d03a1
tatacaatagctatgacagtcacatgcactccacacgtaacgctagcatcctatctagttagcgccctccctttttttttttttttttatccaaacaccacatata

SEQ ID NO: 19621 - DNA, 88 bp, Oryza sativa
  Clone ID: uC-osflcyp055d04a1
gtgtggtttttttttctttttctccctttttcttttttttttttactatcttaaaacaactagccgacagggaaacaagaaaacaaag

SEQ ID NO: 19622 - DNA, 51 bp, Oryza sativa
  Clone ID: uC-osflcyp055d05a1
ttatgggtttttaaaaaaccacccttcaccaccctcaaacaaaataaacaa

SEQ ID NO: 19623 - DNA, 268 bp, Oryza sativa
  Clone ID: uC-osflcyp055d06a1
ttttgttttttttagggatcacgttttttattattgttttttcatgctgctctaccacagcttatcgtttcagacaccatcaaaccagacttagggattcacattacaggttaatagtacacaatgaaacgggacacgaccaaggaccagaccagacaaccatagctccattggggaagacaaataggcagacttgtgaaccctagagcagcagcagctccatggctgaggacttactgggcacccacggaggccgagcaccaggtgg

SEQ ID NO: 19624 - DNA, 506 bp, Oryza sativa
  Clone ID: uC-osflcyp055d07a1
aggacacaattttgcaaattgctataacgggggggtgggacaagcaaaatcatgtccaccaaatatataatatcccagtacacaattaggaaatagaatgaaaggaaaataacctattggttgttattacccaaggggacaaacctacactacacctgaaattgaacaagaaaaaacagccgttgtacagtagtacaagacgccaatggctctgagcatccaactccttttgtgttttaactgtttacatcaggaagtccctggggtcagtgacctattcggtgagggcttaagcccccccggtgaacggcgaaaccaggtagatctgcccttccttgggccccatcctgccggggaaatttctgtttgtcgtcgacacacacaccatagggttatttcatgcgagcatatgtattacgaggaccaccccaacaagcaccacaacttgggctagctggtgtatcacaaaccagcctcctaaatatttgtgagcaagttttgccacc

SEQ ID NO: 19625 - DNA, 516 bp, Oryza sativa
  Clone ID: uC-osflcyp055d08a1
gatccaaacagcacatatattattatagcagaggggtgtcacagttcaaagtgcttctaagcgaaacgagcagaataattcaatttccaaggctggtagatctggattacaatttggcgtgacacagctcagaagcacagccaaaagcagatgaaccatcatcggttcatttatcagttgccagaacacaccgcaggcagccaccttcatgcagcaggtcaaacgccttgttgatgtcagccaggttcatgctgtgagtaacgtactcgtccaccttgatttccttgttcaagtacttctcaacgagccatggaacttggcttcggctcttgaaaccgccgaaagcttgtcccttccagacacggccagtgacgagctggaatggtcgtgtagagatttcttgcccagaagcagcttcaccaactatgactgaggtttccctgcccttgtggcatcactccaatgcatacctcattaccagaaacattttcatgcattcaaagctgagtccccacc

SEQ ID NO: 19626 - DNA, 199 bp, Oryza sativa
  Clone ID: uC-osflcyp055d10a1
tttttgtttttttttttttttttctttttttttatttttttttttttttttatattaaaataaaaaaaaaaaaaaaaaaaaaaaaaaaaaaaacaaaaaaaaaaaaacaaaacaacaaacaaacaaaaacacaaaaaaaaaaaaaaacaaacaaaaaaaaaaaaaaaaaaaaaaaaacaacaaaaaaaaaacacaacaa

SEQ ID NO: 19627 - DNA, 239 bp, Oryza sativa
  Clone ID: uC-osflcyp055d11a1
ttttgtttttttaaacactgaagtgaaattcacttttcttccttattcattaaacaaaactatggaaggatgaatagaatagcaatccaatctcacgcttaaccttgctgccaagtgaaacaaaaaataatctagtgcactctttgatacatacagaagcatacaggtactcatttgcggatgaacaggagcatatgcagagcacaaatgcaggactttgtctctgaattgagagagag

SEQ ID NO: 19628 - DNA, 287 bp, Oryza sativa
  Clone ID: uC-osflcyp055d12a1
ataataaaaaataaaaaaaaaattaaaaaacaaactaaaaaaaaaaaaaaaaaaaaaaaaaaaaaaaaaaaaaaaaaaaaaaaaaaaaaaaaaaaaaaaaaaaaaaaaggaaaaagaaaagaaaaaaaaaaaaaaaaaaaagaaggagaaaaacgcaagggaaaagaaagagaacaaaagattggggaggggaatggggaaaagaaaaaaaaaggagagaaaacagttagatttttacaaataaaaaaaaaggagagaacccaaaaaaacaaaaccaaaaagggaaa

SEQ ID NO: 19629 - DNA, 558 bp, Oryza sativa
  Clone ID: uC-osflcyp055e01a1
gataaaattattattgtcttgaattatgtaaacgatgataacaaatccttttccagctacaaaagaaccagcataacaacaaagaattataaagttgcttaagtaatctctcccttcatctcaaaaagagctatatctagggggcctaggccacagcaacactttcacttaaagggtactttccatcctgcgacacacaagctcccaggatcaatctacttggccttgccgttctcgacagcagcagtcgaggggttcagctcatcccaggcctcgatccaggtgaccatggcatcggcaagcttgacgaagtaggggtcgatcttgccgagcttctccctgacctgctcggcgagggagaggtagcacttctggacggtgtcgcactccttggggatggtggcgttctggaagaaggggagatgtcctcctgccagaagatgcccttgtattcctttttcaagttcacgaaggggttgctagccttgctgtgccagatgtacggcagtccagtcttcactccaggctcaggtggtcacagatgaccttcatgcacca

SEQ ID NO: 19630 - DNA, 527 bp, Oryza sativa
  Clone ID: uC-osflcyp055e02a1
actgatgttatctagtatctggtttatttgtagagaaattccacgaggcactgtatatctacagatgttctgttccataagaaattcatacatgaaagaatatatgtggtaatcgcttcctaacaaaaattgggatatatcagctacgagaacgcatatttccattacatagctgcaataaaaacggggacgcatatttccattacatagctcccataaaaattacagagcatgcatgtaaatataccaaaagggaagagcaaactacgatcattagatctgatgctttatttgagctaaatgatcatattaacatagagaaagcctcttcatctgtaccaactgaaactgaaaatgataaagcataggaatcaaagcctcgactccaaaaaggcggccacaggtagcacatgatttgttgctaccgggtatccacgtgacgtcgtgacctgcgatgagcatcgcgctacacttggtacgccattccaacttctatcagactaatatgtggaatgtgcagtgtgacc

SEQ ID NO: 19631 - DNA, 218 bp, Oryza sativa
  Clone ID: uC-osflcyp055e06a1
aaaacaaaaaaagggcattcccaggggggggggacccttgttaacccaaggggaaacttaagggtacagagaccccaatagttaaaattaggccaacttaaacgcaaaggggtatctgggggattctcttccccctggaaaaaaaagcattgggaagctttcaccaacagggaaaataaacctggaataaggttaaatttaatggattggaaaggctt

SEQ ID NO: 19632 - DNA, 495 bp, Oryza sativa
  Clone ID: uC-osflcyp055e07a1
tttgattaaattaatattgtctcgaattatgtaaacgaggataacaaagcgttttccagctacaaaagaaccagcataacaacaaaaaattataaaggtgcttaagtaatctgtcccttcatttcaaaaagagctatatctagggggcctaggccacagcaacactttaacttaaagggtactttccatcctgcgacacacaagcttccaggatcaatctacttggccttgccgttctcgacagcagcagtcgagggggtcagctcatcccaggcctcgatccaggtgaccatggcatcggcaagcttgacgaaataggggtcgatcttgccgagcttcttcctgacctgctcggcgagggagaggtagcacttctggacggtgtcgcactccttggggatggtggcgttctggaagaaggggaagatgtccttctgccaaaagagcccttgctttccttcttaaggtcacgaaagggttgcttgccttgctgtg

SEQ ID NO: 19633 - DNA, 459 bp, Oryza sativa
  Clone ID: uC-osflcyp055e08a1
aagcaaattgatactcatacattaaaagatgaggggtataacatttttatacatgggaataatggtacctcaatctcggctgatagcgaaatcatgccaaataaaaaaaagtgtgtcatggaaataacattggtatgattcctgctaaaagtaatagcatacaaattatgaattctctgataacctgcttggagaattatccatattcaaaccgatacacatgtttcgcatgtcttaccatgtcatgtcaggaatacgctgatcaaaaatgcgtattcagcaactaccccaccttcgttcagtgaggcagacttggttcttatcaaataaccacactggtcatttataatgaccctgtctttgttccgcatgaaggcttcaaaaatttcaaagtcagaaaccgcattttcccgaatgcatgtgccatttctgactagatagcaaagtgatgctggtgga

SEQ ID NO: 19634 - DNA, 466 bp, Oryza sativa
  Clone ID: uC-osflcyp055e09a1
gggcgcatgctttttgatgcgcccgaagcaattttattcaacttggccagaaccaattttttaccgaggaccacttttgaatgggtagaaattacccaggggccccgggctgctcgtcccgtgtttttgaacgggacacaaccgtggcggaacattaactcatgacccctaagtctcactaccatccatctcaccggttttcaaaaccttggcaaaatgtggcgccggggggtgaaaacatgttagccggagggccccggcccctccatggatccgggcacaaggatccatgcgcccttctactgacccgattagagccgatccttgagaggcccgggtggagccaaccatgccttgtccattgccgggacggagggtaccacgaggtccttaaagaagaggaccacctctagggctggcctgccgtttacatcgggacccctcataacctgggggcgagtaatgc

SEQ ID NO: 19635 - DNA, 127 bp, Oryza sativa
  Clone ID: uC-osflcyp055e10a1
ggcagaggtctttctcaattaaaacaaaattttcatgatgcgtctgtttttttcaaaattgaaaacacatcatcatcgttttcattatctctggctaatgcttccccttcttcttgggatgtgggat

SEQ ID NO: 19636 - DNA, 433 bp, Oryza sativa
  Clone ID: uC-osflcyp055e12a1
tttttttttttttttttttttttttttttttttttttttttttttttttttttttttttttttttttttttaaaaaaaagaaaggggattcccatgggggggggacacttggtaaccggaggggaaacttaagggtacagggaccacaccaggtaaatctaggccaacttaaacgaaaaggggtatctgggggtttttctcttccctggaaaaaaaagcatggggaagctttcaccaacagggcatttaaaccgggaattaggttaaatttatgggatgggaagggcttttacgggcggatattcgctaaggggggcgaatccggtgggggaaaaggggccccttttttatcccaaatggggggccccgcccttattttttaaaaaagccctaccccaactatccaaaaggggcccatagaaggggatttggg

SEQ ID NO: 19637 - DNA, 364 bp, Oryza sativa
  Clone ID: uC-osflcyp055f02a1
cactgcatcttttttttttgctttccttttctttctctctttctctttcttgaaggttgcaatgaggagatgagacgattgcatgtcttggagaacccaaaaagaacaaaagaattgctcatgcacacatgatgatgatctcttcttgttgttgttcagtttttaaccccttgttgctcctaggcctcttgcttcagaccccttcatgatcctcaacctcttgcacgtactaatgaacatctcgaatgggacgtcgccgacgagcatgaggtcgccgtccttgtcctcgtaggtgacggccaagtccgacggcttgacggcggcgcctgcggcggccccgcccgagaagcaaaggaacatggcc

SEQ ID NO: 19638 - DNA, 202 bp, Oryza sativa
  Clone ID: uC-osflcyp055f03a1
aggctgaatgctggtagcagctcgcctgggggatggagatagcttttccattggctgctgtaagtgtaacattcttacacaataaggatgtgaaaacacaaaacatacatgcaaacctgcaaacaattgctttccaacctgcaagaaattgaaggaatgcctattacgcttttttgacaaaccaaaacaaacaattttcaca

SEQ ID NO: 19639 - DNA, 486 bp, Oryza sativa
  Clone ID: uC-osflcyp055f06a1
ggaaaatgtgcaggtccacatgaacagttcacttctttagcaattacagagagagttcatgaggtttaacatctgtaaacttttgatccttgtagccagctgcataatctgccctactgtttattggaaagaattaggattgaccccctacaaaattcttcagcagcgacaacagtacatgccgattgccgcaccaccatgcgcatctacagttagaattctgtcacaatttctctgcaaggttacactacatgagatgggcacggccggccaggcctttagtctgaaactctcttctgttacttctcttcgtctgattgtgaaggcccgttgatggcatcagcaaagtactcaactatgtcattctggtctggggaatcaagtaaaatgtcggagtctgaggccaggaaaggagtacctgcgtagttctcaagtgcttccaagtctcccaaacttgttaaatctgctgttaggtcagaaaggctg

SEQ ID NO: 19640 - DNA, 490 bp, Oryza sativa
  unsure (1)..(490): unsure at all n locations
  Clone ID: uC-osflcyp055f07a1
accaaaacaatagagcccttcaaaatttgacttggggttttctgccctacaaaagacttcatcagcttacttttagctcattattaactacataataaactcaaatcaaacataaccttgggaaaaacgtcagctaatatagtagggtaactcatcgtgtaaaataaaaacgaggggcttatccttttggtataacatgtagccgccatgctgtttacacgacccaaattacagccatttacctccggattgacctcaagaaaacaaaccttccgcagcagagacggaactgttatccagaacctccatggggctcaactctcaccgaagaaatttataatgatacatctggcaattaggccaaacaaggttggcaccccagacttcaaaggtgcaacagcttaatccagcataccggaaagtcggcccaacaataaccatgaaaattgttgagcaccaacaattaccaacattagacangtaattcctg

SEQ ID NO: 19641 - DNA, 562 bp, Oryza sativa
  Clone ID: uC-osflcyp055f08a1
ggctgaatgctggtagcagctcgcctctcatcgagatagctcttccattggctgctgtaagtgtaacattcttacacaataaggatgtgaaatcacaaacatacatgcaacctgcaaacattgcttccaactgcaagaattgaaggatgctatacgctttcgcaaccaaaaaaacaattcacatcctactgccaaaagaactgttgacccattttccttttttctatttcctcatattccattttacatacatataagcaataacaatggagagctatagctggatctatatcaaaccatgacgacaaaacacatgcaaaaaaggggtgaacaaaaaggccaagagctggtggcaaaaaggaggcagaagcaggaggcaggggagagaagggcagcaacagcagcgcaagggagagggcagcaaggcgtcaaaattagagtgctctacctacaaccatgccaacccttgcgagtgtgttcttccatgaccattctctaaagaaagagccatggaaaacattatctgttcttcgatgctctccgggcgaagtggcttgccccc

SEQ ID NO: 19642 - DNA, 84 bp, Oryza sativa
  Clone ID: uC-osflcyp055f11a1
tttttgttattttttcttttttttttttacattttacttttttattaaaaacagagagaggggaggaggttcaacaacaataaa

SEQ ID NO: 19643 - DNA, 503 bp, Oryza sativa
  unsure (1)..(503): unsure at all n locations
  Clone ID: uC-osflcyp055f12a1
gagatcggatcaactcctgaaatttctaatatattgaagggatgatatttgaacattacaagctcttggcacactaaccaccacacacttcccacaatggcatgttactttctgaatcacaaaagaaagcaacagaaacagccatacatagcttcaggtagctttagcctaagctcacaatctcacattactcaacctaatagaaacttcaagcttactaccaaaactagtggcctcctcatacttacagaagaggtttatatatctttcgaccacaatcactaagagattcagaacaacatcagactgacaatgctaacaatgccaagcagcagcccaatacttgccttcaacccagcagctccattcaagccccagacgcgcacatcatcgatcactggcccacagagcgagctgtggtcgtcgcttctcgtgttgtaatacacactgtagaacgctacccgcgtnctctcagctcgtgctgtgaatgtcacattcgcagc

SEQ ID NO: 19644 - DNA, 496 bp, Oryza sativa
  Clone ID: uC-osflcyp055g01a1
gcgcaagaaaaatcagccacagtacatcaccgttattggatcacaaaaaagcaaacaaaacaagcagatgtgatgcgaccgaggcagctttattcaacttgtccagaaccacttttctaccgactaccacttttgcatgggtaaaattaaccaggtaccacgggttgattgtacagtatttctcaatgggacacagacatgccgaaacatcaactatttccccctcactctcactactctccatctcaccgtctttcagaaccttggcaaaatctggcgttggagctgtcaaacatgttagccgtcaggtcccgtctcctccatgtctacagccacaagcatccatgccctctcctactcacttgtttagagctcatccttgagaggctcggctggcgccgactctgccttctccttcgcctgaccggcggtttccttgttcttcttatgaagtcgacgatctcgtcggctgtcctgccgctttcgtagggaacca

SEQ ID NO: 19645 - DNA, 437 bp, Oryza sativa
  Clone ID: uC-osflcyp055g02a1
aaaaagccacggctattggaagcccagcaagaactttatataaaggggaccactaataacaatgatgataaaaccacatgtggaaagggggaccatgatccacaggatgggacaaggcccgtaggtccggccattattgggggattacacaagagcacccaaacgcactcacccaaaagacgaagaaaaaggggctaatctaaatggcaaatgagcaatgtagtagtaggggtagcatgcaaccaaatcgaaatggaaggagaattttttttggcgggaatttcttttttttctctttccttttttttttacttttcccaacacaaatgcaattcaccagatcgtccgatcaatggagcaaccggagcgacacgggaagctggggaggaccatccccaggatgtcgtggcgtcaaaaagccctttcagggcttccaa

SEQ ID NO: 19646 - DNA, 516 bp, Oryza sativa
  Clone ID: uC-osflcyp055g04a1
gctattctagtctgggcggcctttcttttttttttttttttttttttgttttttttttttttttttgtttcaaatctttattttatacccttgtggaccgcgcggtggtatacagcgcttacatcatggtattactatgacggcaaccgagcgcccaactaactgcgggagtaattctggttaattttttctgcgaaaggaagataaaattgagccatacagcaagattggaatgatgttttccattgttacatccacacaaagacaacaagtcgatatgagtcagaactataccctgtatacatatgccccctttaccaaaaaggttatgtaccgaaactttgctctaaaaatgaaggcaacatttacccttaagggggcattttacacccaacttaaggaaatttaatagcacgcaccattgccccaaagcatggtggaaattcatgaaaaatttgggattatgaacaatgaaatcaagggcacttttgcatccaaacagcaccggttgaaagg

SEQ ID NO: 19647 - DNA, 522 bp, Oryza sativa
  Clone ID: uC-osflcyp055g06a1
aacacaatatacacaagctgacaagcatttattaagaagcacctgtttaacatagttaatcaacatgcataatagcccttctccacacccatcaccatcctgatcttgtctacctgaacataacaagtttacatggcaacattgcacaaagctgtaggcatttctcacatgagcatatatcccttcctgtactcactccataataagcaacacaagtagcaagcattacattatttttcttctctgctgctctatggtcctactcaaaacttgcaggaagtgcccagccgctgcttcatccgctgccctgcagccgccgcacgctcctgcagagcttctttcagcagctcctggaacttctcaaggaatatattccactcttctgcattcatgtccgacagcctgacgaagtatacacttgatggaagctgttcgtctgcactcctgttcagagcatgcacactgccgttagaaccgctggatttatcagcactggggaacttcaacccttcagaatggaca

SEQ ID NO: 19648 - DNA, 410 bp, Oryza sativa
  Clone ID: uC-osflcyp055g07a1
gcgtatttagtttggcggccttttttttttttttttgggcaagaaaaattagtcacagtacatcaccgttattggatcacaaaaaagcaaacaaaacaagcagatgtgatgcgaccgaggcagctttattcaacttgtccagaaccacttttttaccgactaccacttttgcatgggtaaaattaaccaggtaccacgggttgattgtacaggatttcttaatgggacacagacatgccgaaacatcaactattttcccctaactgtcactactcttcatgttcaccgtctttcagaaccttggcaaaatctggcgttggagctgtcaaacatgttagccgtcaggtcccgtctttcccatgtttacagccacaagcatccatgccctctcctacttacttgtttagagc

SEQ ID NO: 19649 - DNA, 390 bp, Oryza sativa
  Clone ID: uC-osflcyp055g09a1
ttttttttacttttttttttttttttttttttttttttttttttttttttttttttattttttttttttttttttttttttttttatttaattttttttttttttaaaaaaaataaaaacggagggtcaagaaggagccaaaatacatctttgaaagaaaaattaaatatataacgagagctggggccccctaagtgaaaaaaaggtaacaccaaagcctcaaaaaacctttgggcaagggggaaaaaaaactcccccaaaaaaaaaacccccaaggaaccgggaaggaaacttttaaaaaaccgccgccaaaaaaaaacctcccatgtttaaaaataaggggaacccttcagggaataaaaaaaaaagaaggtgggggttgttttcttc

SEQ ID NO: 19650 - DNA, 520 bp, Oryza sativa
  Clone ID: uC-osflcyp055g10a1
ctcgaaggaaatcgggatatttcatatttctggtgaattacatcatatccacgcttacatcagctattactatcacggaacccagcgccgcactaactgcggcagtaattctggttaattttttctgcgaaaggaagataaaattgagccatacagcaagattggtatgatgttttccattgttacatccacacaaagacaagaagtcgatatgagtcagaactataccctgtatacatatgcccccctaccaaaatcttatgtaccgaaactttgctctaaaaatgaagcaacatctaccctaagggggcattcacacccaacttaaggaaattcaatagcacgcaccattgccccaaagcatggtggaaaatcatgaaaaatttgtcatcatgaacaatgaaatcaagtgcacttctgcatccaaacagcaccggtagaaaggaatagaggccacggcacccaaatggccaaaacttgttgctgcttttccctgttcgagtttaacttctccatacta

SEQ ID NO: 19651 - DNA, 536 bp, Oryza sativa
  Clone ID: uC-osflcyp055g11a1
aacacaatatacacaagctgacaagcatttattaagaagcacctgtttaacatagttaatcaacatgcataatagcccttctccacacccatcaccatcctgatcttgtctacctgaacataacaagtttacatggcaacattgcacaaagctgtaggcatttctcacatgagcatatatcccttcctgtactcactccataataagcaacacaagtagcaagcattacattatttttcttctctgctgctctatggtcctactcaaaacttgcaggaagtgcccagccgctgcttcatccgctgccctgcagccgccgcacgctcctgcagagcttctttcagcagctcctggaacttctcaaggaatatattccactcttctgcattcatgtccgacagcctgacgaagtatacacttgatggaagctgttcgtctgcactcctgttcagagcatgcacactgccgttagaaccgctggatttatcagcactggggaacttcaaccctccagaaatggacacgctcgatgaacg

SEQ ID NO: 19652 - DNA, 468 bp, Oryza sativa
  Clone ID: uC-osflcyp055g12a1
ataaattatttgatatctcatatctggattatgaaaatacaagtggtttgcatgctttacatgcacgtactagctagtactacaacacaaaacacaagtccatctcttacgaattaactcgatcatcgtctcggatttgtccaccgcattattcctcgtatcattcgtatacattcattcattcagactataaacacaaattataactagtactatctaggaatatataatacatgctagttttttaatgacactgactagctagcttgccggctggttcaaaccttgcaaacggtacgcgccattatttgaactcaccgcatgctcgtactactgtccacctccgatggcaccttcagagcctacgccaaatccttcgccgccaccggtgccgcctccgcctgcaccatggccgtcgccgacgccttcaccgaaaccacctcctgctccgccttcgagaccaccgtc

SEQ ID NO: 19653 - DNA, 493 bp, Oryza sativa
  Clone ID: uC-osflcyp055h02a1
aacaagatataatatataaatatatagtcaatgcactatttaatttcggattcaacaaatgaattatgtacagaaaatcaatatggtagctagttatcaccaacatagcgcagcacagcaaagaccgaaagaaagagcagtcaacaacatagattaaaacataatggccatggattcacgatgttcatagccatatacaggtagcaacgacagaaaactagaacggaaaaaaaaaagcagttcttgagtctcatagatggctgccatacatagacagcggatagggaacaggtccaatcaccaaagagtttcaggatgcagccttttgcatgtaagctaaacataacgatatgctacccccaaggtgccatgcaggtgcctcccaatctccaatagtatttattccttttttttccctgcgtacatgctgcgactagaagacttcgaattcctcaatagaaatcgctaacgggcatgtcatcaaagctccaga

SEQ ID NO: 19654 - DNA, 493 bp, Oryza sativa
  Clone ID: uC-osflcyp055h04a1
aacgttccaaaatcaaaactgatgttcgtgagagcgaggccccaaaacctcaaatacatgtaagaacataacaattgcagtgccctaggccatggcatgttcagcaaacacttcagaagggaaactgcaacatgtagtagcataaaagtcggatcacatagttactcggacagcttgcggtcgcacatcaaatttcccatagaagacaaacccaaatctcgtgtaccacaaaacacatgtattcctgactcgaaaatcgattgtgcaacggtaccctgcccattccgcccttcatctccaccgatccctcgccaggaagatcagcaagttgggagcaacgacgaagcataccatcacggagttagcaaagagcccgatgtcagcaagcacggagccaaccttctcctgtatagaccccttctcctccggcgcgagctcttgcagcagcaaaccgacgactgcgaagcagacagagaagagcgcgaacagaacg

SEQ ID NO: 19655 - DNA, 478 bp, Oryza sativa
  Clone ID: uC-osflcyp055h05a1
caaggaaaacatctaatggaatcataataattaaaggtctatgtgacagcaacccacagcatgtaaacagcagatctagcaaccaatacagttcggaattacagctttagttgggatgaccagagtgtaaattaggaggagctgctacttttggagtatttagaccctggatgtccccaacttgcgctcaaagaggcggcgcaatagatagacttgaatgacgctagctgcaatcagcgctgctgactccaatagagccttgtggacagccctcctgctcatgttttcgttcaatatagcttgtcggtcagtttgggcctctagccagtgctgctcgaactgaatgttgtaaagcgcttcatctaattttgctatttgttcaaacaaaggagcaaaatgttcatctttcgcatgctgatcaaagtacgaaaaatggccaacatgcacatcaaaatctacagtttcatgggattgggga

SEQ ID NO: 19656 - DNA, 430 bp, Oryza sativa
  Clone ID: uC-osflcyp055h06a1
cgggaccgaaagtggatctactttttcttcaagaattggatgatagtacaactttgcacagagtttacaaaaccaaacctggttgtttcaatacaaacaggtagggcaaattgtggcaacacaacttttaaaataaaagagccttctatgaatatgatatctctacacttgcagtgctgcaaaaaaatgtggaagactgaagagagttgcaggcccagcaattatggatatgggctgaaccgtctttgaattttgagatcagtaaactgtaaacatgcaactgaactgcagttgttccagtactcaggcactgcatagtggctcagctagtggtgttcacttggaagccatgcatcaaccataaagaatatatatatctatgtcagaaaaggagcttatataggatcaggaggactattatgatgaagat

SEQ ID NO: 19657 - DNA, 487 bp, Oryza sativa
  Clone ID: uC-osflcyp055h07a1
gtattattccagtctctgacttgatgaattttgacttacacttcaaccactgggctaattaattaattaattaagctagcaaccctgaagaagaccttataatgggagtaataattaaccaatgaagaaacagaaacaggaaagctagccccctgtataccgaatcaatcaccatgtactatgtacatgccactatacacacacactgacatgccacccgatgcaattgcaccatctttctgctgctgcctcgtcgtcgttcagtccaggccagggtccccccaaccacggtctcatcgccgcctttctcgagtcctcatctcctctgtctaatccaatccaatccacttaagacacttcttttaattatctttgagtcaactccggcggctcgcctgagtcaaagttcaccggccatgaagctagctagcctgcacggtgttcagtgacaccattgctgccaattgcgtgtttttttttttttttg

SEQ ID NO: 19658 - DNA, 462 bp, Oryza sativa
  Clone ID: uC-osflcyp055h08a1
aatcatcatatacccataaatttctcatgtaacagtcatacactcgtacatggttggcccggcggaaaacaaatcatacatggcgctgttgtcactgacagacaggcttgaggagctcaagaccagcctcctcacaacaacagagcaaccatcacagaataacaccgggccattttcaactgggtgtgtataatcattactatatgcattaacaaggcggcagtagcagcatcatgttatatttggtattcctttgcttcctcaaggttgggtggggctgggcgacacacagcaaaaccacttctttgatgcggagtttgtcctgcggtggtaggggttgatcttctctgttgccttattgttattggagtctttcatgtcagagtttgacctggtgctggcgtccacgttgacggggcccttcttctcatccctggctttgctgaagatcaccgtgaaacc

SEQ ID NO: 19659 - DNA, 490 bp, Oryza sativa
  Clone ID: uC-osflcyp055h10a1
cggagaattactcatatactctgacgaatgattaaatgtttagcatatctttgatgggcgttaccaacataacacgctcattgcctcatcgatagaaaaaaaccgccttgataattatagaacaacttggcccctgaacatgcacgcttgacagtttcagttcatagcgaatttgtacagaagctcatcccggacgtgctggtcagctccgtgcacggcgacggctgcacgtcgagcgccgccccgctgacggcctcgcacttccacggccggaccgccgcgccgccgttgagcttcacgttggacaggcagatcctggagaaggccgacgtcgcgatccccttgaatgaccctgcctccctgatgttctggccctggacgttcttgatcgtcaggccgtccacgacggggagcgcgttccggttcgagcggtacgcggggtgcccgccgacatagccggcgatgctcaggcacgagcggacggtgttca

SEQ ID NO: 19660 - DNA, 546 bp, Oryza sativa
  Clone ID: uC-osflcyp055h11a1
gtacttgcattgcccttataatcaaatgtatggataacaaaagacagttacttgtaaatgccacctgccattttatacactgtggtacgcgcactaatgaagtgtatagtatacttagctctacattccagatatatacgatatgttgatcacttgcagctttgttgctgcctctctcatgttcattcgttcactgggattctggcgtgtgcaggaaagtgccactccaagcatgtccaacagcaactggtatgctgccttctcttcgtccaacatcgctggagcaagctccttgagatcttttcggaggtaagtatcaatgatatgatctatcacatctggatagttcctctcgacgaaactgacgatgctaagtccattgcagaacagaggatcagtaggccttttccctgttagcaactccaatagtactacgccaaagctgtatacatctccagaggttgagaggaatcctcctccagcatattctggggcaatatacccctatagttacttttaaaaccgatcgaacagattgagctcgaa

SEQ ID NO: 19661 - DNA, 402 bp, Oryza sativa
  Clone ID: uC-osflcyp055h12a1
tcgcgatctagaacctcgcggtgagtttttggtagtttagtttgatacaccacttcgtttgataccctcggcgaccgcgcggcggccagcgggcgcatccatggcggcggcgggatccataggcgtgtacaaggcggtgttcgcggcgctgggcgctctcatgctgggcaccctggtgtacacctgcgtcaccgacggctcgccgtttcgcctcgagctgctcaccccgtggttggtggcaacactgattgatttttatgtgaatgtgactgcgatttcgacttgggttatctacaaggaagtcaattggattagttctttcttttgggtagttctgctgtactgttgtggcagtaacgctacatgcgcttatgttgctgtgaagctttttgaatctaaatc

SEQ ID NO: 19662 - DNA, 467 bp, Oryza sativa
  Clone ID: uC-osflcyp057a03a1
ggcgcgggcggcgtgatctgcgacgcgggcgccggatatcgtgtgtcgaaccgggccgagtcggcactcaggatcttattctttccgacgccgaaacacgggaagcagctgattttggagaccccttcctgactccccgtggcggtcgccaccaccacccctgtacgacgccgccggcgacggcggcagccaaggacgaaaccgaaggacgcacgggccgagcacgaaggagcagccgcgccgcgccgatcacacaaccatcgagcgcgagcccggcagactcaccacctccgccgaggcgcgcccacctagtggcacgccatacgagcacacacgcacgctgtgggactggccccccacgcgcgcacccgatccgtccgatcgtccgcccgtaggaagagagaagggggcgatcgatcgatcgatcgcgccggtgcgcgcgcgcacatggagggggggaaggagag

SEQ ID NO: 19663 - DNA, 449 bp, Oryza sativa
  Clone ID: uC-osflcyp057a04a1
tgtggatttttttttaccaggggggatccactgctggctgcatccccattcaaccgaaccatattgagctattgaaaggaccaataaccgtagacgcactctgtgagaggaacataaggccaaaccttccatcggaagccccaagcgccagaaagtgatagttcctagaaaaagaccccaccattggacacccctatttatgcccgaagacgggtgaggcttaatacaacacacccgcaattggtcgtgagttgtgcctagataaaaaggggggaaaaaaacactctactacggctggattggataaaagatgttgaactccttcaagaaaccaaaagttcggggcgggcttgaatgtccggctgatggaacccaaaaagttagtttgtatcttcacagagtgttgataaaggagtaacaccaacgtttgtctctgaacttctgtttct

SEQ ID NO: 19664 - DNA, 282 bp, Oryza sativa
  Clone ID: uC-osflcyp057a06a1
tgttggggaatttaattttgtcggattttttttttttagatatcgacgggcgggagtacacatctcgcgaaattaaaccactctattaaagcatagcccaaccatatataatggcgcataaagctgaaacataagctaacaaaattatgtcttagtccaaggatgagacgcgatacacaccaatccaccagacaggatgaataacggcgtagaacaagtcctaaagattggataaacaggccttccttcaccctaatcccaacaccgcaccgcaaatatact

SEQ ID NO: 19665 - DNA, 372 bp, Oryza sativa
  Clone ID: uC-osflcyp057a07a1
tttttgttttaaggatggaattgggtagcaatactttcaccccaaaatacagtttagcgacaatatcttagaaaagccgcttgctttgccgccatggctggcaagctgagcagagcagctaacacaaagaacacgagatcactataaaccaaacggcaacgaacgaagaaaatacagggtcttttttgtctgaagatacacgaagcggttcgttttcttttatttttagtctcctctcctcctcgatgatgggtgtatggcaatggcaatggcgatgggatcttggcttagttgatgggaaggggctcgccgttccactccttgaggcagtcgagcatgggggcgatgagcttgccctggctgatgccgagg

SEQ ID NO: 19666 - DNA, 417 bp, Oryza sativa
  Clone ID: uC-osflcyp057a08a1
ggagaaaggcaaggttcgaaaaaaattgcttcacttgtccaaagcccaaataaaaataccttggtacctgacacggcgagagccatgccccccacttatttggacacccagagggcaaggctgccgagaaaatcaagccacacaagctgaactcacggccccacctggaagcctttcactggtcgaggccggagactcttgggaaaaacaggaacaccacgcatgccaaagaagacaaattattccccacccaaatcgcccaccccgcggccggctaactacggggagggcgtcgcccccgccggggactttgggatgaggtcccccagcccgagaggtggggctttttttccccgaggactccctggcgcttttggggccttctttttttcgggtgcttgtgaagggaaacccccg

SEQ ID NO: 19667 - DNA, 503 bp, Oryza sativa
  unsure (1)..(503): unsure at all n locations
  Clone ID: uC-osflcyp057a09a1
acaacactataacatgggattatattaggagagagacaaatacaatacgtttcaccggagaccagccaagttgagaaagcagtggcaggctgtatcaggagacgccatagccatacagtatttttcttggagcatcattattgctacaaatcatcatgtgatcgcagcaaacaagtacaataccactgaccttacatgcaaggcaagatgcaattgtttctactcaccttcacgtcatagcagaaagcaccaaacaagatcactgaacactctactgtaaccagcagatgtagccgacaggcgaaagagagtgattttcttcaatgggatggcaaactaattcgtgatcctttgccatttcatatcgaccgaataaatgccggtaggtcattcgcgtacgggctccagtgtttgatatgaaactgaacagaggtcatgccactgctaacaaagaaatcttgcacagtgatgaccctgggatcattctncgagcatatcacttt

SEQ ID NO: 19668 - DNA, 392 bp, Oryza sativa
  Clone ID: uC-osflcyp057a10a1
tgtttgttttttttttttttttttttttttttttttttttttttttttttttaaccatagttataatatccttttattaacaattaaacggggaactgaaagcttaacaacgcttaaacacaaaatattctttgattaacccacgctaaatttacctttataccccccacctaaacgctacagtaattaccgacatttatgcacaccttgccgtcgccggagccggagaagacgagacagtttgacctcgacgcggcagtagggggcggtctggaacttggggccattggcgccggggtagccgttgccgccggaggcgattaaaaaggccgggcaggtgaccaaaaggtggtagtggccggagatccaggtgccgacctttcaccggacgc

SEQ ID NO: 19669 - DNA, 420 bp, Oryza sativa
  Clone ID: uC-osflcyp057a11a1
tttttgtttttttttttttttttttttttttttttttttttttttccagaggggatatgaaactttggaagtttttttttccccttaaagcatttatctcatgattttgttcccagcaggttttaaaaaccctatccaaatcaatgatgtagttccaggggaacttacatatagctggcaaagaagtaaaaaaagtcggggttaaaaagaaccaaaagaaggtccaaattaagttcccactatcccctacttcttttcttctctaacacctaaaaagctatatacaccttacaaagttgcaagttacacatctgagagagcattactttaacatacaccttttttaaaatgggctccctagttcaattcactgcatgcagctaactacctaatttttaaccaggttaaattttgcaagca

SEQ ID NO: 19670 - DNA, 312 bp, Oryza sativa
  Clone ID: uC-osflcyp057a12a1
gttggggaatataagtgtaacagaggcacaattataagatatggatggtagagagtaccattcgacgaaattaaaccactctattaatactagccaaaccatatataatgtagcataaagctgaaacataagctaacaaaattatgtctcagcctaaggatgagacgcgatacacaccaatccaccagacagtatgaatcccggcgtagaacaagtcctaaagattggataaacaggccttccttaaccctaataccaacaccgaactgcaattatactgaagtatctgaaaccggagaagctcttcagggg

SEQ ID NO: 19671 - DNA, 290 bp, Oryza sativa
  Clone ID: uC-osflcyp057b02a1
tttttggtaaaccattggcaaacggatgcacatttttcccatggttaggttcttattttttggcccaaggtccggaccttaaaattacagctgcagcaatccactagaaccttatattaaccataacccacaaaggaattttaaggccccctgagtcaaatcaagcagctccactttatattcttactggtggcaacattggaactgccccctgacaccccttcaggtggatcactgggattgggtggggctgggagcaactgatagcaagcaatgagtgagctagcaaa

SEQ ID NO: 19672 - DNA, 401 bp, Oryza sativa
  Clone ID: uC-osflcyp057b03a1
gggggggaaaaaaacttttttttatttaaaattaaaagggggacccaagaacggcccccccgaaccgaaaaatacatttgcccaggggggaaggcccaaaggggggctaaaaaattaaaaaagaaggggggaaactttagaaaaaccccccgaaaaaaaaaaatgggggcccctcccccctgggggaaaaaaacgcttaaaaaattgggatccttgggacggaaaaacccaccggcttttaaaggggggaaaaaaggggggaaaaattggggcgcgggggaaaacgggaaaaaacccccgggaaaaggcaggcccccgcaaaaaaaaacacggggtacaagacccccattaaaggggggggatgctcccccaggggggggcccacttgggggccccccccc

SEQ ID NO: 19673 - DNA, 353 bp, Oryza sativa
  Clone ID: uC-osflcyp057b04a1
atcaggggcaaactcatatttcatctctaatcattaaaagaaaatcgacctgttccgtataagtttctgacattttgcatgcaaaaagctataggaattttactctgaactctgaaaataccacgccatgaagctaaacccaagcaaatcaaaccgcctgagcccatcgaattgcattaaaatccacccccttgggtgtcaacacaaattgcacatgccctcttagcatgggggcctctcagccgggctcccttggggggtccgccgcgtcagaggcggggatgcaaatgtcggcctttttcaacgctagcgcgggccatgttggcggcccccctcgcggggtcccgcccgtt

SEQ ID NO: 19674 - DNA, 166 bp, Oryza sativa
  Clone ID: uC-osflcyp057b05a1
ctagctgagcggccttcctttttttttttggggaatcatttatacagtggttcactcacgtggtgggacacatgacgcttcagagtgtgccccaacaaccaaaattactttgcaccagcttgctcatctacaaagatcttgcacgctccgttttttgctacataca

SEQ ID NO: 19675 - DNA, 483 bp, Oryza sativa
  Clone ID: uC-osflcyp057b06a1
ttttgtttttatactaaaacaaccatttcattcattttactgattatgttacaacctacgaattcttacaacatttcaatactagcaactatacaactcttcaatgcaaaggaatctcgtccaactctccaatccgaagttccaagcgtgtcaaagcttcaccgtctcagcagagcatcctacaagggtttccagaacggaaaaggaggacatgaaagtatgaaacaacacacacgctattcttgtgagttgggcctatttaaaaaaggaaaaaaaaacacctatacggttggagggtccacggatgttgaactctttgaagaaacccaagtacgtggctttcttgtgtgtccggctgatggaacccaaaaagttagtttgtatcttcacagagtgttgataaaggagtaacaccaacgtttgactttgatcttttgctttattgattcagtcttcgcgcttactaatagcactccatttaca

SEQ ID NO: 19676 - DNA, 428 bp, Oryza sativa
  Clone ID: uC-osflcyp057b07a1
caagccaaaacactgcatagagtacttatttgatgaacatacaaatacaccaggtttccatccattgcagagaaaagaaaaggtaattaaacacatcaacacaacgcattgcagatttacagcactcaaataattaattaagtccatagatacattttttattcagacaaagcagatggacaacgatgagtgtcccaggggacgtcacagtccgcatatcacttcgtcatgacgacgtcagcagcagcagcagagtgtctcgaggcagcactcgcaggtctcgtagcagcagaagcagcagcacagtgtaaacaggcatgcatataagcagcctttttcctcatggcgcctctgaacatgaactttggatgtcatctcctgggcacttggagggttatacatcttggtttttcttctcactgattcaa

SEQ ID NO: 19677 - DNA, 381 bp, Oryza sativa
  Clone ID: uC-osflcyp057b08a1
aaaccattggcaaacaatgcaacatttttcccatgctaagtttcttattttttgtcacaagtactgcaccttaaaattacagctgcagcaatccactagatcatcatattaaccataacccacaaaggattttcaagtccacatgagtcaatcaagcagctccacttttatttcttactggttgcaacattggaactgcccactgacaccccttcaggtggatcacttggatttggctggggctgggagcaactgatagcaagcaatgagtgagctagcaaatccaaacgcccctgtcacacgcggagtcactttcttgggagccagttgaagcagccctatagcaaccactatgtccaggctcgatttgatgagagcgag

SEQ ID NO: 19678 - DNA, 344 bp, Oryza sativa
  Clone ID: uC-osflcyp057b10a1
gaaccatatctttgttttttcatgaagcacacacttttttcacatgcctaatctagtgtcctttttttttcagcacactaattctgtgcttctatccttacgccatcaacaccaataaagtaccacataaatgatactgttcctcacaacatcatgaactagtatacaacaaaaggacttacatatgcccccaaagcttggccaagcaactcactccagctgaacttattgatgctgatgctggggctgatgatataagaacagtactagcagtaacacgagtaggcaagatggctcttcttggacacgtatgaggagacgaactctgaagccacagctgaact

SEQ ID NO: 19679 - DNA, 293 bp, Oryza sativa
  Clone ID: uC-osflcyp057b11a1
aaaaataacataaaaatttataaaaaaaaaaaaaaaaaatttaaaaaaaataaaaacaaaaaacaaaactcctaaaatattacagaaacaaacagaaaaaaaaaacaagggcaaaaacacaaaaggcaatcaacaaaaatactaaaacaaagccaaaaagaagggggataaacaaaaggaatttccttgactacaaaaaaaaaaccgtgaaaaagggctatttctgaaaagaaagccacaataaaaataaacctcttaccaagctgaataccattgatcagaacgaccacaac

SEQ ID NO: 19680 - DNA, 320 bp, Oryza sativa
  Clone ID: uC-osflcyp057b12a1
tttttgttttatactaaaacaaccatttcattcattttactgtttatgttacaacctacgaattcttacaacatttcaatactagcaactatacaactcttcaatgcaaaggaatctcgtccaactctacaatccgaagttccaagcgtgtcaaagcttcaccgtctcagcagagcatcctacaagggtttccagaacggaaaaggaggacatgaaagtatgaaacaacacacacgctattcttgtgagttgggcctatttaaaaaaggaaaaaaaaaacacctatacggttggagggtccacggatgttgaactttttg

SEQ ID NO: 19681 - DNA, 437 bp, Oryza sativa
  Clone ID: uC-osflcyp057c02a1
tttttatcttgcggccttcctttttttttttaaaccaatacacaaattttattgccagttcctccgactgactaaactgacatgagaaggtgttgaggacaattgccacggacatgaatgtacaaatgactggactaaagcaaccacggaccatttatctagacaaaggaaaaaaagccaaataagttcaaatcggcaaaataaattgccttgtttatgtacacaaccaaactaacagaattcggcagccggaaaagcaaattcagagcttatccatgtcggcgttcctgaagctgccatcgaagagtgacaagaggccgccaacgagcaccctttcctacggaaccgggaagactccctttttgaccccatgctctgtaggattggacgatcatgagggcattatagagcgaggcaacagcacctggggaggtatt

SEQ ID NO: 19682 - DNA, 466 bp, Oryza sativa
  Clone ID: uC-osflcyp057c03a1
agcgcaatatcgcattactcatcgatcggatacatcattaaatcacacgataatacagccaacaaagcagtcacgtcaaacgatcggcctgcaatatgcacgacagtatcccaattcccacatacacggtacgccccggttcccatcgatgattcgccatctcgcaacaccacacagtttccactttccacactcacgcaccgaagaaatagtcaagtctagctcgacgcctccgatcatacggctagcgatgctgttgccgccggggtggctcccccgagtcggcgctggagtgggtcccgtactcgctgctgtcctcgatgctgctctcgaaggccaccttcctcaacctgttgatgtcggaagcgtagttgccggagtcgtacttcgaccccgggctgaacatcatgctctgcccgggcttcaccccttcgttcaggtcgtccagcgacgcgttgcctccagc

SEQ ID NO: 19683 - DNA, 439 bp, Oryza sativa
  Clone ID: uC-osflcyp057c04a1
attcgggaaaccggtgtactgatgtgatgaataaatgctcagctacccgccagttcattggcatccgacatacgtaagctgcactctctaaccatccgttatcctttttaacccgggagatcataaatttcttggcagtacaaaacctgagaaacgagcataactacttacgaaagcgaaaggagcccgggagctcaattttaaggcagccacatgagttatatacaccgtttccctgcaaactacaagtcctacacgactttcaaaaaattcttccctccttcaaactagaaaaaaaagaaggtttctaagaagtttgctaatgatgtctggattctcctgtgctgattatacttttgcagctggatggatagatctcaatttgaggagcccaaaaggtcactgattttctgttcaccgaagatgatgcatgaagccc

SEQ ID NO: 19684 - DNA, 443 bp, Oryza sativa
  Clone ID: uC-osflcyp057c06a1
tagttggcgcccttcctttttttttgttggtttttttttttctgattgttttttttttttttttgggaaacgaataaaattttttttggtaaaacatgatattattgttcattttttaaggggacaccacaccgacttggacatcatgtcggagcacttaacccattttccccaacccaaagacaaacagacttgctgggcacaaatccattcaaccacagataacccctggttagctacgggcccccacttcaattgtgggggacgaagttgggggggaccgcccaggctgtgttgttgccaggggctgctagggggccgccggagtcgccgagggggccctcgccacggatgacagcgtggacgaaaaagccggccacggggaacagggggaggggggcgttctcaaactgccttaccttgagctccccgaacgccccggg

SEQ ID NO: 19685 - DNA, 440 bp, Oryza sativa
  Clone ID: uC-osflcyp057c07a1
aaatcaaactgttgtttatcatagtaaatcttcccggagaatcagatgctcagaattcatagggttcttcagcatcttacaacttacaagatggcgcagatatacaagcgcaactatcttaaagtaagctgtaggaggaaatggaaccatttctaacaacgggaaaaatataggttatagaaggaaaccatttgaacaaattaatagggaaataaattaggaggatcgtttccgtccgatctcaatagaactggacctttgatacctaaatggggtctggcatcccgttgaccgggatgacctctttggcgatgaggctcttgccggactcggtggtgacccgaatggagaagggggccttgagtggcgtggcggtgtccatcctccagatggcgccccacgacagcttcatgggcctcccgctggcaatccggcctcct

SEQ ID NO: 19686 - DNA, 386 bp, Oryza sativa
  Clone ID: uC-osflcyp057c08a1
gggacggccgggatgatatatatatatatataggggtgatttaggatctgcttacccttggggcctgacatcgggtttcccattgggggatcgggaaattttttatgcccgggacaaatttatacaggggcattgcccatgtccccaggaaaacccgacaaaagacctaaaattccagggggtcgttgaacccggggtcgtagggggggtaagcctccatgtcgccgaccatttccccgagcattatcccgccgaccgggccggcgaggagcccgagtccgaggcccatgcccattcgtccaccttttcttgccgccggttgttgggcccccccgtaactgtacctcgccggggggggggggcccgggttttacccgtacgggggg

SEQ ID NO: 19687 - DNA, 430 bp, Oryza sativa
  Clone ID: uC-osflcyp057c09a1
caatcaaagagtagtacagtatttatttcgatctcttgataattcacaaatataaatatacatcagaggaagttaattcatggataagcaacagtcagtgattttttgcggtacaagataaaccctacaacgtgacagaaatgtacttcttctacaagtaattattattactcaatgtaatcacatttaactcacaacagattataccctctcgcttctacatgcatatacaattaccgacatgaaatatttctaagtattatatatatcctggattcatgtgcatggcagaagttcttgatatattgcttttgacgcttactaaagaaccaaaacgttcttgccatgccgatgcaggtgatatatccctcagttcctagccttattcataagctggcaccctttgcactgaattaagtttatttgctgc

SEQ ID NO: 19688 - DNA, 482 bp, Oryza sativa
  unsure (1)..(482): unsure at all n locations
  Clone ID: uC-osflcyp057c10a1
aaaactcaaggaaaatttgtttgcatatatatgcatatattatgtataaatgtttagtcacacccttattttagtatagacatggtctacatcaaagcatagcgtttaaatggtactgccatagacacgcaacagtaacgtataccagggaagcttcaagccctcatgcacagctcaacacaaaaaaaaaaaaaagagaacaccataaagtgtaatgatacatgtttcagcatataaaagacacatgaacatggtcatcgctgcagtaaagtccaggctgctgagtgtatccttgcttagccagcaatgaccgtgctttcatcacaaggtccttgtttgacacatttccgcgcttgtctgcaagaatggtctggatagcattgctgagggcaccatatgaagaaccctgcngtgtggttgcatcggctgatgtttgattactttggcacccactgatcaaaatgccgttgttagtgcccatg

SEQ ID NO: 19689 - DNA, 523 bp, Oryza sativa
  unsure (1)..(523): unsure at all n locations
  Clone ID: uC-osflcyp057c11a1
aagactaaatagtgcgattttgcctcataaaagatgggatgttttgtttacacataataaaaaaggaatttgactaatatacaaggcgcattgtggaagagatctcaaccaaatatttactcatgcagccgccctaagcaaatctactgatctacatgatacactagagctagcagaggctatcagcatccttccaactacaatttgtacacaactttgttaatggtgatatatatatatcagttaatttctaatttgccaaaggaagatttgtcatcaatcttcttcccctcttgngatgtctttttcttcttccggctattttcacctgttccgttcctttcattggtggcgtgtaattttgcacatattggctttgggtatcttgtattccgatcaaatcctctaacacaaatatatcctttcttgtagcagtcctcaatgtcttgccttgtttgacctttcatgatcgattgtatcgacgagccaaaatatacaatgcatctatctaggttccagatgc

SEQ ID NO: 19690 - DNA, 446 bp, Oryza sativa
  Clone ID: uC-osflcyp057c12a1
ggtatgcgaacaaaactttcgaactcttttttttctccttgttttctatttcatttcattccgatagatagcaacaagcagttcaaacaccataaccaaagcgaactcaattcatggtaacatcacggacgaagaacacctaacactggatggatggatagagggcttctcgactcgagagagccactggacacgataacgactcgactcgatgataagatgattctgacacggatagctaaggataactggccacgatgggccccaccaatcagtttctccaggtcccgccggagtcgccgccgtagccgacggcacggatgccaccgtagccgccgccgacgccgccacggccgccgccgtagccgccgccgccaccgtagccgccctcacggcgcccgtagccgccgacgccacctccttcgtagccgccgtctacacgaccg

SEQ ID NO: 19691 - DNA, 312 bp, Oryza sativa
  Clone ID: uC-osflcyp057d02a1
tggtggtattttttttttttgtgcatccataggcgcaattctctacagctttccttcttcctttccatctttctgtcggtgcccatgctttccaaagcaaaggggcaagcttttattcgtacagaagtgacttatcatgcctctgatcttccttatatatggtgctaatttaaacagctctataaatacaccgcgataatttacaatgcagtagtattacaaacaccccttaatttgatttccacgggacatctatgaattaacaaggtctaatcaaaaaacgttccttgggcacgctatcacctcagcagc

SEQ ID NO: 19692 - DNA, 398 bp, Oryza sativa
  Clone ID: uC-osflcyp057d03a1
agatacaacagcagaaaaggatatacctctgcttccccggttaccatatggaaagatttttacgttacagacatacaagttacagcacaagcagttttcatatgcttgaacatctaatgtcagcggtagcacattaaccaaaagtcaagtaaaaatcacatcttgggagcaagccccgtatcatgcttgggaacatcagctaatatcagtcttaaatcacatctcaggaaactgaccggcaagtcatactttcctactcgctgatcctacagcagctgcttgcattgacagccatggtgtggccttgtcagcaagtgagtgggcagccgagcttcttcgccgccaaggtgaggaaggcgagcttcagcccggtggcgcggcggctgtgggctttccac

SEQ ID NO: 19693 - DNA, 525 bp, Oryza sativa
  Clone ID: uC-osflcyp057d04a1
cagaaatatgtccagatacattaccagatggaagcactctcaaatatttccagttttcaagcggtgtaatgttgacaaagctgggagaaaattcccaaacatatgctatcacctgtaaagcaaattttgacaccaccaacatgaaaggagtactacaaaacaaaatcggaagggccaaatgcagcagggcaacaagctcctatagtatgggcactgtacagtaatggtaatgtacaaacatcatcttctacttttgatgctaatttgggatatcacaggattaccaagacaacaatcgcgcaaacccagcctttttgctgtcccaggtgactccccaactcacatagacagatacatctataatttacacttactttgcggcttgtatggctccatcctctcctagatcctgtccaagctacgtcaatcaattgtctgtacagcaatgcagctcgggggtcccgaattccagtaaaatgggctgaaaagcttcacagtaagcaacctctagtatgacctcactag

SEQ ID NO: 19694 - DNA, 416 bp, Oryza sativa
  Clone ID: uC-osflcyp057d05a1
ggcagaaaatttttcatccattatttctccatcttgcattccgcaagaagaccgctagttcgggggaaaagagtaaaaaaagaccaaaaacgatcacaacacgtcgtcggactgcaacacgtacgtacggtactccactagaacgtaaaacctatctagaagagggaaaccggaccatatatttggtagcactttacaactagggctgttcagatcagccatgtttttttgttttttgatcttccaatcattcatcgaaaatttcctttaaccacagctccgtctggaacacccgctccagcgctgatgacaactctgtcttgaatgccaaggggggtgctcacactgcgtagctctgctggatcgtgtcgatgtacagccccttgagcttcaccaccgattcgacgcggtccttg

SEQ ID NO: 19695 - DNA, 438 bp, Oryza sativa
  Clone ID: uC-osflcyp057d06a1
tttttaaaatattcacttcattaccttttttgttctcacttccacccaagagttttaacaagaaataaaattgctacggccataatgaccggaagcatgatttttcatggcttacaacatatgcagaacaacattcaaaccctaaatgatggtaaagaaatggcctaggtacctaacaggttctcatcaagttatagtacagacagttaaactacatggatataatgccggcatgatgttcgcgatcctccacaggacaaacattggtatactcacgttggtgattcgtggccattgacagtggctggtgccggaatttcttgctcgggggtaggagctggagcactttcatatccatgattaactgatgccacaacttggataggtgtgggaggggcttttgatagggccctcaacatccccttgtttgccacatga

SEQ ID NO: 19696 - DNA, 455 bp, Oryza sativa
  Clone ID: uC-osflcyp057d07a1
cagcaatgcgatgttcttcgagaacattcttaaatccgggaaaaaaacacatcacaattattaccgagcacctctatgtacattgtacaggatgggttccgttccatatggacataactctccattgaaggaaaacctcaatctacagttgccctaagaaaggtcgaaagaaagggaaacatctcaaagaccgccagatccgcataaataaacagcttcaaagactgacaaactctgcaccctaacgcataaaaccggttacaggagggcgggtaagccaagcgaacaacacagcagcaaacataaacatttgggcctctgatatgtgcaagctaacggctggaaatctggaatccccttgctgccctttgggtcctgtccagatttcttaatctgcgtacctgctctggtgcataattttattctgcacttgtggtattccacctgctgatgag

SEQ ID NO: 19697 - DNA, 538 bp, Oryza sativa
  Clone ID: uC-osflcyp057d08a1
gcatccataggcgcaattctctacagctttccttcttcctttccatctttctggcggggcccatgctctccaaagcaaaggggcaaacataaattcgtacagaagtgacttatcatgcctctgatcttccttatatatgttgctaatttaaacagctctataaatacaccgcgataatttacaatgcagtagtattacaaacaccccttaatttgatttccacgggacatctatgaattaacaagctctaattaaaaatcgatccttgagcacgtcgttcccccatcacgcggtacgttccagctcggcccagaggtcgaagtcgctcatggagagcaggtcgcagaagccgccgccgccgccgctcgcctgcatctggtcgatgctgtcgaactgctcctgaaaatcccagcagccgccgttgccaccgaacccctcctgctgctgctgctgcagggaagaatcgtccacgccgcacgaggcccatcggcctgaaaaccgatccgcctggtcatacctgctgtgctgctgtgtgacg

SEQ ID NO: 19698 - DNA, 502 bp, Oryza sativa
  Clone ID: uC-osflcyp057d10a1
ggcctgctggagctgcgcgtggagggacacggcggcggcctgctccgagagggccttcgcctgccacgccgccgcctcgctgcggaggcgcgccagccgctcctcgagttccgagccgcgccgcgcctcgcgctccgcctccaacgccttctccctgagccggcgcgccgcggatcgctctgccgcgacaagcagcgccctgttatggcgccgcacccgatcggccatcgcccgcctgagctgctcgccctgctctttgatgaatcggtcgagctcctcatcttgccgcttcatctgtccggcaagctcgtcggagaacgagacgaacggcatgggcgacgacgagtagcacaaggctttcaggcgtttgctctcttgctgttgctgctgctgctgctgctgctcatccaatgccaggcgaacgccagtggacacgagcgccgccggcgcacgggacggcgacaccgataccctgttgtggagctgcgccatgctgacaaac

SEQ ID NO: 19699 - DNA, 439 bp, Oryza sativa
  Clone ID: uC-osflcyp057d11a1
ccaccgcgctcgccggcggcgggggaggggccgtgtccgtgcccttctcccgcctcggcgcgctcgcccggcgccagctccgcctcgcgcccctcgacgccggccgcttcctcctgcgccacccgcacgcgttccacctcttcctccaccccgtccaccgcgtcctccacgcccgcctcaccccgcgcgccgtcgcggcgctccgcctcgaggccgacgccgtcgcctcctcgctgcccgcctccatcgtccgcatccgcaagctcctcctgctcgcgcccccgcaccaccgccttcgcctcgaacacatccgcctcctccgccgggatctcggcctacccgacgacttcgcggagtcgatcatccaagcccaccccggcctcttccggctcaccctcgaccagatggaccagtacgagccctcccactgcgacccgcc

SEQ ID NO: 19700 - DNA, 344 bp, Oryza sativa
  Clone ID: uC-osflcyp057d12a1
atgtaaacaaggaaattggggataaggaataaacaccaaaatccaaaattaaggggagaaggggaacaaaatgcaagcccgggggtccaggggttaaaaacaaaaccacacgggaaaacgggggaccacagggcatcaaaacaaaaggaaggcgggaagggaatccaaaagaaaaggggaaaacccaaaccggcggttcggagaaaaacccaaagtgggggaaaaggagccaacaagggcgccggggccctagaccaggagagcgggggggccccagagcccggggagggggacggggcaaatcccaaacccagaagccccacggaaccaagaagcaacggggg

SEQ ID NO: 19701 - DNA, 396 bp, Oryza sativa
  Clone ID: uC-osflcyp057e01a1
tggtggtttattataatatgtgaggtattttattagtcttttgaattttttgttttttaatttgctttagtaccggaaaaccaacaaataatggttacagggacatattcctctgattctccaaataataactggccaggggtagggtgctacctggcggagaaaccagaatgaattggaggaattttctcctgggctatggctcacgggcggggcttttatcagagccagtaaggggtaattgggcactcggaaggagaaccttcattgcttggtggggtttaggttctctattttcgaggggggcttggaaaaaaaccaacccctttcgttaaggaaaaagctttccggggggcccgggtgaccgggtggctagggacagactacactttttct

SEQ ID NO: 19702 - DNA, 304 bp, Oryza sativa
  Clone ID: uC-osflcyp057e02a1
tgtttgttttttttttgactttgggtatttttttttttttttgcttttggaaccaccccccttgtttaggttcgggaaacccaaaaaaatttgcttccggaacacacgccttttcttttcagctaaaatcctgaaaagggttacgcttctacttccacccgaaacaactgggaggcctggaccccctttccaacaggggtaaaagtcgccgtttccctaggtatgaagggcggatgcacacccgaggggatcccccggcccttgctttctttagggctcttattttgacgacagttccgaaaag

SEQ ID NO: 19703 - DNA, 197 bp, Oryza sativa
  Clone ID: uC-osflcyp057e03a1
ttagctggcggccttccttttttttttttttttttttttttgttgttaaggcgaaatttgattaaacagttgattactcaagacctttctcatcaagcgtgcaattctacaagttttctaatcggcaaaatgtttgaaacttttcgcgttttggtttaaccaaccctttggcatttctttttactgccatacacata

SEQ ID NO: 19704 - DNA, 452 bp, Oryza sativa
  Clone ID: uC-osflcyp057e04a1
gcaacagaactacattcaactgatcacagccggcctggagttcattcctgcttgaacaacaaaggtacagagatcatactacacacccagaacactgaagcacttgccatgcaggcagtacttctcttttatgaaaagatgatacagatcagttgcaactatgttacaccaccaccatgtacaacgaccggacaccgaaacatcatcctagtgcagagctgtgaggattgcagtggcgctctcaaccttgaaggttgcaccacagatctcttcttcatttgcaggaacagcagtcaccttgttctttgggttctcatagcacttcaagcctccaagagcattggaatagaagcaaccttgtgggaaaggtgcaagtgacttgccacatgatcctttaagcaggtcaatgtcgttagagaaggcaacagaaccatcagcagttatcccccaga

SEQ ID NO: 19705 - DNA, 395 bp, Oryza sativa
  Clone ID: uC-osflcyp057e06a1
tttttagggtttttgccaatggcgttctctggtttatatcaaaaataattaattcttaacttacaccctacactaaggcaaagaaaaaagtgtgtacatcaaaacgactgccactatgaaaatgatattctatcagttgaaaacgctaaaaaaaatacaagagcaatgcaaaagaaaacaccttttattagttaaactgcctgaagatgaaagcccttaaaaatccattgattgaatcacttgaatgaaggccactcacatttaacatgcctggaacatgacagatctgactgaccatggatgtgtataccttaagttggacaccttactttgacaagtcaatgaaagttcattgccctgtactgaaccagactgcaatactggaaattgtgacc

SEQ ID NO: 19706 - DNA, 448 bp, Oryza sativa
  Clone ID: uC-osflcyp057e07a1
catcagaagacatgaagcattttattagtagtagcaattttctgtttcttaattgaattagcttctgaaaaccaagaaataatggctacagtaacacacgccttttcttttcagtaaaatcactgaaaagggttacgctactactacagaagaaaacagctgaattggtagcataactattggctatggctaacggctgtaatttagagagcatgaaagggaaatgcgcacccgatgagatccttcattccttgctttctttagttctcttcttttgacgacagctccagaagatgttctgcctccctcaagaacaactttgtcagctgcttttggcctctgcggtacactatgcacgtcctaatatttacttttgacttggtctcggtgctctcgtcacttctcgttgcggcttctgaatcactgagatcgaatttctcaagtagtt

SEQ ID NO: 19707 - DNA, 411 bp, Oryza sativa
  Clone ID: uC-osflcyp057e08a1
ggaacaactaccctttttcgaggacgggaaagtttcaaaatcttccaatcagcaaagggctggcaactttggggcttccagtctcaacaaccctagacatacattttcaccccacacaacagggggacatgaacccagcttctaacataagttaaaatcctggttccctatgtatttctccggattacatagctaagggtaaacccaggccagtaaagtccaacaggcttcaattcagttcagcgattgaagatgcgaatcatttttcagcagggccagaacggggagaacagattatgccacgggccaggttacctttaggagagcaaagagaccagcgagacgaactccgatgttaccctgcctttcgatcttggggtgatgacaaaatgttccggatacttcctcagc

SEQ ID NO: 19708 - DNA, 416 bp, Oryza sativa
  Clone ID: uC-osflcyp057e09a1
caacaaggaagtttagactagttttgtttgtcaagagctaaagtctgtgcattacggcacaaacgttttacacacatttccttgagctctctttgctcaacccgactcctccacagcttgttatgtcggcaaactgtcatttttaattacggactagcacctcctccccttccaggtgctcttggcgcttgttcagttgctgccatgggtggcaacttctgctgaagtctcactactgtagaaaccaaaagcttgtcaccaacaatctgtctcagctgcttcactaggtcaggcctgcttatctttctcctcttgaattcttcataatatttatgcaccagatccatgtccgaacggggtactttagcggaaatagcagcaaaaagcattgaaaagggcattccaggtgaactagg

SEQ ID NO: 19709 - DNA, 483 bp, Oryza sativa
  Clone ID: uC-osflcyp057e10a1
gaccaaaattataacatttataatatttgtaatagtgccccgtgcgttgacggctagtatatataatggagcattgttttattcattattatacgactgtcacagccataggatgacatgcccatgaatctaccaaccacattcattcatgcggtcaaagcccaagggcccaaggcccaattctaatctgtctgcctaacagtaacaggccctacaatcacagtgcagtccacttgcgatcgaaagacagttaactgaagaatctgctgtttaccccagccctgtacagctgcatggacttatgggtagagaggttaatctcagtgtatgcagggacaaagaaaacatcgccttcctttgcctcctttttcccaccagacagagactctgcgtggagctctccttccccggttataacgagaaagacagatgggcctggcaccgaggatatggtaacacttcatctgaggtaccaagcaccat

SEQ ID NO: 19710 - DNA, 375 bp, Oryza sativa
  Clone ID: uC-osflcyp057e11a1
acctagggtcatttctgctttcacattttgcaaaacatcacccagaaatactcactaaaatcctacaaaacgttaaccaaaaaaactgggggcatccaagggccccggatacaacaagttccgcaggtcgccccccccaacaaaaaacccaagcttgggcatgatggggccaacaaaaaaattccggggtcatcttaaccgggggtgggccccacccggtaaacaaagggtgcatgaccaacaccacccgggggaaaccatttactgtcttaaaaaacccccccagccgaacccagctttttcttgctgagagagaaaacccggggccctccccccgagggctcatcagcacgccctctgacaggccaaaaggcc

SEQ ID NO: 19711 - DNA, 405 bp, Oryza sativa
  Clone ID: uC-osflcyp057e12a1
cagaaatatgtccagatacattaccagatggaagcactctcaaatatttccagttttcaagcggtgtaatgttgacaaagctgggagaaaattcccaaacatatgctatcacctgtaaagcaaattttgacaccaccaacatgaaaggagtactacaaaacaaaatcggaagggccaaatgcagcagggcaacaagctcctatagtatgggcactgtacagtaatggtaatgtacaaacatcatcttctacttttgacgctaatttgggatatcacaggattaccaagacaacaatcgcgcaaacccagcctttttgctgtcccaggtgactccccaactcacatagacggatacatctataatttacacttactttgcgggttgtatggctccatcctttccta

SEQ ID NO: 19712 - DNA, 76 bp, Oryza sativa
  Clone ID: uC-osflcyp057f02a1
aattaccatacgcagcattttgattacaggaacacccaaaaaactacctccggtgcaagggttaatcctgaagagg

SEQ ID NO: 19713 - DNA, 441 bp, Oryza sativa
  Clone ID: uC-osflcyp057f03a1
atatgtatatgtctttgccttatacaaaatgataagagaaaaacatatataatttggcgtgtctcattacaattacatgctctagttaattagaacagtaagagaggaagtgaagaaaaaaaaaaggaaaaagaaaaaaaaaagaaaatgctcggtgaaggagagctttgacctctccaatggaggagagtgtaaacaagctactctacctctcctcaactactacttctcccggccggcctggcctgctagccggcaggggcggcggcggcccgtggccttcacatgactcttcaggcgttggggttcttgtagagaacatgcggtactcctcctgcagcggtggcgcgtgcgccgtccccggcgggctgtagtaatcgcggtagtaggtgtccggcgacgagtgcgggtaccgcatgtacaggtacgacggcgaccact

SEQ ID NO: 19714 - DNA, 534 bp, Oryza sativa
  unsure (1)..(534): unsure at all n locations
  Clone ID: uC-osflcyp057f04a1
atgtaccaaagcggttagtggtacagggcattgctgcctcctgtgttgaacaatatgagattcggcctacctctggttttacattaacaaacatggagagtgacttcaaagtcagaaggatacaactctttctttctttttttccctctgttttcagagaaagagaaagggtgtaattaagcctgctctttgacatctgcatctgaaacattcagggtcattgaaccccgtggtacctttgcatcccaaaaatgtggagaccaatacgcgaacaaggaaaactgcgccatgtttttcacattctctcagttatgagtgaggcagtgagcattgcatgtagagaacacatcacttagttaacagctggttgctattttcctgctgcaacaagtggaccactgtgatcaagcttcagggacacttccttgaatatcttgcggctgagagtgttgtaaactgctctcgagtattngccggatgcatttctncagtccattccggctgacatcattaactcanactcctcgtagctta

SEQ ID NO: 19715 - DNA, 385 bp, Oryza sativa
  Clone ID: uC-osflcyp057f05a1
ttttgggatagggaaccacgaaagtgagtattcaagctgtaaactgatagtgaggaccccacttttgtgaccatagtcatgcttttacccagataacaatcttgaaaaataattgtagtaggcagtgtgtggtgctatgctaaccagggaataaccctaggatctgcactatcacagctatttcagtgatagttgtggccgaagctgttaaatacagggcaccataatttaaagaccaccaaaaaagcattgaaaaaatacatgggaaagaatgctttaccacgggcgaagagcacccttgacggcgcgggccagggcctgtcaaaatctgggaggtcaagtttgttaagagacctgcatgagctggcttctgcgaattctacca

SEQ ID NO: 19716 - DNA, 265 bp, Oryza sativa
  Clone ID: uC-osflcyp057f06a1
aaaaccaaaaacgcccttgtaaaatttttattgcaaaaacagagggacacaaacctagagggaaaggacccttaaaaaaaacctttaacaggacacaagggaaccgaatggggggggccccccccttcagggcgaacgggctttcacacaaaaaaaacacctcgggcaagaaaccaaaaaattgcacgccggaccccccaaggggaggggggcccaaaaagaggaggccccccccggaaaaaatgggaggccaagcatgcggagt

SEQ ID NO: 19717 - DNA, 496 bp, Oryza sativa
  Clone ID: uC-osflcyp057f07a1
aggtaaaaggtttaattaacataggagtacagcagaaaataacaataaaaagatagcatggaattaaagccgctgctccaatttaccatacgcagcatttgattacaggaataccaaaaaactactaccgatgacaggtattaattattaaaaagcacaggttcagattattgcgacaaaagtttttgatacccgtaagattggacgcttgatagccaaaccacactcagaaccctaaatatgcatacggaggatgtccaatcggatcttcagccaccaccagaggcagatcagtacttgtagtccttgacgtgaaggctctcagaggcaccctcgccgagcacagcatcaccctggtatgtaccaagggtagcctcagagttggccttgcacctggtgatgaaggccttttgcgccttcaccacgttctccgtcttgccgccccaggccttgagcgtgctctgctggagagcaccgccgaaggagaaggacagag

SEQ ID NO: 19718 - DNA, 484 bp, Oryza sativa
  Clone ID: uC-osflcyp057f10a1
attcataaatacgatccattgatatgcaaactgttctggagttttcaagtcgccatatttgaaacaagaataaaagaataaccagagcaggtagaaaaaaaatacattttattaggcagtcttttctgctatgagaaccaacgggtcgccctaggatctacataatcacagctatttcaatgatagttgtggccgaagctgtaaaatacacggcaccataatttcatgaccaccaaaacaccattgaaaaaataaatggaaaagaaagcttaacaaaaaactaatatacacactgatggcaccaggccagggcatgtcaaccttcccagaacgaattttcttagagcacctgcatgagctggcttctgcgaattctaccaattttatgattcaggaagcgcaggttgatgaggttctcttgataaactcatcttcactggcagttagcgaagcaatcgatgcaagccagggcaggcaacttata

SEQ ID NO: 19719 - DNA, 511 bp, Oryza sativa
  Clone ID: uC-osflcyp057f11a1
agggtaccataaaaatgatcgatacaagcttaaaactgatagtgagtacctaactataatgtccatagacatgcttctaaacagataacaatcttgttttctaattattgcaaattctgagtgatccaaacctcagatggaaataacccgtagatctgttctttaacatcacaaaagggaactgcacgctcgaattttcctgtttccaggtcgtacgtccttacacctccccaaacacgtagtccaagaagccaatcgaatgcatgtattatcacgggagaagagaaatatatacagtgaggtcgtatcccgggcaaattctgggtgggtaagcatgcggagtgattcaatccaaggaatagtgcatgatccatcaaaacattctcctgcaccacccccttgcatccatccggatcaactttgcagatttggaatgctataccatctgggtagtgatgcgcgagaatcgcacgaacttgcaggagatcaccccatggcgtcgacactagat

SEQ ID NO: 19720 - DNA, 426 bp, Oryza sativa
  Clone ID: uC-osflcyp057f12a1
ttttttttttttttatttttttttatttttatttttttttttctttagtttatttttgtttttacattttttgttcagttattttatttttttttcaaaagactgaaaaaggtgcaaggctccccgggggaaaatttttgaggaaaagccccagattggttaccggtaaaaaacaaaaaaaaggggggggtcccccgggcaggggggcaaaaaaatggcccaaaaaagtgccgaccaaaaaaaaaatttcaccccgggcgaaataatgggagggggtgggcccaaacggggcaggaaacccgggggagggaaaacgcgccggggggaatgggcaacaaaaaaaggcaatgggggccaactgttctaggggccaaaagtttttcaaaatgttttttgaaacaaagggggccccaaggatttttggac

SEQ ID NO: 19721 - DNA, 185 bp, Oryza sativa
  Clone ID: uC-osflcyp057g01a1
tgtttgttttttaacaagagacgttcttatcatatgcaacacacaagtcatcaactgttacgagggcctcgtagttggacccgttcgggccaatttacaacaacaggacgtgtgggcaagcaaggcagaacaagacaagcagcggcaaagatcccggctgcctttgcatccttgggccaaacggc

SEQ ID NO: 19722 - DNA, 412 bp, Oryza sativa
  Clone ID: uC-osflcyp057g03a1
ccaataagacttaaaacaagtaagaaatgtccccccgggggagcgtttcagggtaaataatttacaagtggattggcctctgttcggggtaaaactggggaattgggatatatcatgggaaaaaacatgacatttcctagactcaaaaaaaactcatggaaaaggccatttttatttattttacaaggacaaagacgtccctttttaaaacaggactttcattcagcaaaaaacgatggggcttttgcagattggaccattcccaaaataagggtttaaacatccttcctgtcctgggcccgccaagggaaggggatccgcagtttaaaaacacttccataatagcccgccttcacattgaaaccaagattatccccatcaagcatgtaagcaaagtccaccttgacagggg

SEQ ID NO: 19723 - DNA, 386 bp, Oryza sativa
  Clone ID: uC-osflcyp057g04a1
gaaacaagctaattttataattaattcacaacaccatatttcattgatcaggttcagaacctgcacagaaatacacactaccggtacagatctcaccttctctccaatactggtacatccatccacgcggtccacacgaatacgtacatctatacggtacacgtacggacatttactgcaccgcgtacacacacgcacactctcctggagagacgcgcatcgtcgtcaacctagctagcttagctgaaggcgatgcgtcgccatggcagcacggcggcggcggcgctcacttgccggggacgaagttggtggcgtaggcccaggccgtgttgctgacggggtctgccaggtggttggcgaggttcttgaggtggcccctgagggat

SEQ ID NO: 19724 - DNA, 401 bp, Oryza sativa
  Clone ID: uC-osflcyp057g06a1
ggttgtgttattatttgtgttgtttttattttttcttttttcaattctttgtgcttggaaactcacaattccacggtttaacaagaaaccaatattccgagtacattaatagtttaaacaaaaaatacaggaatccattcataaaatgagacgatttggtaacgcaaaccgaacaaaaggcaaaccccagaaaagatcaacttcgccagattgatgaaagaagaccccttcttttacaaagcaacgtgagccttggccttgagctcgggaacattcttgaccccctcttatacttttgactcctccgtccaaaaaaacagatcaaggccacttttaccttgctacagtccgaacattgtcaaattcctgcgggcccggcaccggggggaagccaccccccg

SEQ ID NO: 19725 - DNA, 255 bp, Oryza sativa
  Clone ID: uC-osflcyp057g07a1
caaagagaacatcccaattattttccatcaaaaaatttttggtatctgcatagctcagggcgatacgatagttcagatctccgaaccatatcaccttatcatgctcaagaattttctttgggatttttcgcacacctttcctgaagccaaatggctgcagatgaaacaaaagcttgtctggggcagggtcatgctcactgatatgcatcccttgtttccaagacaacccaaaattcctcgccctatgcaagacgt

SEQ ID NO: 19726 - DNA, 441 bp, Oryza sativa
  Clone ID: uC-osflcyp057g08a1
aacagtaacaatgatagagcacaattaacatttctgtaccaatttcaagcctctgatgtggcattcttgtattgacatttacatgacacaaggaatgaaaagaaataagcgtgaaggctggagtatatagccatgaaggtggccacacaagaacttctgggatatttgttgaattctcctctcctagattttataaagacaatactcggccgaaactatgcttcaagagcagcatgaagcagagctgaccagtcttttatttgggctctgggagaggaccctgccgggctgggggttctgagttggctgtccttgaagcatttttttggaatttcattaaaaaaggcattcacctttggtggagttttcgcagatgtttccatgaagaaaagcccattctcctgtgcatatgcctttgcttcctctatttgcacctgccta

SEQ ID NO: 19727 - DNA, 463 bp, Oryza sativa
  Clone ID: uC-osflcyp057g09a1
gagatcggatcaactcctgaaatttctaatatattgaagggatgatatttgaacattacaagctcttggcacactaaccaccacacacttcccacaatggcatgttactttctgaatcacaaaagaaagcaacagaaacagccatacatagcttcaggtagctttagcctaagctcacaatctcacattactcaacctaatagaaacttcaagcttactaccaaaactagtggcctcctcatacttacagaagaggtttatatatctttcgaccacaatcactaagagattcagaacaacatcagactgacaatgctcacaatgccaagcagcagcccaatacttgccttcaacccagcaggtgcattcaagccccagacgcgcacatcatcgatcactggcccacagagcgagctgtggtcgtcgcttctcgtgttgtaatacacactgtagaacgctaccc

SEQ ID NO: 19728 - DNA, 266 bp, Oryza sativa
  Clone ID: uC-osflcyp057g10a1
actaagtgctgcattccattccaaaacgatagaatgaccttcagagctatgttgaatcttattaggctgccaaaaagaaaacaggccgatcactaaatgattcttctggagacaaaagacacttggcaaaccaccatagaagttaccagggcacaaaacactggaagtaacttgaacttaactggaatgatattcaaggccctccggtggtaccggtcccttcaggggaatcatgggcctcttttcaaacgattgggacaaaactt

SEQ ID NO: 19729 - DNA, 54 bp, Oryza sativa
  Clone ID: uC-osflcyp057g11a1
tggggggggtttttaaattcgggagggttccaagcttcttttttgaattatttt

SEQ ID NO: 19730 - DNA, 466 bp, Oryza sativa
  Clone ID: uC-osflcyp057g12a1
gatcactataagtatagaatttatcttcccttttccaatcctttgcgcatggaaacgcacaataccacggttcaacaagaaaccaatatcccgagtacatcaatagttcaatcatcaaatacaggaatttattcagaaaatgagatgatatgataacgcaaaccgatcaaatttcaaaccgcagataagatcaacttctccagattcatgtaggatgacccctccttctccaaagcagcgtgagccttggccttgagctcgtgaactttcttcgccctctcttctccttcgactcctccgtccatgagactgttcaaggccctcttcacctgctccgttccgacctctgccgtctcctcgccgcccccgccaccggcggttagcatgccgccggtgggcttcgtcacgccgatggacacgccgatcccaagcacgtccacgatcagcttctcgttcacgaactgct

SEQ ID NO: 19731 - DNA, 278 bp, Oryza sativa
  Clone ID: uC-osflcyp057h02a1
gttcataaaagttttttttttcttttttggaatggaggtagcacgttcagagtaaagatggagcatcactgatcaattcactgctacacacccaacgtaaaatgcatgatcccgtgttcgagttatacaggcgatgctgagttttgagaaggaactattccgtcctctaagaagttaattaacttcggtacataattttagcaagcatcaattccgaaaattggatgagttcctgactttgaaacggtaaaaccctatcgacacgggtaaaaatttaa

SEQ ID NO: 19732 - DNA, 432 bp, Oryza sativa
  Clone ID: uC-osflcyp057h03a1
tttttgttttttttttttttttttttttttggcagaacacgggaaaagtatcatataacgcgaacagcataccaggtacagaacttggctatccaaattaatctctttatcctagtactagcaatttgcatagctgtttgcctgcttaacagattgtattgggttgcgcacatgctacctaagatacattggcccaattgagtttcaacaaatgcattctgttgcgcacatgctacctaagatacaatggcccaatcgaattttaacaaatgaaagctcattccttcttctgagtgtccctgggaatgcagcactggggatagcaaatatctctggctgttatattgctggtaacaagaacaaatagggggggatgtctttcatgtgccctttggcattcacctccaccttgcacctcccaatctgattacc

SEQ ID NO: 19733 - DNA, 490 bp, Oryza sativa
  Clone ID: uC-osflcyp057h04a1
cttgttgccgccctccttttttttttgtttttttaaacattaacaggggatatttttcagagagtagacaattccaagacgatttaccggcgaccagctaagctgaaacagcatgtgagcatgcgtggatccacagcagacagccatgaggcataccagccactatttttcttgagaagcactctatataatgtgcctcacagaattcagtacatgccgagtcgctagccacaacaaagaggcaatatccactgaccttacatgcaaggcaagatgcaattgtttctactcaccttcaggtgatagcagaatgcaccatacaggatcactgaacgctctactgcaaccagtagatgtagccggcaggcgaaagagagtgattttcttcaatgggatggcaaactaattcgcgagcctttgacatttcatatggaccgagtatacgccggtaggtcattcgcgtacggactccagagtttgatatgaaact

SEQ ID NO: 19734 - DNA, 314 bp, Oryza sativa
  Clone ID: uC-osflcyp057h05a1
tgtggggaatcagtagaagggggaaataaaaacaagaggccccactaaacgatgcagtcacaatttgtagctaaaataacaccagcaattcttagtacagaacacaaaaaaggaaaaatcaacacccgactgcgagaacagtcaatgatgaaggcgatgccacaccatactattattaaaaggcaacccacattacaaatccccatgtaaccaaagggaggacaatagagcatgaattgctaaaaaatcgaggcgtcaggacagctttggataaggatcagtcccaagcactagaaaaaccttgcccgacacct

SEQ ID NO: 19735 - DNA, 393 bp, Oryza sativa
  Clone ID: uC-osflcyp057h06a1
aagcaagcatattttatatgcgtgctttactgaaatgattcaatatctggtataagtatccccaatgttctgaatcatgttcaggtaaaacccagccccaccagccagaagggctttcctacttctctcaagatagatcactaaaaaagccgttacattgccccccaaaagattgccctgatctaagtatctaacggtgaaaaccagagacaatacccttcccctttaagaagaacataataccttttacaagaacacaaaggctctggttatacatcttaacaactaatggtatgtagcacttctgttgccagaaggggggaatgcctgtcgcccccgaggattttggcgattccccttgttctctccagcaccgaattggtttgagggtct

SEQ ID NO: 19736 - DNA, 344 bp, Oryza sativa
  Clone ID: uC-osflcyp057h07a1
aatggcactgaatcatttttatttcctcatcctttgtattcattcctcccagagagacggatccatggaagttttcttgccctcatcaggcaagcagagcacacacacacgggggcagtggaattgctatgaacaagacgctaatcaacatccagagctcaaacaaacaaggggaacaaagctggatcctaaataaacaacaccaggccaaagacccaatgagagctgactcgaaacggcaaaccgaaccacaccgtatagcggaataatttttaccctgtatattcgctcaggcgttcacgatctcgccgtcgtccttcgacgccaggatcagctccgggtgc

SEQ ID NO: 19737 - DNA, 306 bp, Oryza sativa
  Clone ID: uC-osflcyp057h08a1
agctatgacgagatgcacgcagcacgtacgcataggatgctcctttgttatgcggcccccctttcttttttgttggttttttatttttggttgttgtcagaacacgggaaaagtatcatataacgcgaacagcataaccaggtacagaacttggctatccaaaaaaaactctttatcctagtcctagcaatttgcatagctgtatgcccgcttaacaaattgtattgggtttggcacaatgccaccaaagatacattggcccaattgagtttcaacaaatgcattctgttgcgcacatgctaccta

SEQ ID NO: 19738 - DNA, 553 bp, Oryza sativa
  unsure (1)..(553): unsure at all n locations
  Clone ID: uC-osflcyp057h10a1
gaaacagtagaaaggagaaattaataaaagaggccccattaaaagatgagttcacaattcgcagataaaaaaacacaagcaatccctagtacagtacacaaaaaaggaaaaatcaacaccagactgagagaaccgccaatgatgaaggcgatgccacaccatactatcatcaaaaggcaactcaaatttcaaatttccatgtcaccaaagggaggccaatagagcacgattgtttcaaatttcagttctcatgacagctctggatcaggatcagtcccaagcactagaaaaaccttgcccgccacctccgtagctgctaccgccaccatagccgcctccaccgccaccaccaccatatccgccacctccataacctccacctccaccaccataccctccaccaccactgcctctgtctcgtcggaagtcccggccaccaaacctagcaccaccacctgacctgcggtttctcccgccgccgcctccaaacgatgaacgggcagcatacctctcaagccattgaggaacctnctgttagcctctgcatgagcta

SEQ ID NO: 19739 - DNA, 423 bp, Oryza sativa
  Clone ID: uC-osflcyp057h11a1
tggtggttttttattttttccatgcaaaataaaccaatcactccactgaccttgaccgaatcaaattggagctcagttcgcaccacagattttttttttctagactaaatagttggcaccacataaaccgtcacgacactactcataacaccaaatagtttgcagcatttaatttcatttcagataaccaactcaaacgacaccaatatttctcagctcagcatccgttgtctcattcttcactgggcggggggcttggccttcgagggagattgcagagccatttcactgttgaacgtcttgctgcatgacttgcaagaaattgacccaccaccggattttggggacttctcctttgacttgtcattcacgggggtcttgctagcctgctttgccggatgtggagtcgctacatggacaccc

SEQ ID NO: 19740 - DNA, 336 bp, Oryza sativa
  Clone ID: uC-osflcyp057h12a1
aaaacacacgaaatttagctaaattaattaaacaaaaggagcagctaatgtaagctagtgtgcagatcgaactaactacgtacaggcatatccagcaaacgtcgaggcttggggtacgtacctacgtatgtacgtgtatacccacacgtacatgcatagtaccgtacgtacgtatcgccaatatgctacggggcgtgccagctggctacgtaccaaggaaggggaccatggagatgaacgacggcgacggcgacagcaaggttgattagttaaaaattagcgctaggagtggaagcgctgcatgcaagcgtggcaggggatctctgagcgcggcgg

SEQ ID NO: 19741 - DNA, 427 bp, Oryza sativa
  Clone ID: uC-osflcyp058a01a1
atggttataaggaatagggttcaatattacacctttgacatacttaaattcccttcgcttgttctttgctgcaggggaaagaacctgtggggggatatgcactttaaggccttgagactgggatatttcaacaaaacaaccctggcggcagtttgtaaaaacccacttcagggtgttttaaaaaagtgggtgaactactgaccctaacattgaactgaagctgaccacatatacccagacatcttcaacggaaggggggaaaacaaatactccctccaggaattcaactgcaacatgcccccctcgtgacaactcgaacataaatttcttgcggtcaaccacctggcaggaaaccatctgcattaaaggggccaaagaaccctggggaaaccaggcataagccatgaacctcatgcgagagctcagg

SEQ ID NO: 19742 - DNA, 398 bp, Oryza sativa
  Clone ID: uC-osflcyp058a02a1
ctaaagggaaccaaagaaatacatgaatgcacaaccattgagaactccagcatggcataaaggcacacaaaacccacctggaaacagtctggaggccacaaaacccatttgcccaaccccaagaccacgaactcgctgggccccaaggcctccaaccacaaataaccacgggttagctaccggcccccattttatgagccggggaccaaatcggaggcctcccccccggcgagcgtgtagacgaagaacttgaggaggaccggaacagacacaagggggccctttgcgatctagaagggcgggacgaagccaccgaccacgggtaacacggcgggggggtcgcacttggcatccatcacctggagacacccgaaaccctcggggacctcctcaagggc

SEQ ID NO: 19743 - DNA, 522 bp, Oryza sativa
  Clone ID: uC-osflcyp058a03a1
gatacaacagcagaaaaggatatacctttgttttcccggttaccatatggaaagatttttacgttacagacatacaagttacagcacaagcagttttcatatgcttgaacatctaatgtcagcggtagcacattaaccaaaagtaaagtaaaaatcacatcttgggagcaagccccgtatcatgcttgggaacatcagctaatatcagtcttaaatcacatctcaggaaactgaccggcaagtcatcctttcctactcgctgatcctacagcagctgcttgcagtgacagtcatggtgtggccttgtcagcaagtgagtgggcagccgagctccttcgccgccgaggtgaggaaggcgagcgtcagcccggtggcgcggcggctgtgggcttcccactctatgcatctctccacatcggcttgccagttgatgatgcttgctgccaagcactggtaggttgggctctggatgccattccggtgttccccttggatgagcttactggagttatttgtccgctg

SEQ ID NO: 19744 - DNA, 236 bp, Oryza sativa
  Clone ID: uC-osflcyp058a04a1
ggtactacattgggtagggcatgccctgtgttgattcggttaccaaacgcaaagcactttgcgaaacaaccatgcacagggcaacagaagtacctaatacatgctcgagcataaacagaaaaggggggcccactaaaccaagagagaggtaaactcgcatatggggggcaagtctaggatgaagctagggaacattgacggagctaagtgatagggtacatgcggaaggaaccgac

SEQ ID NO: 19745 - DNA, 331 bp, Oryza sativa
  Clone ID: uC-osflcyp058a06a1
aagccccaaagaagagcagagactttaagaggagccaatgacacagctggggattggggtaacaagcttttccaacttgacagtaaggagccaaggaacagatctgggttatggcaaatattataactcaagacatgggctcgggctgagcttttgttccataacaatcatccttgtttcattacaggttcaccacgctcaaacatgaggcctaaaggacctccagggagccgtacgctttcggcgtcgccggccaagcaaggaggggtctgaatatatccgacgggaagccctttcataagctgttcaggttggagaaggtgtatactta

SEQ ID NO: 19746 - DNA, 465 bp, Oryza sativa
  Clone ID: uC-osflcyp058a07a1
aataattgtggagtttatttaaaatcggaggagcggagtagtacacacacacgggtaattagatccaatcgccaccacgcgaaatcaatcgtccaccagctagctcatcgtcgtcggcgatgatcaatactcaaatacacatgtataattgcgacgcgcgcgtgccgtccgtcagccgcggcaccggttgatcctgctgcagccgcgagtgtacgggttggcctcctgcatcttcgagacccccaggagatcgacggcgttgatggcggcatcgacgacctcaccgacggcgggggcgatggagggggagacgacggcgggcattttttcgggccgcgcggcgtgggccgtggaaaccaggatcaggcccacgagcaccacggacaccagggccaccctcatgctcgccgccttccccatgcgcgaacgccctctttttcttcgaccaatttgaagtggtttgtt

SEQ ID NO: 19747 - DNA, 82 bp, Oryza sativa
  Clone ID: uC-osflcyp058a08a1
tttttggggggacaatagagggaaagggggttcttccgtttattcagaatctatatgcaaaggggaacccgagacatacatg

SEQ ID NO: 19748 - DNA, 470 bp, Oryza sativa
  Clone ID: uC-osflcyp058a09a1
gcgtaacagatacctcagtcattgtaggagagagtgatggcatcccaatttcctgatgtggtggcaggtctggaataagcaaattgcgtcaagaattaagagagctaacagaggaccttactttacatgctctgtaaggaaccattgattggagttacatagaaaattttaacatagtaaccaaaacaatggggagatgtggtgtgagattgggatatacttattttgtagcaaataacctaaatgcttatataacacatacaaaaaaaaagttttgaaaattcaacggagatacagatgtggagaaaaatatccaaaaaaaagtagcagaatagaggatcacatgcatgaaacaattggtacatgggaagacgggataaagtgaagcaaataattgaacaaaaagaaggatggcaaaaaaacaacattgtagactagtgcaaaaaagatcaataaaaactgaggagctg

SEQ ID NO: 19749 - DNA, 442 bp, Oryza sativa
  Clone ID: uC-osflcyp058a10a1
agtaattaaaatttacttatgtttcttcttcttcttcacagttcacatggaaatcagaaggaagtagcaaaaggaagagctgttctacactcgacagagtaacaaactaagagagcaacacaagtaacaagaggagagatttagtctcttttctggtgttctgcaaataaaactctcccctcttgctacccctaaaccccaacccaaggtagtagtaagtcaccccactaaaagtaaccggccatctcttacaaaaattggctgtctcctttgaatcaatcgaatcagatcatcatcatcatcatctacagctcgtcatgctcgtcgtcgacgccgccctcgccgtcggcgccgccacccggggcgccaccggtcctctggtagacggcggatatgatggggttgcagacgggctcgacctccttgagcttttgctcgtact

SEQ ID NO: 19750 - DNA, 307 bp, Oryza sativa
  Clone ID: uC-osflcyp058a11a1
tttttgtgatcataacaatagaaacaacagtcaattcgcatataatggcatacgaatcgaccatcattgacacattcaattttatcatgattacatcagttgtgaatatgaggttgaatggatgcaggtgcggtacaggcatggaacatacagcaaaggaagtttcaacataaaagtcaccctccacagcttaacaatacacccaccatccctccagctattcgggctcctcttggcagaacactggacacaatggcctcctcaagattcaacatttgattgtagtacggcacaccgcacactacct

SEQ ID NO: 19751 - DNA, 134 bp, Oryza sativa
  Clone ID: uC-osflcyp058b02a1
attaaactgtatgtttctaaactataccagagtggcaactgtattaactcccatttagagatactctgagggtctttccgcgccgagtggagatcagcttcctaacacatgggtgctagactcacttagagagc

SEQ ID NO: 19752 - DNA, 443 bp, Oryza sativa
  Clone ID: uC-osflcyp058b04a1
atctatgataactttattaatatcaagatatactgactcagtgagtcattcagaggtgaccataaggatacaatgtacatgtgtattcataaaaatgagtgtgtgtatgttgtgaacatctacgttttactatttactatgtttataaaaaaataatagtaaaaaatccttccttacaaactccaccttttttttttctaaagaaagccacgaagatggttatttaaaaatacaggagctgatcttcaatgtgcttagactcataaagccttatttaataggagcacacagattccaatttctttacaaagagcagcacaaaggacctgtgttagtttgctgacacaggtacccgtatgatagttttacaaaccccagaaagagggagtatcggaaaaacaggaatgccatgattatttggtcctttttgaatggaaatgaat

SEQ ID NO: 19753 - DNA, 335 bp, Oryza sativa
  Clone ID: uC-osflcyp058b05a1
attggttacttttgggaaagaaaaaaaaagggaaaaaaaaaaagggaccggccgacacctgagaagagcaaaggaacacaaaaagaagggatcgaacaaagccaaaaaaagaacccgggggagccaaacaaaaaagaacgggggcggggacaaagccccgggggagggccacccggcagagcccgaaaaaaaccccagggagggggggggggaaaaaggggaggggaaaccccggctttgaaaggaaaaggggggaaaagggggcaaaaactaacccccgtggtccttaaacccaggcacgaggaagagggcaggaaaaaacccccccccggggg

SEQ ID NO: 19754 - DNA, 353 bp, Oryza sativa
  Clone ID: uC-osflcyp058b06a1
acacagagaacatattaactgaataaatataggaagcaaaacagttgcactttagatttctgcacaatatattacagcaataactgaaactcggagcacctctatgtctaataatattctattggctatggctcatatcccattttagcatctcttgtgtcaaaattttcaattggacaagtacaatttagattggaatgccgaatggcagaataagtaaatcagtgcaaccatcaattagatactaataactggcagctgtctgcaagttgctctcttccgtttcagcttcagaaggttctgaggtaatgctctgctctgtctctgcatcagatgattctgaagcagtttct

SEQ ID NO: 19755 - DNA, 435 bp, Oryza sativa
  Clone ID: uC-osflcyp058b07a1
gaacataaatctgcttctacaatatactccatcagtaacatgagcaccaaccacaaggtttattagagacaatgccagccccatgctaggacaagcttatttcagctgttcttcctcttaatcttcttcatcatcgtcctccttttatcgccataatttatcgccattttcgcatacgtccataagattatacctatttctttccccagttctgaaatgtccaaacatttatgtgtttacaaccacgcggcgttcttgatcggcgtgacgacggccttgacctgcaggtagttcttcaggctgtcgatgcccttctccctcccgattccgctctgcttgtatccgccgaacgggatcgcggcgtcgaagacgtcgaagcagttcacccacacggtcccgaccctgagcgcgcgggtcaaggtgttggccgtgttc

SEQ ID NO: 19756 - DNA, 428 bp, Oryza sativa
  Clone ID: uC-osflcyp058b10a1
tgtttgttttttttttttttttttttttttttttttttttttttttttttttggacttatccgattcggtcagctaaataacacacccagaaatttacaaaactatttattttttgggcccaataatcgcattcctgggggaatggtcccatttggaaagggaatttattactttttacccacaagagcctgattgacttacgttgggggggccatcgcacataaatgattgggttttggtaaaggcacaccaaacttttccgggatatcaattttatttccttttacctaaggggggaggctccatttaaaatgaattaacaggggtgcaagaaggacatggcccattctaacaggtaaggggatttccaggggagatttttggccccgccccaaaggggaggagctccaaatctccaccttggggg

SEQ ID NO: 19757 - DNA, 200 bp, Oryza sativa
  Clone ID: uC-osflcyp058b11a1
ggggaaacgaaaaaaatcatttttggaaaaacataaacttttttttaaattttttaggggacacaaaaccaacttgatcattatttgggggcactaaacccattttccccaacccaaagacaacgaacttggtggccacaaatccatccaaccacaattaacccctggttagctacgggcccccactttaattgccgggg

SEQ ID NO: 19758 - DNA, 379 bp, Oryza sativa
  Clone ID: uC-osflcyp058b12a1
ggggaaacgaaaaaaatcattattggaaaaacaacaattttttcttcaacttcttaggggacacaacaccaactcgatcattattttggggcactaaacccattttccccaacccaaagaaaaagaactggggggccacaaatccatccaaccacaattaacccccggtaagctacgggcccccactttaattgccggggacaaaattgggggggtacccccaggcgttgttgttgacggggtcggggagggggtccgccaggtttttgagggggcccttgccggggaccatggcctggaccaaaaaccccaacatggggaacatggggagggggccgttcttgagccccttcaccttgggccccccgaaccccttggg

SEQ ID NO: 19759 - DNA, 492 bp, Oryza sativa
  Clone ID: uC-osflcyp058c01a1
catgcattctttctagcggccttcctttttttttttttggtagatgccaatagtgacgttctttttcataaattgcgtggtaagattccttcatttaatacctttttcatgaggctatcgagtttttacaaacaaatctgagtgaatgaaaaaacacaatatattttttcccattcaacccggggtttaatagattaaattctattaaccctaggaaaaaaatgggttgtaaaaccaaagacaataatttataaaggaaaatgggtagttggtagaataataagttataataggaatttaattacaagcaacattactttttatatttggcgcgtttatttgagggcttgaaactaccccttttaaataccaatgggcagttagttaaaccataattggtcaaaaaattccgctcgatggggtgggccttgtgatctattcaaatcccaacttttattttctttccaacctgtttctttccaacttttaatt

SEQ ID NO: 19760 - DNA, 464 bp, Oryza sativa
  Clone ID: uC-osflcyp058c02a1
gatgccaatagggacgttctctttcataaattgctggtagattcattcatttcatacatttttcatgtgcctatcgataacttacaacctatcctggttgaatgaataaacacaatttattctcttccatcaacccgtggctaaaaagattaaatctataaacctaggaaaaaatggttgcaaaacaaagaccaaattaagaaggaaaagggagtaggagaaaataaataaaaagaataaatacaacacatacttttatattggccgtagattgtggcttgaactaccctttaataccacggcagtcgttaaccatattggtaaaaattcgccgatgggtgggcttgtgattatcaatccaactttatttctttccaactgttctttcaactttattgtggtctccggcgtgtctaatctgtgctcactatctcttttgggtgtatccactctttgttcaccct

SEQ ID NO: 19761 - DNA, 526 bp, Oryza sativa
  Clone ID: uC-osflcyp058c03a1
aaatcagtctcacaattttccatggttttaatcagagaaaccaactcggcagacaaaaaagggtatcggaactgacattaagttttgatcatccataatttagtaacagcccaaatctcctaaaaggtaaagcaactagcaacaccatctctactcagctgctgcaacctcccctgccaccgcctcgtcagtctcagcaggcctgtccagcttcataccgacatcttccttgtagtcaccgtgtacctccatcaacttcccaagatcaaacttcggtgccttcaagatcttcaccttgcggatgaacacattttggagagggaatatacttgaagttgacttctcgatctcctttccaatgacttcagggatgaattttgaaaccagttctttcaagtcacatgttgatgcctggttggccatgatctcaaccatcttccggcggatctgccggatctggctagcctgagcgtaacaggtacgcttcacctgatttgggcggcgcttggtgaaaccaatgcataac

SEQ ID NO: 19762 - DNA, 499 bp, Oryza sativa
  Clone ID: uC-osflcyp058c04a1
ttgtggtatcagaaaggatgggggatttcccgcaaatacttatttatatgggttgacaacatttattccgacgcaagctcattggggcagacccagctggccacctagaggttttagattaccattattatttagaccaagcatacggcccaagatcagaactcatgcttacaagcgaaaatgctaatagcctgggtgggtggtttacaggataaccaaacgacaacctcaacagattaaaatgccacggaatgaaaacaaagctgcgaatcgtcaccagaaggcccaattttgtcatcaaacactccatcattcttctgcaacgcatcctctccccaggggagaagattgcccaagttaccttccttaacaggagcagggttcaccatattctcagcctcgaagcagtgcagaacagatttgggcgacccaacagcaacaggtacgtcttcagtagcgtcgaaactctggtagatgaggaggccaccacagggcagct

SEQ ID NO: 19763 - DNA, 88 bp, Oryza sativa
  Clone ID: uC-osflcyp058c06a1
cttggttgcatttttgtttggcggccgtcctttttttttggtgggttttaacagcaacggggcattacatttatcacgggtttagaga

SEQ ID NO: 19764 - DNA, 493 bp, Oryza sativa
  Clone ID: uC-osflcyp058c07a1
gatgccaatagtgacgttctctttcataaattgctggtagattcattcatttcatacatttttcatgtgcctatcgataacttacaactcatcctgattgaatgaataaacacaatttattctctcccatcaacccgtggctaaaaagattaaatctataaacctaggaaaaaatggttgcaaaacaaagacaaaattaagaaggaaaagggagtaggagaaaataaataaaaagaataaatacaacacatacttttatattggccgtagattgtggcttgaactaccctttaataccacggcagtagttaaccatattggtaaaaattcgccgatgggtgggcttgtgattatcaatccaactttatttcttccaactgttcttccaactttattgtggtctccggcgtgtctaatctgtgctcactatctcttctgggtgtatccactctttgttcaccctcctgtggagagtctccttgcttttcatcat

SEQ ID NO: 19765 - DNA, 537 bp, Oryza sativa
  Clone ID: uC-osflcyp058c09a1
aggcagagcctctctatgagctatgacggacgatgcacgcagcacgtacgctagcttggctcctttgacggcggcccgtccttttttttttggtttgaaattcagtctcacaatttttcatggttggaaacagggaaaccaactcggaagacaaaaaaggggatcggaactgacattaagttttgatcatgcatagtttagtaacagcccaaagcttctaaaaggtaaagcgactagcaacaccatttgtactcagctggtgcaacctactttgccaccgtcttgccagtctgagcaggcctgtccagcttcataccgacatatccctggtaattaccgtgttcctccttcaactgcccaaggtcaaactaacggggccttgcaggaacttcaccttgcggatgaacacattttggagagggagtatactcgaagtggacttctcgatctcctttccaatgactttaagggtgaaatttgaaaccagttatttcatgaacatgttgatgcctggttggtctgattttaaacattttc

SEQ ID NO: 19766 - DNA, 445 bp, Oryza sativa
  Clone ID: uC-osflcyp058c10a1
tttttgtttagcacttagaacagatataatttcatcaaagaaaaccaatacaacatataacaatattacaataataataaaaaaaatctccttttcccaaaaaaataaaataaaataaaaatctcccatttggggccacatgccatctctcctatatgggcctcatttcttgatccgaaataatcctcataaaccatactaatatttttccccttttccccatacaccattgtaataattatgtcaatggattttctacgtaggcttaatgatcaacccatcataatcttcgctagtgtcaacggattattcaaagaagactggagaaaaagaaatggtgatatgaagaaggaaaaatctgtgtagccatgcatgcgccgtacgtcgctcagtactcctcggaatccggtgcgctggcgccgggtcccggcgcgttggcggagcc

SEQ ID NO: 19767 - DNA, 534 bp, Oryza sativa
  Clone ID: uC-osflcyp058c11a1
aacagcaacggaacattacattaacacggattagagacaggtgaattacaatgtaattgtatctagccatgcacagtgccaaagaggcagcaccgttagaataagacgcaaacgaatccgactaacaaaatacgagtcaccaaacacactgacaatattctgagtatttttgacagatccaccaataagacgaatacagcaccatcatgtcacagagagaaacatattgttccacaaaatacaccctactcagattgttcttataagcaaaagattaaacccactactaacactacgacgcatgcttcatttgtcaaaggagtcgccgaggggaatttaagccctctcaccacgaatcctcctagccagctgaatgtccttaggcatgatggtcacacgcttggcatgaatagcgcacaggttggtgtcctcgaagagaccaacaaggtatgcctccgcagcctcctggagggcaaggacagcatggctctggaaacgcagatcggtcttgaagcctgtgcaatttcctaacag

SEQ ID NO: 19768 - DNA, 139 bp, Oryza sativa
  Clone ID: uC-osflcyp058c12a1
aactatgaggggttttatttatatcaagatatactgactcagggagtcattcagaggtgaccttaaggattcaaggttcatgtgctattcataaaaatgatgtgtgtgtattgatgtgaacattttacgttttacctat

SEQ ID NO: 19769 - DNA, 208 bp, Oryza sativa
  Clone ID: uC-osflcyp058d02a1
aactagccagtttaaaaggaatagccggtctattcaactgaatgtagctagaccacggcagtaaggcgactgttcaaactgcgacgtaaagaacctgagagtgctaacgcaagagcagagatcagcttctaccacattgtgactgcacaccaggagcatgttgggattgcacaccagaactttgcacgacgcatcggtgtactggtct

SEQ ID NO: 19770 - DNA, 437 bp, Oryza sativa
  Clone ID: uC-osflcyp058d04a1
ttgttgttttttttttttttttttcctagattggtcccatttttttttatttcaacttggggagggcatagacaaccactttggcgggctattagggggtacaataaattgaccacacttgcccagaggagcccatcacattgtccccaaatgtttggtttttccccccaacctagccatttgaaattggttccaacacgctttgactaagaccacaagcccccctgggcactcgggctgatatgttaagaactcagctgtccagtgccacaactggaagctttgttgaagttctacagaatggttgccaacgattaacaggtcttataccgtggcctaaaacaagcaggttcttcgtgttaaaccacatctgggaagcgttgcatgctaattttagcctaggattttccaaggaacaacgggacgcaggtcattga

SEQ ID NO: 19771 - DNA, 498 bp, Oryza sativa
  Clone ID: uC-osflcyp058d05a1
aaaaaaaaacagtacaattgtagactttattatgttcagcggtagctcctagtatcaaattacatgaaaaacaatcgaacacacatgtacacagagccacttcacactttgactcgagtctccaaatccaaaggaccaaaccctgacattgcaaaacacacgcacgcacgcacgcacgcacacacataaaatgtttaaattaagatttgatgaattcgaaatcaattaattaaaacacccaaattaattaataatttagtcgtcgtcgtcgacgacgatctagtgcttgtgctcgaagtcctcggtggcgcgggtgggctggtagccgatgccatggcggttgttggggaacaccatgaaggcgtagctggcgacgccgccgacgacgggtgggagcacggccatcatggtgcgctcgctgacctcgagcgccgggtagaggcacgccacggtgtcggcgtcaaggagggcgatggtggctaaaacgaggagcgagag

SEQ ID NO: 19772 - DNA, 538 bp, Oryza sativa
  Clone ID: uC-osflcyp058d06a1
gacatgagaacatacccaatcatgcacaatttgatggaaacatataacaagtcaaacaagtccattttacaagaaagggcccttttttttcactatggttatgtatcacattgctgttttcttcccactgtgtaacctcagtgcacccaggtaaagaaacttactgaaaattcagtaagttggcaatcactttggcccagctttcccatacgaatcacgcagggtaaccgtcctgttgaacacaatgttctcaggtgtcgagtctgtgtccactgcgaagtagcctagccgttcgaactggaacttgtcaccaagaaccgcagtcgcaagcgatggcacggcgtaggcacccttgatcacctcttttgagttcgggttaagatcacccagccaatcctccagttcagcaggattctcagagaggaataatttatcaaataatcttacttccaccttaagtggttcaactccaggtgctggctgagcaacccagtgcagaacacccttaggtttagtagtctttgaagggtcatattca

SEQ ID NO: 19773 - DNA, 316 bp, Oryza sativa
  Clone ID: uC-osflcyp058d08a1
tttttattacaccattcttttggggttttattttttctatgatgtttacacggtctttattctttaattctttatgtgactatcctgtttttttgcacggggggaaaacaacaaaaactaggggcataggaataactataatccgatggcgaaaacaaaacagggggataaaagaaaggtgtatcagaatgcataggtgttagcttcaggggattaaccttgaggtacatatcctaagacagcaagtcacggacccccgaggaagacagggccccaaaaagggagctagccttgagggcgtcacaccccattaacg

SEQ ID NO: 19774 - DNA, 351 bp, Oryza sativa
  Clone ID: uC-osflcyp058d09a1
gtgaaaacaacatcattttttcttatatgtacgcttaggacgttgacacggttctccaatacaaaaatgttagtgagactttgatggtttactgtacgccatttaaaaccaacattaaagaaggaaccatagtaatttttctattcttctatgggtgaaacattttgagggtcattttttctgaaaagtatttaagcagttatggtcaatggtgttaacctttcagttgggatttcaactcttggaaattaccatattcccaaggaccaggcaaggttcacttggaccaaacaatttaggcttcctttaactttttccaaacctagttttctttcaatggagaaaaatttt

SEQ ID NO: 19775 - DNA, 435 bp, Oryza sativa
  Clone ID: uC-osflcyp058d10a1
aacagcaacaacagcatagcttgccttatttgtttgtttccacaagatgaaaatgtcagcggaccaggaactgccacaagagaaggcggcaattagctctgccaacctgggcagccagcccccaaaggggcaaatactccccccaacctgcccatttccgcttggtcccaacacgctacaacaaagaccacaagcccccctgggtacacgggctgttttgttaagtactcagcatactatttttacaactagaagctttgttggatttctacagaatgctcgccaacgattaacagggcagataacctggcctaaaacaagcaggttctccggatgaagccacatcgttcaggcgtcgcatgctaattttagttcaggattttccaaggaacaacgggacgcaggtcattgaatcatcggatcaccagaagaaac

SEQ ID NO: 19776 - DNA, 514 bp, Oryza sativa
  Clone ID: uC-osflcyp058d12a1
agcagaaggcaaaggaaatttcccgcaaatacttattcatatgttttgacaacatttctcccgacgcatgctcattgtggcagacgcagctgaccacctagagcttttagttcaccattattatttagaccaagcatacgtcccaagatcagaacacatgcttacaagcgaaaatactaatagcctggctggctgcttcacagaataaccaaacgacaacctcaacagataaaaatgccacggaatgaaaacaaagcagcgaatcgtcaccagaagtcccatcttactcatcaaacactccatcattctcctccaacgcatcctctccccaggggagaagattgcccagtttaccttccttaacaggagcagggttcaccatattctcagcctcgaagcagtgcagaacagatttgggcgacccaacagcaacaggtacgtcttcagtagcgtcgaagctctggtagatgaggaggccaccacagggcagctcctgctctaccatgttgtgcat

SEQ ID NO: 19777 - DNA, 454 bp, Oryza sativa
  Clone ID: uC-osflcyp058e01a1
tctggcttggctccttgttggcggccgtccttttttttttttttttttaaaagaacaggcagacatgcctgtggaaactggaatacttttctcatgttgcacctttccagaaatttgaacaaaaaaaatcccaatgcttttagaagtaaccaagcagttggtgattttaaccatttcgagaggtttcccacttgcacctgaatacctggtagatccatcggattatcttggttcttaccatttattccatgcggaaacccccttaacgctttgtggtctatcaagccgacggcgctgccagttcaaaatacaagcaagaaaagccgaatccgcatggcgaggaccaaaagggtatcacgttggattgctcagcaactgggaaataccggcaggcaaaatgagatacggggaattgatgcacaaaatggacaccggtgttgcggtgctgcattct

SEQ ID NO: 19778 - DNA, 415 bp, Oryza sativa
  Clone ID: uC-osflcyp058e02a1
accttgccagactaatcggaacagccaaaatagacaactgaatgtagctagaacatggcagtaaggcgactgcccaaacggcaacgtaatcaacctgagtatgataacgcacgatcaggatcagttcgcaccaatatgtgctgcaaaacaggaacatgatgggatgacaacagaacttgaagacgcatggtgccgtggtctcaaccacagggcacactgcgcgctagatttgggctgctggctgacgggcgaacgtgcaccaattatagcctttcacgtaatcacccatatagatgacacacttgaccatgagcggtacaagcttagagccgaccatcaaagtcctttttagtccatgcagaggcactgatgcagcatgtaacaagggtctggttgaggctcatatgcctgcgct

SEQ ID NO: 19779 - DNA, 519 bp, Oryza sativa
  Clone ID: uC-osflcyp058e03a1
tttttgtaataatatatatatatatatattgcacgtatcacttcaacatataaaacaaataaaatattccaggctccatatttgatcggtacggagttcaagggatacagacttaatatttagttgttcagtgcagtctaaagcacaattaggggaacacaaactagcccaccttatggttcctggaagttcctactttcatctttggacttatcaccatggcagcgctgacgatcatatagtaaatgttggaacaccatatagcggcattaacagcaatgacaaaccttatatttctaatgcctcttctgaaagcatcttccgacctgcaccacataaaacatagtactccctctatctatttttgatagtcataatttttaaatctgaaaaaattatttttgataggcatatttcaatccaacaactgatcatcttaatggttttctcagatttaatgtgtgactttttttcttttacactaattggctacaatgagtttgagaaatgaaatattaa

SEQ ID NO: 19780 - DNA, 345 bp, Oryza sativa
  Clone ID: uC-osflcyp058e04a1
ttgtggtttttttttaggccaggggacaaaatgaaagtttcaaagagattgaatttacattatattcattttggatccagttccaaaacaattgagatccaagcatatgcatggtctcatgatcgagctaataatttagtttatcaaccggggttattgctgttggaatgtgtgagatgcatatatatatatatatataacatcaagtatatgtatatgataataaataattgggggccggcaattgatgcatgtgagtgagagattgaagattcatatttagtgtgtagaacgtaagttcgggttgggggctggggtgtttatggttatagtacaggagttgaa

SEQ ID NO: 19781 - DNA, 496 bp, Oryza sativa
  Clone ID: uC-osflcyp058e05a1
accaaaggtcgtttccatatctctaaaaatgcagaaaaacattatatatatgttctagatatatatatatagccagcatccagcgaagagaagattactagattggcaaataacaaaggtagaaaaggagaggttcaggtaaggcttcatctactatatgtataagggggtggaggggtcatcatcatcctccttggtcatacagaggcaggcaggcaatggtggtggtctgcttcatggggggtcaggtactcaggtcactctagtagaagacggcgttggcactctggtagccgccgtcgtagatggcctggctggctccggcgcccatccccatggcggcagcctgctttagggcggcgtgctgactcatcagggccgggttcgctgccatcttgctcagcgccagggtgcgctcgtaggctaggaggtcggtcgccgacatgccaggattgaatggtgctggtgctggagggggtaggggcgcggatgctgt

SEQ ID NO: 19782 - DNA, 410 bp, Oryza sativa
  Clone ID: uC-osflcyp058e06a1
ttgttgttttttttttttttttttcctaaattggtcccatttttttttatttcaacttgggtaggtcatagacaaccactttgccggctttttaggatttacaataaattttcaacacatgcccaaaggagcacatcacattttgctgaaattcttgctcttccttaacaaagaagcaacaagaaaaatgtttagggggctctgaactatgaagcatattttaagtaacaatttggaggaaaagtggaaaacacatgtgtacagtgcctgaaaaggagagcagttccaagacatcatcagagggtcatattatcacattcctctctaacaggtgcaaagagatcagagttcatgtttcttttcaccgccgttcgggaacattgtcacaaacattttcccccttgttctcc

SEQ ID NO: 19783 - DNA, 474 bp, Oryza sativa
  Clone ID: uC-osflcyp058e08a1
aataatatatatatatatatattgcacgtatcacttcaacatataaaacaaataaaatattccaggctccatatttgatcggtacggagttcaagggatacagacttaatatttagttgttcagtgcagtctaaagcacaattaggggaacacaaactagcccacctcatggttcctggaagttcctactttcatctttggacttatcaccatggcagcgctgacgatcatatagtaaatgttggaacaccatatagcggcattaacagcaatgacaaaccttatattcctcatgcctcttctgaaagcatcttccgacctgcaccacataaaacatagtactccctctatctatttttgatagtcatatttttaaatctgaaaaatttatttttgataggcatatttcaatccaacaactgatcatcttaatggttttctcagatttatgtgtgactctctattctctacaca

SEQ ID NO: 19784 - DNA, 508 bp, Oryza sativa
  Clone ID: uC-osflcyp058e10a1
ttgttgtttttttttttttaccaggttttttttttatttttttaatattgcccaaaaacattttatatatgttctagatataaaaagggggaccgcatgcacaaaagaaaaaaaggcgagataggcaaaggacacaggtagaaatggacaggttcagggaaggggtcaaccactaaatgcaaaagggggaggggggggcatcaagacccccctgggacaaccagaggcaggcaggccacggaggtgggcagcttcaaggggggtcagggacccagggcactctagaaaaaggacggcgatggccctcaggtagccgacgacgtagatggcctggctggctccggcgcccaaccccatggcggcagcctgctttagggcggcgtgccgactcaacagggccgggtacgctgccatcttgctcagcgcccgggagaccacgaaggctaggagggcgggcgccgacatgcccagtaagaatggtgctggagccggaggggggaggggcgcg

SEQ ID NO: 19785 - DNA, 477 bp, Oryza sativa
  Clone ID: uC-osflcyp058e11a1
accaaaggtcgtttccatatctttaaaaatgcagaaaaacattatatatatgttctagatatatatatatagccagcatccagcgaagagaagattactagattggcaaataacaaaggtagaaaaggagaggttcaggtaaggcttcatctactatatgtataagggggtggaggggtcatcatcatcctccttggtcatacagaggcaggcaggcaatggtggtggtctgcttcatggggggtcaggtactcaggtcactctagtagaagacggcgttggcactctggtagccgccgtcgtagatggcctggctggctccggcgcccatccccatggcggcagcctgctttagggcggggtgctgactcatcagggccgggttcgctgccatcttgctcagcgccagggcgcgctcgtaggctaggaggtcggtcgcccacatgccaggattgaatggtgctggtgctggagggg

SEQ ID NO: 19786 - DNA, 425 bp, Oryza sativa
  Clone ID: uC-osflcyp058e12a1
cctagattggtcccatttttttttatttcaacttgggtaggtcatagacaaccactttgccggcatattaggatatacaataaatttacaacacatgcacaaaggagcacatcacattatgctgaaattcttgctcttcctcaacaaagaagcaacaagaaaaatgtatagggggctctgaactatgaagcatatcttaagtaacaatatggaggaaaaggggaaaacacatgtgtacagtgcctgaaaaggagagcagctccaagacatcatcagaaggtcatattatcacattcctctctaacaggtgcaaagagatcagagttcatgtatctttcaccgccgctcgggaacattgtcacaatcattttccccttgttctcctctctgtctgcaatcttgatgcaggcagctacatttgcacc

SEQ ID NO: 19787 - DNA, 296 bp, Oryza sativa
  Clone ID: uC-osflcyp058f01a1
ttgttggtatctgcaaacaggagcgcagttccataccaaatacgcacgataatacatactttaaacagactgagtttaacgtacatcacgtcacatggaacattggccgtcctttaaaactggaatactacatcacacacaaacaaacttccaattggggcgcacaaataaatctgcaacaacagatctagtaggagtactagttaacacagccaacaacagtagtacccgttttattttgaaccctttttgcttctgaatcatttggttgcaaagaacagtccccacctttgctt

SEQ ID NO: 19788 - DNA, 276 bp, Oryza sativa
  Clone ID: uC-osflcyp058f02a1
ataggcaaacaataacacagttccataccaaatacgcacgataatacatactttaaacagactgagtttaacgtacatcacgtcacatggaacattggccgctctctaaaactggaatactacatcatacacaagcaaactaccaattggggcgcacaaataaatctggatcaacggatctatgtgggagttctagttaacacacttcgacggcagaacgctcccgatttgttctgaaccatttttgattctggatccaaatggttgggcttacag

SEQ ID NO: 19789 - DNA, 542 bp, Oryza sativa
  Clone ID: uC-osflcyp058f04a1
gtcataaattatacaaccaaaatttgcgaacttaatcaggttcaaaatggaacatgtaagcttctttttcatcctgataaagacgtacattttgcaatgagtaagtgattctctggagaaatatttgatgggacgtagcttacaagatctgcatctaaacccttctctctaagccataatagcctaccagtatcaataatatctttacacataaaccccaaggcagctctctcccctgctggtatacttcggatgagtctatcgattccgctgacctccacatcagacttctctgcttttccgcacctgtcttctacagatgagtcttcaacctctaaagaggaatccggggagctgtgatcaccatccacagcccagctgctaaaccaagtcatggtatggaaatcttcctctgtaatccctaaccctgagaggaatgtcttatctgcaatgagaacaggaacattattctctaagaagaaaatctaaaggttttactgcaattttcaaaggaggacggtataatattatataaagtagtc

SEQ ID NO: 19790 - DNA, 461 bp, Oryza sativa
  Clone ID: uC-osflcyp058f05a1
cccagccaaaaaaaaagggggggccccggtaaaaggggcccccaaccgggcaaaaggcccatgaaaaaaaggggcccccggggggggaggaaaatttaaaaaaaaaaaaaggccccccccaaaggcggaaaaacggggggggggccccccccccggttaaaattttccccaccaaaaggaaaaaatggggaaggtaaatcggaaaaccccccccaggggcccaattccagtttttgggggggggggccccagggcccaaaccaaacccccaggcagggcggcaagggaaacccggggcaaaaaggcgggggccctaaggataaaatcccgggcttccagggggggggggcttccccattaaaaaatatgggagggggttttaataaccttctttgagcccaggggggaaacccccccccgggggccccccgaggccctggacaaatctccgggggcccccc

SEQ ID NO: 19791 - DNA, 474 bp, Oryza sativa
  Clone ID: uC-osflcyp058f06a1
ttgttggtatgttcaaagccagcgtatttataaagcatacctgagagccacaggaaacagtatcatcaaattgaaataagaaacggacccgatggtcccttaacccaggcccgtgtcgacatcagccccccaaatacttgactaacaaaggctcgcggtgaccaggcacattgggaggcccaccaaactggctgattaccgaccaccacgggggcggggcaccaggtggaggggggactccttttggacgttgtagtcggagagggtgcgtccattcatcaggtgcttgcacagcgaagatcagacgctggctggtctgggggaatgtcctacttgacctggaaataggccttcaaactatccatggtgtcggagctctcaaactccaaagagatggtctgtccagtcaaggtcttcacgaagatctgcatccatcacggagactaagcactaggtggagggtagactcctttt

SEQ ID NO: 19792 - DNA, 415 bp, Oryza sativa
  Clone ID: uC-osflcyp058f07a1
atctgcaaacaataacacagttccataccaaatacgcacgataatacatactttaaacagactgagtttaacgtacatcacgtcacatggaacattggccgtcctctaaaactggaatactacatcacacacaaacaaactaccaattggggcgcacaaataaatctgcaacaacagatctagtaggagtactagttaacacagccaacaacagcagcacccgttttattctgaaccctctctgcttctgaatcatttggttgcaatgaacagcccccacctctgctcaccggcagagctccgcttcagcttcgcgttccagccgttcacaatgtcatcgtagtcctcctgggtgaagtctgccaagaaggcttctttgttcttctcaacttcagcaagctccctttgaagaaca

SEQ ID NO: 19793 - DNA, 460 bp, Oryza sativa
  Clone ID: uC-osflcyp058f08a1
ggcacaggcagatacatttgcccattattcagtgatgataatacctgatacaaactacaaaactacagacctacaagctgagatcggacaagagaaggaaacggcactgaacaatctccaatctcctcccgtttagcagctatcttaacaagtaattacatcacaactcagtggttcttttggcccctgcaaagaaggcctaagtggaagaactatacaaactcgccctccacaaatcacaaatccagcccaaaacgctgggctttcaccaatactcagttgagaagaaactctagcactagcaaccaacctcgccggctttgtaaaataccagcgccgcatcttctacaccattacatggtagctcatgaaaacttggatgtgttcagcctgccccaccattttcgcttcaccgagttgggcgacgattggttgccgctccccagtggttgggatcacc

SEQ ID NO: 19794 - DNA, 383 bp, Oryza sativa
  Clone ID: uC-osflcyp058f09a1
aaaagaacaggcagacatgcctatggaaactggaatacttttctcatgttgcacctttccagaagtttgaacaaaaaaaatcccaatgcttttagaaataaccaagcaattggtgatatcaaccatttcgacagctttcccacttgcacctgaatacctggtagttccatcggattatcttgattattacaatttattccatgcggaaacccccttaacgctctttgatctatcaagccgacggcgctaccagttcaaaatacaagcaagaaaagccaaaaccgaatggcgaggacaaaaagggtatcacgttggattgctcagcagctggtaaatacgggcaggcaaaatgtgatacgtcgaattgatgcacaaaatggaca

SEQ ID NO: 19795 - DNA, 557 bp, Oryza sativa
  Clone ID: uC-osflcyp058f10a1
tgcctccttagcggccgccctcctttttttttttttgtttttttttattcatcctatttttgttatcttaatcaggttcaaaatggaacatgtaagcttctttttcatcctgaaaaagacgtacattttgcaatgagtaagtgattctctggagaaacatttgatgggacgtagcttacaagatctgcatctaaacccttctctctaagccataataacctaccagtgtcaataatatctaaacacataagccccaaggcagctctatacaatgctggcatacttcggatgagactatcgattccgttgacctccacatcagacttctctgcttttccgcacctgtcttctacagatgagtcttcaacctctaaagaggaatccggggagctgtgatcaccatccacagcccagctgctaaaccaagtcatggaatggaaatcttcctctgggagccctaaccctgagaggaatgtcttatctgcaatgagaacaggaacattattctctaagaagaaatctaaaggttttactgcattttcaaaggaggacggttt

SEQ ID NO: 19796 - DNA, 504 bp, Oryza sativa
  Clone ID: uC-osflcyp058f12a1
aggccagcaaacaaaatgaaagtaacaaagagattgaatatacattatatacattttggatccagtcccaaaacaatcgagatccatgcatatgcatgttccatgatcgagctactaatttagttaatcaaccgcggcgactgcagttggaatgtgtgagatgcatatatatatatatatataacaacaagtatatgtatatgaaaataaataatgggggccggcaattgatgcaggtgagtgagagatcgaagatccatatatagtgtgtagtacgtaggtccgggctgggggctggggcgatgatggttatagtacaggagtgaaaaattagtgcatcctgccctgctgcgtctgggggagaaggccggggatgtaagggacgccgaacttggggatgaactcctggccctggatgaaggcctccacggtgaactccttctggacgtcctggtaggtgagggactggacgcccttccacttggcgcgcttgctcatgtcggc

SEQ ID NO: 19797 - DNA, 66 bp, Oryza sativa
  Clone ID: uC-osflcyp058g02a1
tttttgtttttttttttttacaaggtatacctttttaattaaacaactagtaccaaaacttgacca

SEQ ID NO: 19798 - DNA, 303 bp, Oryza sativa
  Clone ID: uC-osflcyp058g03a1
caaggtgaacctaatttacaacgaactggacaaacattcgggctaaatacgaaacaagccccaggaacaaccaaaggctaaactaagagaaaacgagaccctacgacacaaaagggcgcaaagaccggaatctgaaaggacagaggaaaagaagcacagggccaacctgcaccaaaaggaccgcgaccgaggcggtaacgggggaggcgaattcgccgccagcccacccttaagctgacgctgcaaagtaagagcaaccgagacaattggaggagcaagagcaggccaaaacaccacgagcag

SEQ ID NO: 19799 - DNA, 508 bp, Oryza sativa
  Clone ID: uC-osflcyp058g04a1
agtcttaaaacttccgaaaaatttcatcatatgcatgatgcaggagaagctaccaaacaatcacaaagttaggtgggtgggcaggagaagcgccgctgcaaatttccaaaccttgtatcatcatcatcagctttggatacagaaccaggcataacctgggatcatacacgtggttcttggtgtggagaagttagagaaagcttcctgctgaagcatgaatttttcagtcttcatgctgtacatcatcagcatacatgaatgctgttagctaggcttaaagaattgagggagttgaagggcgacaatctgtcagagatacccagggcactgattgttccatagaaatgattcagtgttttgaatttgatagcaggtcgttcagctcagagacaactgccatatagcaaaacttgtattgatcctctgtttggaccattccaggtcgctgggatctaaattttttgacagttttagaaagatccaaagcagacatgtcaccaagtaaaat

SEQ ID NO: 19800 - DNA, 457 bp, Oryza sativa
  Clone ID: uC-osflcyp058g05a1
tttttttttttttttttttttttttttttttttttttttttttttttttttttttttttttttttttttgggggaaacatggaccataaaaaggttgcaaccaaattttgaaaaagggggagccttcactttttgataggaaggacaggggctcaaaactggtgaaaacaagcaaatgactgggctgccccccaaacttttaggggggggaaaaaactttagcagccactattttgttaacaaaacagggcagccatagcaaacaaggggctggtttccatttaggaagttcataccgagactggtttaggggtgataaaaaaaacacgcgaggggaattttttaacaaccgggcaatgacaggtttaaccttaaaaggggggtaaagggggtatttgggaaaaacctttgggaaatccaccttgtttgggggaaccttttcctccataacctggtt

SEQ ID NO: 19801 - DNA, 532 bp, Oryza sativa
  unsure (1)..(532): unsure at all n locations
  Clone ID: uC-osflcyp058g06a1
gaaacaagctaaccgtgccaaagcaaaggtctataatttaaatgcccaaaactttaacattgttcaagtcgatttgtcgtctcaaagtaacaaatacccaagtaccaactttggcatcaaaactatgatttctggaatacattgggaacaatccaaggaatgcatcttcaagcagtttcagtcatagggtactcaaaggcaacatctttcccacaaagcctgcggtagaccgcggagaaggtctcgagcttgtattcggtattgttgcgctcctttgggtccaagaaaatcttgatgaccttggcaccatccagacggtatctgatgcgcttgccaacaatctcagctgggtagactacatcctccaagataccatcatgaacagcagtaagagttcttgtgcgagggcgctgaacagccgagcccttcttgggaggcctcacaatcctccttgttgcaacaattaccacatccttgccgctgaacttcttctcgagctccctgacangcctgacatggattttcttgatgc

SEQ ID NO: 19802 - DNA, 355 bp, Oryza sativa
  Clone ID: uC-osflcyp058g08a1
gttaacccgaagtaaccttatagcatcaatcaacgataaccaaaacttgtctgaactggtcaaatatccgacaaaactcccatatttaaccttggacactacgaaaatttctccgaggcaaaaaagatctcttaggatataactgtgcttaaaaacagggctcctcgcaagacgatgtaaagtagcacattgcaaatctactcgatcaggtcatcgtcatcatctggcagtggttgggctgcagcccgtgccagttcagcctcgtgctgttgctgggctgctagatcaattgtgacatctggaggggccagagcaggtgttttcaacaaagtggaggttaccatcgccagcaagg

SEQ ID NO: 19803 - DNA, 151 bp, Oryza sativa
  Clone ID: uC-osflcyp058g09a1
attaaatattgggggtttttctatacttgaattcaagggcaacttaaaatacaacgaatttaacatacaggagaccaaaacccgtaatcaaggccacaaaaattaccaaagagcgaaacctacaaaagatcaagaccccaacagaacaaaa

SEQ ID NO: 19804 - DNA, 414 bp, Oryza sativa
  Clone ID: uC-osflcyp058g10a1
gtgagaaattaacatctccattgaagtttttcgctccactgattagatctaaaccgatgtagtgcatatcactgcaaaaatgtctcaaaggtaccagaatatatctatcgtgctatcagcgcatcgactgtgcatcatagctcgagatgattaagtaattacaggtccagagtctgcagctctgcaagacttctcggtgcatatatagtactgtaggatatggtaggtaaggcaaatgttactaagtttcttcagctgtaagaaccaccatgtactggacaaccgttgaagggcgtaagaacaggcgtgccacttacatggagaacgagagctgacccatgaagaggttgatgacgtcaaggtacagcgagatggtggcgatgacgtactcgttgtaggtgtggcgcttgatca

SEQ ID NO: 19805 - DNA, 484 bp, Oryza sativa
  Clone ID: uC-osflcyp058g11a1
ctggcgatgcatctctttgtttgccgcccgtcctttttttttttttggatcaagctaaacgaggggggataagattaattatttatatgagtaacatctttttcattggggaagacgatgtgccttataagtgttgccccaacccatgtatccaaggttggcatcaaaactttgatttgtggaatccatggggaacaatccatggaaagcatctaaaggctgggccagccatagggtacttaaaggcagcatttttcccacacagcctgcggttgaccgcggagaagggctcgagcttgtatacggtgttgttgcgctcctttgggtccaagaaactctggatgaccttggggccattcagacggtatctgatgggcttgtcatcactcccggctgggtagactacatcctccaagatgcgcttatgaggcggatttgggttcttgtgccagggcgctgaacagtcgggggcttcctgggaggc

SEQ ID NO: 19806 - DNA, 450 bp, Oryza sativa
  Clone ID: uC-osflcyp058g12a1
gaaaaaaatcctgaagtctgtaccaaagttcagtattacacctcacagaaaatggcccgtgtctgcagctgtgtttcttcttcgacagtcatgcgttcctctgtcgaaggggaacatcgtacgggcagccaatccgagcacagtatatatagtatagcagttctgcccggggacagtcaatgtgtgtgcttcgttacattataggagtatatatttctgcacctacgcgagcccgtacttggacagtggtcttagttttcgtacactttgcactcgtcggtctccgggttgtccttgcagaagtcctccagtgggtcgccgctgccctgcaccgacgcgccgggccacttgctcgccaccagatgcgccagatcgaccacgcgttggctgtagccccactcgttgtcgtaccaggcgaccaccttgaccatgtcgtcgcccatgaccatg

SEQ ID NO: 19807 - DNA, 442 bp, Oryza sativa
  Clone ID: uC-osflcyp058h01a1
ttggttttttttttgaattacaaccaagtttgtttaaccataaagggcttgggttaattgttctcattacataatgaaactattcgctacatggaaaaatatcgaagttatatatatctatcagactatcaaatattctcgctcttaccatcagggaatctcctttgtgctggtgtcgcccttttgcttacaaaatgcctgcgctgccctttgtacggcaggacatcctcgctgtcatcctccctaccgttaccatccttatgaatcgagtcaaaaattttgctcttgccagtggatctccccagggttgatgctgccctagtgcgcactttggcacgtttgcgctcgccttcgtctggatcagagccattgttctcccgatcgaaagaggaattaaaaacttctacttttgtcagtcccctcttgtgttccttcacctatt

SEQ ID NO: 19808 - DNA, 501 bp, Oryza sativa
  Clone ID: uC-osflcyp058h05a1
agagggaagagatggtagcatcatcatgattcatgagctcacttcatccagtacaaatgattgcgaaaatgccatcgaaattatatgtacaagctcgtgttgtttcagtaaaaccgtatacacatgtaacgcatcgtcctatctaattctaccacggctcggagttcttcgtccagtaactcgtggcaggtgatctgcggctgctccagccatcctctgctaaaatcaagcttacccgcgctctcagggtgttcaccgcttcgtcctccatgatctccagcggattgttccaatgctgcccagccactgcggtttggtatgatgccaagtattgcaggcagtcttcatagtacccacagtggtagagaagggcggcataatccctcagttcacggggatcgtggttcagtaggataagtcgttcacatgctgctaaagcacgccgcatatcaccaaaccggacattagtccatactccacgcatcaacctatgttgagcag

SEQ ID NO: 19809 - DNA, 534 bp, Oryza sativa
  Clone ID: uC-osflcyp058h06a1
acgcaatatgagcacaactatataacttaataagcacattacagcacacacatggccaaggcagttatttgaatcagtctccaacatacttcaaatcatagaccacaccatacagcaaacatagtataaacattgtcatagagagtacagctgatagcagcttgtaatattctagcattactttggtagcatccctctacaaaacatagcagacatcaccagctcttcatcttggccatacacattcaacatggtttgctagtgacagaccacactgaccagaacatttcgtctcctcagtaggcaccagctgccatgagcagctcatcaaggctccagatgccctcgttgcttgccccgtcttgtgtagcatcattttgcagaaggttgtccattgattcatctgagctgctctcaacataaggtaatggcaaatacttcatctcgggatcgaaggtgggcatgttttgtgcgagattaggcatgccatttccctggggcacggcgataccatagtgttcctcattctctttg

SEQ ID NO: 19810 - DNA, 475 bp, Oryza sativa
  Clone ID: uC-osflcyp058h07a1
gaattacaaccaagctagtctaaccataaagtgctcgagtaaatagtacacagtacataatgaaactatacgctacatggaaaaatatcgaagttatatatatctatcagactatcaaatatcctcgcttctaccagcagtgaatctcctctgtgctggtgtcgcccttttgctcacaatatgcctgcgctgcccttcgtacggcaggacatcctcgctgtcatcctccctaccgttaccatcctcatgaatcgagtcaaaaattttgctcttgccagtggatctccccagggttgatgctgccctagtgcgcactttggcacgtctgcgctcgccttcgtctggatcagagccatcgtcctcccgatcgaaagagtcatcaaaacttctacttctgtcagcccctctcgtgttcctccacctattgtgtccgtgctggctgtcatgggtatcattttcggggccttcatgcttg

SEQ ID NO: 19811 - DNA, 455 bp, Oryza sativa
  Clone ID: uC-osflcyp058h10a1
aagatcaaaatcaaacggactcgactgtttcctctttttagttaaacaaccaaatttgtttgtttcaggaccagtacacgcgagtcaaaccctagtacatgcgagtcaaaaatgactatcgatttcagtaggaatacatgcatataacaactattcccggtaagcaatgaacttcgcaatatcatcaagtccagcttctctgtaacatccagcaattcgatcaacaacatcgtcccaattaccatccaccgatgccaaatccattagaaatgctgcctcgtcaagaaccacctgttctggagcttttcctttcttcagatcctcacgcttgccctcctcactaaccttctctggtataaactcaatctgctcatcctcccacccagctaattcagcagcctcttcataactgcagcccagtgtccaccatggtgacttcagagccactcgagctg

SEQ ID NO: 19812 - DNA, 446 bp, Oryza sativa
  Clone ID: uC-osflcyp058h12a1
agcagacaaagccaaagcatgcaaatatgcgattgcaatgctgcccttctccctctcctctcctctgcctaactagaactccataatccatatccatcatctctccactactactatagtacacccaaagcaaatgagcactagctaggactagtagtacattgatgatgatcgctgcctctcctctgccccctcccatgctccctctctcatcatggacggagcataaagcccgtagccaaaagtagagcgcacaaaaagagtttggccagatcatggcactgcgaaaagggcatcaactagctatggctagcttggcgatgccaatgccgacccaaggcatggagaaatggaggatgatggagtagggtacatgtcgagcatgcagatgcagtgtactgccagtagtaacactcgatcgctgctgctgactgctggtgctgttg

SEQ ID NO: 19813 - DNA, 353 bp, Oryza sativa
  Clone ID: uC-osflcyp061a01a1
ggggggggaaaaaaaattcggttttgtattaaacccagggaaggtttttaaaaaaaaaaattgggggggggggggaaaagggggccctttttaaaaaaaaaaaaaatttttcgggggaaaaattttggaaaaaggggggggaaaaatctttggggggaaaaaaatttttttaaggaaaccccccttggggcaaaaaacaacagggggggttttttaaagggccggtttttgggaggaaaaaaacccctaaaaaaacccccccggggttttttttttggggggaaaaaaggccccttttgaaaaaaaggggaaaaaaaaaattcccccaaatggggggtttttttgggaggggg

SEQ ID NO: 19814 - DNA, 362 bp, Oryza sativa
  Clone ID: uC-osflcyp061a02a1
gggcaaatacgccccaaaaatttcactccttcttaaaaatccccaaagccaaaattggtgccaacaaaacaaagctgctgcccgctggttggcgggggccccaatatcaccccctttgggcccggggaaaaagaaccccccaggggtatcaacctcccaaaaggggccgccccgtttggaaaaaaatttttttctgaactttcttggttgggccaaattttttttgaaaaaaccaaatttgggggcctttggtacttcgacccccacaaattcacggccttttggtcctgggggctttgaaaaaacacggggagaaatttaaccccccttttgtttcctggttcccttttggggccggaaaa

SEQ ID NO: 19815 - DNA, 456 bp, Oryza sativa
  unsure (1)..(456): unsure at all n locations
  Clone ID: uC-osflcyp061a03a1
ggcgccctttttttttttttttgatgtaaatgggtgagggtattaagaaccgacagcatactgacggtatgggtaatacagagactagaaacaggatgatggggctggggacacaaacatattacatgggtggatgtaaacgaaaaggacctgatccaagatttagtctgggttacgcactttgacaacagatcacttcagatcaccaacccatttataacttctccaaattttatttctctttggaaccaacccccaccaccantctaataatcannnacccttattatcacccaaaccattgtattgatggtaaacgctaacccaagcttattgacacatgtacataacggaatggcatgggttaagagaactatttgtctcaagtacagaaaaccgtttttggggcccttanggtgcattagtaatcacacgcatccatttaatttttcttaa

SEQ ID NO: 19816 - DNA, 453 bp, Oryza sativa
  Clone ID: uC-osflcyp061a04a1
ttttgtggtgctttatagtggtggcggccacaagaggaatagatcatacaaccaacaacaggcaaaggataaaggtgcacttagctattttaatctgggaagatggccaacattggataaagttctacccccaacctgcccacttacatttggggccaacacgctacaacaataaccacaagcccatccgggcacaggtgctctagtttatgcaaatcatgttaaaatttaggccttgcggggaatggtgctggacagacagaatgggccccaacgcaaaacatgacctgttgcaggacatgaaacatggatataccacggatgaaggcaaatggagtgcagtccaagtgtataagtgagttcaggagcattcatagagcaaggggaagcttgctagtgagtaatggcatcacgcacagaatctgttagtttattccccccccctatattggg

SEQ ID NO: 19817 - DNA, 445 bp, Oryza sativa
  Clone ID: uC-osflcyp061a05a1
aagctccaagcaagagcagctgcaggctgcatctccattattcatataacatattgtactagcaaaggttccattacagtatatgcactctcttagttgaacataaggccaaaccgacccacggtttcgacttaagccagcaggagatagttcatagaaaaagtgcacacttgcaacaaccatatcaaggtactcaacggatgaggctacattattccaacccaatcatgcacccaagctacacaagagtagtagtagtgcccaccactgacatggaccgatcagataaacagcatggtgtccaagcagcaccagagcataagggcaggctcttacgcattcacttttggtgcccatccagcaatcaggtgctccttagctgccttcgtcttgatgaaagattcgcggctaaacagagcctctgtgtaagcatgaacattggtta

SEQ ID NO: 19818 - DNA, 212 bp, Oryza sativa
  Clone ID: uC-osflcyp061a06a1
ggattggtatagtatttttttatatgaaactattatatgtgtagactattagattaacagtggatggtgtgccaatttttagagctagcagttgactatacaattaaacttgctcttaaaaaaatgcagcagcattaagccgccggcgacgataccggcgtcagcgcggtggtggaggggagggtgttaagccatggtagcagcttggcgtg

SEQ ID NO: 19819 - DNA, 456 bp, Oryza sativa
  Clone ID: uC-osflcyp061a08a1
ggctgtcaatctggtactttcttttgcagaatagtatttatacagaaactgaaaacaacagataggcaggcagacacagacacaatgcagaggtggctgctacggtgatggacctcacccaatattcgttgggttccccactttcacaacagatcactccagatcaccaacccattcataacttctccatatttatatgcaaatgcaaccaacccccaccaccagtgaatcatcaggtaccttatcgcagccaaacgattgtattgatggtaaacgctaacccaagctcattgacacaggtacatagcggtatggcatgggtaaagagtactatttgacgcaagtacagcaaaccgtttctgggtccttcatactgcataagcaatcacacgcatccatctatctgtatctcaagttcatgttaagctcgggcccgtacatgccgtcaggtacatg

SEQ ID NO: 19820 - DNA, 469 bp, Oryza sativa
  unsure (1)..(469): unsure at all n locations
  Clone ID: uC-osflcyp061a09a1
ggccgacaacgcggtcgagcttctcctgcgccatcgcctgcaccctcgggttcctcgccagctccgccatcgcccactccgccgttatcaccgcggtgtccgagccggcagcgatcatgtcccagaggaggccgatgacagtgtcgtcgctgaggtcgtattggtccctgagggtgaagagggcgtcaacgaagtgctgcttggcgccgtgccgctcgagctcgcgggcgtgctcntccatgatccgcctggtgaagcggtctnaccttgcgctgtgggcgttgtagagctcctcgtccaccaggttcagccaccgtagcaccgggatgtgctccgcgatgggcaccgacgcgccgatcttgatcccgtctttcacgatcgccttcagttcgcacccttgctcntccagctcaccagcggcatctatgaaccgtttcccgaaggtcagccgtgtgatgttattaaaggc

SEQ ID NO: 19821 - DNA, 454 bp, Oryza sativa
  Clone ID: uC-osflcyp061a10a1
gtgccttatttgtttgcttccacaagatgaaaatgtcagcggaccaggaactgccacaagagaaggcggcaattagctctgccaacctgggcagccagcccccaaaggtgcaaatactccccccaacctgcccatttccgcttggtcccaacacgctacaacaaagaccacaagcccccctgggtacacgggctgttttgttaagtactcagcatactatttttacaactagaagctttgttggatttctacagaatgctcgccaacgattaacagggcagataacctggcctaaaacaagcaggttctccggatgaagccacatcgttcaggcgtcgcatgctaattttagttcaggattttccaaggaacaacgggacgcaggtcattgaatcatcggatcaccagaagaaactgtgtgcatgtgcttgtcccttccatttggatctctaga

SEQ ID NO: 19822 - DNA, 330 bp, Oryza sativa
  Clone ID: uC-osflcyp061a11a1
gtggattggtagtagaattgttgtataccacacaaaagaatgtagatactgtgaaataaacgtttgattgacatgtcacaattatagagcaagatttcatcaatacaacaaatgtacagcgagtgctttaagagtgagattatgccggcggtgttttttgcgtattctggtccaaaggtggagatgcatgcccaaaagacatgatggcatctttggcaggctgcggcaagccctttggattttatcaatcttcacgacgtactttgcctgttgcaggaggtataccattcccggaattacagacactttggccgctcttcccatttcagg

SEQ ID NO: 19823 - DNA, 81 bp, Oryza sativa
  Clone ID: uC-osflcyp061b01a1
atataaaccataacagacaacaagaaaggcacacagagagccaagaaacctaccattcccaaacaccaacaaaaaaccaaa

SEQ ID NO: 19824 - DNA, 472 bp, Oryza sativa
  Clone ID: uC-osflcyp061b04a1
gactctcatctccctagataagctgttatatttgtttatgtatatacatagtaataaaactgtaagatgtctctatttaataaatgactaaactgtggtataaaaaaacttctatttacacagataaaaccaggttcccatcctttcggtgcatactactacctgtctacctggctagcacctatgtccctgttacaacaaccgtcggtcatactgaacctctgcatgagccagttttcctcatggaggtaacaggcaaaaaaaaacatgtgccttcctccagagaatctgcatctgtcattgacggcaaaggctaccaacggaagcaaccaggtggagaaatgccaaaggaagttcctagctcttcccaccaaggcgctcatagaacaagatatagccatgatctgtgttgccaccacaatgctcccgagaagagccatagaatgtttgcaggggggattcctcgctgatc

SEQ ID NO: 19825 - DNA, 431 bp, Oryza sativa
  Clone ID: uC-osflcyp061b06a1
tttgggtttttttttgtttcgaccgaactcaatgtaatagctgtttaatttaaaaacatgttaaggctcaaagtacaaataaccatttaactgggaaatcataaccaaagcttaataactattgagctccggaattacaccttacatattgggatagcaaccacagccctaaatacccatcgatccatccaaagctcccctagcctatgcaaattcttgtaaaatttaaagccttgctggcaatgtttgatggacaaaccagttcaggccctcgtacaatccctcacctgttgtagtacaagtgctatggatataccagtgttactggcgaagggagtgcagtccaagcttatcagtgattttagcagcattcatagcgtttggcagatcttgcttgtttgcaaagacaagcagcacagaatcacgtagct

SEQ ID NO: 19826 - DNA, 474 bp, Oryza sativa
  unsure (1)..(474): unsure at all n locations
  Clone ID: uC-osflcyp061b09a1
ttttgggtttttttttttttttttgttttttttttttttttaagaacgagctggcagaaaggaaatattttaacttaataacatccagaggacataacccattctcatggcatcatgctaaaggtggttaattataaaaaaacagttatgcgtttgcaaacataacataggagctttcagggaacaaaaaagggtagttttttcagtgtagaacccgcaacaaagaaagacttggtttaagctgggggacccttgcccttttttctttggggctttttcatgtnnaaatccaactccttgcccttaaggatataaccatttgtttgggcacactgcccagggcgggaagaaatgcagggcagnaacctcccactggcaaactgttttttnatgtgggggtcaagggggcgtccctgttggggctttttaagctttctgacaacaaggatgcttttctttgctttctttggggga

SEQ ID NO: 19827 - DNA, 412 bp, Oryza sativa
  Clone ID: uC-osflcyp061b10a1
tttttgtttttttttttttttttgcagggagaattcagcagggagaactgtttgctgtgaaattatggggggtttgctcgtcttacaggcaaaatggggaatccccacacaatccatgaaaatcatttagccgttgcacttctgtttgcacaaaccggctaaattaaaaacttctccattcagaaaaactagaacgggaagcatgttttccttcctttccctaccaaaacctgaatctccatccaaaagagggaggagtcgctttcctgcaccaccactcaccagcactactactactacttttagtcatctactgccgattttcaccaagccaagagggcagaagaaacccggagaatccagcattatgagctcctcccctcctcgatctcctaatcgatgtagcccctcc

SEQ ID NO: 19828 - DNA, 406 bp, Oryza sativa
  Clone ID: uC-osflcyp061b12a1
cgacggaactcaatgtaatagctgtttaattcagaaacatgttaaggctcaaagtacagtaaaccatttaactgtgaaatcataaccaaagctcaataactattgagctccggaattacaccttacatattgggatagcaaccacagccctaaatacccatcgatccatccaaagctcccctagcttatgcaaatcttgttaaaatttaggccttgctggcaatgttgctggacagccagtccaggccctcgtacaatccctcacctgttgtagcacaagtgctctggatataccagtgtccctggcgaagggagtgcagtccaagcttatcagtgatctcagcagcattcatagcgtttggcagatcttgcttgttagcaaagacaagcagcacagcatcacgta

SEQ ID NO: 19829 - DNA, 372 bp, Oryza sativa
  Clone ID: uC-osflcyp061c04a1
aaattcaaactatttcttttttttttttgtttttttttttcaagggaaagggggaccaacccaatacccgttcattaacacgataacccaaaacattccataactttgaaagtgcataggaagcccccctaattaacagggggtctttcccatatgaacccttttcttatttacacgtgcctaaataccctgccagccttttaccattggggcattcattaaacctttttactccagggtcaccaaacacacccatcccaggaggaatgccttacaaatcattggagtttgagtttgggggaaacagaaccatttgtcctgatttaaggaggcgggtatttacatggggagccttgtgcattttcccaattt

SEQ ID NO: 19830 - DNA, 425 bp, Oryza sativa
  Clone ID: uC-osflcyp061c05a1
tttttgggcaaaagaactttgtccttggatatccttgacaccttacatccacacacgtccagcttacacgttaactgttggctagatacaatctagaaaacataaatacgtgcgctacatgataaacgcagcttatctagatctgaagcaaaatatgatccctactgacaaactctacaatgtacgaggtccatggcctaacctagcacacgaagttagcctgtatatatatgcaacaccaccatacactgctgactgtaggtcagggcaatcatactttcactcttcaaacaaaatctgatactgaccaccaggataaccgtggtacagcaatctcctgaagtttggacagacctagctcccttggacaccatgatcttgccgaacaaactgacccttaacccgcggtcgctgctcggctagta

SEQ ID NO: 19831 - DNA, 389 bp, Oryza sativa
  Clone ID: uC-osflcyp061c06a1
ggtcgaagcacagcgggaagaactagctggattttttcatttttcgattagaccgcccgacgaagggcaagatgaacaaaatgtgaccccttgaacgatcggattgagcccttgacagattaatccacaccttgggaccttaattaaatatcatgggtcacaatatatttgggccagtgccgatgaaacgggcgaggggaagacgaaacaaaaattcaggaaaccagcaagaaagaaactttgtgggtggggatcgttgggattaaagcgggggaccggctgccccgcccggaattccctttggcgacgcgggggactgccgggttttcctttggtcttatcacccctttaaaggttcttattgagttgctgggttggcggggcttgga

SEQ ID NO: 19832 - DNA, 99 bp, Oryza sativa
  Clone ID: uC-osflcyp061c09a1
tttttgttttttttgttttttttcgttttttctttttttttttttttttttttttttttttttttttttttttttttttttttcaaaaaaaccaaaaca

SEQ ID NO: 19833 - DNA, 478 bp, Oryza sativa
  Clone ID: uC-osflcyp061c12a1
agaacgggaaaccagatcaaattggacagcattacataacagcaaacctcccaagtctctctattgcgtccattacaatgtgcgattttacgaccaaatatgttagcctaacaaagcaagcaaatacaaagcaatttagagctagaatcaatgactgatgcatgtaccgagttataaagaaatagcatcactcgtattacagcaaacaagagcaactctccacctaaatgtacataggagaactgaacccatgggtagactatgtgctcagaggaactttgcaggttgctttattgtggccataaccctggcacctgctgcaccgcactgcccttttaattgcgatgcgtgggtctgccggcttctcctttggcctgccaacccgtcgacgggttcttattggggttgcatgtgttactggactttgagattgatcacttaatatagcaggaggcagcataacatcgggttttggatt

SEQ ID NO: 19834 - DNA, 123 bp, Oryza sativa
  Clone ID: uC-osflcyp061d01a1
aaacaccataaccaaagcgaactcaattcatggtaacatcacggacgaagaacacctaacactggatggatggatagagggcttttcgactcgagagagctcactggacaccgattatacgac

SEQ ID NO: 19835 - DNA, 403 bp, Oryza sativa
  Clone ID: uC-osflcyp061d06a1
gaagtgaaatggaacacacgcggaagaccaaccacattaccttcccccattctatcctaacaactcaaagaaggaccaaagaaagctgctctcatgcgtgaccaaccaactaaatggaaaactgacatgcagatatctgaaatccttgtgactcctgtactatcagcatgctaggaagtgagcaatcccaccactgtgttctcgagcatacaccaaccaggttcaacccgtgaggacatcatccagtttgttggctagaacagttagggctgctccactcacagtaatcaacatagggggcaccggcatatcaccccgagagatccgatccattatggccctgcggaaaacttggaggcgccgttgatgcacccacaattcattaggaatccaccttttgcac

SEQ ID NO: 19836 - DNA, 391 bp, Oryza sativa
  Clone ID: uC-osflcyp061d10a1
ttttgggttattccagagtgaccgacagatagttccattcactcacaatagcacaagcacaaagtagaggttgttactgcataagaacaatcaccaagatgacaatgtctaaagcagatatgcttcaggttctgttcaggctgtactaggcaaaatagttctgttttattgagaccaagtactcacgtactggttcgggagtacggcataggtaggtagtttgtagccacagccatcgccatcttagtcacggcgcaaccttcagcatatatgctcccacttacaatcttaggactcgtgattcttgaccatgaacttctggccgactgatggggttcatgacaaccggtggtccattcatgccgggccatgcttgaaatttttgttattt

SEQ ID NO: 19837 - DNA, 457 bp, Oryza sativa
  Clone ID: uC-osflcyp061d12a1
caaacatgccatctgcaagattggaagtgaaatggaacacagtggaagaccaaccacattactctcccaattactctcctaacaactcaaagaaggaccaaagaaagctgctatcatgcgtgaccaaccaactaaatggaaaacgcagatgcagcatatctgagatccttgcgacgcctgcacgatcagcatgctaggatgtgagtaatacttccactgtgtactcgagcatccaccaaccaggttcaacccgtgaggcaatcatcgagtttgttggctagaagagttagggttgtacagcacagagtaatcaatatagggggactgcaaatcatcacgagagctcgatgcattttggccctgtggaaaacttggaggcgccgttgatgcacccatcaatccatcaggcaaaccaccatttgacatcattttctgcatggcgctcactgtattcctc

SEQ ID NO: 19838 - DNA, 382 bp, Oryza sativa
  Clone ID: uC-osflcyp061e01a1
ggttcaaaatagcattacatatagcaaaggtacatccaaatcattcggtataaaccgcaagatggaacaacggcccatatgtcttcttaacttacgctcaaatcaaaagtttatatataatctcaagaccagctccaaacttaaagcgaccagacaggtagccaaacacggtaacaaggtattctagttcttggggccaatatccttcagagcgcagatctgctcctcacccatggcagacatcacggtaacaatcagatccttcccctcggcgaatccatccttgatctgagtaagcagagcctcatcactagggagcctcaggtcatccttagtgcctccactttcagtcaggaggctgacaaatccatcttcagaaatg

SEQ ID NO: 19839 - DNA, 346 bp, Oryza sativa
  Clone ID: uC-osflcyp061e02a1
atagaaagttctcaagcatactaaccatttaggatagtttcagcaaacaaacattgcagaagcatttctcaggcgacataacttgccatgacactgcctccaaataagtaacatatatcaaatttataacattcttatccggaaaaaaataatgtccatccaaggaaacactgcctatgtaagcgctgaagcattacacaacttgactatttatgcccgtatatcaatgaaaaagagatgcagcctttaatccagtcttggttccataagcaatatttcaaagcctttcttcagacacatacaacagacagaagtactgtgccctacaagttccctttggaaaaga

SEQ ID NO: 19840 - DNA, 167 bp, Oryza sativa
  Clone ID: uC-osflcyp061e09a1
ttttggaatattataaaccctccgttactcaacattattggcaataagtcacacacataaatttagggtccgataagatacttaagcacacccagaagagtacaacatcaaacttattagcctatataacttggctatacgttacaatatccactaacaacaacaca

SEQ ID NO: 19841 - DNA, 458 bp, Oryza sativa
  Clone ID: uC-osflcyp061f01a1
gattataagtgacgaagcggtctcacataaaacagggcacacaggttacaacaacgagggttgtaagcccattaagccccaaacatcagatcaccacaagcaaatgtctcgaagacacacgcacacggcaacaggataactccacactggcagatcatgggatagcagcagttatcaatcaggccttgacacacagaacatcaagcccccagacgacgacgactcctctagtactcgtcaccatcatcgccatcctcattctcgtcggactcagcgccaacctcctcgtagtccttctccaacgcggcgagatcctcacgggcctcagagaactcacccttctccatgccctcacccacgtaccagtggacgaaggcgcgcttggagtacatgaggtcgaacttgtggtcgatgcgggagaacacctccacgacgctggtggagttggagataatgca

SEQ ID NO: 19842 - DNA, 472 bp, Oryza sativa
  Clone ID: uC-osflcyp061f07a1
tttcctgggttataagacgacgaagccggtctcacataaaacagggcacacaggttacaacaacgagggttgtaagcccattaagccccaaacatcagatcaccacaagcaaatgtcttgaagacacacgcacacggtaacaggataactccacactggcagatcatgggatagcagcagttatcaatcaggccttgacacacagaacattaagcccccagacgatcaccacttcatttagaacttcgaaccatcatcgccattctcatttttagttggactcagcgccaacctcctcgtagtcctttttcaacgcggcgagatccttacgggcctcagaaaactcacccttcttcatgcccttacccacgtaccagtggacgaaggcccgcttggagtacatgaggtcgaacttgtggtcgattgcgggagaacaccttcacgacgctggtggagttggagatcatgcaca

SEQ ID NO: 19843 - DNA, 342 bp, Oryza sativa
  Clone ID: uC-osflcyp061g02a1
gggatccaattttcttcattgagtacttcaatacccatccccaaattgaagatgaatatatgaacaacaaacaataatccccataaccttatttcaagatatgaacaacacatacaaatcctcaagataaaaaaaacatgaataaacatgaacaaatcacgcgagtaattcattatcatcgccatcgtcactgcttctgcttctggtgtgggaggaagaacaggagggggcggcgtcaccatcgcacctcccagatcggcccatctccgacctccaacactaatggatcggtcaagccaccagaggtaagtagaggagaaagagaggagaagaagggtattt

SEQ ID NO: 19844 - DNA, 237 bp, Oryza sativa
  Clone ID: uC-osflcyp061g08a1
ctcttttttttttttgggatccatgattattcatccgagtactttaatacccattcccaaattgaagatgaatatctgaacaacaaacaatcatccccataaccttatttcaagatatgaacaacacatacaaattctcaagataaaaaatacatgatttaacatgaacaaatcacccgagtaattcattatcatcgcctatcccactgcttctgcttctggtccgctaggaacaac

SEQ ID NO: 19845 - DNA, 259 bp, Oryza sativa
  Clone ID: uC-osflcyp061h01a1
ctagcaaaaggatcattgattttatacttatcacgagaagttcactgaaattacattcttaggagaagcagcgtatacacacggataaaacacggagaaaatctttacgagagatggttggtgtttgggaggcaagaacggccggcggcggggcggccattacgcggatgggagcacctttttgacgatctcgtcgctgagggaggcgatctgggcgttgagcgccttgacggcctcctccttttgcgcctagaggttg

SEQ ID NO: 19846 - DNA, 220 bp, Oryza sativa
  unsure (1)..(220): unsure at all n locations
  Clone ID: uC-osflcyp061h04a1
aaccaaaatccataacatccaaccattttttttaccaatcattaacagaaaaaattgggaacaagcataaaaagattgtgacggatgggcccgaaaatactcaaacttggaaacagggccctggccttaatgggaaggttaccagcccccgaagtataacgcctaacattnaaagcgcgnaacttgaaccccttaannnaagaccataccagggaaaaag

SEQ ID NO: 19847 - DNA, 101 bp, Oryza sativa
  Clone ID: uC-osflcyp061h07a1
atgtactagcccaaggatcattgattttatacttatcaccagaagttcactgaactctcattcttaggagacgcaccctctacacacctgataaaaccacg

SEQ ID NO: 19848 - DNA, 103 bp, Oryza sativa
  Clone ID: uC-osflcyp061h10a1
ttttttgttttttttttttttttggtttttttttttttttttttttttttttttttttttttttttttaaatttttaattgttactatttttcctcctctttt

SEQ ID NO: 19849 - DNA, 404 bp, Oryza sativa
  Clone ID: uC-osflcyp062a01a1
aagaaagaaccacagcactttacaattacttgagcacgatctacattacaaccacactaacgtaaattataggtatggagtccttgtacgaatataaaatatggttgcaggcttgcagaaagatcttgaatattaacattgcacagaagttcaccaaccacggcataaaaactgggaaattgactagacactccgggcactctaaaaatacagaccccgtcactttttgactccccccccccacgggacaagaccggacacggggtccagacccatgattacggaccggttcctgaaggcaacccaattttccctaaagggggggggaataaagattgggggaaataggggaaaaaatggttcctgggggaaaatttttttcggtcccaattcccctcaacata

SEQ ID NO: 19850 - DNA, 289 bp, Oryza sativa
  Clone ID: uC-osflcyp064a02a1
gcatgctcccctccttcagcaggttgcctcctttgtggccgcccccctttttttttttttgatgtttaaaggccagaattttatgcatcaatgccccatgatttgtataaagacgcttgcgaatgaaacaggatacaactagcaacccagacaaatcctggatatgaccaaacgcaagccttgccatctccacccaattacgccattattttttgggcataaagcagaacggctgaccattccgtacccttccaccagaactcaatactcataaacttccaacaacaaa

SEQ ID NO: 19851 - DNA, 375 bp, Oryza sativa
  Clone ID: uC-osflcyp064a03a1
ttttttttttttttttttttttttttttttttttttttttttttttttttttttttttttttttttttttttttttttttgaacaaacaaaaattgcgaatttaaaaaccaactccaggggagggggtttgcatggaccatggattactagccatccaaattcctcgaatttttttggcacaaccaactttgcaaagggggatttactgggggggaatgaaccccctccttgagggaaatggcccattcgacatttacagaggaagggggcaatgaaaattgcagggataacggccgatccccaaaagaacttatacaattttttttttcccctaggatatgattattagagcttgttaggatttccgaagggac

SEQ ID NO: 19852 - DNA, 358 bp, Oryza sativa
  Clone ID: uC-osflcyp064a04a1
ccagaaccaggaccaccaatggttgatacaaaattctcagcacataaactcacctgataagtttcccctacggtttgggagcatttatgtacaaggaacaagatcttaaggactgccaaaaccaggtattcttatacctccaatggtaacaaaccaggacgggagcatgaacaagcaaggagtagtggcacagagggttccttagtatacatcttcctaggattagatagtagtagagtgggaaatagaagtgcttattccagtacatcttagcttccagtagcttattacgggacatagcagcttgccatctagaggtttagacccatacaataaccacatatcaccatattaccca

SEQ ID NO: 19853 - DNA, 454 bp, Oryza sativa
  Clone ID: uC-osflcyp064a05a1
gcaaacaatcacgcaagagaagctgagctgctgctcctgctcttaatgcaggcatggcacatcaaggacgggcatttgcatcataataaaacgtctagccaaagttggataccacacattcttcgtcaacaaactgctgctgcgacaaaacccaaaaccaaaaaaaaaaagcaacctaacggaacggaggaaacaacccagtagttcttagttatgcagctctccctcccttttgacggatcaaaacctcatgcttgcagcatatgcatatcccaccaggccaccaccatggggtggtgaaccatttagtttcttgcgttgtggctccccaaaatgcccctctcatggtgaggaacacgctggtagccatttgatggcctgccactaccacggttgcccgcatattcgttgtcgccttcccctctagcatacccttgccctcctccaccgaaac

SEQ ID NO: 19854 - DNA, 334 bp, Oryza sativa
  Clone ID: uC-osflcyp064a06a1
ggggttggaaactagaaccccggtttttttttttttttacccagggttttatgactaagcaaatcctcaaagggggggtttcttaaaaaaaaatgggaaaaggggatttttgggggggggtttttaaaaaaaccagggggggaaaccccccatgggggatggccgggccacttgttgggatttcagggttccccacttttttaggacccccccggggggggttatttaggcggccttgcggggggtttaaaagggggggggcccttttgcttggaggaagcaagttttttaggaaaccccaggggcaatatcggtttttttgttggaaaaaggg

SEQ ID NO: 19855 - DNA, 439 bp, Oryza sativa
  Clone ID: uC-osflcyp064a08a1
gtgatgatgacagcattttctgaaacagaacacatgcatatgatcactgctgtgaatgaagaaaacaggtaacaactaacaacacagttaaatcctgattatcaacacaagagttttgtcattcttatttctttgttgcaagaaaaataggtttcactgaaaacaagaatcactggaacaaccagagaatttttcttaagcattcactgggcttctgatggtgcgctgttcagtacttaatggtgcttgttctcaaataggccatcgggtccccatgggaactccttgttacggatgtgcagataggggtacgccggcggctcgtcgaagtgggggtggcccttggagaggttgtacgccgccagcagggtgcaggtgacgatcccggcgtaggtgatcttctcccacttggccgtctcatgggcgtcgtcgtgggcgg

SEQ ID NO: 19856 - DNA, 347 bp, Oryza sativa
  Clone ID: uC-osflcyp064a09a1
gcaagctacttatatttcatatgctatggcatgaaaagaggttcaggtccgagatatacaaattacccagacaaaatggccatgtcgagggttcgccgtgaaaaaactttgaaaccaggaaactagcagtttaaatacagtaatctaatacaaagaacaacaaatacaattcacaccagctcctgtgaaacaacgccgcatccaaacctacaatagctcatgaactgatcaatttggaaggaacaatgatccttcaattttggatcacttgagaagagactccatggcttcgaagaaaaaagccaccatttccttggttggagttttgaccgcacactttacgccag

SEQ ID NO: 19857 - DNA, 312 bp, Oryza sativa
  Clone ID: uC-osflcyp064a10a1
aaacacgcaaaaccggggatttttttaaattttccccacaaaaccggggattttcctctttgggactggggttggcttacagggatccccccgtccctgggggtttaagaaaggggctttaagccttttacataatttaaaccatgggggtggccccctcattagaccttgatttttactccccgggggcaaaaagcgggggattgaagggttaggaaggccccattccagttttgagggggacctttttcggggggggtttggggaaataaaccctttcaacctttggcccaagctgcacctccttgggtt

SEQ ID NO: 19858 - DNA, 365 bp, Oryza sativa
  Clone ID: uC-osflcyp064a11a1
ctttattggcgcgcgccctttttttttttttttgggattaagcaatgcatcatttactcgctacaactgcgaatttctcgttagaattttgcggagaaagggtataaaccaaactccccaagatttgcaacttattacctctgcgcctcttggttttgcacaaagatgaaaaaaaaagtaaaaagggggcaaatcgtataaaggctatcctgcatggtttcccgggaatttactctgctggcaacgaacttgcggagtaaacccataaaaacgggctaaaaagaaggcttggaaaatgatccttattcccagtgtaactggaacgaaacaaacaggaaaaagaaaaattaattccaaaaccaggt

SEQ ID NO: 19859 - DNA, 441 bp, Oryza sativa
  Clone ID: uC-osflcyp064b01a1
cacactgcatttttttttaattggaaaggcagaatcacattgaacaaatgttccatgatttcacaatcttgaatagtaaagcacactagttactagttagagctctgccagagaaaaggatagcctcctgttagtgacaaaaaatggcaactgtcctcccatgcatccatacttattgcctagcccaccaaagcctatgtaaagaatccatttgcacataatacttgtttacaataaatagactaacaatgaaccgtacttatttcatggtttcttctttcggagggcctttagcaatcttgtcactcgtttgggtgtctttagactctatggcagtggcctgagctctcttacttgcaatttctctttgcattggtatttgatcttgcattactttcgtcatctcctttatttgcttctcttctttctccagttgccatg

SEQ ID NO: 19860 - DNA, 423 bp, Oryza sativa
  Clone ID: uC-osflcyp064b02a1
cactaagtcttcaaacagctggatggccgtaataaccaagccatcatatttcacaagacaagcattcagtgctcataaccgaggaataggtgaaaagaaaggacaaaatacaagaaaagactatacatccaaaccccagcttaacatctatttttactaaccttaatcatccccaacatttgtacatttttctcaattctaacattccacgaaacaaactccaagtcaaaacatttaaaaagcacttcttcagcagcagctcctctaagttccaacacccagcttgctaaaccgcttatgacatcgatatttgaggtatcttcacatctcaggactaatccataaaggtcccttgggaggacacacttggcccactggcaaccagtagagatgggctctggtggaggaacaatcattaacacc

SEQ ID NO: 19861 - DNA, 105 bp, Oryza sativa
  Clone ID: uC-osflcyp064b05a1
gtgggacaatacatacctagtaattcattttaattccacatttttagagttagggagagggcccataattcgttatagaggggttcgagatcttcataaaggcaa

SEQ ID NO: 19862 - DNA, 365 bp, Oryza sativa
  Clone ID: uC-osflcyp064b06a1
aaacaaccaacttaggagaagattaatggcaagtaaattgggggccaaaccatgcaaacttacataagggttaagggccgtcataacacaatatccccttgttggaaaaacaaacttttttcagcagcaaggaaataagggaacccaaagggaatttctgatcctaaaaagcgccccaggctagacaagttcggatcatagagcatcgccattgaaaactaggccaaacctttaaaacaatgtacattgttggcctcacaatgcttgcagggaccaccagtttgagcactggtaaatccagcaacagtccacgagaaagattcagcggggtttggcttaactcggagcggcagcaggtggccata

SEQ ID NO: 19863 - DNA, 401 bp, Oryza sativa
  Clone ID: uC-osflcyp064b07a1
gcaaaaacatcatcttcttcttcatcttcttagtgtacacaacaccaactcgatcatcatctcgtcgcactaaacccatcttccccaacccaaagacaacgaactcgctggccacaaatccatccaaccacaattaaccactgctaagctacggtcccccacttcacttgccggggacgaagttggtggcgtacgcccaggcgttgttgttgacggggtcggcgaggtggtcggcgaggttctcgagggggcccttgccggtgacgatggcctggacgaagaagccgaacatggagaacatggcgaggcggccgttcttgatctccttcaccttgagctccgcgaacgcctcggggtcattggcgaggccgagcgggtcaaagcgcccccggggtagagcg

SEQ ID NO: 19864 - DNA, 400 bp, Oryza sativa
  Clone ID: uC-osflcyp064b08a1
catcaaccatgttactacccgttttccataaatccaattgcaatatactgcatatactaaagtttttcacattgagacctgaatttgatgtaactggactgatccgggaagccatttatagttttagaccaaataagtgggccttggattacccactaattttacatataaatagattcacgggtcggtcaaattttattacctataaatcggtttacgggttggcccatagcccatttgtatttttagacctgaagctgcattggccagatgagaaatgattcatcagagcagggacctgatcctgtcaccctcggtcatgacatggctgcgggtgatctcgccgacgctccggcagccgcaaagcgccatggccacctccagtttgccgttgagcatt

SEQ ID NO: 19865 - DNA, 407 bp, Oryza sativa
  Clone ID: uC-osflcyp064b09a1
atcaacaatcgcagaccagcatcaagtaatacagtacccaaaaaggttcccatagcacagacgaaaaaacaaagcgaagacataggaagcgggcggtggcgtacgaggcggaaatacggtgataatgtaagacggaaacaccaagcacacaaaaccctgccctagaaccaccaagcaaaagccaccttacatgtcgtcagcctcctgctgctcctcgtcctcgtactcgccctcctaatcggcgggggcatcctggtactgctggtactcagagacaaggtcgttcatgttgctctctgcctcggtgaactccatcttgtccatgccttcgccagtgtaccagtgcaagaaagcctttctcctgaacatagcagtgaactgcttgcttacccttcggaacatcttct

SEQ ID NO: 19866 - DNA, 80 bp, Oryza sativa
  Clone ID: uC-osflcyp064b10a1
gaccccaaatgttctcattgattgagagcgatattcataaaagctgcgaccccgaattaaagatttaaaaaccatacccc

SEQ ID NO: 19867 - DNA, 151 bp, Oryza sativa
  Clone ID: uC-osflcyp064b12a1
ccagaaccaggaccaccaatggttgattcaaaatttttagttctttatctcacctgataagtttcccctacggtttgggagcatttatgttctaggcccaacattttaaactcttttaaggctaaaggtgccttataccacccaatggtaa

SEQ ID NO: 19868 - DNA, 440 bp, Oryza sativa
  Clone ID: uC-osflcyp064c01a1
agacaattgcactttttcaaataatcaaagagtatatagcaggttactgaaatatggcatttgagaaaaaaaaaaagaaatgaacaatcaccccagatctaacgggcatgtagtgctcacagtacttgggagtccagggcagcctcctccgagcactgccacttcttgccatccataagttataggtccagcttcttccagaagttacattaagggaagcaacggattgtccaattatgtcggcagtccagtatttataagctgtattctgcagtagtctatcttggcacacatcacaggcaggagactggacccccaagccaacaccatacatgtgaaccattggtagatcaataaccagattacgttgaaaaataatactcataaaaaagaaaccgttgttcaacctaatagcagaaacaacacatgaaatattcatt

SEQ ID NO: 19869 - DNA, 432 bp, Oryza sativa
  Clone ID: uC-osflcyp064c02a1
gaaagcctgaaaccatacctacctttcatagcagtagaaacaattgtacaactgtctcgactcaaatgctctaaatacgtcactcagcaagaattatacgacatggacagtaaacactatcaccccataagctacacatacgtaaacaccaagaaaattgcatcgaggaaacttactttctataccatggcccctaaatcactctactcctttgatttctaaaatgtactttcagaggaaggaacacactgaaaaaactccagatctcctcagtggaagctggttggagcagacagattgctatctttctctttgccatccttaacagaagaaactgaactgtgctgctccttcatagtttataacaccaagagtgcaagcaaggggtagcccacgggagtaagcgcccaattcacaattagttgcgaaatt

SEQ ID NO: 19870 - DNA, 385 bp, Oryza sativa
  Clone ID: uC-osflcyp064c03a1
aaaccatccaaatgaggaacatagataattttccagtcggacgctaactgatagggataaaacaactatcagcaatgacagattgttctatatatcctttatttgggaggtcccgtctacgtgatatcagcatctatggactgcttggatcgacaacaatttgtaccgatgctgtaaatgttcattcagtccagaatgagaactcgaatggtaatggtgatacagccaaaatgactttaaaagaagggaaatgaagcactgaagttggcaagagtatcttgtaaaaagctcagttggctgccagtcttgaccggagctccgcagcaaccgcattaatgaactcttcagtgttcaggtaatggcttcttgtgacgtttgaagaccc

SEQ ID NO: 19871 - DNA, 89 bp, Oryza sativa
  Clone ID: uC-osflcyp064c04a1
gatcttaaatttatcatttttcaccttatggtttgttttttcctgatcttgaattattttcatttgttctttttttttttgatttaaaa

SEQ ID NO: 19872 - DNA, 153 bp, Oryza sativa
  Clone ID: uC-osflcyp064c05a1
atgggagttgcaatagttattgaaaaaaatcgagttacatatcattctcccttaaagagcatcggcaacagataagaattctactacaatctgaattgctcactatggcagacgcagcaaaccatctagagcacttatttgggcagacagtta

SEQ ID NO: 19873 - DNA, 436 bp, Oryza sativa
  Clone ID: uC-osflcyp064c06a1
ctggattaattaactagcatatttaaatttaaaacgtaactgtttgagcaaataccacgaaatgttcaggcgctaagatacggcaataccgatacatccagcatagcaaaaatggcgaagagcacagagtcagataaagctatagagaactagggctccaggagatgggggccgaatgacaaccatggcgcttagtcgacctcctccatcttgctctcgccggcgtcgtcctccagcggcggcatgtcggcgtcagcctcagcagactcgtcctcgtcgatgctcaggccgagcttgagcatccggtggatcctggtgccgaaggtgttggggtcctcaaggctgaagccggaggtcaggagggcagtctcgaagagcagcatcaccaggtccttcacagacttgtcgtttttgtcagcatcggcacgcttgggga

SEQ ID NO: 19874 - DNA, 432 bp, Oryza sativa
  Clone ID: uC-osflcyp064c08a1
aacgcttaaattacatcagtgtatcatcatcatcagaaactgtttcagacaccccaaacaaaaactccacatacccaaaacaaaaaagaacaagacgagaagctagaatctacggcagtttccatcatcaccaagaagccaagcaggcaagcatttgtcacatgttccatgagtagccaccacctgcctggtcacccaggaacagcccactctcctccagttcagtactgatcagattcccaagattgtcaagatcatccaactcatgcagagcatcagccttgggggtagccgcatggccgccgctgccaatgccgccgcccgcagcagctgcaacttgggggttgctgctcactgacttgaagctgttacttttgctggggaggatgctggctgtattgttgatcacactgctaggacctgttgtaacca

SEQ ID NO: 19875 - DNA, 338 bp, Oryza sativa
  unsure (1)..(338): unsure at all n locations
  Clone ID: uC-osflcyp064c09a1
ggcggcgaaattgtgggtgagcaacgtatatacgtgtacgtacgtacatccttgctcatcttattgtaccgtatatatacgtacgtagtagccagtatttatttagtggtacgtacgtacgcatggattattaataatttgggggtgattaataattaatcagttgcagtagtagccctgctgctgcggcatcctgccgtagccgtactgctgctccttggcgccgtagctggcctgcttctgctcgcggtgctcgtggtaggcgtagccgccggcgcccaccgncgncaccgncgncacgccctgctcgatcctgtgcctttgcgcgttcgccgggt

SEQ ID NO: 19876 - DNA, 431 bp, Oryza sativa
  Clone ID: uC-osflcyp064c10a1
gatctcaaatcaacaattcccaccttagggtcagcatttccctgaacttgtacataatcacagcgtaggaaagatgaggaataaaaaacctcaaacctaatcgcatatctttcggaatacaaaaatatctattccattatactcttgcatatctttttgcagggcaagtaatggcataacaaaaaaaaaaaaaaacacggtggtagcacgaacattgccatggctaaggaaccgcaatagccctctctgcaactgatatcttcattaatctgaaagtagtaaagcatagtagtggactattggcatcatggttcttgattatctagcattaaagatgatcggtggaagcaataggttgagaagatgtcctcagtgaacacaagtgtgtgaattcttccctcaactgacaagcagaatcacacctccagtga

SEQ ID NO: 19877 - DNA, 447 bp, Oryza sativa
  Clone ID: uC-osflcyp064c11a1
agagtgtccgatcaatatgcagatgataaaattcagaggaaaattatacaaatccatggagatgagaaaacaaatcacatgacagctcgtaattacagtactaagtacacgatggaacggaacaacaaccccatatcatcatcaccatcatcatctagctagctagcaaaccactcatctctctcacacacatgcatgccggccgtcagacgaaatgatcaagaaacaagaatcatatgcactgcctctatcctggcaggtgggcccgatcagaagagggcgagcttgacgaggacgccggcggcggcggcgacggcggcgctggcctgcaggccggcggacgcgccgccggtcggcttggagggggaagaaggggtggccggcggcgtgccgctgcttcctggggtggtgctgggtggcgtcccggagccggagccggagccggag

SEQ ID NO: 19878 - DNA, 234 bp, Oryza sativa
  Clone ID: uC-osflcyp064d01a1
cattccgatagatagcaacaagcagttcaaacaccataaccaaagcgaactcaatacatggtaacatcacggacgaagaacacctaacactggatggatggatagagggccttttcgactcgagagagccactggacacgataacgacttgaactcgatgataagatgattctgacacggatagctaaggataactgggcacgatgggccccaccaatcagttcctccagttcc

SEQ ID NO: 19879 - DNA, 289 bp, Oryza sativa
  Clone ID: uC-osflcyp064d02a1
tttttttttttttttttttttttttttttttttttttttttttttttttttttttttttttattttttttattaaatataattttataaaaaaaaaaaaataaaaaaaaaaaaaaaataaaaaaaaaaaaaaaacaaaaaaaaaaaaaaaaaaatattaaaaaaaaaaaaaaaaataaaaaaacaaaagaaaaaaaaaaacaaaaattttttcaagagaaaaaaaaaattgagggatacaaaaaaaaaaaccatcaagaaaaaagagaaaaaaaaagctgtcccccagt

SEQ ID NO: 19880 - DNA, 412 bp, Oryza sativa
  Clone ID: uC-osflcyp064d04a1
atcaaaattacatgataaaattattattgtcttgaattatgtaaacgatgataacaaatccttttccagctacaaaagaaccagcataacaacaaagaattataaagttgcttaagtaatctctcccttcatctcaaaaagagctatatctagggggcctaggccacagcaacactttcacttaaagggtactttccatcctgcgacacacaagctcccaggatcaatctacttggccttgccgttctcgacagcagcagtcgaggggttcagctcatcccaggcctcgatccaggtgaccatggcatcggcaagcttgacgaagtaggggtcgatcttgccgagcttctccctgacctgctcggcgagggagaggtagcacttctggacggtgtcgcactccttggggatg

SEQ ID NO: 19881 - DNA, 410 bp, Oryza sativa
  Clone ID: uC-osflcyp064d05a1
aaatacaagcacaccaattaagttatatatcagtatactccatatatatgacagcacaggtacatcatcactagtagaagaaaatattgatattgatccccagaaagatgtgcttccactacctgaagatcctggcctttcagcctcagcagcaggccgtaaaccctggagatgatctgtgactactccatttacaccagttctacccaaaagcgcacgcggcttttgagttttatcagaagcttgtgacttatcagcatctactccctctcttctagccacagctgccagtctagaagacctaacttgctgctgtgcttgctcaacagccttgctgccgccgatgaaatttggatgagatgtgtttatgtaatccgcctccatctcaatgatatgtgctatcatatcct

SEQ ID NO: 19882 - DNA, 400 bp, Oryza sativa
  Clone ID: uC-osflcyp064d06a1
agcttagataattgccgtactctcaacagaacaaatgcattacatacagtcatacagtgaagagacacttgttccaaaagaactgcttcattaattgcacatacgttacgacatcctttatacatagctgttacgtacgtagacatgtatacaaggtttggatgcaatttgtagaaaagaaaaagatcgaatcacctgacaaatatgttacatgacactatacttacatatgcacattaccctcaactcgggcatcactcatgcatgatctgaaactcttagtgctaattaataaagaagaagtgatatatattatagtagatagagaaaagaagaggaggggaagttaacaacaactacatatgattcttacatcaattgattattgatcatgtcttcc

SEQ ID NO: 19883 - DNA, 56 bp, Oryza sativa
  Clone ID: uC-osflcyp064d07a1
ctagattgttttttttgacttgttttaaatttgtctattaagttttggttattaca

SEQ ID NO: 19884 - DNA, 251 bp, Oryza sativa
  Clone ID: uC-osflcyp064d08a1
ggggaaaaaaattgaacagggtcctggatgctggtcgggttgaacaaggaaaaaaagggggtcatttttgcagagacaaaaactaacccatttttaactggagaggggggtcatagcatccattgggcacctacacacaatatccttttttaagccggacccctggacaaacccccaccgggttggaaaaacccataatttaaaattttttaaagaatttggatccgcagaaaaacttggttggttggggc

SEQ ID NO: 19885 - DNA, 422 bp, Oryza sativa
  Clone ID: uC-osflcyp064d09a1
ccccctggtgctcttacaaatggggagaatggaatgagtagaattgattgcacaacatttattacataaataaccgttgatacacggtacgtgtccagtcgtctaccaatgtcggcgatgtagcagtagacctttattgaaggttggcgtgtggctcatgatgcgattacctccatagcagccactttgaaggattcatccatcaacttaaacttgtcagctggggcggcatcgaggacagctttagctgctttcttgtaggcaagtgaagttgcagcaactttcttctcatctccttgggccatcccgagagcagcaaaggcgaacattctccgtttccacgtggcagcttcaacttcatccttttttgctggtggggcagcagccacaacggagtcggcagcctcgttgatggcctgagt

SEQ ID NO: 19886 - DNA, 441 bp, Oryza sativa
  Clone ID: uC-osflcyp064d10a1
atgtacagttcttataaaatgccactttcttttgggaggttggtttacacactgatctggagtagtagtatactggaagatcagatagctgctgcacactacgttcatgacaaaacagatcagatttcagaactccagaaaactggcaggcacacgcctcattggtctaccccctctgcctctctctctctttatctctctgcacaattatgctctgtattcgtctccacaatcgcctattatatccataagatttcttcccttattcgatgcttcagtgatgctgttcatgtcctcttcatctaattcaagcgagaagatggcgttggtgtcttttatgtgttcagagagtcccagtctcacacccaccattgaacccgcaacagatgtctggttcagtatgtatctcacagcaacagttgatatagaaacaccatgctt

SEQ ID NO: 19887 - DNA, 417 bp, Oryza sativa
  Clone ID: uC-osflcyp064e01a1
agcactgtaagtactcgcattccacaacaaccgaagggcaacaataggactcagaacatccaagtttttaaccgaatagaaataaacgagttttaaacgactaacatagtgcacattgcgagcagatattaacggtccatgcaacgagtaccatggccgtgggcaaaacttaacgaacgctaagatatttcaaatgcagccagcataaccaccacttcaacgatgctcatttcttcttggcggcagccttggtcaccttggcaccggctgggtccttcttctccacgttcttgatgacgccaacagccaccgtttgcctcatgtcacgcacggcaaaacgaccaaaaggagggtactcagagaaggtctccacaaccatgggcttggggggaataattttaaccataccagcatcac

SEQ ID NO: 19888 - DNA, 423 bp, Oryza sativa
  Clone ID: uC-osflcyp064e02a1
ctcccaatatgcttctttaatagatccatactactaaacatccacacccacacaagcaggcagtagtaccattacatcagggtgattgagattaatttagaaaatccaaaaccattcattggctgctactcagaaagcgaaaagctttagaaaaagagaaaaaggatgagatggccgtgcaccagtaccatcccatcgtcgccgccgccgtcgtaggagagagctcagaagcggagcttggtgaaaaaccacctgttcttgccggtcttgaagcggtcctcgaggcgcgccttggcggacttgcaggcggcgaccttcttgtccctggtggcgagcgcgtcgggccccgcggcgaccttcttgaggtcgaccgttagggtgtagcggttgggcatgaggtgggtgaagtttaccagcttgatg

SEQ ID NO: 19889 - DNA, 351 bp, Oryza sativa
  Clone ID: uC-osflcyp064e03a1
gctgataaagaaaaatggcattttgcaacacatttaacttgttcagtgttcaagctaacgttgaacctggtacaagtacaacatgctggcacgcatgtccacatctcgcgggtcgagggttcaagccgaatacaacacacggcatgttgcatttcatcataatttaaagtacttagcatcactttgaacaaggttttggtggtcacatgtatattcgcaaccttcttaaggtgtccgcaaaagacgtgcgcagcataatactttgcagacctatggttatcaacagcaacatgccactaggcacctttttgctcatgtctttagcacctttgtgagcattctgaatgcagc

SEQ ID NO: 19890 - DNA, 426 bp, Oryza sativa
  Clone ID: uC-osflcyp064e04a1
ggccattaaatattccattcataaattgctatacaaagcaaaagagaaaattcaacatatcagtaggtcttatctagccatatggctcgatcaacgccgcttcgagccagtgtgaccaagtcattagcatgactaagactatagggaaaaacccggctattacatgaagtatcgtgatgccactcagtacatctggtggtggttgtggtagcatatgctaattttattgatggatggataagacgaggtgttgcttgctcaagcgataggagaagcggctgctttgaatgtttcatccattactctaaacttgtcagcaggtgcggatgcgtcaatcgcatcagcagcaagcatgaaggcaatggaaactgcggcaacttgtctcttttctcctgaagccatggctgtgtcgagcatagtagcagc

SEQ ID NO: 19891 - DNA, 310 bp, Oryza sativa
  Clone ID: uC-osflcyp064e05a1
aataataaggcttaacatccaaatttaaaccgaacagaaaatagagttttaaacgactgacatagtgcacaaagggggcagattttaacgggcaatgcaacaactgaaatgaccggcgacaaaacttaacgggtactaaaagagctagatatttcaaatgcagatatggaaagcaccacttgaacgaggctcatttctttttggggggagccttggtcaccttggcaccgggtgggtcctttttttccacgttcttgatgacgccaacagccaccggttgcctcatgtcccgcacgggaaaacgaccaag

SEQ ID NO: 19892 - DNA, 162 bp, Oryza sativa
  Clone ID: uC-osflcyp064e06a1
ctatttatgagctactacgacgcatgctcccctccgtcagcttgttggctcctttgttgccgccctcctttttttttttttttttggcagcaagatgcttaagatgcattcttcattacaaatgattcagctatacatacgttgttgacgctttcacctaac

SEQ ID NO: 19893 - DNA, 365 bp, Oryza sativa
  Clone ID: uC-osflcyp064e08a1
ggcaacagaccattcctacttcacaatcatatttcattttccataaaaaatatttcctaaaagaaaaagggcttaaattcagtttgtaacaagggctcaccatgaaaaattgggttagcaaaatgatcattccgaagtgacatatacctagctataaagcccccaaaacaacttatataagggagcacaaaggtgtccccaaactagcctcaagtcatctatcatcgatcttgacattattcagagccaacatcaacacctttctttgataggaattcctttgcctccaagatatcctgctggagtagtacagctttttgcgggcaagttgggaagaacataagcccaaatccaaccataaaaag

SEQ ID NO: 19894 - DNA, 382 bp, Oryza sativa
  Clone ID: uC-osflcyp064e09a1
gaatgacatctttgaatgcatatcatgagtggaagaactgggcggccaatgactgggcaggctgatcatcccaacttccttcaagcaactcatgtctaactagaaaagaaaaaaaagaagaaaataaaaagattatgtacagaaaaaaggccatcatcacaacatggacctttggcacaggcgatagcagttgttgctcaaaccctattgcaagcctgtaaaaggatggcttttattctacagctgcatagctcgaacacctgcaagaaagccacaaccaaacagtagcagccaaaccacaagtattctttacctcccctactcctgcgctaactcaaaactggcaagaagtgccaagcctttgccttggcctttgccccgc

SEQ ID NO: 19895 - DNA, 263 bp, Oryza sativa
  Clone ID: uC-osflcyp064e10a1
aaaaaaaaaaaccgggggaattttttaaagagaaaaaaacaaaaacttgggggggaaatgtttggaaaggggaaaaaggaaatacttttataaaaaccttttgttgttggggaaaaaaaatttaggaaaaaaaaaccccccaaaaaggggaaagcccaacaaaaaaaggggcaagggcaaaattttaaaaaaggttttggggggccaacccttttaaaaaatgaaggggagccttttttttttttccccctaaaaaagggggg

SEQ ID NO: 19896 - DNA, 440 bp, Oryza sativa
  Clone ID: uC-osflcyp064e11a1
ggcagcaagatgctcaagaagcatagtacatcacaaatgattcagctatacaacgttgttctgttttccctaacataatgcatatcagaagcgtctgagaatacataaaattggtactcatttcacaagagtagcttatgaattatattttctggtaaaagacaaaacaaacaacaagaaaaagaacatatcactacaccttgactacataaagcaagcaaccccaaatgtaggttttgatctactcaaggcaaaccacctcttccaagtaaatacaagtcgttgccaaaagattcagtatactcatccagtgttccagtcctcaaactgtgctgctagccaaagaaagctcatggatttcggttaacatccactcttctccagtttgtcctccaagcactattgcttttgttcctccaacaacacaagtgctgtggccc

SEQ ID NO: 19897 - DNA, 447 bp, Oryza sativa
  Clone ID: uC-osflcyp064f01a1
atgctaaaatattacttcatttcattatttatgggcagaagcatacatgctttatcattcagttcttttctaagatatgaatgcccctttctgtttccatctatcctccctgtattctggtttacagtttattcagagacgcgaagtgatcgcagacgcagaacggggaattctatcgcactgataattgacccatccgagcagcgatctctcgctgtcatatatgaccatctgatccagcattgtaattcctccaattaagtttgttccagctaacgacggatgctccttcgatccatcaaggatgcccaagcacacatggcccttttgagagataatgaggtagtgctcaggtgggatctccaaagtggccttcttatcgccatcggcaaatttcagagacagtgatctgaagcactttttgacttcatcgatagttctgatttt

SEQ ID NO: 19898 - DNA, 380 bp, Oryza sativa
  Clone ID: uC-osflcyp064f02a1
aaaggcagaaaacaacccccaactttacaacacttagggcccataaacgcctaggggggacccccattggggggggacttatggggcatatcatggaaaaaaacccgctgcctaaaaaaacgggtaagacgcccaacacttgctttacgggaatattggggggggggggtaaacaaatcaacccgttttggtttgaaaacatatgggaaggtgaaaagggccggaagaaaacgccaaaaagaaaaaggctatccggggcaattgggttacaggttaaacactttctttaaggtggggggggctttttttaaagaatttttttcccgcgcttttggacgagcattaatggcatggtcttggcagaaggggggggggggctt

SEQ ID NO: 19899 - DNA, 372 bp, Oryza sativa
  Clone ID: uC-osflcyp064f04a1
gggccccgggaagacgacgagcacgttcgacgacttgaggtcgccgtgcggcggccggtggaagagcggcagcgtctggtgcaggtaggccagcccccgcgccacgcccttcgctatcgccaacctcgccggccatggcagcggcgtcctcccctctcctctgttctcgtggaggaggtggaagaggctgcggccggggacgtggtcgtagacgacgagcttctcgtccttggagaagtagcaggcgacgacctcgacgacgttctcatggcggagcttgccgaggagctgcatggtgtgggcgaagtccttgcgtggcacgtgccccatgttgcgcagccgctttacgacgacgacgaccgggccgtcgcc

SEQ ID NO: 19900 - DNA, 404 bp, Oryza sativa
  Clone ID: uC-osflcyp064f05a1
gcaaacacaaggccttttacttgacataatttttctttttggaggtacaaatgatgtgcatagggagattagcccaaaagaagccaacagacaaaaacttggcagacatgagtacatgacacgaattttgttttaaagcctgcaatatcagtttcggttgcaacaaaaacttgttggcgtttccctgttcgggatgctaaatacagttacacagggatacaagacaaaagatgtgatcaactgctcgccgagccattgtccatagcgcctaaatttaactcttcatttgagtctattacattttcaaaatcatagtagggatttgccttaggtcgaggttttacagctttaaagctatggaaaacaggggtggaaaaatctggaggattgaggacaatatatgc

SEQ ID NO: 19901 - DNA, 439 bp, Oryza sativa
  Clone ID: uC-osflcyp064f06a1
cctactaatgagcgtcaagacaagaacaccaaactgatacacatcggttttcagttttagtgacacacagtacttatcatgatcatgaattgcgctgtcatcattgttgagcctctgcgcccatgagaatcccgtcagctttggcgtgaaactgtcatcaacaagtgtcttggatggtgcaacatagccatgtctgatcataccagctgctgaggaatggaggtactctaatgcttctgctgtctcaactgcgatcttcacgcgtaaatgcagtgggaaatattcacggccatctagaatgtcagagagggttcctctagcagcatactcgtacacaaatgcgggacaatcagcattcaagcagtaacccaagagtctgatgatgttcttgtggacaatttgagataggatcatccctccgttgataaacgccttttcg

SEQ ID NO: 19902 - DNA, 432 bp, Oryza sativa
  Clone ID: uC-osflcyp064f07a1
aaaacaagtgctctaaacagtacaatagaagacagtcttttgaggaaaaaaaacatattttttaagaatacagtaaataatctttttcaataatccagcgaatataacatggcctaaatccaagtcgttggatatttttttaatcagagaatcaatacgggctcccttatgcatttgagcatatcgatcactgatcatcattcatcctctgcatcaagacccttaatggagccatttcttggaccgagtggattggcctttctaaatgggccttgagaggacatggtgcctggagatagcacaacctgaagagtcaggtcaatggcattatagtatctgaaaaaagaagaggcttcagattgcttctcgatcagacattcagacagctcgttgcaggttttaggtcatatcatctaggttaggtacagatgc

SEQ ID NO: 19903 - DNA, 385 bp, Oryza sativa
  Clone ID: uC-osflcyp064f08a1
agaaaactcgagtgcctgctagcagtatcacaaaatcactgttagactggaaagaaataacatagcatatacatctggcatggacattttgactgtccaaagatctctgaactagaagcaaccctacttaactggacagctgaacacaacatgagttttacaggaaagatgaggcagctggctagcatttaggaacacaacacatctgtatgtacacaagtcagtcaatgaaacaacagtcacctgaagcataaatcttatggtatgggctcaagaattggaaagaatgggcatgaaaggcaaggggagaagcaaagcctcggttttagatcttgttaaccttgtcggaaaaaaaaaatatttaagccatttaaagtacaacagc

SEQ ID NO: 19904 - DNA, 52 bp, Oryza sativa
  Clone ID: uC-osflcyp064f09a1
gttcaataaatttttttttgcggagtgtttaggggtttccattgttcaaatt

SEQ ID NO: 19905 - DNA, 456 bp, Oryza sativa
  Clone ID: uC-osflcyp064f10a1
ggcggtggcgcggttggtgaggtcgacggagcagtcgatgtcctcgatcacgatgatggacttggaggtcgtcttcatcagcagcttccggagctcggcgttgctgccgacctcggtgagctcgaggtcgtacacgtcgtagccgaggtggttcgccatggcggcgatcatgctcgacttgcccgtcccgggcgggccgtacaggaggtagccgcgcttccacgcgcggcccgtgcgctcgtagaacgcgctcccgtcggcgaagtcgcggaggtcggccatgatggcggccttgcgctccgggtccatggcgagcgtgtcgaacgtgctggggtgcttgaacgggacggggtcccacggcaggccgcgcgcgtccatggcgccgccgcgcgcgttggtgtagagcagccggtcctggctgcggcgccggatgtccgcggcggcggcgaggatgtg

SEQ ID NO: 19906 - DNA, 417 bp, Oryza sativa
  Clone ID: uC-osflcyp064g01a1
gcttcctatgcgttgattgaccatgttaatcatgcaattggatgagttaatgtaagttggatgatgaccatgttaatcatcgttccccgttgttcaaaatggcatgttaatcagaaaccagattcataactatagaaggaacctgcaagctaaacttgcgacagaaatagcaaaccattgtaaattgcaaagttgaaaagcagcaaaggagaaggatcaattccatactcagggaggtttctgtgcttccagcttcctaacaatggcattggttacagcccagttgaaccctcggtactgaagccacctcactacgcgtgcacggcgattctcaaggggcaagctttgcccccgctgccactgtttagctgcctactcaaagagatgatccattgaatcctcggaaatgccatacat

SEQ ID NO: 19907 - DNA, 403 bp, Oryza sativa
  Clone ID: uC-osflcyp064g02a1
gatcctcgcgctccccggcgtggacccggacccgttgcccgccctcgtcgagcacaacttcccgaccctcctcgccgtctcgccgctcgcctccctcgagctgctctccctcctgcggcccaatccccagctcggcctcgcggtcttctcgtcccgccggacgctctccccgcccgcgaccctcccggagttcgtcctcgccatctcgctcgccggccgcgcccgcgaccccgccgccgcggcccgcctcttcgccgaagcctccaccgcatactgccccgaccaggcgctctacaatgccctcatgtcctcgtacatgcacagcggtcttgccgaccgctgcatcgaggccttccacacgctggagcgagacccacgctggggacccgccaatgcggacttc

SEQ ID NO: 19908 - DNA, 422 bp, Oryza sativa
  Clone ID: uC-osflcyp064g03a1
aaaatccatgaattacttcatgcataaaccgcacgacataatggaatggacggtgaacaacaaaccgaattagatacagaacaaaacgtaaaatacggtagcaaattattcactccctacaatgctccctccatctgatggaaatggaagtcatcagatcggaggcccagaagggaatcctgcgttccagcaattattcgtcaggcgatggactaaaaaggcagagaaacaagaggctggctgattacaatttttcgacagagtttcatctcatgaagagagatatactgctcactcaggcctcgagctggagcttcttgattgtgtcgatgtgctttgctgggttgaggcccttggggcaggcgtgtgtgcagttcttgatggtgtggcagcggttcagctttgaactcgtcgttgatgga

SEQ ID NO: 19909 - DNA, 359 bp, Oryza sativa
  Clone ID: uC-osflcyp064g04a1
aaaaaaaaaaggggggaaaaaaaaaaaaaaaaagaccacggcaaagaaaaagggggggcaaacggggttgaaaaacaacggaaattttggtggaaaaagggcaaccaggccaaaaatttaaaaaaaagggggggcccaaaaggcaaaaaggaaagggttaatttgggaaattttggggttccccaccggggggtttaagggggccctggccgggaaaaaaaggggaaaaaaaaccccgaaaggggaaaagttctttgccatttgccaaaatgaaggggggggggcctcagggaccctggaaaaaacccattccttgaaggggttaaaaaaaaaaacggaaaatttgtttggagggcccc

SEQ ID NO: 19910 - DNA, 427 bp, Oryza sativa
  Clone ID: uC-osflcyp064g05a1
aacttgatgaaactgtgaaagaattaaattaagaaaaactggctcagtcaattctatgtacaatattacgaggctttcagcggtattgcatttaaaagaaaatctgttgaagcatctatattggagatctaagtgtcagtgtagtccttgcaactgcattatgtccttgaaaatctctgaaaaaattacgagcaaggcaccccccatgacaaatgagagggtaaattttcctcccgggactattggtggtactggagcttccagatcatctgagtacctctctgaccaagacatagctgctggaaaaactccaaaaagtactagaactccattagttcctgaaagtccaatgccttgaaaatattctctggatcaagcaatgacagaacaagcggtgggagcaaaagtcacaaggtacggcagaggt

SEQ ID NO: 19911 - DNA, 447 bp, Oryza sativa
  Clone ID: uC-osflcyp064g08a1
gataagcaaaaaaaacatcgatatatcgcttatataaagtaccctcttcagtttcagaactgacaacattatcgccgcacactttaccggacctgcagcagaaacgcagtattggcaagaaaacgagaacagttgatacatacacgtttattcggggagagatgtaaaaaggctatcaaacaggaggccataaagaaagttcatgggtagcctcaaaagcattctagaatggctcttgaaaagtttatgtgatgacggtgggagcagatcggccagtgtactcttgcatctttgacagcttcagtgcaacatcaaccagaggagcaagggcatcctgcgaatccctgccggtcttggaagaatccttctcatactgctcgatgtagacacggatagtagcaccaacagagccagttccagagaggcggaacaccaaccgggaaccat

SEQ ID NO: 19912 - DNA, 394 bp, Oryza sativa
  Clone ID: uC-osflcyp064g10a1
acgtaaaaccatccattttttttattggcgacgaatttatcagatatgctctagatacatatcttggggggatatagccggggctttgttttcacatatcctcacccaacgataattggagtacttttacaaaaaaaccggtcggagagggagggaagagattattacatatgggttaagagcagaggccattgagatgggacataaccaaattggaaaataaaaatatttagcatattatatatgggtatatcatcaacatagcccaaaacaaagctgcatactattattataggcagcaatccaccagcgcgaagcttgatcttagcttaggtgccaccagactccttgaaacctgggggcttgtaggcgatgaagctaatcaactgcacct

SEQ ID NO: 19913 - DNA, 424 bp, Oryza sativa
  Clone ID: uC-osflcyp064g11a1
agctaggtccaagtctggacaagatgcaattcatcaacgtaggattacacgtacacagagcggtgtacagagtcaagaaaattaagatagcatgcacgcacggagcgtgcaacataaagtatacagagatagagagagagatgaccagcgctgcattgatatgccccagctgttatttttactgtagctattattttggctagttgatcaactgcgagccagcatcgatcgatatatcgatcggtcggtccaagcaggattaatcgatctagctgaccttgctgcagtcagtggagaggctgatggggaagccgacgttgacgccgcacttgccggggatgccggcggcggcgccgaggttgagagacttgatggtgccggcgagggtcttgaggcaccggcaggcggcctggcggtcggcggt

SEQ ID NO: 19914 - DNA, 440 bp, Oryza sativa
  Clone ID: uC-osflcyp064g12a1
agacaacatcactcgccatttcagatatcttagaaatgttccctgataattccagactctttaagacagcatatccctgaaccaataaatacttaaactgcagatagaattagccgcataatacattacaacaccagaatcactcaacagctgctatctcagagaatttgtgagatagctggcattaagccttggaatagccgcactaaacctaaaaattccatgctaagcaatggaagtacactagcgacagtatgtcaggcttctatcaaggaagaagcctcatgtcaatcagccaagctatcaagaaagctttgcaactccctcaggccttctgcagatatactcctctgtacacgaggccttggagttgttaggacaggaggcggccgagagttgaagcagatgacaacaacagaaaggttgtcgccgctcttcct

SEQ ID NO: 19915 - DNA, 456 bp, Oryza sativa
  Clone ID: uC-osflcyp064h01a1
agtatatcaaatttattcttgcatcataatgtcagtgcacataaacaggcaatccttgctaccaaagcaaacttgtttttccgacagtttgctaccaacaggataaatacacacgaacttttcagatggaatatgcagcatttcgcagacttagggtcaggctgacaacttagctgccacggtaagtggtgaatgaaaaaggagaatgcaacagagggacatggaaatgctcggtcgtctggttcttctttatctcaaatatgatgctcacataagggaagaaccctgaaggtgcatacttgctggtgttgaaacttatgcgatagaaaccaggagcgacgttgttgacaatgtccatcagttgaccgctacggccatcattgttcgtaaccgatgagcccagggtcacccatccattgaaatctttgttgttgaatgatgggggtgttgatgcat

SEQ ID NO: 19916 - DNA, 401 bp, Oryza sativa
  Clone ID: uC-osflcyp064h02a1
gggcttaatttaattttcttttgtccggaactagtgacagtgcattaggagttcattcaggaaaagacaaaacacatactgcagtatcatacctagatgcatccaacttccaattctttgagccagcaaagatagggcatgttctaattcaaaactgcaaacaaactatagccgactcaaccaaagatagggcatgttctaattcaaaactgcaaacaaactgtagccgactcaaccaccaaacatatgagaggcagtaagggttgaagatccatggatctgttcaggcgatggtaacattaactcttccggccacttggtccaaaacacgccttccctgggaggtgatgagtcttccgccctttggggtcacaatcatgatgcccatcttttgcaactgc

SEQ ID NO: 19917 - DNA, 502 bp, Oryza sativa
  Clone ID: uC-osflcyp064h04a1
tagtgcaccgctcgcttaggctgtgatcctctattttggggcgccccttttttttttttttttttttttttttttttttttttgtctaacaagaggaaaagtctgcgcttattttacaaggcggcgttcatagagatcattaaccgcccatattcatttgagaaatcaatcaaccgggtattcctcacatgtctgaattggctgaggcaatcagggctacacatggtttgcttcctacttgtgcggacagcaggtagagaagaagaaattgacagcaggcgagcctagcagaggaggaagaaaggaagaagaacaaactaacctggacatcgccgtgcagaccgtcgtgtttgccgcaacggcaaagcccctgcggctgcggcgaccttaatctcaattttgtccccgccaccgccgtttccgccaccgacggtcggaaccctcccgctaccgttcacccttccgtgctgctgctgttgctgcttgagcttccttccgatct

SEQ ID NO: 19918 - DNA, 313 bp, Oryza sativa
  Clone ID: uC-osflcyp064h05a1
gctgctgctgctgctgtcgctggcagcggcggacatgtcgatcgtgtcgtacggggagaggagcgaggaggaggcgcggcggctgtacgcggagtggaaggccgagcacggctagagctacaacgccgtcggcgaggaggagctgttggtacgctggcgttcagggacaactctccggtacatctgacgtatcacaaccgcctgccgtcgacgtccggggttccacttcctttccgcctcggccctcaaaccgcttttgtcgaccttcaccaaacgatggagttacccggtgacacccttacctttggcctca

SEQ ID NO: 19919 - DNA, 97 bp, Oryza sativa
  Clone ID: uC-osflcyp064h06a1
aagcaaccgtaaactcgatgagggctttaatattttttaacccccctgctccaatctcatggaccactatcattacaaaatgatcaccacaaaccca

SEQ ID NO: 19920 - DNA, 54 bp, Oryza sativa
  Clone ID: uC-osflcyp064h07a1
cttcttttttttttatttaggatatcaaattttattctttgctatcataatggt

SEQ ID NO: 19921 - DNA, 440 bp, Oryza sativa
  Clone ID: uC-osflcyp064h09a1
gtcagacagaaagttcccctgttcagtcactagcacagcggaaacgttacgattcaggctatcgtcgaaatatttatgactcagattatcccggggcacaaatcaaaaggaagagcgctattccacatttgacaaaagagaaacgggagagagctacacggaacgaacggacttgtcctggccaaaacatcttgtgaatgggatgatgatgatgatgatgatttcaccaaacaattcgacaccctaactgaaacggaaacgacgatgaccagttttcttattataaatcgcccactaaacttttgtatatcattggccctagctggccgctttgccaccaccaaactcctccgaaatcctcggggcatctcatcctcacggggatgagaatgcaagggaataaatgatttaagatgagcttttgagaacacactcaacca

SEQ ID NO: 19922 - DNA, 418 bp, Oryza sativa
  Clone ID: uC-osflcyp064h10a1
agacgaacaaaatcacgacaaaactgcttccgctcaggatgacattgttgttcatagatttgaactcgagcacaaaagaagccaaataatcctttgacatgaagccaaagccaaaactttgatctaacagatatctgaaatatcttagtcctaaacttttgattgttaatcatccaacttgcatttctcgacgaaagaaaaagaactaggggactcatcttccttcaagagcacatgcttcactcactatcctgatcatcttcaaccagtatcttcttgcaagctttatagcacatgaatgagatcccagccgcaggcatcagcttgatgcagctcggcccaagccccttgtaaaggccgccaatcccttcattctccattatgcaatacagagcatggaagacatttttgtagacct

SEQ ID NO: 19923 - DNA, 433 bp, Oryza sativa
  Clone ID: uC-osflcyp064h12a1
acaactctaaacttgatgatgtctttaatcatatataaacacactgtccaatctcattgaccactatcattacaaaatgatcaccacaaacccaataaacaaaagaaaatgaaaaactctagaatcacacctctaattaagtttcttcttttttgtttcaattttttccctgggaactgcagcgataaatataaaaataaatagcccttcttattttttgcaccaacgagggacacgaattggacaaaagaagaagagggagaggagctgaagaactcaacacaaaatgcactaagctcaaaccaccacctcaagctgccaacgccaacgccgcggcgaccgtggcggcggcggtaacccacctggcgagcacggacggcgcggcggcggccttgtccgcgacgtcgtccgcgggggtgccgtcgggcgagtc

SEQ ID NO: 19924 - DNA, 366 bp, Oryza sativa
  Clone ID: uC-osflcyp065a01a1
aaatacttaatagtaatagactctttgatggagtattacaacatgcagcagtggctttaatacgccagtacattaattaagttacacatatgcaggctccattttggtttcttttaatttatcgtattacagaatttctgtagccttgcagatgatcacttggatattatgtactagtaattaacaattggatgcatacaaaagatggcccaacgacaacagaagatgcgtgcatctgacattgtctggccttatttgttggtagtactccaattaattaacaagagatgatgcattcttgtgccttagtttcttcacatgcttggctttacgttgagcctattttcaatctttaaccccaacgac

SEQ ID NO: 19925 - DNA, 497 bp, Oryza sativa
  Clone ID: uC-osflcyp065a03a1
acgggaacgccacatttttatttgcatacgatgaccatttataactacactttatttgcatatgccacattccttagctcatgagcattagtacaaagaatgttataaaacacgggcttcatttttcaacctgtcaacgagctcatcgacggatgaaagaatgacaccggcttttctcttaggtggttcagtgacctcaactacttccatgtctgatctgatatctacatccagatcttcgggggtgactttcttgatgacttttgattttgccttcattatgtttggcaatgttgcataccttggttggttcagtctcaaatccgtggtgataactgcaggcaaatccaagctaatggtctcgattccgccatcgacctctctctccacagtagccttttccttgttcaatataacctttgaggcaaaggttccttgtggccaattaagcaacccaacttgcatttgtcctgtttggttgcaatcatcatcaattg

SEQ ID NO: 19926 - DNA, 237 bp, Oryza sativa
  Clone ID: uC-osflcyp065a04a1
gagtcggggcactaccaatgtaaaggaaacatgaataaaaagcatctatacgagtctacaatcacatttgcggtagcagtagcgtaaagataatgagaaacatcagctgatctcaaaagagatctctcaacattcgacgagagaaacattgtccaaacaagttccaatagacaagggcgctttctacagtttcacagcccctggaatacccaatgcgccaaattgggtcagagggga

SEQ ID NO: 19927 - DNA, 483 bp, Oryza sativa
  Clone ID: uC-osflcyp065a06a1
agcaatgtatactcgcattccacaacagtcgaagggcaataataagtcttaacatccaaatttaaaccgaacagaaaatagagttttaaacgactgacatagtgcacaaagcgagcagatattaacggtcaatgcaacaactgaaatgaccgtcgacaaaacttaacgagtactaaaagagctagatatctcaaatgcagatatggaaagcaccacttgaacgaggctcatttcttcttggcggcagccttggtcaccttggcaccggttgggtccttcttctccacgttcttgatgacgccaacagccaccgtttgccttatgtcccgcacggcaaaacgaccaagaggagggtacttagagaaggtctccacaaccatgggcttggtgggaatcatcttaaccataccaacatcaccgttcttgaggaacttgggcttctttttcagcttcttaccagaatcgttgtcgattcttggtcac

SEQ ID NO: 19928 - DNA, 301 bp, Oryza sativa
  Clone ID: uC-osflcyp065a08a1
atattgcaatataaagtgcaatacagttttttggtaccatatgcacacaggttggatattttccttccggccccatcaaagttaacatgaaaaggcacacctggaagaaacattgagcaaacaattatgcagcatagctaaggaattacagaagctgaagatgatcaagaagctagctgacgcaaaaagccaaaaaccgaggataaactagctctggcaggcaaacgaacagttagctgataattaacagcgagctgaccggaggccctctctgatatcgatatatctacacttaaatgcc

SEQ ID NO: 19929 - DNA, 464 bp, Oryza sativa
  Clone ID: uC-osflcyp065a09a1
aaacagcaagtaacaaaactccaccaaaaaggcaactgttttaactccgaattcaagtcctaaatagtacttttgcaactgatgattttgcttctaaacattgtgctgctcacttgaagcattttgcatccagcaagtcctcgccctcgaacggctcctggtcctcaatcatggcattgacacgctctttctgggcctcatcagagaggtcaaccttggtccactcatagagctccatgtcgtagacctcatccatgacgaacttggggatgtcctgaccacggaagagccagagtcccttgaccttgaagggcggtgtggagccaatgaccagcatcttgccaaaagcatacttgcggcacagatccatccgctgcaggaacccaccgaccttgttcatcgtcacaaacgatacggtgttctcatcgttgtacttgtagtcacagaaccacagagagtaaccc

SEQ ID NO: 19930 - DNA, 337 bp, Oryza sativa
  Clone ID: uC-osflcyp065a11a1
ggattaaatccatccatcttatttcgccagttttggcccctcaaaaagagtctcactgggacatcaaagcactcccccaggcccaacgctatgatattgtctttttttacatgtaaacgagtttttgaacaactaatgggcaatatcgtcaattctgatggccttagaaaaaccttccaacaaagtaacgttttttaggtcttaagcaatggatccttttacaagccactgaaccttggaacttggggaacattgaggcccgcccatgtttcaggtaaaacattttgacttgcctagctccatttttttcttgagtgccttctgccccttattttta

SEQ ID NO: 19931 - DNA, 463 bp, Oryza sativa
  Clone ID: uC-osflcyp065b01a1
caaaaggtataccaggtcaaataaacagcaagtaacaaaactccaccaaaaaggcaactgttttaactccgaattcaagtcctaaatagtacttttgcaactgatgattttgcttctaaacattgtgctgctcacttgaagcattttgcatccagcaagtcctcgccctcgaacggctcctggtcctcaatcatggcattgacacgctctttctgggcctcatcagagaggtcaaccttggtccactcatagagctccatgtcgtaaacctcatccatgacgaacttggggatgtcctgaccacggaagagccagagtcccttgaccttgaagggcggtgtggagccaatgaccagcatcttgccaaaagcatacttgcggcacagatccatccgctgcaggaacccaccgaccttgttcatcgtcacaaacgatacggtgttctcatcgttttacttgtagt

SEQ ID NO: 19932 - DNA, 98 bp, Oryza sativa
  Clone ID: uC-osflcyp065b04a1
ccttttgtttgttggttttttattgtcttttgttgatttgctttctgagaattattttatattttcttgattagaaatagcacaggaactgatctgtc

SEQ ID NO: 19933 - DNA, 473 bp, Oryza sativa
  Clone ID: uC-osflcyp065b05a1
acgtcgcatgctcgcctccttcagcttgtatcctcttttttggccgccctttttttttttttttttggaaaggaataaagattgaatggaatctctttcatggttatggcgcttcacagttcacactgatttacagttctaaacaaggtatcgggaaaggtttacagccctccaatacaatgctaatggagtgctgttcttacctgatttagtgatttcacatttcgactgagaatccatcaaggttagtacacgggtctcaaagaatgaatccggaaagttgtttcagtcagactaatgcatcttatcaaagggtgacacttcgttcacccagttttcgtccacaagtttcgtacattcaaaagtaacttgaaaattccccaaaaaaagccaccagtttttttttttcagcttttgtcctaaacaatttttttattaacaaactttaaccaactaccatgtttgacaagcac

SEQ ID NO: 19934 - DNA, 477 bp, Oryza sativa
  Clone ID: uC-osflcyp065b06a1
atcagtcttgacttgtcaggttgcaaaaaaaagaaagcacaaactttagacaaataaacttccatccagaaaacaaaaacgatgctggctagtaatctcaagaaagtattcaggaaattagccacaaaaaccgagcctgctggtcgtgatcaaaaccttgattggcgatacatatatatattggctgaataaaatcgcagataaataagtgaaaatctactcggcagtgacctcctgtcctaccacgacctcatcttctgaaagcctctcgagcttcgtcccaacgtcctccttgaaatctgcatgaacctccataagcttgcccaggacaaattttggggccttgaggatcttgactttaggcacaaacacattctgaagcgggaagatgcttgatgtggccctttcgatttgcttcccaatcacctcaggaatgaattttgacaccagctccttgaaatcactggatgatgcctg

SEQ ID NO: 19935 - DNA, 465 bp, Oryza sativa
  unsure (1)..(465): unsure at all n locations
  Clone ID: uC-osflcyp065b07a1
aatccactaatcaagttttatttcatttgcaggagatgatccacaacaactggagcatataacgcataagagcacgagctaagttactagtagaagatagcagaagcacaaaccatcgccatgtcatatggctgaaatcgattggcgtgccaaatccccaaatctactcgaacttgtagtgcttgtcgacggcctcggcgacgtcccaggtgcagctcatccccttggggaacaccaccaggtcccccgccgcgatctccacgaaatcctcgccggcgccgtccgggaacaccttcaccttcccctgcagcaggtagcacgtctccttggccgagtacgtccacgggaacttgctcttctcgcacccccacttgggccactcgcggacgccgagctcggagaggcgggactcgggcgggttgcgctccacacggacgccgagcttctccgtcgccatcgncttcg

SEQ ID NO: 19936 - DNA, 512 bp, Oryza sativa
  Clone ID: uC-osflcyp065b08a1
ggttccagatagacagaagattttccactcatgtttggaaaactaggtaaatactgtatatctctacggggacaaggataagatgttatagttggcaaagacctgaaaactgcaaacccaaacatacaaatgttacattccgaatctaatcaacaacactaaaacaacaacgctaatatcctgtgcgacgacatcatcaatgaagttatacgcttccaagctgctgcgcaattatattccttgtatgataatagcacctgcgaatgttctgcctctttcactcataaatcaactccttttgtttttgttaactgtacaccggtaacagaaacacgatcatgtgacgagatcatcaacctcagaattgaatacaaaactgggaaatgtggttgttatgtccttgaggtacggaagagtcattatcttcaataaagagggattccttgagacaaaattctcccactctgttctatctattctcccatcctgattagtatcagcatctgaaaacg

SEQ ID NO: 19937 - DNA, 480 bp, Oryza sativa
  Clone ID: uC-osflcyp065b09a1
ggagggatcaacacctctttttcaataaaaaaatatcaaccaagaatcggaaagaattttataatgtaattgcgtttttaatctaggacctcttgagaactcaacagcaactagcaatcttaacccttagattatccgggatgtcgccaccaccactatgaaatttgtagactcgccaccaccactatgaaatttgtaagtagtagagaaatggaaatgggatcagatgctgaattgaggaaaccccacgaacgccacgaaatcagtaatcaacgctccaactcagttcttgctccaattccctcttttgtgcaaaagctccaacttatccggactagtcaacagttttacctgaggcaaggaaccttctatttgtcctcaagctctggaaggtctaaacattaaatgttgagctcccagcaggtggaacagcaacaacttttcctcagcaactgtcttaccttcaatccggagcgtaaa

SEQ ID NO: 19938 - DNA, 430 bp, Oryza sativa
  Clone ID: uC-osflcyp065b10a1
aaaaaaaaagggacaggagaactagattgcaagatgttatcaaaacgttaacaagtactacaggtaaactctcagggagagggcgagaggctcaggctttccaagctatgagcacgggagactactactcatcatacgctagtgatgggttacaggaaaagagaacaaattcgtcaagcagatttcagaaaaaccacgtaacacctttatacaacttttaatgccctagtgctaggttacagcccttacaggaacagagatcaaatcgtcaagtaaatttctgaaaatttaatgaactgaaccacttgttatcggcagattcaacagattgaacgcctgcgcaaagtggaaatcgcaatttagcaaaatagccttaacttggcatatgaacacctttatacagttttttaagcctcaaaaattttaataa

SEQ ID NO: 19939 - DNA, 519 bp, Oryza sativa
  Clone ID: uC-osflcyp065b12a1
gaacaactattatgtcctttactatagtgaaaagaagaaagtataacgtgctaatgaagtaccgggaaaccaatatgctgcatacataggcatagcactgatctggcaacatcttaaaacaagcacaccagaaacatatgtggcacatccaagtagcagcacagaggttgcaaattattccccagcttaaatcacgggtagcaggctgaagaatagaagcacaaatagttcataaattctcatctctttgttatcaagagtggaaatgagccaccagttacgagatcagcacccctcgtgtgtcgccatccagagagcaacaattgatttttttttcccatgatggaagaatcaaacatgaagataaaaccagtgcgcttcggcgaggccatggtatttgagtcgtgccatcatgggagcacagcgtgcatgtgcaatgaggttagtaaccgttaatctttcgctgcgaggggctagagtgtaatgcccggttgcagtgagccttgagaagccaacctg

SEQ ID NO: 19940 - DNA, 459 bp, Oryza sativa
  Clone ID: uC-osflcyp065c03a1
gaagcagaaattattccaggcactgactgcattcacaggagcaaagagaaggaaactaatcatcgtccccgaaacgtcccggtcaggaggcttgaaaacaagcattacaaccagcagcagcacaatccgctgtggcaaatgtcaaaagcaaatggaagtgggttctacatattacacaaggtaaaaaaagaagaaaaaataataaagggaagaagagagaaaaggtcgagctaacatgatggattggtggtggtcctgagcttgctcagaattgcacaacaggataagggcctcgtcggtatgaccaaacgggctaaaaggcgaaacggggggatgatggatgatgatcccaggccagatgctccgagataagggaggcacaccaacgtggtttttcctgtccctgcaaaggaaaggaggagacacttgaagagcttaccactgttgccgcggccccgg

SEQ ID NO: 19941 - DNA, 375 bp, Oryza sativa
  Clone ID: uC-osflcyp065c04a1
gtcaaggtaagtgatggaatacaacagccttaacgcttctgacgatcattagtccatgacatatactcagtcttaaaaagcaagatacattgatacattaaatgttattcaaatctagtcagagtcagggttcgccatcaacaatacctggcattgaatcttctgattccacaatcaaaatcatccagtttttgctggactgcatgaagtgggtaagaaccaggaaccagattgcggttgctttaccttccagtttactgttttgcttaatgatgacctcaaaagcctgacgtttttgttcccgaagatgaatcgacaatgtttagtgtggccctttgtcggtaaactggggccagctacctgttggttgagatc

SEQ ID NO: 19942 - DNA, 76 bp, Oryza sativa
  Clone ID: uC-osflcyp065c05a1
cgtgatcctcctttagtcgccgccccttctttttttttttttttttaattctcaattttcggaacggttaaaatta

SEQ ID NO: 19943 - DNA, 509 bp, Oryza sativa
  Clone ID: uC-osflcyp065c06a1
tttttgtttttttttttttttttttttttttttttttttttttttttttatttttacttttttttttttttttgtttttttttaattttctttattcatctcaatctggggggtgtttttttcacggaaaaccccccaaatttttaaggggggcaaaaataaaaaaaacggtcccaaaaaaaaaaaatgggggagaaaaaaccaggacagtgttttaaaaaaaaccccccccaaaaaaaaagggggacccctaaaaaaaaaaccccccgggagggggggggaagaaaaaacccaaagggggaaaaaaacaagcgccccgaaaagggcaaaaaccaaaggggaaaaaaaaaaaaatccccgaaccattaaatgggaatagaaaaaaaaaaaacccaaaaaaaaaagggcaaccttaaataagggggggaaatttcaaagggggggccgggacccaaaaaaaacgcgcaaaaaacatttaaaaagggggggttggaggggaaaaaataaaa

SEQ ID NO: 19944 - DNA, 424 bp, Oryza sativa
  Clone ID: uC-osflcyp065c07a1
aaaaaagggggccccccccccctttttttttttaagggggaaaaaaaaggggcccttgaagggagggggaaaaaaaaaccccttttttttggggggaaaaaaaaaaagggggaaaaaagcccccccaaaaaaaacgggggtcccccccggggggccaaaggatttttttaaaaaaacagggggtttaatggggggaaaaaagggtgtttttaaaaaaaaaaattttttttttttcccaacaaaagggggtaaaggggccccccttggcctataaaggtcacccttttcccccggaaaggggggaaaaaatttttttcaccctttttggggggataaagggggtgaaaaaacccccccggggtgtggcccccaaaaaaaataccccaaaaaaaaccgggccctccccaaaagggggccccccccc

SEQ ID NO: 19945 - DNA, 453 bp, Oryza sativa
  Clone ID: uC-osflcyp065c08a1
catggaccagtaggtccggttgatgtacgtcattaatacgcagtataaaagaccaaaagtagtatcacatcatcatatgcctaacatggaaaacttgatagtattatcgcccctagagcggaaagaaacaatttgtcgccgccgtcaaagccgtgcagatatgtatgcacggcgctgcttgctgcttactgctgcgcgcactgcacgcgctgggcgccgccgccgtgcatgtcctcgtcctcgtcgtatgcctcctgctgctgctgttgctgccgcctcctcatctcctcctcgatgttcacgtcgtacggcatggtctcctcgcactcgtcgagctccatgtcggtgtactgcgacaccggccttggcgggaggacggtctccagggccttgcactggtcagggttcaaagagtcggggaattccacggagaaatggatgtagagcttcccc

SEQ ID NO: 19946 - DNA, 418 bp, Oryza sativa
  Clone ID: uC-osflcyp065c10a1
gaaacaggaatatgaattgccattatataatgataatttctttggtataagaaacaatattatcgaaacgagataggcaaatcggcaggtataaacgagtgtattacataaggtgttacataagatcacatggactaatacatcatagttcagtactctgtaacttttaacttattccaaaaacaccactgatgacacacaacctaggtaaaaacagcagtacaactgatggacaatcgcatagaggtgcaataggttcaaatccacaacccagtcttacttgctatctgcagaggcctcgactatcttgacagcagaccaaactcgcctttccctcacgcagacttggatgcgatcattccggtcttccgggcataggcaaagatcccgcctgcctcaataaccggcccggcatcgc

SEQ ID NO: 19947 - DNA, 352 bp, Oryza sativa
  Clone ID: uC-osflcyp065c11a1
ctcaaataccacttaatttaaaaagggattattgcaacacacataattttcacataggaccattcaaccaccattcctttgggcccaatcgctggcaaaacaggttttccatgatcgtactgaatcaccatacagttatacattacacatgacatttgcgaagggggtcagggggagcattcaccagaacaaccacacaccaagggcttcataatagctttgaaaagaaccaaacaatgggtttaacgacagttttgtcagcagctgcaaatttgaactccagttcaatttcaccaatctaggctaatgctcctcggggggaaaaggttggcgatgtaatctatgatagggc

SEQ ID NO: 19948 - DNA, 365 bp, Oryza sativa
  Clone ID: uC-osflcyp065c12a1
cgcatccactcggagaaagaggcacttctattctttttctgagggaaaaaaaggggcaaaagaatccaagacaacacattgtcaggaacatggcttccaaagtccagagctcctatataacacgtaactaagagcaatctaatcctataatcctccccttaaaaagaaaaccgcctagatgaatggaaaacggctttttcgatcaaccattcattaatatatggacaggtcgcccaaaaccttggttgtcaaacccttttggtaaggggggtccagtaattaacgccccaacttccaaacgggcaagggccccggcaatgccaaatagcttgaagggaaattttccctcgctcccccctgggggg

SEQ ID NO: 19949 - DNA, 128 bp, Oryza sativa
  Clone ID: uC-osflcyp065d01a1
ggccaaaaaaagttgtccctctccaaataggggcgtaaaaagttaaaaaaccaccccaagagatatttcccgcaaattaatggttggaacaaactcttatttaaggtaacaaacactttctatttttg

SEQ ID NO: 19950 - DNA, 286 bp, Oryza sativa
  Clone ID: uC-osflcyp065d02a1
ataggaaatgccatcacaagtttgcaatataaagatttacatttatcaaaacatcaaggggaaaaaattagttctcgtttatttttgaaagaaacaaaatttaacttttaatggtaaacatcgtaatcatcattatcatcggaattaacctcctaaaaatgacctttcccaaccttgattttaccatttaaataacttggggggcatgccccatttaacaaaatgttatgcccaggattattttggccatgtttatacccatttccagtcccatttatttctaaac

SEQ ID NO: 19951 - DNA, 466 bp, Oryza sativa
  Clone ID: uC-osflcyp065d03a1
aacgaaatctctcatccttggataatggtcaaatgaagatgtccaatatcagatccaacattatttgattaacctaaattcatgtatatcatctttacagaatgagaatggcttatgaatcattccatacaaaaccaaaacaaattttgggaattttataacagaaaccgcgcacgattgatgaaaacgggatcacattcaatatcaggaatcaataaacagaaatttcttcttttttgctcttcaagttttttcatacactcaaaatgcaaaagggaaacaaaactagattcatccgacaaaatcatatattgcatttttatagcaagtatcatttctcccctaatttttttttggtctacattgatccaccatacgaataaatgatagggtttgtctcataggtataatttaaaaagaatttatgacctttgcttggaatgcatgccccaggaggaggatcaaa

SEQ ID NO: 19952 - DNA, 367 bp, Oryza sativa
  Clone ID: uC-osflcyp065d04a1
gttgagaccgcttatgtaaaaaattaaggtatgcactaataattttgaactaaaaaatgaatacacctgtatgaaatggggttttgaggcactgaattatttaacagttgatgcctcacaattgttcaagaaaaaggggttacccccttaatttaatatttatgcccaaaacaaaggggaaatagaaaaggtaccggttttatttcttagtcttataatgactgtttaatccttcattatattgcaaaaaatgtttccacttttttaaaattttgcccttgcaaatggggaaatactgacccccaaggttttttaaaacctttcaggagagctattgcctgcaaaacattcttttgaaccaattttt

SEQ ID NO: 19953 - DNA, 445 bp, Oryza sativa
  Clone ID: uC-osflcyp065d06a1
agtacctcgataggttttaactcattaactgccacggcgcacaagaattacagccagaaaaactgtgttgcaagtttaagaaaccattagctaacctcggcttatgatcgtctagacaagattcaaccaactcacaaccatccataaatatataacatctctaagatgacaaaaacagcttctgcagcacctcaaaatagcttctctaaccgtagcatttcaaacccaatactgcaatgcagatgggttgagcaacggccaaagcttcccaatactgcaatgcagatgggttgagcaacggccaaagcttgtacatgcattcatggattcctacttcccagcagaatcaggggaaccatttccatacgaaaccaaacctttcttcccttcaaaactggcagaaggtgaccgggactttgcattactttctcgctttgggacagga

SEQ ID NO: 19954 - DNA, 228 bp, Oryza sativa
  Clone ID: uC-osflcyp065d07a1
gatcgtagtagttgctcaaaacatgctaactgagcaacaggtaaaaatgattactcaaaacttcctttcttatcaggaaatgtgatgttgcacttcaacaatgatgttttcgatgtatactgatgtaagtttaaaaccaaagtgcttttgtttgctaaaaatctttggttgaataaaattggtaaagcctattatgtttgaaatgaatcaaaaattggaaaggtgaat

SEQ ID NO: 19955 - DNA, 475 bp, Oryza sativa
  Clone ID: uC-osflcyp065d08a1
gacgaaaggagctgtcttgagttaagactttcaagaaatggtataactgaaagttggaacaatctaactctcaatatcaccacaacaaaatgaaaattaatggacctctttcaatagaagcaacatacagccgtacacctagtggaaaaaatcaacaagaaatgcatctctactctaatttgagcaacagccaattctcttcagcgcagacacgtcatctttcacattaatcttctctcctttgattggagcatttgatccatcatctgatgcctcaaccgtcttcttgctgacagtttggtatatctgagtcaaaacttctgcaaaagcattctctacatttgtggcgtctaatgcagatgtctccatgaagtacaatgactcagcctcagcatattcctttccatcttcagttgaaacagccaccataaggcggagatcggatttgttgcctactagcatgacaccaatacta

SEQ ID NO: 19956 - DNA, 480 bp, Oryza sativa
  Clone ID: uC-osflcyp065d09a1
aaacaagataaaaactcatccaattttgcttacaagcaacagaaaacacgggcttgcataagtaaagttgttacctccatacaagtgatacatgtgcttttaaatagtgaaactaccaaacagaaactccatattcagatttttcctggcatgaagagtaaccttccagaccaactgttagatatgatattatttggcttctccggtagaattagcccaatgttgcttcaagcctaacgcctgcacgttgatgtctagatgcatccacaggacagcctcagagtcgctatgagcgaaatgggcttcaccatttcacattttgtttgatgccataaatttgccttttctctcagcaggtttaagaatttgaaaagaacacatcaaagtttcatcaacactcatcattgcacctgcattatcaaattcaccacaatagtttggagctgagaatatggtgacaagtgtctgtcggcaaagaac

SEQ ID NO: 19957 - DNA, 433 bp, Oryza sativa
  Clone ID: uC-osflcyp065d10a1
gatcaccaacagctcacctttctgctattattttcctttgcttttgataaacaatgtgtaacaatttacaggtttatggctacaaattaatggaatacaaccccaccccaccagacctgaccaacctagcatttcctatatctacatgacagtataaaaattatcttgttttacccaccaaaaaattttaactcggtaaaccgaccatcaggttagcctaaactcacaccatgtcagccctaagcgacacccctctgcaccacccttatttacctgtgtgctatgctacacttcaagcctgactcttgtcttgattggctttagttttactcccaatgcttttgggtgacaggagatcgggtgatatacagaatgggctgagggggctgcgcgggctacagtccaactggcttggtctgtacaggccataacc

SEQ ID NO: 19958 - DNA, 413 bp, Oryza sativa
  Clone ID: uC-osflcyp065d11a1
cgtacctggtctgcactgcacagggcacatcatacacacacgattcatcagtacacaaattaccaacttaacgtaacaacacacggtaacacatgtactcttaccatccaagaaaaaatcaacttctaactacgtctataaattcatagagaagttaattttttttagacaggaggagtacttaattaacacacagtaaggaggcacgttatattaagccgccggagtacacacatcgcggcggcgtgagcaacggtataacttaacgacggcatggtggctcgccggagttgattaacacctatggcacgggtggaacgacggacggcatcggcggctgtgggtcttcctgcacggtggtcgacgacgccggcgggacgccggggaatccggagccggcgccggatcaatcg

SEQ ID NO: 19959 - DNA, 493 bp, Oryza sativa
  Clone ID: uC-osflcyp065d12a1
gatgctggaatagctggagccaaaactcccagatggttttcttgactgcatcaatatgccattaagtctggcaactacaatgacaggccataaagtcttgcattacatcacagataagtctaatagatggcctaattgtctggcgttacatcacacacaagtttaataacagataacttgatctaacattacatcacagtttgtcagattcccatggaggcataagcagcagtagaccaggtgtaagcttctttggcttgaactttgctgattcttgagttgaaacattgacaaaagcttgcccagaagtgaccttaattgttgcacttgtagaaccctgagaatgggcatgcaattccactagtgccttttgctttgaagacactgttttccttgactgacttgcagaattggtgttagcagctgtacgtgactttcttttcctgctttgtttagagctttgttggtgtttgagagcactaaattatcagct

SEQ ID NO: 19960 - DNA, 478 bp, Oryza sativa
  Clone ID: uC-osflcyp065e02a1
agtggatgatgaatcatttgtaaaggactggaaattaggccaggatgattttcacaacacaaatacaggatacacaaatttttgtttagtaaaaacatacggagatgggcagggagaggtccttcttgccttcgtaagctctttctgtgcagtctgtatcctaattacttgtccagtatgcccctgtaatcagtaactgccagaagaacagtctcagaacttcagacccaaaaggtatcctgaaacatcaaacatgataagctaggaatagcagtctgcatacattcaacttccactttttattccaactgtactcccatctctcagtcagtgacacatatcaggaatacgtaaaagatttgcagtcgctgacaaccatgtgaatgactgagaacattttttagagcaaaagtagacaggcaagctccctgatattatatcaggctcacaatatttgtgcatacaaactaaaataatt

SEQ ID NO: 19961 - DNA, 81 bp, Oryza sativa
  Clone ID: uC-osflcyp065e03a1
attaatatatttaaaataaaattatatttattaaattaaattataataaaaaaatattttttaaaaaataaataataaaaa

SEQ ID NO: 19962 - DNA, 79 bp, Oryza sativa
  Clone ID: uC-osflcyp065e04a1
ggatcattattttttatttttttatttttattatttattattatattatatatataatatttaaacaaattttttttta

SEQ ID NO: 19963 - DNA, 436 bp, Oryza sativa
  Clone ID: uC-osflcyp065e06a1
ggcttgacaatttaaatactgaactgcgatctaatcatctcttcatacagtatgtaaccgagttagtgtgacattcaaaactgatgtactttgaaaacgcaaatttttttgcctaacaaaaaaaagtatgacattcttaaggggaaagggatgcccaacaaaaccattccaccaatcgagagtgccatgttccagttcatggcaaaagaaaagaccaattcaaaccaccaaactaatgtatcaaaatccaagaggaagataatcctgtcgaactacgccctccctttttttcagccccagaatctgctgagaagacccttcttctccttcttcattctgttctcaatgtttgggaacttgatcgcattgtaggccatatcaagaacaaatggattacacggaactgattggaatggaggtgggaatcgtgcaatgc

SEQ ID NO: 19964 - DNA, 97 bp, Oryza sativa
  Clone ID: uC-osflcyp065e08a1
aaattattatattagttttatatataaaaaaaagaaaatataaaaaaaaaaaataaaaaatcaaaaaaaataaaaaaaaaaacaaaataaataaaaa

SEQ ID NO: 19965 - DNA, 388 bp, Oryza sativa
  Clone ID: uC-osflcyp065e10a1
acgacaaaccacgaacttggatattaaagatgccacaaagaaggttcacataaacaacacaggtcacagcagcgaaagctacaagcaaaccctgcataatcgaaaagcaaatgtttttcaaaaccagacacacaaactgatagatagaagcccacacggacagatcataggatagcagcagtaatcaagcattgccaaggcaccaggcaagaaccctgaacctctctagtactcgtcaccctcatcaccctcgtcaccatcgtcgaactcggagccgacctcctcgtagtccttctccagcgcggcgaggtcctcgcgggcctcggagaactcccccttcttcatgcccttgccgacgtaccagtggaccaaggcgcgcttggagtac

SEQ ID NO: 19966 - DNA, 480 bp, Oryza sativa
  Clone ID: uC-osflcyp065e11a1
gaaaaagaaatacaagggcttacatatttaacaaatgaaacaattttaaaacatttaagctcaggcaaaaaactcaagtacagcgtaccacattataattgataagaagtttctctccgtccctaactaacatttataaaatttaaacacatatatataaagggacatacatagagcatgtatgaatctattcaaaacaaaacatctaataatgtaagatacatgaagtgcgtggagtttaggacaaagcacatattaggccattcgggtgtacgcgtattactgttagggccaaaagcaaaacacggtgagatctaccagaccaccgtatgtgagcttctacactactttgcgggccctttttgggcaacaaggcctctggtatactgggctactgggatgtctcccgtggaaaggcattcgcacaaccttggaattggggagttttatttatttgcctttgacccctgacccaacaag

SEQ ID NO: 19967 - DNA, 445 bp, Oryza sativa
  Clone ID: uC-osflcyp065e12a1
cagcatataagatgcacacacatatatattattatttatatacactactaagtagaaaagaatgccccagacacggtaataaaaatggcagtagatacataagaaataatttaattacactagctagcagtggcacatctgaaaaaacaacgtgaaataaaagggtaaaaaaagccaagcagaaagctagctcatcactttattccagaaacggtacagggtagtgactcgctcgctcctccctttggcgaaataatgtcgtcaatgcctcaatcgtgcagcagcaagtgctcggtctccggtgatcgccgacactggtcggtcgctggcggtatgtgcggcggcttgagctttttcggaggtgcttaaggttttggctcaggcttaggcttaggtttcggtttaggctttggctttgggtatggtttaggctccgtttttggtt

SEQ ID NO: 19968 - DNA, 204 bp, Oryza sativa
  Clone ID: uC-osflcyp065f01a1
acataaaaagctatatacattatagactcgtatacaattacactgccacggtaatatctgaacaagaaaacatagccaggtagaccctggcttccctggatctcaatgctgacgtcaaaggaattggcacgcttagaattgtttgtacagggttgaaaaagaccccacgagaattccgtcgccaagccttgcgtaacccgcaac

SEQ ID NO: 19969 - DNA, 327 bp, Oryza sativa
  unsure (1)..(327): unsure at all n locations
  Clone ID: uC-osflcyp065f02a1
tcgcgatcatcgcatcaaccaccaaatcgaaggcacgtaggtgagcaccaacagctacatcggccatggctcgcgcgctcgttctcgtcgtgatcctcctcgccgctatcgcagtggcaccgttcgcggaagcctcgacagtcaccggtggctccagggtattgttggcctccgacgcgcccgctgagagcccggctgggcctgcggcggccccaggcccagcggaagagtccagcagtgaatctgctccatctccgagcgccgctgatgcctgatcgagtaataatgaagntccaagtgaataattcttcatcccaagaacattga

SEQ ID NO: 19970 - DNA, 319 bp, Oryza sativa
  Clone ID: uC-osflcyp065f03a1
gaacataaagtcgacacaggatacattccaagaaaatcaacagggaatcaaaacaatttgttcattacaataccaatttgactgatttaagatttccttttagactcacagaaacagtaaacaaggggttctatccaattcttctttggttatgagatatactgcaggcaaagatagtcaacacaagtttgatgactatttacaataataatatcggtaaaggggatgttttaatatctctctgaaaaggttgagcctgtttggtggcaccaagcatccttttaacgacaggccgtccttggcttggaaaggtaaaatt

SEQ ID NO: 19971 - DNA, 387 bp, Oryza sativa
  Clone ID: uC-osflcyp065f04a1
ctagtcaatttttatttagtttaaacaaatttataaaaaaatatagcaacatataaaatattaaattagtctaattaaatccaatatgaaatatattctgataatatgttccttttcatattgaaaatactactttatttttttaaaaaactttggttcaaactttgaaaaaattggcttttaaaaaaaaacaaatgacttttgtaatatgaaacggaagagttagtataataagatgaaaaataagacgtcaggcgagctccttggcgacgtttgctggacttgccggcgaccgttcttgcagacggagagggttggtgttcccttggccggcgtacttgaggtcgacgttgtgcagctggatgccctggcacggtaggttgttgg

SEQ ID NO: 19972 - DNA, 439 bp, Oryza sativa
  Clone ID: uC-osflcyp065f06a1
agatagggtctatgttgttcatatagatttgcttttgtttttctcaatctaaggattgaatttggacttgaattcttgtcagtacttggatttgtactgcattactccatgattctctctggctaactgcaaatagcataaactcaaaatgcacggacatgaagcaatttttaagcatgagcattttcagggaggccaatctcggctccagtttcaactgggaagtccaagaagaggccgtcggagacggattctttcttgtagcttttcttccttgcagcacagcttccacctgaactgtgttcaccaagtagtgcatggtcaccaatgtcttaatccttgcaaacttgtttccaggacacattcttggaccttccccaaatggcccaagcaataaggaggaatcgaaaagttgttctcgaatcgagcagggtcgaaa

SEQ ID NO: 19973 - DNA, 324 bp, Oryza sativa
  Clone ID: uC-osflcyp065f07a1
caaagcctccaccgattcgattccactcgacaagagcaaagccgacgcccggccccatcgcgacgcgacggtagtatagtagttacaaaaagtgaatgtgccgcgtacgcacgcgcgtgcgtgcgtctcacacgagaaagggagaatcggtggccgtaagcactcggctcaatcaatcatcactcacctcaccggccgcggagcagggccttctcggcggtgtccatctcctcgaggatgcgggcgcggcgcttgttggggatgggggccggggggccaaagctgatgtaggggccaaacacggttttgagcgcggacaacatc

SEQ ID NO: 19974 - DNA, 113 bp, Oryza sativa
  Clone ID: uC-osflcyp065f08a1
ttttttttttttttttttttttttttttttttttttttttttttttttttttttttttttttttttttttttttttttttttttttttttttttttcttttttttatatattt

SEQ ID NO: 19975 - DNA, 388 bp, Oryza sativa
  Clone ID: uC-osflcyp065f10a1
cgagaagatcagtactactttattcatgccatgaccatgcatacatatgggctttcacagatccatgaagaatttcctcgcccgaaaccgaaacatacatatatagcaaactcactcactctggctgcagagcgaccgtgcgaagtgcgtactcacacgcaattttattagatcgatcggggccggcacggcggcgcacacgttctacttcgccgcagacgccgacatgatgccgccgtcgaacggcgcctggccgaagcagtccaggttgggcccgtagccgacgccgagcacgtcgcagtagcgcttgtagaacgcgacccggtcggcgccgccgttgccgccggcgcactggagcccgccggtgaggatgttcgtggtgagcccg

SEQ ID NO: 19976 - DNA, 494 bp, Oryza sativa
  Clone ID: uC-osflcyp065f11a1
aacagaacggtttaggcattcagaatgataggattctattcatcacaaaacaatcagtaccgattctattcatcactgctatatgcagttccgaaataacaaaagaaacaatgaaacaaaacagcgtggttcttatgctaagatgtacatgaaggtctaggtcaaaccaaagacctgattacactccctgacaattttcagtatatcatcattaagtacatgatacatgtcaccggatgagccatttttatgcgacaagtgttttggacgtcttaacggcctccaggatgtctgttccaggacaagtagttgtgatcacccaatttccttggttttatgaggtatagcaaggtgaaagcaaatgccaagaaaaagcagacccctccgactataacatacgcaaatcctagaaaatcattcttcccaccaagccaggttgcagtagaaaggaccagcttttttttgccaccaagttatatggattgagttgttac

SEQ ID NO: 19977 - DNA, 473 bp, Oryza sativa
  Clone ID: uC-osflcyp065f12a1
acacgtcaccagggggagtaactctatatgtaaaaccaacagaaaaaaaaaacatcatataatatgtacaccaggcaacagaaaagcatcatatgatatttacatcagctaacttctgtcactgcaattccattgtgatgtatatgcaagctagctacaaaattgctgcctacacaatggacctaccctacctaactgtatcaatcaataccaccttagtagaagcaaggataaccgacccagcttcttgccgccaaacatcaatccatccaccatagctccaacatctatcccttctcaactagggcacaaccaaaaaagaagtgatgcccttcttagttagtgcacagccaaaaaataagtgatggtgcatgcatctggggggcatagcactatagcagggaccatacatcaaatagcatcagctgctaatcagagtctgactcgattgttagtatcaacttttgtctact

SEQ ID NO: 19978 - DNA, 343 bp, Oryza sativa
  Clone ID: uC-osflcyp065g02a1
acgaaaaagagctttttgtgtgggtaaaaatctttagctttgtttggtacacgtccccctcgaaaaggagcaaaacgtacgagacgaacacacaggaagaagaaagcttgcttgcgtgaccgggccgatcaaccatggatgcacacacatgcatgcatggggattgatcgagaccttagctaggtcatcttttattccagaatacagatgtgatactactaggactggatacagaattgggcttcacacattgacccaggcagaatctactagggggcaaccggcgcgctggtgtatatatatgaaccggctttttgatcgatgggttaactcaccctggagc

SEQ ID NO: 19979 - DNA, 497 bp, Oryza sativa
  Clone ID: uC-osflcyp065g03a1
ggagaggaagaaaaaaaattgtgacatatattcaactgaatcagattctttgtcgtagcaaaatcacaatgtttgggacggcattatcattattttgattggtacagtttgacaacaataacacatttggactgagcatcacacgtactcaactttctctattgtcaccaactgaatgctcaaaattttgttagcttcttcatcttctgttcttcaatgtttaacagtctttcttttctttcatgagctactcgaagatgggtagatcaagaggcttattctttgacccatcttgagtgtctcttgaagatgatgagagagagagagcagagaaggcttttgtatcagattctttatccatgtccaggaagaaccgatgccatctagagtctgatgtcaattctgggtgaaaagcagtagcgaggatgttcccttgccttcagcaacaattacccgttctttcgagtacacttttttctcacaccctcttcagacgc

SEQ ID NO: 19980 - DNA, 336 bp, Oryza sativa
  Clone ID: uC-osflcyp065g04a1
ggcaaaacattgaatcccctgctcacaagtcacaaatagacaagccacttaatagaagtccgctacatagcacacacacacacatctttgtagtagtttgcagtcagtggcctgaatggcaggggagacacaactctccagccattctccacttccatggttatcattcctacagatatagagtcctactgtacattatttgagatctgagtttattcacacagttttttcctttaggccaggaaggaacacctttttattcaccaggcaatatggcttttaccaggaccaagcgcccaaaacaccattagtttgcctgggctggcaccatggttt

SEQ ID NO: 19981 - DNA, 472 bp, Oryza sativa
  Clone ID: uC-osflcyp065g06a1
gaggaaggatcacactgcagaaccataagaaaaaggacaagagcgaatggataattacaatcaaacgtcaacgagtacacacaaaatcatgacgtttttaatcatcatatacccataaatttctcatgtaacagtcatacactcgtacatggtttggcccggcggaaaacaaatcatacatggccgctgttgtcactgacagacaggtcttgaggagcctcaagaaccagccttcctcacaacaacagagcaaccatcacagaataacaccgggccattttcaactgggtgtgtataatcattactatatgcattaacaaggcggcagtagcagcatcatgttatatttggtattcctttgcttcctcaaggttgggtggggctgggcgacacacagcaaaaccacttttttgatgcggagtttgtcctgcggtggtaggggttgaacttttctgttgccttattgttattg

SEQ ID NO: 19982 - DNA, 400 bp, Oryza sativa
  Clone ID: uC-osflcyp065g07a1
caggggaccaaaaattatataacactaccatgtagtagaaagctggagcaggagggacaaagattacagcaattcggttcaagtacacgtaggtgattgcagaattgcagtcaagttaaagcgaaacaggaaaatctggaaaaaaaataatcctcttttttctttctttatggacaggctggatcacacggggtaagactgctggatggtctcaatgtcgaggcctttgagcttaacaaccgattttacatgccccttgagcgtatggagctccctaagcctggcaatttccgccctcctttttgccttttaagccatttgattgagctcattgtagccagccttctccgagaacattttggcatcaggcggttgcagtccatggaggggcctttgagca

SEQ ID NO: 19983 - DNA, 156 bp, Oryza sativa
  Clone ID: uC-osflcyp065g08a1
gtgcttcaggattggggaaatatcaggccccaaagcgtgtaactatgtattatgccactactagaagcctcttattgctctcagcctataataacgaaagaaacttaggccgggaacttataaaaaaaaaaaaaaaagggggcagccgttagcaaa

SEQ ID NO: 19984 - DNA, 193 bp, Oryza sativa
  Clone ID: uC-osflcyp065g10a1
gcgaaaatggccacagggaaccaagaatggggcaatttcttggtgccattcagccattctacctttaatatttcttcctggaaattctagtgttgagttgctttattacttacaaattcaagggggaaaactttactttcaagcctacaacattcaaaattcttaccacgccttttttaaaagttatttgggt

SEQ ID NO: 19985 - DNA, 116 bp, Oryza sativa
  Clone ID: uC-osflcyp065g12a1
tttttattttatttatttttattttattttttatttttattattttttatttattttattttattttttatttatttatttttattttttattatttttttattttatattttttt

SEQ ID NO: 19986 - DNA, 443 bp, Oryza sativa
  Clone ID: uC-osflcyp065h03a1
cacagagaacatggaagtgcatacataatttagatagctggtccaaaccacatactctatgttctcacgacagcacattaacaaaacagagaaactagtctcaaaatcccacagataacttcttatggagatgttcaggtaaaaacagattgataaatccttgagataagatccggtaacgctgctactcaaaacttaaaacaagacaacgctcactgcgtcactccgagccacttcgagaagttgtcgaactcagcatagtcactgtctgagatcatggtcttgtaccatgcctttcctgcagccttaaccttagcagcctcctccgggctaagcttggtccttttggagtcaagcttctcctttctggccttgatgcgggcagcctcaacaagggtggccatcttgcgtgcagtgccgaaataggggttgagcttgagcac

SEQ ID NO: 19987 - DNA, 436 bp, Oryza sativa
  Clone ID: uC-osflcyp065h06a1
ggatggatgtaatgtaatactacagatacttcaggaatgggaaaaggaaatgctggtataaaacgcaccaacattactcggtttaagtagagtatttatcagcagaaacaatcttagacaaagagaagaaaatgatgaaaatcaactatttagcagcacacagcatactgcatgagtttttcaatctcaatacaccattacgaactgaattgacttttatgagttaggcaaatgcttcatgctttacaagccaaccttattaaattttttcccacgggtccagcaacaattaggatctggaaacagtattaggatataccaacatgggctgagagggccttatgctgaatgggagcctcagtgctatgatccttttacctgccctttctacaaaaacagaacttaccacccttcaaaaatagcagttgataatgac

SEQ ID NO: 19988 - DNA, 145 bp, Oryza sativa
  Clone ID: uC-osflcyp065h07a1
aggagtagaatgcatatgcccttgagaagggggagatgtggtgaagtttacagttacagctattccaaatctccagacatacaattcccgtttttcccaacttataaagtacaatactcagctctccccaaataaatatatttat

SEQ ID NO: 19989 - DNA, 385 bp, Oryza sativa
  Clone ID: uC-osflcyp065h09a1
gggaggaactacactctctttatttgtagactttttatgaaaattttatgttcggctcacacgaaataaaatgtagcgcatgcatatatgaataactcaaactacagattggcagccgtcacaatgttggagctaaattcccatagtttcttggccaactctgcatttgaagcctgccagctcggggtctctaaattgcagttgctgaagtactaaccacttattccagaaacttgaggatggaatgccacataacatgacgatgcagcaccctgttctacagttttacatacgattcttccaatggtgcccaccacagcattagccatagtccagttcttgaataggttggttacaacaaaaccgggatggatcgcacttgctg

SEQ ID NO: 19990 - DNA, 148 bp, Oryza sativa
  Clone ID: uC-osflcyp065h10a1
caactattgcaattgacttagctcaaagagcatataaatatgtacaagagaagttagaaatgtctataatacccttaattactcttaacacctcccactcaaatgtcaatgttgtaatgcaattaacatttgcattttggaaaggtta

SEQ ID NO: 19991 - DNA, 273 bp, Oryza sativa
  Clone ID: uC-osflcyp065h11a1
aaactaatccatcaaatacaatgatttcggtaagggggtatacacttatctggtgaacaggcaatacacacataatggaacgctgtgatggtagaaaaattctactaatcttatcaaagaaagtaaccaaacacgacatgccaatcccaacaataccatatatttcctttacaaaggaacaataaattacacatcaaatccaaaagctttgtgtcccgatcgagactgcttggtcacacggacagaactgtgatcagaagcaaagcctgcaac

SEQ ID NO: 19992 - DNA, 735 bp, Oryza sativa
  Clone ID: uC-osflcyp065h12a1
atttttgggtatatttatatattaatagattataaataaataataactagaaatagataattaaataattaatatcataaaattttaaaaaatacaaataaggtaaacaatttgaatataaaaaaaaaaagtataaataaatcctttaataaatataaaaaattaaaaaattacaattttgtttcttattcacataaataaagaataaaaaaaatttattttttcaaaaaaatagtataaaaaaatattatttttaataaaaaaactttaaaaacactattaatgaaaaattttatttaatcaataaaatatttataattttaaaattttaaataggttttttaaaattggttactaaaaaaaaaaaaaaaggttaatattgaagttctcaaaataggattaaaaaaattatatttttaacaaatattttttaataatctacctaaatattgtaatataaaatattaataataaaaaattttatttattccgttaaaaaaataaaaaattgtattttattaaactataaaagatattataatatatgacccaaaaaattaataataatttataaaaagtaagataattaatttttctttattttataaaaaaaattataattataatctcaaaaaaaaaaataccttcaatttaaagatgttatttattattaaataaaatattatattttgaattttttattaataacggttaaattttaaaaaaatatattat

SEQ ID NO: 19993 - DNA, 329 bp, Oryza sativa
  Clone ID: uC-osflcyp068a03b1
tagaggaagaaggagagaaacatctagagggaatgagaaagacggggttcagccgagccctgttcctgctggcgatggtgtgcgtggcggcacacgcgaaggactaccccaaggaggagggcgcgaaggcggaggggccggccgcatgcatgaatcctagcaggtacacatatagctgaagaatatggttctatatggaaagggatgggtgcgcacgtagactcgttttatcgaaaagagcttactctaagaggtttcgatgatgagacgaggacagttgctgcaagtaaccttgagggactaggccatttgctaacatgcaattacac

SEQ ID NO: 19994 - DNA, 334 bp, Oryza sativa
  Clone ID: uC-osflcyp068a04b1
ttcatagccagatggttcaaagcaaagatatacagcaaagcacatattgatagcaactggtagccgagctcaacgtgtcaacattcctgggaaggagttagctattacttcagatgaggccttaagtttggaggagctaccaaaacgtgctgtaatcctcggtggcggatatattgctgctgaatttgcttctatatggaaagggatgggtgcgcacgtagacttgttttatcgaaaagagcttcctctaagaggttccgatgatgagatgaggaccggttgttgcaagtaaccttgagggaaggggaatcagactccatccattgtcaatcct

SEQ ID NO: 19995 - DNA, 268 bp, Oryza sativa
  Clone ID: uC-osflcyp068a06b1
tactaagcaaaagaagaagaagaagaaagaggttgatttttgatgcataccgctgctagcacccgccgttggattgtttgtcgtgttgtccgcctgctgtgaaggggcgcatcctgcagattcaggctcctcgccgtgttgcgttgcgcgttcgtgcggctgttgcggcggtggcagtggaggctgcggaggtggactacagctctaacatctcggtgtttcttatggaggtcttcgacctcttcggcggccaggcgggcaccgtgca

SEQ ID NO: 19996 - DNA, 539 bp, Oryza sativa
  Clone ID: uC-osflcyp068a12b1
tattaagcaaaagaagaagaagaagaaagaagaagaagaagatgcagaccgctgctagcagtgtcgttggattgtcggccgtgttgcccgctgctgtgaaggggcgcagcctgcagattcaggctcctcgccgtgttgcgttgcgcgttcgtgcggcggcggcggcggtggcagtggaggctgcggaggtggactacagctctaacatctcggtgtttccgatggaggcgtgcgacctcatcggcggcgaggcgtgcaacgtgcagatgtacccagaggccaagctctcatcatcggctgctgttgctgtttctcgtgcggcggcggaggaagtcgacagggactacctatcctacgacgagcccaccacggtgttccccgaggaggcgtgcgacgatctgggcggagagttctgcaaggccacctgatcccattcccatccatggagaattggagtcttctatcatccttcctcctctgctccactaccttaattccatgtagctacagatttatatgttaatcatcatgtatggtac

SEQ ID NO: 19997 - DNA, 536 bp, Oryza sativa
  Clone ID: uC-osflcyp068b01b1
ttcattatgtcgatgatatttctatgccaaggctcatggctagttcttggcacatgaatgatatggaaaacatgcctgccaaggatatttcttccatcccggttattggtgccccaggaatctttggtgagtcacaggaccaaccaagtcctgtgtctgtactagatggaccatttctctccgataacagcaggagcttgctgtgctcatctgaaagtttcatcaccgcatccccacaagctttgtcgagatctccacttatcggatcattttcacgctcactttcatgggaagatcccccactggaagtcatgtcgccaaattccttgagactatcaaggcttttctctaaggctgacgaagatcaagactcattgacatttatccagaagttagtctgctctgctggcatagatagagaaggttgcatgttatccggtcctttggaactgtatttgcttgagaagttctcagattaccaagatgagggaaccaattacgggaaaggcggtcgaaagagaagtttctattcgatg

SEQ ID NO: 19998 - DNA, 551 bp, Oryza sativa
  Clone ID: uC-osflcyp068b06b1
ttcactcatgccacccccaattctgctccttgtggtggttctcctgcgtctcctcaccacgcgcgacgcccgtcggcaaccagttttggttcgcaggtggctgaggaagcagtcttcgggtggcctttgcgtggtttgcttcatcaatttgttcattctagggataggcatcagagtgctttggtaattgctatggaccggcaagtcaggggtgaccatgaagggatcaacgttgttgggtttgaagtgccaacatcaccagattcaagctacaacaacgcctgttcctggaaatgaagatgaagctcgagagcccccattggttcctcctcatctgcagcatacattattgagcttcccaccaagccaagatgattcaagcagccttcctccaccttaaaacgtggtactcaaccacctctacatagagaaagagagctctagatccgtcgttgccctggggattacccatcggttcagggcaaagtttgtgactgttgtgctgtacaagcccgtacaaaggcggtagggtgaaacattttgtgtacctg

SEQ ID NO: 19999 - DNA, 153 bp, Oryza sativa
  Clone ID: uC-osflcyp068b12b1
tgcctctcctagatcccatccgcatcttcttcctcgtttgacattgcccctgctgcttgcttcacgtctcctcttcatgtgatctgaggcgctcgctttcggattcttgctcttctcggcggctcgcgttgggggagcggtggtggggaggag

SEQ ID NO: 20000 - DNA, 497 bp, Oryza sativa
  Clone ID: uC-osflcyp068c02b1
ccctttattgtcttgcatttggaggagaagtatgagatggttttactcaaatgaagcttgccagcattccgcatctcatcttgcatgagatcaactgcctactgaacactatatctgatgctcaggatgtgaaacagaatgaacttgttgagaagtcactcgttgtcacactcttggaacactttggacaagaggcggctgatctaaggtcagagcgaaacaccctgaagcatgagcagcaagcaaagagcgaggaatcgctccagcttcagagagaaaaacaagaacttgtgaatatcactgatgagttctgggaagaagtggagactcgtaatcgtaaagcggatgagctaagggcagaagcaaagttcttggtcggacagttgtcagaacttgcagggtctccgatgtcattgcatagtgagattatcaagcgtattcaagaaaacttaatgctatccgatgaactatgtgatttcagagagaaagaaaggggt

SEQ ID NO: 20001 - DNA, 533 bp, Oryza sativa
  Clone ID: uC-osflcyp068d01b1
ccacactgatcgaaattttgcttatgaaaaggaaattcctgcaagttcgacatgcatggacaagaaagagagtatgatctcaaacaatgaagtcagcaactttgaaaaagcccttgagacacactcagatagtccaaatttgcatgttaaccaagataagaaagatgaaacagctgataaccaaactgtggtggaccataacaccgtgttagacaagcttgaagattctaatcggcaggaggagcaggaaactgctgcacagaagttaccaaaagaaactgaaggaaaccaggaatttatggcaataacagagcctgtgatcaaagaagagaatgtacatgaaacagttgaaggtaacactcaagcagtgaagataaaatctaatgaagagaaagaactttttgattcacaggttcaggaacgtggtctcaatgtggtttcacccaaagcaacttctgaggccgacgaataatttgtggagataacatagccagaattcagcacagatgaagaacatagtccataggcggatg

SEQ ID NO: 20002 - DNA, 539 bp, Oryza sativa
  Clone ID: uC-osflcyp068d04b1
tggattgcagagtgtgtgcttgataagatgactgaaatgggattcaaaccgaactatgtgacacaagaatgtctaatcatgatgtatgcatattgtgattgtgtctcaagggccagacagatattcgatgagcttgtgagctcacaaaataatgtacacctgtcatcagtgaacgcaatgcttgatgcgtactgcatgaacggcttgcccatggaagcagatcagctgttagattctgtaattaagaaaggtgctgtgcccagtgcttccacatacaaattgctttacaaggcctacaccaaagcaaacgacaagaagcttattcagaagttgctcaaacggatgaactcacagggtattgttccaaataaaaagttcttcttggatgctttggaggcatttggcaacactgacaagaaaccccggacggtacccagcaaaaactctgcaagcaagccagatgtggagtccgcaaacaattctggaactgacactttaagcaagccaaatttaagcgtctgcaagttgctgcgtgatgg

SEQ ID NO: 20003 - DNA, 371 bp, Oryza sativa
  Clone ID: uC-osflcyp068d06b1
tcctttgtggttatctaatacgtaattaaggatggagtttgttgctatctcatcttgttactctgttcctagtagcttgctgtctctgttagtactaccagagaccggtacgtgttagctagcctgctggctcctatcaagggctagcgacaacccaaagaagtgtgtttgtgtgtaaacatcttccatgtgtaaatactgccgtgtgtttccctactttcagcgtttaattacctttgatgtgataataccaataccagcttgagataaaaaaaaaaaataaaaaacaaaaatataaagctaaataataaatataactatataaaagaagatctaaataaatgatataatatatatgggggggggcgttt

SEQ ID NO: 20004 - DNA, 448 bp, Oryza sativa
  Clone ID: uC-osflcyp068d07b1
ttagcgagcaggaagagacgagacgagggagggatggacaaggcttgcttgcaaagggcgcgtttggtgcccaaatgattgatcttggactgccacacattgtacataatttgaaagttcaagcctggactgatgagagattattagatgcgctgaatcatctagaaataggactcaaagacaaccttaagaaggtgagttcatttgagaagtacaagtaacaagttcttgttgatcatcttgactggactacaatgcacaatgacccaagtttgtggcgcgagaacattaataactatgaagaaaatgagttccagattctacgtgtgcttatgacaatcatcgacacatcagacgacacgactgctcttgctgtatcctgctatgacctattaaagttacttcagtaccacccttctagggacattgtgagtggagatgttaaggc

SEQ ID NO: 20005 - DNA, 405 bp, Oryza sativa
  unsure (1)..(405): unsure at all n locations
  Clone ID: uC-osflcyp068e05b1
tcttttttttttttttttatncggagagcaggggtattattttactacatgttaaaaaaacactgtaccatatacattttaatgtaacactggagtaaaaggctattggccataaagttacagttttgtggcatccgaagccaacatttattactccgattgccatagcaacccagttcggaaaaccggaaaggccaaaatatccaaaagagattacatggtgaacactgctctgaccttctttttcaggtcccagatatgagggtcaactagggtgccgttgcacatcaagcaattattctgccatcagctgaaatagcatcttacatgcgtgacctcgacgaagcctgctgggttgcgctcggtgcgcttaatggcaggcttttattaggtctatttttcaaa

SEQ ID NO: 20006 - DNA, 346 bp, Oryza sativa
  Clone ID: uC-osflcyp068e07b1
tcttagatgccggagaccgggcattggacgcggacccattcatttctcaccttcggatccagccaccgcacgctcaacagaaggatggtctagctaaacctatcacgctgctaacgtctccgcccaggccgtgatgcctgttctacgggcgcacgtaggggggtctttggctatttcccccctttgtttgaatgtatatcagaagtgtaggtggtggtatcttcttgtgtatgccttctcattgattgtaaattttcacaaaatttccttcttcttttggttcttgtaaatgcgtaatttatctggatgctttcgtaataaaatcgttatactcctgttttttttt

SEQ ID NO: 20007 - DNA, 279 bp, Oryza sativa
  Clone ID: uC-osflcyp068f03b1
ttcctagctcacgcagaggcgacgacgacgcgcaggcgcactcgccctgctccctccccgcgatctcgccgtaggggatctcgtctgcggcgaggaagcaaaggccgagggggcagcggctggggaggggaggggaggggagcgtacatatttcattagagtccaaacttgagaatagtcctctgataagctcgtcacatcacatcactgaataaacctgccggcactcgacaaattaatctttgggcattccctagtgtctgctccttatggaaccta

SEQ ID NO: 20008 - DNA, 425 bp, Oryza sativa
  Clone ID: uC-osflcyp068f07b1
tgttaacattgggatcagcaaaggtactggcaagaaatgaactatcatctcatggctactgcagagtgtaaagttgtgaagggtacaaatcctaatctaagacttgaccttatcattgatggcacgcttgctgtgccaagtgacactcttatcacccttcagttggtttcttttcatggctattgagccacattggtcagaccttctaccatttgcattcatctctacttgtgccttttttcgcctcatgcggttctcctgcctcatacttcttagagcttgtgccctcttctcaatctccagtgcttctgagaagtttcagactttgacagcaccatactttgctccacagacaattctgtctgtaccaatggcgacagaaaaaagatcgcacccaaaaccatgatacattctcttgtggaggt

SEQ ID NO: 20009 - DNA, 471 bp, Oryza sativa
  Clone ID: uC-osflcyp068f11b1
tcttcccccccgcctccaccaccacccgccgctcgccgctcgcccaccatggccatggcgacggcgctccgcaagctctcctccgacgccctccgccgccagccgctctcccgcatcaccccgctctactacatggcgtccctgccggcgacggaggagagatccggagtcacctggccgaagcagctgaacgcgccgctggaggaggtggatcccgagatcgccgacatcatcgagcacgagaaggcccgccaatggaagggtctggagctcatcccgtcggagaacttcacctcggtgtcagtgatgcaggcggtgggatccgtcatgaccaacaagtacagcgaggggtaccccggcgcgagatactacggtggaaacgaatacattgatatggccgagtcattgtgccagatacgtgctttggaggccttccgcttggacccagcgaatggggagtgaatgtgcaac

SEQ ID NO: 20010 - DNA, 381 bp, Oryza sativa
  Clone ID: uC-osflcyp068g06b1
ccgttgtctgctctagatggattggaatttggaaggtatgttctataaaagaaccacgagccccttttaaaatttcaagttctgaatttaacctacgactatatgtggacggagggtgacgctgatcaaactgcttatcatacaggcggagatcattcacatgctgctagcagttctcttgtttgcccttaccttgcactgcgtggttttctccattctgtgcatgtcccttctagttttagttctggtgccgaaaacagttcatttcatcggcatccaactagcttggaaggccatgcagcccacgatttgagccatacacaagtttttcatgcaccagagtcaagaaattatgaccatgacccccgctttttgaaccat

SEQ ID NO: 20011 - DNA, 506 bp, Oryza sativa
  Clone ID: uC-osflcyp068g07b1
tctttaactttttgactttgttctacatagtttttgtggcgctctacactgtgccagtactgtatgagaagtatgaggacaaggttgatgcttttggtgagaaggctgagattgaatttaagaagtactatgccctctttgaagagaaatgcctatcgaagattcccaagggtcctttgaaagataagaagcactagattagtagaaggtacctgcaatgaatcagcagccgtgttaatcactattgctcgacttttattttggaggatggttatgagtccttgtgtgtgtgtctagttgataatatatacttgcatgggcagttctagccttctagcatggctgatagttgttatgtggtggcagatggttgtggcgtgcaatcttttgtggagttgagcaatgctggctcaaatctgctgatcttttccccctttcatgttcaactttaagcatagttactatatctggatgctagaagtatttatggtactatcaatgcccca

SEQ ID NO: 20012 - DNA, 497 bp, Oryza sativa
  Clone ID: uC-osflcyp068g10b1
tcgcagcgctcccatcgcccagggcaacgccacgaaacctagccccaccgactcgcctcgcctcgcctcggaatcccccaacaccagagcgcggcggcgaccatggagccctcccccgtcggcggcgggtccgcctccgggtcggtggagcggtggcgcgcggaggcgtcgcgggcgttccagcactacctggatcgggcggcgccgcacacggcggggcggtgggccggcacgctcgtggccgcggcggtgtacgcgctgcgggtctactacgtgcaggggttctacgtcgtcacctacggcctcggcatctacctcctcaacctcctcatcgggttcctctcccccatggtcgacccggagctcgaggcgctcgacgccggcccggccctccccacccgcggttccgacgagttcaagcccttcatccggcgcctccccgagttcaagttctggtatgccatcacaaaagccttttggttgcttttctgatgaca

SEQ ID NO: 20013 - DNA, 490 bp, Oryza sativa
  Clone ID: uC-osflcyp068g11b1
tctttagctgctgctggtggaacaggacaatttgctgtgcagctcgcaaaactagcaggcaacaaggttgttgccacatgtggtggcaaatgtaaagctgcacttctgtcttccttaggagttgatagagttatcaactaccaaaatgaaaagatcaaagatgttctgaaaaaagagtttccaagaggagcagatatcatatatgaatcggttggtggggaaatgtttgacttatgcttgaatgcacttgcagtccatggacgccttattgtaattggtatgatctcccagtatcaaggagagcatggatggaagccacggaactacactggactatgtgataagattcttgctaaaagtcaaactgtggctggttttttcctaatccagtatgctcactcgtggcaagatcatcttgacaaactttttgacctgtatgcctctggaaagctaaaggtttcccttgacccgaaaaaatcgtgggtgtagc

SEQ ID NO: 20014 - DNA, 264 bp, Oryza sativa
  Clone ID: uC-osflcyp068g12b1
ttcttctactagtcttcttcctcctctcgccctttcacaccggagccatagccggcgggagaggccagcccgactgccagagcctctacctacgactatccgcggccggatggcgccccgcgtgtccctgctcgccgccggcgccgtggccgtggccgtggtcctgcttctcgccgcgccggcgcgggcgtccaacgacgagggggacgcgctgtacgcgctgcggacgaggctgtcggatccccacggcgtgctgcagagctg

SEQ ID NO: 20015 - DNA, 317 bp, Oryza sativa
  Clone ID: uC-osflcyp068h06b1
tccttctcgattctactccactccttaaacctatccagtttttgcgtaattctgctgtcatacggcttattgtgtggctgctgaatcttgaaaatttaggatccaatggttaggagatttttatcggccctgctgtctccagagttttttcggttgaggatcccagttgtaaatttgtaaccagtttttttgccctgctttctccgccggccgatcgatcgattatcgacctgtatgcctggtggtgtccgtgagctgctcttgatttcttccaagaatacaagagaaacctggcacccagctcacccagcagagtt

SEQ ID NO: 20016 - DNA, 323 bp, Oryza sativa
  Clone ID: uC-osflcyp068h07b1
tcttgcagtccctggagtgatgatcgcagtcgttgggcttgcagtgtttctgttcttgcctgtcggtccggagatgattggaatcgaggaggatatccatgagaaggatgctgagaaggatgacatgagtgcacctctgttggaagaacgatcggcatcaaaagaaaaggcagtcgggttcattcaggcttggagaattcctggtgtagcgccatttgctctctgccttttcttctgcaagcttgtggcttacacattcctgtattggctttcgttttatatcagccacacagcaatcggtggagtgtccttgttagacaccg

SEQ ID NO: 20017 - DNA, 513 bp, Oryza sativa
  Clone ID: uC-osflcyp068h08b1
ttcggaagaaggagctcgcccgccggctagggtttgccgcacacccgccgccgagcagctagcaccggagtgttgggaggggaggctcgcccgccgtcgccgccatgccgcagtcggtgctcgtcgaccgcgcgacgagcgagtcgctcatcgggcccgactggtccctcaacctcgagatctgcgacatcctcaaccacgacccctcccaagccaaagatgtagtgaagtctatcaagaaacgcattgggcacaagaactcatagatccagcttctcgcactaacattgctggagacactgattaaaaattgtggagactttgttcatatgcacgttgctgagagggatatactccatgaaatggtgaagatagctaagaaaaagcctgattatcatgtaaaagagaagatactaattctgatagacacttggcaagaagcttttggtggtttccgtgcaagatatccgcaatattatgtagcatatcaagagctcctgcgcgctggagctg

SEQ ID NO: 20018 - DNA, 504 bp, Oryza sativa
  Clone ID: uC-osflcyp068h09b1
tcttcgaggagaccaggggcgtcgaatccggtgaccccctcctctctacaggcgattctggccgcccggacgaaagggtcgtgagccaccaccaccatcttctccaccctgctttgtgtagtgccagatccgctagcaggccgtcgatacggcgcttcgtctccccccggtggatctggccgctcagagcttcactggcgccgaggacagcgagctcgcacggcggctcaggggccccgccgtggccgtgagggagcgccttagcttcatgaacgagtacctcgccgaggaccgcgaccccgtcaggtgctaggtcgtcgccgccgccgtcgcgttcgtcacgctcatcgtattaggtgtagggagtgttgatgataccccaatagaactgccaaagaaactctacataggtcccccaagtgccaaaacaatttaactttctgatggaaggcatttggcttataagaacaatgagtcacaacttacagggcaagattttcactg

SEQ ID NO: 20019 - DNA, 524 bp, Oryza sativa
  Clone ID: uC-osflcyp068h11b1
tcgtccggcggcaatcgctcgccggagtcaaggtaggatgatggcggcggcggggctggagtcggcgtgggagtacctcatcacgcatttcagcgagttccagctggcctccatcggcaccttcctcctccacgagagcgtcttcttcctctccggcctcccctctctcctcttcgagcgcctcggcctcttctccaagtacaagatccagaagaagagcaatacacccgattaccagaacagatgtgtagtgcgtctcgttctctaccatgtctgcgtcaatctccctctcaccattttatcatatcgcaccttcaaattcatgggcttgaggagcacccttccgctgcctcactggacagttgtcgtctcccaagtgctcttcttttttgtgcttgaggatttcatattctactgggggcatagggcactgcataccaaatggctgtaccagcatgttcacagcgtccaccatgaatatgccacaccctttggcctaacatctgaatatgctcaccctgctg

SEQ ID NO: 20020 - DNA, 515 bp, Oryza sativa
  Clone ID: uC-osflcyp071a02a1
gatttggagctgggggcggcggagggcgcggagcgcggagcggcgggagcggaagaggacgaagccgtagcccttagatctgccagattgcttgtcggagatgacacggcagtcctcgagctcgccgaagcgggagaacgcggagcggaggtcgtcggctccggcgccccagccgaggccgtggacgaagagcttcctgctcgcggggtcggcctccgccgcgcgccgcacggccgccatcgtcgcgggggtagtctccgcggccgtgcggagcagcgccaccagctgctcccgcgacaggggctcgagcagcttcgcgatgtcctcctcatcgtcgtcccctccggcgccgtcctccccctcggcgccgccctctgcgctcggctccggggggtcgtcggtgatggggaagtagatggtcccccggggcttgagctccgaggagggcgtctcctggtggtggttggtgccggcgccggcctccgacgaggctaccggggactcccgcggatccg

SEQ ID NO: 20021 - DNA, 518 bp, Oryza sativa
  Clone ID: uC-osflcyp071a04a1
tttttgtaaataaacagatgatactataactcgaagaaaacctattattctcttttttagttacttgctactatgccccctggctacagagtaaggtatacatttgcgaacaagcaaaatttgtggttaacacatactgctttgtaacgacattagcatgcagcttgagttcacttgccactgaaagaaaaaaaaaaagctatgggtgtatgatctggcaagtttttttgtgctctatacaactgcaaaaaatatttaataaaagaatcaaaaatgaaaattgatgggagccgtgaccgtgatcatggcagcaagatgccacctcttgctcaaaatggagattccagtggctgtaccaagacagatgatgcatacaaaaaggtttcctgcacctgtcgacgagctgcgttgtcacaccccggatcctcggctctgatcagaaacaattactggccatgtatggattggcaattttgcgcacagaacaaacatcaacttctcatcaagcttgatcctga

SEQ ID NO: 20022 - DNA, 241 bp, Oryza sativa
  Clone ID: uC-osflcyp071a05a1
attgtaggccatgactcttttttctgtccatacactgtgtcagttttctttatcgagtttcatgtcaaaatgttcattttgcagtcttaatagaaacaactatgacaatgttttgactatcccaggccttctatagtgagactatccgaagcatcaaaaactgaaattattgaccaatttctgattgcgcttaatgtatttcccggaaaagatatttcattgtccaataccatgaccactc

SEQ ID NO: 20023 - DNA, 390 bp, Oryza sativa
  Clone ID: uC-osflcyp071a06a1
ggaagaaaagaacccctccaaaatggggctgattatattacccatatcaggcaaaaaatttatcaaagaaatatcttgtctgttagttaggaaactaatacaatacaatagtttcaggatagatcagatatatgctgaacacaacgagtgcagcagtttttacacgtaaagcccttttaatttatgaatcctacccccgcttcatacctgacctatacttatcagttatcaagccttataaataaaggctttggcactatgaacttcaagaacaaaacacaaagcaccagatgaatttatccaaatagattcactaaggcaagcattttcagatttgctgcatgcaacaaatccaggagaaggcccccagagctcagagaaaacaacccc

SEQ ID NO: 20024 - DNA, 487 bp, Oryza sativa
  Clone ID: uC-osflcyp071a07a1
gagataaaaggctcatcattttgattctaaacttcattaaattgacgaggttaaaagacaatttcgaatgacaaccacggaaggcgcaccctgccctcagcaatgcacctactcaaatatgtaagaaaaagttacacgtatagaaatttgttaaactccttagaaacgttgattagtcaaaattttgtaaggattttcgttggtgtcctaaaaattttggaagagttatttaaagttagcatcctccaaaatatgaaataccgaatgtttgtaattaatcataagttgtcacgggaggcgcaggcgcagtgtcgacgacaggaggagctgatccggccgctgcataggtcttatcggcggttgatccggctactggagatgtctcctttgcggaggttgatccggccgccgcagaggtcgccgtgtcggcggttgatccagccgccgcagaggtctccttgtcggcggttgatccggcccccgccgc

SEQ ID NO: 20025 - DNA, 98 bp, Oryza sativa
  Clone ID: uC-osflcyp071a10a1
ttttgggttttttttttttttttttttttttttttttttttttttttttttttttttggaaatttttgttcctttttcttgttttttttttgggaaaa

SEQ ID NO: 20026 - DNA, 468 bp, Oryza sativa
  Clone ID: uC-osflcyp071a11a1
gtccaataattcattgcaatagttcactgcaggccatgacaacagtagctgcccatacactgtgtcagaattcggagcgagttacagtcaaaatgttcattttgcagtaaaaaagaaacaactatgacatgttttgactatccaggcttctatctgagctatcgagcatcaaaactgaaatatgagcaattttgatgtgggaatgatttccggaaggcatgtattgtcaatacatggcagcagagagtaaaagtatatccagctacataactaaggtgtagacaagacaaataatgagaatttggtgacaatcttggcaacttcagcgctgtagcttcctccttgcaagtgctggacttttctttggtatgtagactttgtaactgacctgcacagtttctccctcatgcattctagagaatgtctttttctcaaactgagaaccatctttgacctcagtcccaagct

SEQ ID NO: 20027 - DNA, 354 bp, Oryza sativa
  Clone ID: uC-osflcyp071a12a1
ggacaacatgcaattcataaaacgtataggattacacgtagtacacacagatcgtgtacatactgaagaaaattaagatagaacatgcacacagggagcgtgcaacataaagtatacagctgatacagagagagaatggagcgctgcatgtctgccgcaggtgttattttaattactttgttcatatatgctgtagcaaatacgtgcttaattactagctgatcaactccgatcgagctagcgtgttaagctcgatcgatcgatccaagcaggattaattgatctagctgaccttgttgcaatcggtggaaaggctgatggggaagccgacgttgacgcccgacttggcgggga

SEQ ID NO: 20028 - DNA, 62 bp, Oryza sativa
  Clone ID: uC-osflcyp071b02a1
ctttgtggttttttattctttttcctctttttcccttcatattctattatttttttattttt

SEQ ID NO: 20029 - DNA, 472 bp, Oryza sativa
  Clone ID: uC-osflcyp071b04a1
aaaattgcaattcgggttcttataaagtcaccacaccaacgggttgtggcagggtagcaacatgatgcatactaaaacacacgcacacaaacctaaaggcgagggatacagtttaaggatgcaaagcgaaagctaaactggaacacagctgctcaaggccagggcaaagtagatgactggatcaaataattcattgcctggctcgcgatttcgccctgctggcctcctctggggttgatgggaacagctccacgtaccttgtcccaatggtcatcttgtccttgcacatggctgtctttgcaacctctgctgttgggaactccacaaaggcttctccagtggccttaccatctggacggtacgcgatgtgcacattttcctccgtcagctcatactccacaaagaacttgatgatgtcttcagtggtagcagagtagggcaggccacggagcttgagcacctcaatatattc

SEQ ID NO: 20030 - DNA, 472 bp, Oryza sativa
  Clone ID: uC-osflcyp071b06a1
tttttgtttttttttttttttcaacggaaaatttttacgtattgaattgatcatggaaaagcatgaaagtccttgggttggagaaataattatttaagtggtccaccggtacacatgtttactcatctttcgatcccgggatcctaacattttatttcttattacacatttatacttactccgccctaagatagagtaacatcgaatagaaagatcactttttagtactaaactctttgacgtcacttagcttccagcatgtacgtaccgtgcacgtatgcaatgtacgtacgcaccaaacgttttattcattattattactctgttcattattcagtcgatcacgatgagccgagcagcgtgtgcatgcaactcaacagtaaaggttggcccccgggctgacccccaactggcggcagcagttccttgtagtagtttacccttgcgttgacggcaccggggttctttcctt

SEQ ID NO: 20031 - DNA, 324 bp, Oryza sativa
  Clone ID: uC-osflcyp071b08a1
acgacaaaccacgaacttgggtattaaagaggccccaaagaagggtcacataaacaacacagggcacaggagggaaagctccaagcaaaccctggataatcgaaaagcaaatgttttttaaaaccagacccacaaactggttgatagaagcccccccgggccgatcattgggaagcagcagtaatcaagcattgccaagggccccggcaagaaccctgaacctttttaggacttggaacccttataacccttgaaaccattggggaacttggggccgccctccctggaagccctttttcaggggggggggggccccccgggccc

SEQ ID NO: 20032 - DNA, 121 bp, Oryza sativa
  Clone ID: uC-osflcyp071b10a1
catttttggggggttttagttttttggttttccttcatattttgtttagctactacaagtgcttgtttctggttgcttaattagcaaatttaatcactgagcctatatcgcgagcaaaaga

SEQ ID NO: 20033 - DNA, 321 bp, Oryza sativa
  Clone ID: uC-osflcyp071b11a1
caagcaaaacaccatatcatttcaacgcatttcaccatattctcataatatgccagcaaattatatgacacatggggggagagaggaggcagatctccatagaataatacactttttgtaaacaaattcaactcggccaaccgcttcccaaaaaaaccactccaagacctataattgtctttggtttttcagcagccccaacttcttcaaggaaacctgccatggctccaaggatagtatccccattcaaaaagaaagaaagcccaaactgcctgctgctcccctcccccacgaaataaaactctcatgcacgccaggact

SEQ ID NO: 20034 - DNA, 407 bp, Oryza sativa
  Clone ID: uC-osflcyp071b12a1
ggagggaaagcttacctaggaaattctgaatcctagatatccgatactataaaaaacacgtgcattctgaatccaaggaccacatattcgttcgctacccataaagggagtggattcacaagcatcaaacctttcagtttggtacagataggctcgctacgtggcatgccttctacctgctacaaaaacctaaagtacacataattagcctactcgaagatggcgattttcccttgagcaccatggcccatggtcgcttcctctaatataagcagctgcaaaattagcaaaataatttctttgttgaatgactccagctactatttcttcagaaccaattcgagtagtcaaagtcgcggagtttcctaaagtgcttctccacattttgcctcgactttgcccactcc

SEQ ID NO: 20035 - DNA, 433 bp, Oryza sativa
  Clone ID: uC-osflcyp071c02a1
ttttgtttttttttttatcttgacagcaaatagtttggtaactttgaaactccacagtacaatacggcgttctagaggtccagacaaagagcatcaaagcaagaatgaagagaaagacaattggaatcacataaaaagatggcccaaagcacactaatttttattacaaccgccacgacagtcttgatcgtactgactctaaggcgcaaaatacaaatcggcattaatcttttgcggatatcccgctctctaaaggcttcttattcctcagcaaaacccagttcagagagcttgaggtgggcctcggcgtaatccgcaaagaaggcgtcctcatccgcagcatatttctccaccagtggacggaaggctgggtcagccatgagggctttgtcacttggcagctgaagaaggcctttcttctcgccacttacaa

SEQ ID NO: 20036 - DNA, 365 bp, Oryza sativa
  Clone ID: uC-osflcyp071c03a1
acgtaataccatccattttttttattgtcgacgaatttatcagatttgctctagatacatatcttgtgtgtatatagccggagctttgttttcacatatcctcacccaacgataattgtagtactcttacaataaaaccggtcggagagggagggaagagattattacatatgtgctaagagcagaggccattgagatggtacataaccaaattgtcaaataaaaatatatagcatattatctattgatatatcatcaacatagcccaaaacaaagctgcattctattattaatggcagcaatccaccaccgcgatgcttgatcttagcttacttgcccccagactcctccaacctgggggcttg

SEQ ID NO: 20037 - DNA, 226 bp, Oryza sativa
  Clone ID: uC-osflcyp071c04a1
gatggaccattgctgataactattactgattgaaatgtagcaagcatgggacatagtacatcacagagctagctaaatgagacaccacaatactgaccgaaaaccaccaagaataaagattacacaacatacccaacacgcaaaccacttgacttgactgagaggatgaattctttcggctgccaggatgcagcgtgcatcaccaaagttgaacaatttaagaaat

SEQ ID NO: 20038 - DNA, 438 bp, Oryza sativa
  Clone ID: uC-osflcyp071c05a1
agcaaaaccttttaataattaatcccccattagacatatcttcaattcaggtacattagccagagacgacgatctgttgttacgttatggtgacgatacacatgtgcgacagcgatactgcataaatacgagatccaaaattaagcgtgctaattatctgcctcctgtagtagcaccgcatctatgtccttttttttttcgctttacctcttctctacttgcaacatgcacagtctgaagcgcaagagagctcaacgccatcttgcagaagctgacaggtagggtgctgatcactcatcatcagtactcagtcatcacttcttcgcctgccttcttgatgcagctccgatgaggagagccttcccaacaagcccagtgttgagcacgcagacggcagccactgcgccaccgaacaccacccatttccagtcgaaccct

SEQ ID NO: 20039 - DNA, 418 bp, Oryza sativa
  Clone ID: uC-osflcyp071c06a1
gcgaacaaaactttccaactcttttttttctccttgttttctatttcatttcattccgatagatagcaacaagcagttcaaacaccataaccaaagcgaactcaattcatggtaacatcacggacgaagaacacctaacactggatggatggatagagggcttctcgactcgagagagccactggacacgataacgactcgacttgatgataagatgattctgacacggatagctaaggataactggccacgatgggccccaccaatcagttcctccagttcccgccggagtcgccgccgtagccgccgccacgggtgccaccgtagccgccgtcggcggcgtcacggccgtcggcctagccgccgccgccaccgtaaccgccctcacggggcccgtaggcgtcgtcgtcaccttctt

SEQ ID NO: 20040 - DNA, 521 bp, Oryza sativa
  unsure (1)..(521): unsure at all n locations
  Clone ID: uC-osflcyp071c07a1
aacacacaagatacacagcattgctttgcatatcactgcttgtctttgaaaacggcacgagtattggagcgtacactaacgagaaaattcccagcatacaggaatgcggtttattcagtttcataacagtgggtatcgaaatcagatatgctcataacagataaccaaatttcagcctaagcgctttgagctccgtgagatttccagagtttggtccattcctccattgcatcagcagctttagcgaagattgcattctgcggtcccagtttctccttgacaatgctggttagttccttaacacagtcttcaacagtaactgaagtactcgatagcttcagagattcgaagaagggaagaacgacgtccatgactttcaccccttcccattctttcaagctctcgagagccttacctgcttctgcatcacttctcatcacataaggaagacctgtcttcacgccataccgtaagcgattacccaccantttagtacacaagccattccaaacgccttcaag

SEQ ID NO: 20041 - DNA, 476 bp, Oryza sativa
  Clone ID: uC-osflcyp071c08a1
tttttttttttttttttttttttttttttttttttttttttttttttttttttttttttttttttttttttttttttttttttttttttttttttttttcaaaaaaaaaaaaaaaacaaaaaaacaaaaaaacccccaacgggccccccaaaaaaaacaggaaaaaaaaaaagggggaaaaaaaaaaaaaccccctttaacggggaaaaaaaaaaggggccgaaaaggggaataatagggcgaaaaaaaaaaggggggggggaaaaaaaaaacacggggggggggaaaaactaaaaagaagggggggggaaaaaaaaaaaagcccccacccccccgggatgagacctccaaaaaaaaaaaaaaaacgggggaaaaataagggctcggcagcaaacaccccagaagggctagttaaaaaaataccacaaaaaacaagggggggaagggggaaacacaggggccacagcgggaagggg

SEQ ID NO: 20042 - DNA, 111 bp, Oryza sativa
  Clone ID: uC-osflcyp071c11a1
tttttgttgtttttttttttttatttttttttactttttttttttttcttggtttctatttcaatccattccgacagatagctaccagcagatcaacacaccataaccaaa

SEQ ID NO: 20043 - DNA, 195 bp, Oryza sativa
  Clone ID: uC-osflcyp071c12a1
atattgcaattcggttttttaaagaggcccccaccaccgggttgtgttttgttccccaccttttgcaggctaatggattggcctacctacttaaaggcgctggcacaaagaatgtggttgcggttacaagagggaactaaactgcctagctgagcatgagattatgcaaattcctgtcgggaggttggacaccca

SEQ ID NO: 20044 - DNA, 406 bp, Oryza sativa
  Clone ID: uC-osflcyp071d01a1
aggagaggggatttgccaaaattaccaaaggaaaggaaagcagcccaaacaaaacaaaagccaaaagaaaccttcgggggcccggcaccgataccccaaagaggggggccaccaaaaaaaagcgaatgggcttctccaaaaattccaaactctcaagggcccaaagcatacttcccaaacacaatcccaattctatattcaacaggacccctgcactgcccccgcaattttcaccaaccccccaaagaacagaaccctgtatcaaccaacccagggatggggggaccccagccggtttcattggccgggcaacacaacttccatctgaaaaatccccaccaaaaggccccccttggccccagggcataccggccccgttaaaacaatatcaggcctgaaaaccccc

SEQ ID NO: 20045 - DNA, 521 bp, Oryza sativa
  Clone ID: uC-osflcyp071d02a1
ggcagcgaagaagaatattgtgcaacaccggataaataaataccagctcgatgatacaaatagtttaagcataaccatagaagtaacacagcagtgttaaaaaagagccaacaaattcatggcagcaacatgtaacaccacacatcaaaagttttcaacccatcaggcacgcaggaaacgtccacattccacagacaagctaacactagcatgcattggcctaattcagactcttatgaagagactcaggctgaagcatgatagactcatgatcctctctacttgaacagatcgtcatcgtcatctgggagaggttgtgctgctgcagccgcaagctcagcctcatgctgttgctgcattgcccggtcaatgggaactttcggaggtttaagagccacagcttcaacgaaatggaggttcgggtcaccagcaagcttccttggaagataaaggaagggcttctcaaagtggagctgctcttggcagaaattcatagcactggagatttttcttcctgggga

SEQ ID NO: 20046 - DNA, 264 bp, Oryza sativa
  Clone ID: uC-osflcyp071d06a1
ttatttgccgcccggcgccggcgcggcggactcctgttgtctcctcttccgtgcgcgcgcgcgccgccgtggccacggccatgtggccaggtttgcggcgtccgcttcgggggccggcggcgaggaggccggggagccgtcggaggacgaggcgcagagggagtgggaggcggagatggcgcggcggctgaaggaggccgaggagatggaggagctcgagcgcaccgccgaggagctgcagagccaggccgccgccgaggcccc

SEQ ID NO: 20047 - DNA, 475 bp, Oryza sativa
  Clone ID: uC-osflcyp071d08a1
ggtgaaaaagaaagaaacaattgaatgaattaatatctgatgatgtacaatggatctgatggtacagattctacaactatgctgcaacaaattacacaatgtaacaaattttcaagaatgtgaattgaacaaagatacacaagccgccaccttacaacacatggtggaggccagaggtaacaactgtaacgatcaatttgtgtgacacatatgtaccaattttcctgatcgtgtgggcatacaaaaggtcgctgtcaataagttttactgtgcttgctgttgtctctcttgagttgtactttcagttttttaccacctaattggcatccgttcatcatactaatggctgtctgtgcagaagcaggagaatcatagcttataaaaccgaagcatttactaagaccagttgctttgtctacaaaaactttagcactcagtactctaccaaaaccctgaaaggcaccggcatgatctt

SEQ ID NO: 20048 - DNA, 480 bp, Oryza sativa
  Clone ID: uC-osflcyp071d10a1
atctaactatttaattttattcacaatttatatacaaaaaactttcataaaaatttaataatatttagtaacaacaggtcttcttaaaaccttagatttgactctatctctaattggaactcttctgttgctaacaactggcattctaccggatccatgaactggagcagtaattgttttgccaccttcgagaccggtagctggagcggcagcaatagctgggacacgtccatatctcaatctgttaacgataccgcttccaaatcttcttctaccaacagcaaactcggctccagatgagtaactagcagaggaaccaagagatcctacagatgatccaaaggaatcgagagatccaacggaactaccgtagctggcagatccagtggaaccgtaactaacggaaccggccaaggtgaattgggaaacgatggcggccgaggcattggtgttgccacggtagtattcacggactggacc

SEQ ID NO: 20049 - DNA, 101 bp, Oryza sativa
  Clone ID: uC-osflcyp071e05a1
tctttttggtttttttctttggaggaggaaaacacgcgaccatatgatattcttctgttatgttacaccgaaatggcaaaactccgattgccatctatcac

SEQ ID NO: 20050 - DNA, 342 bp, Oryza sativa
  Clone ID: uC-osflcyp071e10a1
acaaaaaaaaaaacaacttttatttaagggggacccctttgaaaagggaaaaatttccaggaaactggaattccaaggttgaaaggatattcctaaggggaaattaggtgggggggggacaaccattggaacaaaataaggttgggggacccctaaactcggggggaaaggccccaaacatttgaaaaaaaaccccgggttcggggggaatggccctgagctttgaacaacgcttccccttggggggcccctagggccaaaagcgagggggtccccctggggggcaacaggggtgggagtcccgggagcaccccttggaataaaaacagggtggtttttttt

SEQ ID NO: 20051 - DNA, 331 bp, Oryza sativa
  Clone ID: uC-osflcyp071f01a1
aaagaaaatccaaacccctccaagatttgggttttgggaacatagtaatagattcagtccacagagataacggttttgacaaaggatgggccagtagtattccgaatttccgatagggcaaacaaggggacaaccaggcaaaatttttacttagccaaaagccacagggtatataataatctgatctaacaaacaggcaaaaggggggcaaagcttccttttttagggctttctggctgggatctgagactcaggcttttttttcactggatcttccttctctgacaggataagctcaatggggcacggggaggacctgtaagggttgatg

SEQ ID NO: 20052 - DNA, 501 bp, Oryza sativa
  Clone ID: uC-osflcyp071f03a1
atgctaagaaagtaaaaggtgaacggaaggagtttacaatccgaacgaagggagttatttgcaaataaatagagaacatctaacaaataactaaaatgcttgatgcttcctacgatcgaatatttcttgggtgagcttgagttactacaacaacactaccaggaccggagcttcaattattctgtgcatcctgcaagaacgttcttgaactaaattcatcatccgagtatgtatgtgagcgaaaccaactaagctccggcaaattcgtgagcggtcccactgcagctagggcgatatccttgtcaattatgaaatccttagctgtttccattacctgtatcacggtcaacagcatcaatgcgagcaaaaagctctaagaatggcattactcgcccatacgttagcatctgacggccgttattttcagaaacagcagtggatccgtcaatgtgaagaaaaagagacactttcactgattacaagccccaacaacctttgttt

SEQ ID NO: 20053 - DNA, 75 bp, Oryza sativa
  Clone ID: uC-osflcyp071f08a1
tttttgttttttttttttttttcctttttttttttttttttttctttgctgccaaaaaatcttaaaaagaaaacc

SEQ ID NO: 20054 - DNA, 420 bp, Oryza sativa
  Clone ID: uC-osflcyp071f10a1
attccaataatatactgtacaattgctgacatgtggtgctagaagtttctcaccaagtacatagcatacgcttaatatgtaggtacttacaaaacataatcagacaattgaagtccaagcgcccccaagtaagttatgttacacgaagaaacgccaaacagaagcaaatttacagcgaaaattgcatacaccgcagttccatagtaagccggattatctacacaatagctgcacacaaactttttcatatgcgcagtgagctcatacggagctccccgctcgcatggacctctttgaccctcttatcgtactcatcttcctcctcttcctcgttctcttctggcctctcttcctcttcctttttcttctcgtctgaacccgcgtcgctccagtagcctgtcctggatgatttcggcatgg

SEQ ID NO: 20055 - DNA, 292 bp, Oryza sativa
  Clone ID: uC-osflcyp071f11a1
tttttgttattaaaagaccctgcatttgatggatatatattgaagcgtgcagtggcacaaggtcctctgagattcatgattcgtctgccccaaaatcaaccctcacagtctctcacactagctaactatcaaaccgcatcaggtaagcaggaagtaacacaacgaaggagcaacatgcatatatactttctagctcgatcattgaccacggcgcatgcacatagcaaccgcgaaatgagagctggagatcgatggatcgatctctcctttattattgccgcatcacttgccg

SEQ ID NO: 20056 - DNA, 404 bp, Oryza sativa
  Clone ID: uC-osflcyp071f12a1
attaacaatgttcatcacattagatccagtgctcaacagcacaaacaatacaaacagtttcacagtttctctgcttaatatttgcagagtctgaatatcagagcagcagggaagggaggagcaagtagcatgcaggttcagacacaagactccaggcagttcgattacattgatccttataaaagaccagcaaccataactatgacgaagctaggcgaccagcgggtgaagactgaagaagactgatgagaagacgaagggggtccagcgctttaccaggccgacaacctgttctaccgtctcactgaaggacgaggcagccttttcggacagccggaggggcaatggagacaggcgtgtaggtggcgtccttgccttcgctgtcttcctccttgtcggactga

SEQ ID NO: 20057 - DNA, 103 bp, Oryza sativa
  Clone ID: uC-osflcyp071g03a1
tttttgttttttttttttttttttctttaatttcaccctcaccttattcccttctctgtttttaatccaagaaacgatgacacggaacaagcatctcggacga

SEQ ID NO: 20058 - DNA, 489 bp, Oryza sativa
  Clone ID: uC-osflcyp071g11a1
gcggataactacagatgatgatgatggaaatgaaatagcttcaacatactgtaacaacatcccaagtcatgcccacagcgagcaaaagatttatacaccacaggtagttctctctctctcttcctctcttcacattcacaggttcctctctacaaaatcccagatcctctcttccatatagatccggtcccctaaccggcgcggcatgtgcctctcgtcggggaagaggaggatatcgtagggcttcccctccgccatcagcgagttgatgagcctcgccgtgtgcctgaaatgcacgttctcgtctatcataccgtggatcagcagcagcctccctcggaggttcttcacatgatgcatgatcgacccgtatctgtaagcgtcgcgctgctccgagggcagacccatgtacttctcggtatagaaagtgccatacccatcccatgctgtcaccggagcgccagaacttgccaactgaactgtcgggaa

SEQ ID NO: 20059 - DNA, 395 bp, Oryza sativa
  Clone ID: uC-osflcyp071g12a1
acacttaacaatgggccagtacctttaatactttactgggcataccccagggcaaaatagggtagaccaccgtatcctccctggatacacataacagcacagggagggcaaaaaaaagccagcttcaaaaaggttatgccacctatcaagcatttttaatcagatcaaatgactagaaataggcctgggcgggccaacataagtccagccccgctttggggttcataaagttttcaaaccaaaccattttgacattaacttttatccatgggatcatttccaccgcctttttgggactttgaatccttggctccagctcctgaagcttttggcacggagtcttcaagagcctccaggaacgaagctactgggaatttatatttactaggggcaac

SEQ ID NO: 20060 - DNA, 407 bp, Oryza sativa
  unsure (1)..(407): unsure at all n locations
  Clone ID: uC-osflcyp071h01a1
atatgaagattatttaattatatataaatccgtgatactgtactttnnnncagtaaggtcaaaaaaaaannnaatagcaagaagtagtttaattgaacagatccatctatgaaagaataaaaggaattggaagaagtagctatcgctcaggccgcttcagattcagcagcactagcagcattcagatccacagaaagatcaagttccttcccagtgatcttgctgtacaatgcaagcacatccttcaccgttgtctcaaaatgagtagttgcatcgtaactatttgtcacgaagcaattgtcctcgtcagcggtattagtaggttcgtatcggccatagatgtcaaaaaatgtttcctctacaggtccgagcaaaacgaacccaggtttcagctcgatctaagcttg

SEQ ID NO: 20061 - DNA, 403 bp, Oryza sativa
  Clone ID: uC-osflcyp071h02a1
gtagtcttgcaaactgtgcaattgattttattttcaccatgcatacgtcaaataatcacagccataataacaaaagccatactctctgtattaaagatccaacaggttcagagaacacgcaagctcagaactacacatcaccaaaattggagcaagtttgggggtacatatccgctcatacagtggaggatttatttctcgattctacgagctttttaactagagttcgaccgggaagtcaattacggatagaaatgagcattctgtctttacaaacccatgcacacaacagtgggcatgaaccgcatgatattcaccatcaagtttagtagggctccacgggtgcgcggaacttggcaccagcgtagacagcagccgcaccaagctcctcctcaatcctaag

SEQ ID NO: 20062 - DNA, 546 bp, Oryza sativa
  Clone ID: uC-osflcyp071h09a1
gacagcggaatgccaacgtaaatgtaattcgtgcttttaaaaactcacagatcagctggacggtggttcacccatcacccttcacaaacacgtacgagagatcaataagcagagagcgtatcaattacaacgtgataattcgatatcgagtcggcatatcaagagcgcttcgtgatcggcctcctccccgccgccggcacgagcggcggcggcgaatcacctccctgccacgcccacaccatgtcgccaagcgacggcttaagctcctgcttgcagaagtcccggaaatccggtgagtcgccgccggtcttcctcacctccaccacgtgcacctccggcgccaccttgaagatcttccgcctcgatggccagcgcgccccttccgcccgtcctggctcccctccaggtcgacccttcttttttcctttagcttgaagctgaaccttcccggctcccggatcttctccagcttggagatgatagtgttgggttttattgcggagaccccccccccccctgcttcccttgttaaattcggccccccct

SEQ ID NO: 20063 - DNA, 305 bp, Oryza sativa
  Clone ID: uC-osflcyp071h10a1
gaattgagcacagttcaaaacataaagatttatgaactttagcagttctgttagaagctagctggtaccattcaggtaacattgacaaaaattgcaagtgctcccatgaagaaaatgcttttgcagcagaggaagaaaacagaaaactctaggcatgggaaaccccagtggcagaatgtacatcatactcattatttgaaatgctttcgtttaaatgctcaaaacatttcaattaaagtaagaaacagtggtccctcagctgacaacatcaaggaccagcttgcgtgactttaggacggaccacc

SEQ ID NO: 20064 - DNA, 470 bp, Oryza sativa
  Clone ID: uC-osflcyp071h11a1
ggtacatcgacatttgaatgatcatatcagtttccaaatgtgagtattacattgcatcgtcaggatgcagtattgaaaatcgtcggactatacaagttgctcctcaaaattggaaaaggagatacgatcaaaaatcggagggtgatacagaaaagaatgtgcgaattcagactaaatttgaattgttttgctttggaggattagccatcgcaacaaggccaccgaatggatcaccaaatggattggataatccatcatgagaaggaagagcagaatactgggcctgctgctgctgatggtatgtttgcggcggcaacgtcaccatttgctgctgttgctgaatctgataatactgctgctgctgctcctgataatcctgatgctgctgttgcatcatggcttactgaaccattcgacggtggcgcgaagctttttagacattgcaaatggatcgttgggaccaaatgggt

SEQ ID NO: 20065 - DNA, 350 bp, Oryza sativa
  Clone ID: uC-osflcyp073a03a1
gaacacatcaacaagagagtaaaattcaggacgaaatgtcgacaagatattggaatcttggccacgcacgcaccaattcttgggtgacgcggccggaatcgaacggcacacccgacccaacccaacccaacccaacccagcgaactaaacggagtcaatcatctgatgacctaaaaaaaagggaaacaaattctgccaaattttattggtttttctttcccgcttgcttcctctcttcttctgcttgtctctcttttcatcacttagaggcgtgtgcacgtttagtacaccggcgcgccggacacctgcgcgactgctccgggtagggcgcgacgcgcgtcctacgtgtg

SEQ ID NO: 20066 - DNA, 71 bp, Oryza sativa
  Clone ID: uC-osflcyp073a04a1
tttttggggtttttttattttttttggttttttttttttttttattttttttttatattttttatattttt

SEQ ID NO: 20067 - DNA, 69 bp, Oryza sativa
  Clone ID: uC-osflcyp073b01a1
attttatgggtttattttactttccccttctttttcttttcttttttcttacaaatggcggaaatgaag

SEQ ID NO: 20068 - DNA, 401 bp, Oryza sativa
  Clone ID: uC-osflcyp073b02a1
gaacaaatatggcgttttatattggcatgtaacatgaacagaagaacctacaaattacgaccaagttcacatccaactcccaaacaaaagaggacgacgcaaagttgccaacaacacacatgaactgaagactccgtagcatagggaagcccctgcagggcggtaaatctagccagtgacccacgcgctgtcctaccatgtatgctgctgacctgctgtcctactacacaaaggcaagacgcccgcggggaagctagctccttttgtcaccggcccgcgcgcggcgttgcgccgttgcggagtggcactcggttttttttggctagtggcgcggaggagcccgcaggggcgccccggtgtgcgccctgggtgggcactggtagcaattggcgaagagcccc

SEQ ID NO: 20069 - DNA, 349 bp, Oryza sativa
  Clone ID: uC-osflcyp073b03a1
gtaaaaacccaggggcttgataaaaaaaagtagatgagcaatcataggtcaacggtggaatcgaggaaaacctccgccaggtccacaggcggtcatatcgcaggaaaaaaagggaccaatataacaatatcacaatatgccgcaactgtcgaaaggcagctcaagggcattttgagaaatgctaaaaaatcccaaagggaaggtgacatgtttgacgggacgtgtaataggatcataaaaatcaagctataggaagatcgaacggatcggaccagtgtttttaaaaaaaccgcaagcaagatgaacaaggttttcccagaacggatgcgctgtgaaatcaccaaggcca

SEQ ID NO: 20070 - DNA, 97 bp, Oryza sativa
  Clone ID: uC-osflcyp073b04a1
gggaaacaagcaaacatgccattttccattcatcaaggacacaatccgcactgaaaatttaaactgaaggtttgctttaagttccaggtctaaactt

SEQ ID NO: 20071 - DNA, 103 bp, Oryza sativa
  Clone ID: uC-osflcyp073b05a1
ttttgtggaaaaccaaccacattatatagtaaacattggcttcagagatcagatccacaaggttcacagccactatagcaagtcacaagaaaggtagaagcta

SEQ ID NO: 20072 - DNA, 165 bp, Oryza sativa
  Clone ID: uC-osflcyp073b08a1
tttttggtttttttcttccaatcagcataagtgcatggcaacttttcgcgctttccagttctcaacaacacttagcacatacatttctcacccccacaccaacaggtgagacattgaaacccaggctactaaacattaagtttaaaaactccctggttctcccct

SEQ ID NO: 20073 - DNA, 394 bp, Oryza sativa
  Clone ID: uC-osflcyp073b10a1
aaacaagccaatatccttgtattaattatcgagagtacttccaatgtccaaacaggtaaaatctaacttataaggtaaaacaaaatgggccagctataacaactagatgcccacttacaagtaatccttgtgaaatccaaccaccatcacccaagaactgatccttacaaaggaatgtcgaagaactatcaaaaagtaatcgcccagacaacagaccacttttaagcgacaagcttcagtataattggcaggagggaacacaagaagcaagatagcactactgtgcagacaaacccttataagttgctaacactaacaacttttgtaagaagtctaaaaggtgtgtgtatacagaacttgttgcaaaacgcggcactcggttacattttgaaat

SEQ ID NO: 20074 - DNA, 493 bp, Oryza sativa
  Clone ID: uC-osflcyp073b11a1
tttggtggtttttttttttttttcttttttttctctcccggaacaattttatttctgatttcctatttgcgaggagaaaacacaagcttattttggaggctacaaacaaactgaaatgacatggcccgaatcaaatgaaatttcacaatgaaactcaacagaagggttcgatcttaaacatgcatttaatccaacttgctccacactgatcacattacaaattaatcaagaagaaactaaacatggatcgatcatcacccaagtgtcacatcctcgcaacaaaagccttttttcccatttgaaccaaattatttctttacaacacatcctcacaagattttgaccatggagggaccaccctttttaatgctgttgcccatggcaaaatgggtaaataagaacttgctgttggaacgggggcgtggttcccgcaccatgtaaactcccccgtagactaggcccgttaggctcccccccaccagggggccccccc

SEQ ID NO: 20075 - DNA, 430 bp, Oryza sativa
  Clone ID: uC-osflcyp073b12a1
tttttggttttttttttttttttttttttttttttttttttttttttttttttttttttttttttttttcccaaaaaaaaaatttaatttttttcccaaaggggtcaaaggaatcctagaaaaaggccccccgggggattccagataattccccaaacttaaaaacccggttccctttaactaaaacaaaataatcccttaaaaaagagggtccaaaaggggctaaaaacttggccaaaaaaacccgggggaacatttcccaggaaggaaaccttcccgggggacaaccaaccaaaaatttccggggggggtaaacccaaaaaactggtttaccaaaataccaaacagtttacgggggggggggaaccacaacaggtttacggggggtggaaaatgggggggggaacaaccccccttggggcccccccct

SEQ ID NO: 20076 - DNA, 86 bp, Oryza sativa
  Clone ID: uC-osflcyp073c04a1
tttttgtggtttttttttttttttctttttttttttttttttttttttttttcatttatttttctttttatttttttctttttttt

SEQ ID NO: 20077 - DNA, 268 bp, Oryza sativa
  Clone ID: uC-osflcyp073c05a1
tttagtcggccgccggaggtggcccaggtggaggcgtcccagacggtggcgtagatggacatgggcttggacgggaagtcgccggtcatcgccggcgtgcggcggacctcgcggatggggacgtcgtctacgaataagacgatggcggtgcccgttccagaggaatggagtagccggtgggaactcccgtgggtcggggtcgaaggggaagcaaggtaagcgcttcctcccctcccccggtctcacgccttgccattttgccgtaaca

SEQ ID NO: 20078 - DNA, 387 bp, Oryza sativa
  Clone ID: uC-osflcyp073c06a1
atcacgcaatagattaattttgttccattggaaatctgcagctcaatgtagatttattgaagtcgctacatttgtgttcatcgctggctaacacaacaacaggtaagatgatgtccatacattttattttcctaatcatctaacttgtacatacatttcttttacactacaacataggctcccgatatgagtcactacacttgccctatggaatccttctaattaactagtgtggtggatgtcacaactactgcaaatcaaggaatgattttgctacaacaaacagctgatcatcagattggggaacccagattccttgatctgatcccaacagataaatggcatgtcctaactcctaatgctattcactattcaccagaaagggtg

SEQ ID NO: 20079 - DNA, 427 bp, Oryza sativa
  Clone ID: uC-osflcyp073c07a1
tttttgttttgtatacgaaaaagagctatatatttatgtataatccacaacgtacacgcacgtagtacaagtagtactccatgtacatgcagaagtacatatgcatatggtacaaaaactgatctctagctcttaggtacgtatagtcgatcgacgaataaattaaggaaacagatagcgtagtgaccggtcggtcgatcaaccatgtatgcatggtgatggatcgacctagctagctagctttcattttattcagcataaacactgattacacaagattcaaagcgtgagatgacatttgcttctcggccggcgctgcatgtcattctttcggtagtgatcgatcggattagtatattctgtagcaatttatggaggggctgatggtgttggggatgtttgattcccgcacttggagggtatgcat

SEQ ID NO: 20080 - DNA, 236 bp, Oryza sativa
  Clone ID: uC-osflcyp073d03a1
attcatcattattgataataatctgtaagtaaaatatacagattgggggcagtgatacaattgatagtatgcactgaaaacaaaagaagtcttctcatggtttcattccccaaaggcggacaagttcttgagtaccatataaaatcacggttcaatagatctacaagatattgaattattcgggtactcctaacttggcagaggttgaactttggtcgaagctttttgaaacattt

SEQ ID NO: 20081 - DNA, 128 bp, Oryza sativa
  Clone ID: uC-osflcyp073d08a1
aggccataaatatatttacaccgcgcctccatttatacagaatcgattttttagggttgaataaacactaggcgaacgaagaacaggataaaaaaagcagaaaaacagaaaggcgggacaaggccaaa

SEQ ID NO: 20082 - DNA, 257 bp, Oryza sativa
  Clone ID: uC-osflcyp073d09a1
ggaggcggtggccgggggcgccgccgcggggagcggggagaggaggagggttcacgtcggcctccagcatatcccaagacatctacaagtccagcttattaaacagaataatttggttcatcaccaaacccttaagaatgagatttcaagcccaatttctgttttcggaaccgaaagagtgcgagagcctccattaaggtacccgcttcatgcttgctaccagctgtgctaccagtcacccgctattggagaaggca

SEQ ID NO: 20083 - DNA, 398 bp, Oryza sativa
  Clone ID: uC-osflcyp073d10a1
acagcagaaaatgggaaaccactttatatgtcgacgaatctgttagtataatatctacatgcatctcatcagatgagatcagatcgagtacaacaagatggcgtatgcaggttgcgcatgcatgcatgaaaatcgagataaaaagggattaattaattattaacatatatatatccatcagtagacttccacattccatagctccgacttcttcagctgcttcttgtagtcaagccagtcgatgccgtcttttgcagcgaggtcgatcatgatgtcgtcgatgcctttctccatgcccttgaggccgcacatgtagacgtaggggttgtccttcttgagcaggttccacagcttgtccttgaactccgccattccggtttgggtgaccatttctcccc

SEQ ID NO: 20084 - DNA, 106 bp, Oryza sativa
  Clone ID: uC-osflcyp073d11a1
tttttggtttttttatttttttttcttctttttttttctttttttatttatttatttttttttattaaaccaacacccagggtgttcccggcttgatacaaaaatt

SEQ ID NO: 20085 - DNA, 451 bp, Oryza sativa
  Clone ID: uC-osflcyp073d12a1
aatctaacatacgcaaactgatattatcacaatgttagccgatgacaatggaaagagtaatctaggtacaagcggatcattgacggtggagacaagacattggctgcaccacaacacccaccagtggcgccaacaaggagcgctatccgttataggacgagagaaaaagtaaaacatcacgatgtgaagtgaaactgaataattctagtagacgatgatgatgatggataggctccttaggacgcccgccgcccttagcgtcttgctgctcccatcttgtccactggaaggctcactcgtcatcgtcttcatcctctttgctgcccttgtcgtcatcctcaatcattgaccttggacttggactttgtcagattccttcttgtcgtcctccttttccttcttggggggtgcctttttggcagtgctttcgcccttgttgtaagcagcaatg

SEQ ID NO: 20086 - DNA, 254 bp, Oryza sativa
  Clone ID: uC-osflcyp073e04a1
gcaaaactatggtattacgagatcatttaagtaaatgaaatacaacgcccttggcacaccaaaaaacagaagtacggatgtgccaagatgattacaattattctgtaatgggatacatcgagccccctggcttgccgaatgcaacacgaacaatttacaaaacgcctcagcctaaaatattatctcggaaggttttccgttgagccagcccttcaaagaatccttcccggacccgttgaatgtccctttgtttc

SEQ ID NO: 20087 - DNA, 360 bp, Oryza sativa
  Clone ID: uC-osflcyp073e05a1
agcatcagcaaaggtcaagatgatagatactaatcttagaaatcagaacggtgacctgttaggtttcaagaagagttacaaggaagactgcacttgggcacatataataactcggctattaaaacaaagcacaaatcatttcttgtctgacgaacacacgccgaacatgttaaaaacactctcgaaactgttggattgaatggggtggacccttcattcttagcgctcgaggcacaggctcagctagtccgagctgcttaaaccctgtagatggtcaggatacacgcacgccatggtctgcaatgcaacttaaccccaactattacaaagggaaaaggcctcaataaccggtgtgctttt

SEQ ID NO: 20088 - DNA, 119 bp, Oryza sativa
  Clone ID: uC-osflcyp073e06a1
ttggatccttttttggccccttttttttttgggaattttaatccgagattaagaatgtgagacatgggacagttatccattcaatcttaccagcactcaaaaacagaattcaatttgtt

SEQ ID NO: 20089 - DNA, 384 bp, Oryza sativa
  Clone ID: uC-osflcyp073e07a1
atgaacacattctgtgtttaaggaaacacaattatctttttctgaacaagaaattcgctatctacaattctgcagcagttgctcccatatatagggcctccttactttgcatataaagaaagttcaagcgataagcagtacctgtagtcatggcatgatattctaatccaactcttttgtaggatggcataaatggagcagccattccctccataacagaaattgcagagattcaacaaactgttgtgaaaggaaatggtgttctcaggagtagggttgtctgaaaaatagagtgtttcttatcggggaaaacaggtgggaagacccatctaggctaacacagaagaataaaccaatcagcaacggctaccagtgcatcaacta

SEQ ID NO: 20090 - DNA, 75 bp, Oryza sativa
  Clone ID: uC-osflcyp073e10a1
cgccggaaccaaatgaaatacgcggtttaaactaaaaaacatcgggaggcgctaaaagtcacagaacaaccatta

SEQ ID NO: 20091 - DNA, 274 bp, Oryza sativa
  Clone ID: uC-osflcyp073e12a1
ttttgtgtttttttttttttagcacccaaaagatctgtgcaaaaagtcataccgttggaacatcatgagcagaaaaaaacttaataaatacgaactgctgcttgatttcagcgaaaactaagtttgaggagattcgtctgagctaccagtcatgatatgttctctacccgaaaataactaagctttttgaaacaattaacatatgcacacctaacccatcgtaaatcaattaggctatccacattaagtgcctaaatactttgattacccagaa

SEQ ID NO: 20092 - DNA, 184 bp, Oryza sativa
  Clone ID: uC-osflcyp073f11a1
accaaaggtcgtttccatatctctaaaaatgcagaaaaacattatatatatgttctagatatatatatatagccagcatccagcgaagagaagattactagatcggcaaataacaaaggtagaaaaggagaggttcaggtaaggcttcatctactatatgtataaggggggggaggggttatca

SEQ ID NO: 20093 - DNA, 361 bp, Oryza sativa
  Clone ID: uC-osflcyp073g05a1
ataattaattcacaacaccatatttcattgatcaggttcagaacctgcacagaaatacacactaccggtacagatctcaccttctctccaatacttgtacatccatccacgtcggtccacacgaatacgtacatctatacggtacacgtacgtacatctactgcaccgcgtacacacacgcacactttcctgcagagacgcgcatccgcgtcaacctagctagcttagctgaaggcgatgcgtcgccatggcagcacggcggtggtggagctcacttgccggggacgaagttggtggcgtaggcccaggcgttgttgttgacggggttcgcgaggtggtcggcgaggttctcgagggggcc

SEQ ID NO: 20094 - DNA, 261 bp, Oryza sativa
  Clone ID: uC-osflcyp073g06a1
aaagaccattaacattttatcatttttattgatgatttacggggtctatacacaacgaataacacggtagtgcattttacactaccagttttatttttttaacaaggcccttgatgttccttttgtcgaattggtaattgatttttttttacgaagacctaatgttcagaatctgttagttaagatccaacttgtgcaagcaaaacaatgcattaaattctgtttaagctggcgccgccatctcgaaaaactacttttgta

SEQ ID NO: 20095 - DNA, 295 bp, Oryza sativa
  Clone ID: uC-osflcyp073g07a1
ccgccgccccaacatttcattaaacaacccagaggtttgcttcattaccaaactggggggatcaacaaataaaataccagggggcctggttaaacatgaccaaacaagaatacctacccactcccaattccaggacacctttgcccaaaattacttctacttcttccacccaaacaaatttaattttcccttccctaattacactttaagggaggaccaaacttcacaaaaaaccctcccccccctaacaaaaaattccatttaaggggcaaaaaaaaaagggccaaacttcatc

SEQ ID NO: 20096 - DNA, 333 bp, Oryza sativa
  Clone ID: uC-osflcyp073g08a1
ggatacttcaatattggaattccatacgaaataactgtagttcatgtgctcgaattacaaaacctttctgaacagagtactgaagcaaaagatgaatccaaaacaacgttctagcgtctcatacattacaaaacgcagggaagtgcaaaaaccattttatactcccaaacccacaaaaggatacaacatgacagtaaccaccggttattacatattccagccctttgcaaagccggctagagcctcaagccgccaggctaacaaagtaaaacattgctttctgcgctttttttggcaaccaattgaccgagcaccctagaaacaaccccgttt

SEQ ID NO: 20097 - DNA, 422 bp, Oryza sativa
  Clone ID: uC-osflcyp073g09a1
agcggcgtcaaaggaattttctcatgttaattacatttgttgttacatttccaaactccaatggaaatcgaaatgaccacgtcagaaagaaatacaaaaagttattagccaaaaacggcatgaagaaatgggatcaaacaaaatatggccagaacgtcacaagaggtgaatccagaacatgcttgcggaggtggacaaggaaagaggagaggaaaattaaaccacaatccccatgcatgcatgcacgggggctagaaaaatgcatagccatagaagatctacctttgtggctgtgggtgtctctcattcgtctccgtttaatttggtgctgacgaattgaactgtggcaacgacgaccgatgatggcgacggggatctacaggccctgttttaccagggagtcgccgagccttttgaccacc

SEQ ID NO: 20098 - DNA, 278 bp, Oryza sativa
  Clone ID: uC-osflcyp073h01a1
agaaacaatttaatctaacatacgcaaactgatattattacaatgttagccgatgacaatggaaagagtaatttaggtacaagcggatcattgacggtggagacaagacattggctgcaccacaacacccaccagtggcgccaacaaggagcgctatccgttataggacgagagaaaaagtaaaacatcacgatgtgaagtgaaactgaataatttttagtagacgatgatgatgatggataggctccttaggacgcccgccgcccttagcgtcttgc

SEQ ID NO: 20099 - DNA, 77 bp, Oryza sativa
  Clone ID: uC-osflcyp073h05a1
atcttacaaacaaacaaaaaaacaccaaacaacacaaaaaccaacaacaaaaaacaacaacacacaaaccaacccaa

SEQ ID NO: 20100 - DNA, 222 bp, Oryza sativa
  Clone ID: uC-osflcyp073h06a1
aagctgaaccaagtgatccaattattattcactaattaagcaaaaaaggaaataaaaacaagtacaaaattgtttgacaaaaaaaaaattgagcacgctagcacgaggacaatgtacgtgtcacactttcctagaccttaatgttgaccaggcgctccgacgccaacgacgcggcgttcaccgtcatggcgcggacggtggcgttcgttcccagggacgggt

SEQ ID NO: 20101 - DNA, 140 bp, Oryza sativa
  Clone ID: uC-osflcyp073h09a1
ggggcgggcgcgggcgtctaggacgagcacgcggaggccgaatcggagcagctggctgcgcggcggcgaggccggtgagaccggcgccgacgacgagcacggatgcggcgaggcgctgcggcgcatcgggtggtggggag

SEQ ID NO: 20102 - DNA, 391 bp, Oryza sativa
  Clone ID: uC-osflcyp073h10a1
gttcaaatgaagagacctcttatttaacttatacgaaggccattcaactagttacgagaagatgtctagctacaacaatacatcacatttttctctgcatgctacctgctacattggattgttggctaccagctcgatacaactttctcaccctactatatatatacatatacaaggccgaggaatccaagacaacacctgaatagctccttcagggttggaacggaacgaccgatatattatcacttcactggccaatgagctctactaaccaaagcctccactccagtaccgcgcatgtggaatggttacatcttatccaccaaacacaccagttgacagcaattagcagttcctgatgatcaagaatctgatctactctcattgcttc

SEQ ID NO: 20103 - DNA, 568 bp, Oryza sativa
  unsure (1)..(568): unsure at all n locations
  Clone ID: uC-osflcyp074a02a1
ggaaaacatatcacaaatatgccacccagaacagagacatttcttgcttcaacaatgagcatcaaaccacaaccatgtccaatccgaggggtatgacacaactagaacacagttattatacattaaagaagcaagcacattaatgttagcataaagacccggttccatgaactaacatgcaacaggatgaacataccatcagttcattgcacaagtagctgctgataagcacacgcatacatcaacacagaataagcacagacacatgcatacataacaacagtttctgtgacataccatgagcagatacattggatagttagttactcatgggaaaacatacttttgttgagcagaaacctttcatccagagctcatggtaaaccagacagcagagtgaccggcacttgccatccttgttgccactgaagagatagtcaagtgatgaaccaccgcctggagcagcctgcaccttggttgacggacggtccgtaaggaaatttccacagttttgacccncagccctcatgtaattgttcggcttactactttgaataccggctgggat

SEQ ID NO: 20104 - DNA, 370 bp, Oryza sativa
  Clone ID: uC-osflcyp074a04a1
ggttctaccttttttttttttttttttttttttgggaaaattttttttttttcgggaagggaaggggccccccccggattggtttttttttccacccgccccaaagctaaaaacccccataattaaaaaaaattccctcgggccggggggccccaggcaaacattttggggcaaaaaccgaagaagggaaacggccaaccgggcccaaaagggccccccgggggaatcccaaaaccgccttggccccttaagaggaaggggggaccagcctctgtcgcccaaaaaaaaaaaattttaaaggaaaaaaggcccccccttaaccccgagggggaagggggccccccggcttttttagggggggggggaaacc

SEQ ID NO: 20105 - DNA, 306 bp, Oryza sativa
  Clone ID: uC-osflcyp074a06a1
ggcaaataggcaaccatggcaaataaataacatcattcggtcatacatagttttaacaatagatataataaaagtaaaagactcctccctcctcaccagcacatagcacagcctagcaactacaaaaattcccataacatggcataaaaatttggaaattgtctacgaccacagtgacttttaaaacagaacccccacctttatcactcccccccccccccagataagacagtgatacttcagacaaaaacaatccttatcaggccccttaacataacttttctgaacttgatcacagaaggtcag

SEQ ID NO: 20106 - DNA, 395 bp, Oryza sativa
  Clone ID: uC-osflcyp074a07a1
actggcgaaagatttacatcagggaacatcaaacatggatgaacgagccgagctggttcttcattgataaacagaagggatgaacagggaatttacatcagagggctacacaaaccaaaggtcttaagcatgctagctccataaccagtttgcttacgtaccttaaaacaaatgtaatcgaattacacgagatgtagccgtcaatctgcagatacaactccagcgtgctccatccgtcacggacccctgtactgcctgaagcatgaaaggcatccttgtcgctgatctacagggatcatgccttcaccctttgaagtatcgatcgcctccaacatagacaccacctcggtcatttcaggtcgcttgtcagggtttgcattcccagcagcgtttta

SEQ ID NO: 20107 - DNA, 79 bp, Oryza sativa
  Clone ID: uC-osflcyp074a08a1
ttttggtcatttttttttttaaggttttataatttaattttttttttatacttcttatctttttttctttttaataaaa

SEQ ID NO: 20108 - DNA, 510 bp, Oryza sativa
  Clone ID: uC-osflcyp074a09a1
ggtctaactcggtaagcacgtttttcagacaagcaatgttctacctcattgagttaaaaccatactatcaaaattacattgggactctgaaaggaaacaacattactgcctttaacggctttgataatacaacgtttgctctaaatggcccccttaatctacactgttctggggattccttcctgaccaaacatggtgcacaaacttccatccatgggcaacatgttatcagaggagcttctcaaaagtgaaccaaactgtatatgagtgtccatgaaagcaggaaaagagtgaaagaggcaaacattccctcctgaagaagtgctccatgggctccaaagtcttcctcatcaatcttcaacaggtatgcatagtaccagtaaacgagcccagtagaaatagtcacaaacagtgcgatccagatggcgccgacgagggggacggattcccagagcaggctcgatgcgaggccgagcacctgccggatccagtgcacggcgttcagcagtt

SEQ ID NO: 20109 - DNA, 150 bp, Oryza sativa
  Clone ID: uC-osflcyp074a10a1
attggttaattttttttattttgggacacttaatgtaaattagcttgattccaacctgatttggtgtacaagaggacggttgcccccggtttacccctgaaagtaatccccagactaaaagtgtaaagcggggtagattcaccgcgctgt

SEQ ID NO: 20110 - DNA, 336 bp, Oryza sativa
  Clone ID: uC-osflcyp074a12a1
tttttggttttttttaatttttttgttttttttttttttttttttatatttttaactttttttttctttaccaattttacttaatatttttgacactcatattccggttcatgtaaaacaatcaatatgcccgtaaatgaccaaaaggaaaccgggacagattgactggtaacagaaaccctcatgtaacctagaacaggctagaggcaaccaaagttaagccgatttacaaagttatcgcttaatgagctgctgatatcaaaagctagcaatctaaaccaaaccagaaaaagcgggccaacttcaagggttgaggaccaaggacaggccaaccct

SEQ ID NO: 20111 - DNA, 458 bp, Oryza sativa
  Clone ID: uC-osflcyp074b02a1
ggaaaacatataacaaatttgccaccgaagacagagacattttttgtttcaacaatgagcattaaaccacaaccttgttcaatccgaggggtatgacacaactagaacacaggtattattcattaaagaagcatgcacattaatggtagcataaagacccggttccatgaactaacatgcaacaggatgaacataccatcagctcattggacaagtcggtgttgataagcacacgcatacatgaacacagagtaagcacagacacatgcttacataacaacaggttctgtgacataccatgagcagatacattggatagttagttacttatgggaaaacatacttttggtgagcagaaaccttttatccagagctcatggtaaaccatacagcatagggaccggcacttgccatacttgctgccactgaagagatagtgaagtgatgaaccaccgcct

SEQ ID NO: 20112 - DNA, 527 bp, Oryza sativa
  Clone ID: uC-osflcyp074b03a1
attgcaaaccagattttgatcagatgaagagatttaccaccagtaactaacatgcaacaatcatcatctcattgttcaagagttcaaacattatcgtcgtcatcatgggacgaggaaaatttgccagacacgcaccagagatgggagaacatctggactctggtctcttctaagtgaagctaacagtaaggctaaggtaacaactcccaagaggccaaagataagacaacagcaatcctgaaacaacatgagacccaaaaagaaacggtgcgggcgattcccaagcacaacgtacactggcagtcgttattcgtgatgtccgtcgaagatttcagcgctgctgccaatggtattatgttcttagaaccacttgaacagcacaccaccgtgtgtggcgaagaaaggcgcaaacacaagggactcgacggccatgagcttgatgaggatgttgagcgacgggcctgatgtgtccttgagggggtctccaatggtgtcaccgatcacggcggccttgtggcagtctgatc

SEQ ID NO: 20113 - DNA, 323 bp, Oryza sativa
  Clone ID: uC-osflcyp074b05a1
cagtacctctcaaaatattaacttaaaaatagtacactgtttccccgtatgttacatatgataaagtttcccaaagcgaaatagacatactgaacaaaagcacggtggttaattttttattgcacagcgatctaactatataaatcatcatcgttagttgcttccctcacggatgcgaaggggtcagcggtggcgccggcgccagacgttggcttggtagcgaacctaaactcggtgccgaacccacgagactgctgcagagtctgggcgaaggcctggtacttgcggatgtcggcgttactcacactccggcgtgcgtactt

SEQ ID NO: 20114 - DNA, 190 bp, Oryza sativa
  Clone ID: uC-osflcyp074b06a1
tttttggttttttttaagctgggggggggcccacaaaagaattgaacaatagctcccaggagtagtttacatgtagcaaaccatcttacatcctatcgcctcaaaaccaccgtgcattttgcacctactggacattgcacactcgcttgtcctctttaatcactctagattaaatttaaatcctttcctg

SEQ ID NO: 20115 - DNA, 406 bp, Oryza sativa
  Clone ID: uC-osflcyp074b08a1
catcatcggtgcaatgcaatcgtagtcatcatgtaatagtacatatctacgtcgctgcttattgctgagatatttatcaaaaattgatcatcaattggttctacacatacacggacaaaagctggcactctgtagtctgtacccgtatacacacggacagttcgtacctataccattaccattacacccactctcaagtctcaactggaactagccaagctccgtacgcgtaaaccgggggagctcgccgcgccgaggcccaagcgaccaccgtccatccttgcacgccggcgtcgccacgacgccaccgccttcgcggcgcgcccggcccggcaatgccaggctgttccggcgagaccggcagaaccgtggcgggcggtgagctatttgacgcgggcgccgtcac

SEQ ID NO: 20116 - DNA, 477 bp, Oryza sativa
  Clone ID: uC-osflcyp074b10a1
cagtacctctcaaaatattaacttaaaaatagtacactgtttccccgtatgttacatatgataaagtttaccaaagcgaaatagacatactgaacaaaagcacggaggttaaatataaatagcacagcgatctaactatataaatcatcatcgtcagctgcggcggcagcggatgcgaaggggtcagcggcggcgccggcgccagacgctggctggtcagcgaacctaaactcggtgccgaacccacgagactgctgcagagtctgggcgaaggcctggtacttgcggatgtcggcgtcactcacactccggcgtgcgtacttcatcgactcctcgaagtgagccgccttgatctcagcaatatcatcaacctcgtcctcctccatggcttcagggttgtccttcctccgcttctccatcttgatgtccttttcaatgttctctctgatggcgtatttgcatgcacgctggcagatt

SEQ ID NO: 20117 - DNA, 391 bp, Oryza sativa
  Clone ID: uC-osflcyp074b11a1
gggccacaaaagaattgaacaatagctcccaggagtagtttacaggaaagaaaaataaaatactatgcataaaaggtcaagaaaggtattgaggagacggggaatccaggcttaaccatctgttctttattttgggacgtgggcgacaaccattttaagggggggatagctaatggattatcacatctggatagtaaagaaatccttaaatccatatacttcccattgaagaaaatccctaaaatttgcaaatgctttagcggtgggcaaaattttcaaccggaagggaggggacctgcatgaatcaaccaaatgaggttaactggacagcagcaaagtaatcctaattccatataaaccccattaaagaaaatccccaaaaattgcaaat

SEQ ID NO: 20118 - DNA, 429 bp, Oryza sativa
  Clone ID: uC-osflcyp074b12a1
tttttggtttttttaccaccacatgaactaagcatatgttacataacacatgaaagaaattaaggaagatgttgcaaacatatcctcgagaacacacgacacaatgtgcatttgcactactggacatgcacaccgcttgcctcttaatcacttagttaattaatccttctgcagttcttcctgatctccccgtttgatcccgtcaacggtgtgatgtcccccatcttgatcatgcccgtcacaaaatcagcaaagaatgtgctctggctactaatgtaagactgaaccagagcattagtagcttcggcattgaagagctcctgatcagagtgcaggagccccttcttgacgacgaggtttttgtagtagatgttctcgaacacggttggggtctgaagatccaaaggtgccagaatgttgtcacctgag

SEQ ID NO: 20119 - DNA, 83 bp, Oryza sativa
  Clone ID: uC-osflcyp074c04a1
tttttgtgggtttttttttttttttgtttttcttttttttattttcttttttacccttttttaaatgggcgaacgggcggaaa

SEQ ID NO: 20120 - DNA, 170 bp, Oryza sativa
  Clone ID: uC-osflcyp074c05a1
aggagcaatctcaacctttttttggcactttcaaatccgaataaattcaaaattctgggggctttcaaatatccagctaaagggtaaaaaagtgctcaaaaccactgtgctttggggttacaggtctttacacagactcccaaacgaggttatttcaaccttgaattgaa

SEQ ID NO: 20121 - DNA, 344 bp, Oryza sativa
  Clone ID: uC-osflcyp074c09a1
cgaacatctggttcacagagtcaaaaacggttttgatctgtacctggtcgtgtctgaggcaacatatttattcggcgccccgagtctttcggactgaaacgacgatacatggacatgggtaacaactaccaacacaattagtgggtaccaattataccaactttatagaaggtatagatccaagagctacagcacgcattgttctgttccactttgtttgcgcggggcgactggctgaacaatttagccattttagccttatccacgaataattacagacaggcgcgatcaaacagagaacacttgtaagcctgaagcctaagccgtttcatgatgccatatca

SEQ ID NO: 20122 - DNA, 436 bp, Oryza sativa
  Clone ID: uC-osflcyp074c12a1
gatttggagctgggggcggcggagggcgcggagcgcggagcggcgggagcggaagaggacgaagccgtagcccttagatctgccagattgcttgtcggagaagacacggcagtcctcgagctcgccgaagcgggagaacgcggagcggaggtcgtcggctccggcgccccagccgaggccgtggacgaagagcttcctgctcgcggggtcggcctccgccgcgcgccgcacggccgccaacgtcgcgggggtagactccccggccgtgcggagcaacgccaccagctgctcccgcgacaggggcctcgaggcagcttcccgaaggccccctcatcgtcggcccctccgcgccgtcctccccctcggcgccgccctctgcgctcggctccgggggggcgtcggtgaaggggaaataaaaggtccccccgggcttgag

SEQ ID NO: 20123 - DNA, 518 bp, Oryza sativa
  Clone ID: uC-osflcyp074d01a1
cgttcgttcgatcgccatttttttttatctcgagctacagagcttacacaaatttatccgggggaataggctgctggttaatacaaggtagggggtaactctactactactgctctacttctggctgggtggctggctacgtagataaatatttacatcagagagttgggaggagttgagaggggcaatagcaataatgataaatcttggccctaaatctttctgccaagagaagaaaaaggaacaaaaggataaacaataggcagtctacatctcatactagctaaagccatagggtttgcattgcatcagccatcagataagcaaaagggggggcaggggtgatcaccaacacatcagggggtttacttgactgggacccgcagaatggcatctctctctcaagactccatgcgatctacctcttgtattaattcgcttcactgaaccttagtatctgatttgttgggcatcggcagatgacccttttcattttttgaagagtatcttttcttggg

SEQ ID NO: 20124 - DNA, 417 bp, Oryza sativa
  Clone ID: uC-osflcyp074d02a1
aaaattcatccgaaatatcaacaatcgcagaccagcatcaagttatacagtacccaaaaaggttcccatagcacataccaaaaaacaaagtgaagacataggaagcgggcggtggcgtacgaggcggtaatacggtgataatgtaagacggaaacaccaagcacacaaaaccctgccctagaaccaccaagcaaaagccaccttacatgtcgtcagcctcctgctgctcctcgtcctcgtactcgcccttctcattggcggtggcatcctggtactgctggtactcagagacaaggtcgttcatgttgctctctggctcggtgaacttcatctcgtccatgccttcgccagtgtcccagtgcaagaaagcctttctcctgaacatagcagtgaactggtcgcttaccctccggaaca

SEQ ID NO: 20125 - DNA, 179 bp, Oryza sativa
  Clone ID: uC-osflcyp074d04a1
atgctgggtttgtttacccatgttgaatttaaacccctcaaggaagaaaagggccgccggctgactagggggggacacaaatcgcatccaaaccacacccagctaaacttacaccacaccggacagggcgtagggacaaaaccaaacacacacaacgatgtcgcggggcccaaaaagga

SEQ ID NO: 20126 - DNA, 341 bp, Oryza sativa
  Clone ID: uC-osflcyp074d12a1
agaaaaaaggttgtttgggggaccgggccgatcaaccatgggtgcacacacatgcatgcatggggattggtccagaccttaacttggttattttttattccagaatacagatttgatacttctaggactgggtacaaaatttgggttcacacattggcccagggagaattttcttggggggaaccggggcgctggtggatatatttgaaccggctttttggtcgaggggttaacttaccctggagcacatcatggaagcgcttttggggtaagggacccttaccccccactttggggggaagtttggggggttttccgggtttagcccctttatggcccgg

SEQ ID NO: 20127 - DNA, 383 bp, Oryza sativa
  Clone ID: uC-osflcyp074e01a1
cgacatcaatcatcatcatcatcctcatcattttatcgctagaaaatggcaaattttccaatgctccttgttcactgtgccacaggatgacttatgcagctggagacaaaagctaaagaggaccagagaaaattctgggatcaaaacacaaggttggaacctggaactagaacaaaaatgggaaatcaagtagacaatggagtcatcaactcaaggagcaaatcatgacaaaatagtctacatattttgctcatccccaacaaaactatggcctttgttacacccaacgtcgccggtttagaacaacttgaagaggataccaccgtgggtggcgaaaaagggggccaaaacgagggattcgaccgccatgagcttgatgagga

SEQ ID NO: 20128 - DNA, 362 bp, Oryza sativa
  Clone ID: uC-osflcyp074e02a1
gagctcacatgccatggcaggctaactttagaggtgacgaacatgaaccccgtttcacatctctgctgcatgcatcccttaaccacaccaacactcactgtgtgattgatgatgaattgctctcactcactcactcactctctctctggtctttcagagctcctatgcatatgctaagcttaacccggcaagccgaaaaatagggtgggcacacagacaatggggagtggagggttctacttatttagcccctatctatttaactttccatggatcaaagttgctccaaattagccattggattttcatctgggtctctgataccaacggatgttttgaggatgatgcggcgattgcccgtg

SEQ ID NO: 20129 - DNA, 51 bp, Oryza sativa
  Clone ID: uC-osflcyp074e09a1
ttttgggttttttttttctttttctccttttttcttctttttttctttttc

SEQ ID NO: 20130 - DNA, 418 bp, Oryza sativa
  Clone ID: uC-osflcyp074e10a1
ttttttgttttttttttttttttttttttttttttttttttttttttttttttttttttttttttttttttttttttttttttttttttttttttttttttttttttttggaaaaaaaagggggggggattctaaaaaaaggggggggagtaaaaaaaaaggccaaaataaaagggggggggtttttcttttaaccatttggattttttcaaaaaaaaaggggaaaaaaaataaattttttttttgcaaaaaggtgggggggggattaaaaaaaggttttttttttgggggggggaaaaaaaacaaaatagggggggggaaacttttttttatcccccaaaaaaaaaatgtccccctttggggggcaacaaaaaagttaaaaccctgagaaaacccaaatttgggcccttctaggccc

SEQ ID NO: 20131 - DNA, 407 bp, Oryza sativa
  Clone ID: uC-osflcyp074f01a1
aatcgaaagtccaaagcttgcacttctaaagtaacatttgcagcagtacatccaccataaatggtggtcttttcgatccagtggcatctcatgttggtccatactagtggtacagtttaacaatagactgttgtataaacacagcagtatctgggacgatactcgagtaatacataaattctattctacatatatatctccatgccaagtattttcgaagactggcatagcgggcagaagctcagcttgctttcgcactccttgcaaaggcaaagatgcccacaaggcaacaatagcatgcaagccttgcttgacttgcagactctacatgcggtcaaatttttggagtgtctgttctccttcggcattagttgcaaattggcggcaccaccattgcaacaggatgc

SEQ ID NO: 20132 - DNA, 449 bp, Oryza sativa
  Clone ID: uC-osflcyp074f10a1
ggaagtgataatttaaatacttaatagtaatagactctttgatggagtattacaacatgcagcagtggcattaatacgccagtacattaattaagttacacatatgcaggctccattttggtttcttttaatttatcgtattacagaatttctgtagccttgcagatgatcacttggatatcatgtactagtaattaacaataggatgcatacaaaagatggcccaacgacaacagaagatgcgtgcatctgacattgtctggccttatttgttggtagtactccaattaattaacaagagatgatgcattcttgtgccttagtttcttcacatgcttggctttacgttgagcctattcgcaatctttacccccaacgacttattacactgggagaggtaggtgacccagatggcgcggagctcaggggagaccttggggtgcgcgagc

SEQ ID NO: 20133 - DNA, 423 bp, Oryza sativa
  Clone ID: uC-osflcyp074f12a1
gatgaaatacatgatgaaccacgtatgttctcaaggtaaaattaattaatgcagtatagttttaactttgtccatcgatctcaacctgtaactgtgacgacacactggctacagtgccctcgaggtactagcagtatagcagtagctgtagtacgtagcagcagcagcagcaggttcactgtcttgattggattggatcggattagtagacgtagttcttgacgaacatgccctccttggcctcggcggcctcgccgtcgctggtgtacttgccgagctgcgccagcgagttggccttggcgcggaggagcagcgcgtcctgcgccgccttcacgttctccggctgcccgccccacgttttgaggcacgtgttctgcagcgccctcgcgtacgagaacgacacgtgccacgggtttgggcccc

SEQ ID NO: 20134 - DNA, 247 bp, Oryza sativa
  Clone ID: uC-osflcyp074g02a1
tttttggtttttttttttttatttttttttttattttttttttttttttttctttgtttccaacaaaaaccaaacagccaaatgcccccacacaaacagagacaaaccgcaaccaaacccaaaaaaaaaatcaccccgtgcgaaataaaaccacccaccaaattaaccgagcaacaaaacgccgcaaggggcaaccgaaaaacagggaaaaaacccaaaaacctcaagggggccaagaaggaaaaac

SEQ ID NO: 20135 - DNA, 117 bp, Oryza sativa
  Clone ID: uC-osflcyp074g06a1
ttttcggggtttttttttttttctcggttttcttttttcctttttttcgggggtaccaaatctcctaaaactctggcgggggggaaagaatgaaagactcgaaccaaccagtcccaa

SEQ ID NO: 20136 - DNA, 383 bp, Oryza sativa
  Clone ID: uC-osflcyp074g09a1
ttttgtgttttttttaagtccaatgttttgttctttttttttttcattttgttgggaaaaaataacccatttgcatgcgtgaacaaattttttttccattccgaggctttcatattgggggaatggaatttgctggctgaatttcccctaccaaataaaataagggtccctggtagcccgaaattaaacaggggggcgggcaagctgtttgaagttgaggggtttggttaattgggccgggccgtcggggaaggccggggcgcttagcatgggggcccttttgaagggggggacccggccccaaaaggcccacttgtcggggtcggcgcaaagcggggagcccacccgggagtccttctccgggccacaattttccgtttccg

SEQ ID NO: 20137 - DNA, 486 bp, Oryza sativa
  Clone ID: uC-osflcyp074g12a1
aacttaggatagatagtcgaaaaccaaatccattacagaaagtagcatgtcttgaacagaacaactctgataatagctcattacagaaagtagctcatgaatcgcccagtctctgcagctcgtttcatttcttcaacccaggtagcctacgtgattcattaattaattcctacatcttcttttttgagactctactattaaccccagtttttacaagagttcctgcctcacctgtagccttgataagatatttggagatctcactggtgttgtagtagcgctcgaagaggaaatacttcctctcatcaatcttagccacgccttgcagcgttttactcctcagaatcaacagagataaccccatcccttatcatccaagcgattgatcttggacaggaaagaaatgacatccccatccatacccaaggtggggaaacctgtgaccagccttctcaatgtcttctctggatcattgccaatctttgg

SEQ ID NO: 20138 - DNA, 320 bp, Oryza sativa
  Clone ID: uC-osflcyp074h01a1
acccatgagaaaaaccaagtcattcataaaactaattgtaattaaagagaattttttgtattacatggaaaatcatcctcataagtcatgacattaaattttattcaaaacattatgcacaaatgtaatctaaactttagaaaaaaaacatgcatttgaagttgccactatcattgccaccattttccacattacaggcattatcatattcacaagggatctttagatgacagttgtccaccttgcagtaaccatattgccccagatcatgatccatttattttgtcaaccttataagcattagaattattcttcccttg

SEQ ID NO: 20139 - DNA, 336 bp, Oryza sativa
  Clone ID: uC-osflcyp074h02a1
ggtctcaagaatcttaagatggtaaatacacacaagagagaggtacggtatacaagacttagtttttcttaagtacaacagatcttccattccttcatgatcctatcagcttctacacccaaaccacacaaatcaccatgcacgagccctcttcctccactgccaaatcaactggggcttgagtagccaagcattcatgtggtgatcagtagccgatgtcagcgtcgtcgacgaccaggttgccggtgatgagctcacggtaggcggggaccggccagatgaacccccttgggaggagcttgacggctagcttgacgtcgatgatgaacttccctt

SEQ ID NO: 20140 - DNA, 358 bp, Oryza sativa
  Clone ID: uC-osflcyp074h03a1
aaaaaataagagccttttttatatcagggacatgtccctacgtttttacacgaagcaagacagtttatagcataacagccggcctatgtttttcatgagggtaaatttttaccagacctacttaaggaccagtttatttcgaaaagacacttcataaaaaataagagccttttttatatcagggacatggccctacgttcttacacgaagcaagagcccttatagcataacagccgaattatgtttttcccgcgggtagattggtaccaggctttttgggacaaaaggccttttttttaggattatcccctttttggaatggaggagaattaccacgcccccttggaaaggcccttgg

SEQ ID NO: 20141 - DNA, 253 bp, Oryza sativa
  Clone ID: uC-osflcyp074h04a1
gtggcacacaccatcgggagagtaaaatcggggccgaaatgacttcatgagaatgaaatgttgttcatacacgaaccaatttttgggggacacggccggaaatgaacgggtgacccgttctagcctaacccaacccaacctggctgactaagctgacacaatcttctggtgacctaaaaaaacgggtaacaccatttgccgaagtctagaggttgacttttcccgacagcttgctgtatgccacggtttggct

SEQ ID NO: 20142 - DNA, 586 bp, Oryza sativa
  Clone ID: uC-osflcyp074h05a1
ataataagcttatttgggatttagagagcatgacatacagcgtaaaaacatacaaacacaacttagaacatacaaacacaacacgtgtattctaagttgagacaacaactcaacttagaacacacagatataaaggaaaaagaaaccattcaacatgtgatcaacgaacatgatacaacatctcaaacacaagtcttgagatcagaaaacaccaacgagaagagagagtccgaacaagaagagccaaacgatatgaatcaataacaaagcttatccacgtacagaatcacttccagcgttactagcgtcgcaagctcctcttttgactacacgagctccattgcacgctgcgtcctcacaaccgcacgagtacgtgactccattggctccgcaaaccagatcctcctggacacagtttattgggcaagcaaatggatccggaaccccgccgcagatgtcgccaccagcttgcccatccgcagcttgtaaaccgatcaagcagaaaaccagaaagaggtagggcattcttactgagaacgaggagaacgacgccatcatgtgaatttcatcgaatgatcgaaaccct

SEQ ID NO: 20143 - DNA, 395 bp, Oryza sativa
  Clone ID: uC-osflcyp074h06a1
acaaaagaaccgcccgaactttattctttcacaaagaggttgcctgggcttcctgaacccaaaaaaaaaattaaccggttgggggttaacccgacccgggaacttaattaattccccttttggccctagccggttcttaaaattgggaattaaaccttgacgtttcaccctggggggtgggggaacctgagggacccgacgggcccggggccggggccctaaacaaaggggggggggggcccccccagggggatggggcccaccccccctgggccgggggggggcaacatgggggggcaactgacaaaaaggggggagcttgcgggaacccaattgcccccctttcacttggggggggcgttgacctttacctggagggggaactaccccggggg

SEQ ID NO: 20144 - DNA, 73 bp, Oryza sativa
  Clone ID: uC-osflcyp074h10a1
ttttggggggtttttacgaagtatgcaggatcactcagtcacggccgtgctctacctcactcgtgttaaaacc

SEQ ID NO: 20145 - DNA, 460 bp, Oryza sativa
  unsure (1)..(460): unsure at all n locations
  Clone ID: uC-osflcyp074h11a1
tttttggttttttttttttttttttttttttttttttttttttttttttttttttttttttagcagctcgggagcatcgaaagccatgaagctggttggtggtcttttcccggggggaaaaattggcaatgcccatcggggactggcagtttgatcgggaaaacgagctgggagttagcgctgcgcctgcacatttacataacctgggaagggacaatttgtaaagggggggttgncgtggggacggaactgagccactccctgggctacccatgcgagacaaggagcccatccagccgttgatcgggggggccaaccccttctccggcgttcgatcctgccgcctccggccgtccgccgagccgttgttttcccgcgagctggatggagcgtcaaccttggaagcatccggctgccattccgggcgaggggggcgcaacgcaaccccaaacctggggac

SEQ ID NO: 20146 - DNA, 520 bp, Oryza sativa
  unsure (1)..(520): unsure at all n locations
  Clone ID: uC-osflcyp075a02b1
cttactcgtccgcccacgcgtccgccgacatcgagaaggctattgtggagcctgagagactggaacccagagaaatcagagaaatgccgctcgattttagaaatagtgatgctgactttgcagtatttgcagatgagttatatgattttgatcttccaaaggtcaacagcagctgcttttcgccgttaccgtcgatccagccctcttcgccaccttcagaaatgtcagtatttgcagggggcctgtcttcacttagtagtttcagaagcaaaagaagaaagtaaagagctggtgaaaacaaactgtccagatgctactaacagttcatggatgctctcatctgtaggtagatcagtgtacatttacagaaactgattgtagattctgtgtgctgaattccgttccagcaagctcagtttttttttcacagccttcttgatgagatttttactgtatcagngttggctgttttgtgccagaaaaaatgggaagaaaatgtaactcagatcagtttgagact

SEQ ID NO: 20147 - DNA, 270 bp, Oryza sativa
  Clone ID: uC-osflcyp075a06b1
gtttgtttctcctccccctctttaccttttcctggtcgggtctgttccgaggttcgtcgtggggtttagtgggttgagatggcggcgccggatgtcgagtaccgctgcttcgtcggctgccttcgctgggccaccgacgaccgcttcctcgaggccggcttctccacctacggcgagatcctcgacttcaagatcatcaacgacagggagaccgagagggcacgtgggtttggcttcgaaaccttctcctcccagtcagtcatgccccac

SEQ ID NO: 20148 - DNA, 341 bp, Oryza sativa
  Clone ID: uC-osflcyp075b03b1
gtcgctggcgtcgctgatgggcgcggtggcgtgcgtgcagggggtggagcacgcggtgttcccggcggagctccgggcggcggtggcgcggttgctggggcgggcgacgcgcgccttctcgccctactgctacttcgacgtgacggagacggaggggatgggcaccaacgagatctacgacgccgtgcagctctacctcagcagctcggcggtgcccgccgcgggggtcaggctcaccctgtcgcgcccccacaacgcgtcgtccttcacctttggccttcccgtcagcgacccgggtgcttgaccccttccgcggtgccgccgtcacgtgggagcaccgt

SEQ ID NO: 20149 - DNA, 454 bp, Oryza sativa
  Clone ID: uC-osflcyp075b04b1
aagcaattcttgagctcaatcagcaacaacatctatcgccttcttgcttagttaagtccttcgccctcccaagaagaagaagatgtcttgctgcggcggcaactgcggctgcggcagcggctgccagtgcggcggcggctgcggcggatgcaagatgttccctgatgtggaggccacagccaccaccaagaccttcgtcctcgctgctccatccaacaaggcgagctctggaggaatggagatggcggtggagagcggcgagaacggcggctgcggctgcaacacctgcaagtgtggcaccagctgcagcggctgctcctgctgctcctgcaactgaatctatcgtcgtcgtcgcccggctgcatgaggatttatcgtatggatgctgctactgtcgatcagagctttgatcgaggccttaatttgcttgcattagtacccagcttatatgtag

SEQ ID NO: 20150 - DNA, 496 bp, Oryza sativa
  Clone ID: uC-osflcyp075b12b1
tctatttaaagtccttggccttaatgaagtcgacaaggtctcactagaagcccagggtgggccttcgaaggacaatggagaagtacagtgcatcatgcaggctgatattgggctgtaatagctcatcaaaggtgacagaggctgtaagggctcgttgcttgaacgtgcgagtgaatgcacccagtgaagaccagatcgtccaagttctggagttcattgggaagaaagaaaatctgcagcttccatttggatttgctggtaggatagcagcacaatcgaaccgtaacctgagacgagcgatactgttttttgagacctgcaaagtccagcaatacccatttacatcaaatcaagtagcacctcctcttgactgggagcaatatgtgtcagaaatagcagctgatatcatgaaagaacaaagccctaaaagggtatttgctgtgcccagaagttctacgaattacttgcgaattgattccacctgagagcatcttaa

SEQ ID NO: 20151 - DNA, 446 bp, Oryza sativa
  Clone ID: uC-osflcyp075d01b1
attcattctcttctagccttagcctatctggctagctttgttgtctagctctgatcgaggttgtcggtgatcatggcgacgtcgagggtgatcctagcgctgctgctcgcggcggcggcggtgatggcgtcgtcggcgcagctggacgagaagttctacagcaattcgtgccccagcgtggaggccgtcgtccggaaggagatggatgctgccgcgctcggcgccgtgcccagcctcgccggcccgctcctcaggatgcacttccacgactgcttcgtcaggggttgcgactgctcggtgctgctcgactcggccgggaacagcactgcggagaaggacgcgacgccaaaccagacgctgcgcgggttcggcttcgtcgagagggtgaaggccgtcgtggagaaggcatgcccgggcaccgtctcctgcgccgacgtgctcgcgct

SEQ ID NO: 20152 - DNA, 541 bp, Oryza sativa
  Clone ID: uC-osflcyp075d03b1
cttttgtgagcagctttctggctttgcattcactggcaactgatgggtgcaatcttatggatcacggtgtgtcaagccaccaattatctatggtgatgtgagccgccccaaccccatgactgtgttctggtccaagttggcgcataggacagatctatcgccccaacgcttggaactgttggctggatcggtcacatttcttaactggaattttgtcaggaatgaccagccaggtggttgagacatgctaccagattgctcttgccatcaagaaggacgctgtggaccttgaggctggtggtattcaggtcattcaaatcgatgaggctgatttgagagaaggtctgccactccgtaaggcggagcatgctttctacttggactgggctgttaactccttcagaatcaccaactgcggtgttcaggacaccacccagatccacacccacatgtgctactttcacttcacgacatattcacttcatattaacatggacccgtttgatcaccatcaatactcccgttccactagaacttgctc

SEQ ID NO: 20153 - DNA, 405 bp, Oryza sativa
  Clone ID: uC-osflcyp075d06b1
tatcactctacttgtactaggtagatcgctagaacagtggcgttcggtggcgaggagaggaagagcaggatcctggtggtgggcggcacggggtacatcggccggcacgtcgtcttggccagcgcgcggctgggtcatcccaccaccgccctcgtcagggacctctccccctccgaccccgccaagtcgcagcttctccagagcttccgcgacgccggcgtcaccctcctccacggcgacctctacgaccacgccagcctgctcagcgccgtccgcgacgccgacgtcgtcatctccacgctgggcgcgctgcagatcgccgaccagaccaagctcatcgccgccatcaaggagggtggtggtggcaacgtgcggaggttcctgccgtttgtgtttggcctggac

SEQ ID NO: 20154 - DNA, 413 bp, Oryza sativa
  Clone ID: uC-osflcyp075e07b1
tcgtcgaagaaaggctctcaccaatccaacggagctcgatccatcacagtctcatccaattcgcactcgctccatccatggcgtctgcaggatgcggtctcgccggcgccggcgacgtccgccgcggcgcagcagcagctgcggaccgtggtgctgagggtgtccatccactgcctcggatgcaagaagaaggtcaggaaggtgctcaggagcatcgaaggcgtgaaggatgtgaaggtggacgccgcgatgcacaaggtgacggtgaccggcacggtggacggcgacacgctcgtcaagaggctgtacaagtccgggaagcaggccgtgccgtggcagcacccgcacgtggcgccggcgccggaggcggtcaaggcgatagaggccgcgccgcaaagcctgaggctgtgccg

SEQ ID NO: 20155 - DNA, 157 bp, Oryza sativa
  Clone ID: uC-osflcyp075e12b1
caaaaccccattcgcttcgctcctcctcgtggttttcttcaacgcccgctggcgctcgccgaaggtagtatccgcgcggcgaggatcgcctgaggaggaggagaataggacgctccccctcccctctttccttcgtcccctctcctcctttcacctc

SEQ ID NO: 20156 - DNA, 500 bp, Oryza sativa
  Clone ID: uC-osflcyp075f05b1
ttgtcttgtgggcttcctctccctctcttcttgggcggcgctacgcgacgaggcggtggctgcctgccatgccgaggagaggtggagcggcgaagaagccggcgggcggcggcgagctgtcccgcttcctgcagtcgcacctccagaccatcaacgacaccttccagatgatggcggaggcggctcccggcggcttggagcggacggagtggtctgaggtcgtcaagctcggcgagcaagtctccaggcaggccactgttgctggaatggtctggagtggtgatttgcctgatgtagaaacactcaaggagaacatcgccgcatatttcaacatcctgcagggcttccttttgggttgccacggcagcacagttggcgcaagacccacacttcacaaatccatctgtagctctgcacagaatggtgttgactccagcttctcattgttcaatcaaactgtttctgcttatggtaagtaaaaacctttctcaaggatcttc

SEQ ID NO: 20157 - DNA, 519 bp, Oryza sativa
  Clone ID: uC-osflcyp075g02b1
cggacgcgtgggcgcgggtccgacgaggcgatgcgacgagcacttgcatgtgcggggctgatcgccctgatttgtatgtgttaactgccgtcgtggctcgtggccggttatggtgggctcaccttcctctcgccgccttttgtctccttttccggttctctcctctgtcgttgggcaaaagctatcaacgattctaactgccaaggaggagtcgcctataagtacctgagcccgggagcaccgctctcttcacaaccaagcaaccatcgattcgatcctagcttaagccgagtgaagtagctagcaggacattgttggtagtgcgatcttctccctgttatgcacaaaggtctaacacagtagtgccctgctcctcctcttctcggccttctgcttcctcgcccggcgagccgccgccgactacagctactggcagagcgcccacgccacgttctacggcggcggcgatgcgtccgcacgatgggccgggcgtgtgggtatgggaacctgacagcaccg

SEQ ID NO: 20158 - DNA, 552 bp, Oryza sativa
  unsure (1)..(552): unsure at all n locations
  Clone ID: uC-osflcyp075g07b1
cgccccttctctcctccaccatccgcctcaccggcgtacggctccgacgagatggccgccccgctccggcggagcctcccctccctggggcgcacgctcctctcgccgtcccccgcgcccgcgcggatgctctccgcggcggcgtccgacgccctcgtcgagatcaagccaggcgagatcggcatggtctccggcatccccgaggagcacctccgccgcaaggttgtaatatattcacccgctaggactgcatctcagcagggttcaggcaaagtcgggaggtggaaaatcaactttgtgtcaacccaaaagtgggagaacccattaatgggatggacatctactggagatccatatgctaatgttggtgaagcagggcttacgtttgacagtgcagattcagcaaaggcatttgctgaaaagcatggatgggattatgtggttaggaaacgccatacacctcttttgaaggccaaatcttatgcagagaactncangtggaggggtcccccgaaggcagagcaagcctgagcactaatctggcatgctaca

SEQ ID NO: 20159 - DNA, 588 bp, Oryza sativa
  unsure (1)..(588): unsure at all n locations
  Clone ID: uC-osflcyp075g10b1
cttctctcctcctctaatctcaagtctctggctggtcgtcctcgcatctccactcgccatgggcaagattaagatcggaatcaacggtttcggaaggatcgggaggctcgtggccagggtggccctccagagcgaggatgtcgagctcgtcgccgtcaacgaccccttcatcaccaccgactacatgacctacatgttcaagtacgataccgtgcacggccaatggaagcacagcgacatcaagatcaaggactccaagactctgctcttgggcgagaagccggtcaccgttttcggcatcaggaaccctgacgagattccgtgggctgaggctggtgctgagtatgtcgtggagtccaccggtgtcttcactgacaaggagaaggctgctgctcacttgaagggtggtgccaagaaggttgtcatctctgccccgagcaaagatgctccgatgtttgtctgcggtgtcaacgaggacaagtacacttcagatattgatattgtctcaaatgctagcttgaccacanactgccttgctcctcttgccanggtcattcatgacaactttggtattatcgagggtctgat

SEQ ID NO: 20160 - DNA, 559 bp, Oryza sativa
  Clone ID: uC-osflcyp075h04b1
ctcgccgtcgcagatccgatccaggaagagctcgccggcgccgctgccatggcgctctccgtggagaagacctcgtcggggagggagtacaaggtgaaggacctctcccaggcggacttcggccgcctcgagatcgagctcgccgaggtcgagatgccggggctcatggcgtgccgcgccgagttcggcccttcccagccgttcaagggcgcccggatctccgggtccctccacatgaccatccagaccgccgtcctcatcgagaccctcaccgcccttggcgccgaggtccgctggtgctcctgcaacatcttctccacgcaggaccacgccgccgccgccatcgccagggactccgccgccgtgttcgcctggaagggggagaccctcgaggagtactggtggtgcaccgagcgctgcctcgactggggcgtcggcggcggccccgacctcatcgtcgacgacggcggcgacgccacgctgctcatccacgagggcgtcaaggccgaggaggagttcgagaagtcagggcagggtcccgacccgagtccaccgacaa

SEQ ID NO: 20161 - DNA, 146 bp, Oryza sativa
  Clone ID: uC-osflcyp075h12b1
aaaaaaaagggaaaaaaaaggagcgtagaagaggaaatttaccactcgcctcggctgcacaaatctcgcgcacgggttggcggcggcggcggctcacgctcgatccgcggccgaaaccctaggtggtggtggtgggattaggactt

SEQ ID NO: 20162 - DNA, 530 bp, Oryza sativa
  Clone ID: uC-osflcyp076a01b1
tgttgtcacagctgaaggaggaactatcagttccgagcgaaagcaattccagcttgaacaagcaattggaggaggcaatattgaaagtgtcaaacttaactgaggagctcgagacagttcaagctgagactgccagtaaaattaatgacatggaaactaacacaaaagatttggtaaatacaattgttctattatcttctcagaagaacaaagtggaggagcatatgaaaattattaccgaagcatgcatggagaaaatgtcatttatgaaagatttcgaagatcaagtaaagcaaaaaattacagatcgtgagatagcaattgcttgcctccagcagagcctcagaggaattattggcagctgccagagactccagtatgcatatggagaggtatccacaaaggcatcacaccttgaggtacttaggagggaatacctcgtgcagatagatacattggagaacaaacacacagaaattatggagaaacatcgtcaattaggggaggaaaatacatttgcaaacaaagag

SEQ ID NO: 20163 - DNA, 431 bp, Oryza sativa
  Clone ID: uC-osflcyp077a05b1
gcttgtttatcaaaatagagttggctggaagctagtatgggaagatcacgagaaggatggtctactagttggtgatgatccatgggaggactttgtgaaatgtgtacgatgtatcaggattctttctccacaggaagaaatgcagatgagattagtcggcgactttggagacagctttctacccaaccaagcttgcagcagctctgatgggggtcatccctggaggataaccggcgactagaatgtagaaactgatcaaaacccactttacatacatactgttgttgctgtcgcctcaagaccgacttttttttgactgttagtctcatgacagtgcaaaggatggtagtaggcaatgataatttttgcttcgaaactttgagcttacagttaatttatcgacatgaagactcaatgaatatggatacaag

SEQ ID NO: 20164 - DNA, 237 bp, Oryza sativa
  Clone ID: uC-osflcyp077a06b1
cactattggtgctgatacgcctgcaggggccggcccggacttactggccggacccacgcgtccgggttcgttctccttctccctccccggcccctagccggcgggcccccacaatcgcccgggtgtcgccgtcaccggaacggaaaatcatgggcgcggaggcagagcaccgcatgtatccctaccccgctcccgctaccggtccccctacccttgttgggaggaccgacagaaact

SEQ ID NO: 20165 - DNA, 428 bp, Oryza sativa
  Clone ID: uC-osflcyp077a10b1
tttttatttaatttctctcttcatcatcatctggctgtggatcttctacagaagctacagtagccagcaaatcaatcgatcgatcgatacgtgcaatggcggccatgaaggtgaacaagattgccgtggcggcgctgttcctcgtcgccgtggtggtggcgggcggcgccggcgctagcgcccacgtcggggttggggctggggccggggccgacgccggcgtcggtgccgccgtcggggccggcgctgacgccgccctcggggttggcgccaacgccgccggtgccgtcggggctggagttggggctggaattggagccgccgtcaacagaggcgggtctttcaccggcgcccgcgagggcgccgccggcgtggcacccaaggtgcatgtgtgagatcgatcgatcgatcgagcggagcggcgtaca

SEQ ID NO: 20166 - DNA, 554 bp, Oryza sativa
  unsure (1)..(554): unsure at all n locations
  Clone ID: uC-osflcyp077a11b1
tctgttctctcagttatccatgtggaagataacaaagggaacagagcattgcatgtggcaactcggaagggcaacaccgttatagtccagactctaatatcagtcaaagagatcgtaatcaatgcagttaatagagcaggagagactgcttttgctattgcagagaaactaggtaatgaagaactttctaacatcctgagagaggttggtggtgaaactgcaaaagagcaagtaaaccctccgaattcagcaaagcagcttaagaagacagttagcgacattaggcatgacgtccaatctgggatcaagcaaacacgtcagaccaagatgcaattccaaaaaatcaagaagaggattcaaaagcttcacattggggggctaaacaatgccatcaactccaatactgttgttgcggtgcttattgccacagttgcctttgcagccatatttactatccctggtaattntctggaagatatgaaagatccacatgatcccaacatgaccttanggcangcatttgtagcaagcaatccnngcattataatcttctg

SEQ ID NO: 20167 - DNA, 495 bp, Oryza sativa
  Clone ID: uC-osflcyp077b01b1
gcttgttttgctgtccaccggcgtcgcggggaactacagcggtgcattgcaagtgatgtcagtggagtttcaggtgccatcgccactggtgccaacgagagagagctacttcgtgagatactgcaagcagaacgcagacgggacatgggccgtcgtcgacgtctcgctggacagccttcgccctagccccgtcctcaaatgtcgccgccgtccgtcaggctgcctcatccaagaaatgcccaatggctactccaaggtgacgtgggtggagcatgtggaggtggacgacaggtcggtgcacaacatctacaagctgctggtgaactccgggctggcgttcggcgcgcggtggtgggtcggcacgctggaccgccagtgcgagcgccttgccagcgttatggccagcaacattcccaccagcgacatcggcgtgattacgagctcggaggggaggaagagcatgctgaagctggcggagaggaaggttgttgagct

SEQ ID NO: 20168 - DNA, 511 bp, Oryza sativa
  Clone ID: uC-osflcyp077b03b1
tgtttattgagaaatctttcactaaaattgctatgcttagtgtgtgactcattagtttttttttagggttcaaaaaggggattaaaaaaaaatagaatgaaccctactatgtaattatagaaaatgaactaataaccaacctattgcttcgtattgccgagatcctaactaataaacagtcactatatgaataaatacatctatcataaatgagtaaatctatcatatacgtgtagcaactgcaattttttctttaaaaaaaaataggattctaagttgtgaagcaaaactaaaggggatgtagataaaaggtacgatgatagaaagaaggaagagaaataagaaagatataggattccaatatgtatgggctatgaattacattataaaaagcaatgtgataaagcattgaatttacaaaaaaaacagaaaattcggaaatcggatttgattgaaacaagaaatacaaattttacggaataacaaagagcgttccgagataataaacctg

SEQ ID NO: 20169 - DNA, 494 bp, Oryza sativa
  Clone ID: uC-osflcyp077b04b1
ctctgttcttgccgcgcttaaaccctcgccgccttcccgcggcgaacgcccctcccttcgccgccgcccccgaccatggcgcacgccctcggctgcggcgccgccaccgcccccgccggggtgggtctcctccaccaccacgagaaggctggggcgttgttcagtgccgcaggctccatcgttcgggttcagcagctcagcgggaaggggagcaaaagccaagctataagatgtgcaatgccaagtgcaagtgagcatggtggaatttcaaccgcaacagctagtagtagtgatcaaaagaaaggtggactgcgtggcaaactgaataaagttgttctagcttacagtggtggtttggatacatcagttattgttccatggctccgggagaactatggttgagaagttgtctgtttcactgctgatgttggccagggtgacattgaattggaagggctagagaagaaggcaaaagctagtggtgcaagccagct

SEQ ID NO: 20170 - DNA, 482 bp, Oryza sativa
  Clone ID: uC-osflcyp077b05b1
gctcactgcaacttaagtttttctatagctcctagcaagctagcaatggctccctcggtgatggcttcgtcggccacctccgtggctcccttccaggggctcaagtccactgcgggcctcccggtgaaccgccgctccagcagctcgagctttggcaacgtcagcaatggcggaaggatcagatgcatgcaggtgtggccgattgagggcattaagaagttcgagactctgtcgtacttgccgccattgacagtggaggaccttttgaagcagatcgagtacctgctccgatctaagtgggtgccttgcttggagttcagcaaggtcggattcgtctaccgtgagaatcacagatcacccggatactatgacggtaggtactggaccatgtggaaactgcccatgtttggatgcaccgatgccacccaagtgcttaaggagctcgaggaggcaaagaaggcataccctgatgccttcgttcg

SEQ ID NO: 20171 - DNA, 550 bp, Oryza sativa
  Clone ID: uC-osflcyp077b07b1
tggttctttctgatgatgttggtgctggatttatagctggacatggaagtcaatctgcttctggaccagaggtagatgttgaacgcctggttgatttgcctcctcaggaagaaattagtggcatgggcatgtctaaggtcataagggcagatcaaaagaggttcttctttgaccttggaagcaacaacaggggtcattacctgaggatttctgaggttgctggagctgatcgttcgtcgataatcttgccactctccgggttgaagcaattccatgaaatggttggccactttgtagatataatgaaggacaggctggaagggatgacgggcgcgaacgtgcgcacagtggagtccagtcagagatgatttagctttgaggtgctcgaccatggccgttactgctgttatgcctcctctaggtttgttatgtggtgtgtggctgtgcagatcacgcagtattggtggggataataatgttatttctcctttttcttttcttcttttttttctgaattaagtggtgaggattggacttgtttggacttttc

SEQ ID NO: 20172 - DNA, 565 bp, Oryza sativa
  Clone ID: uC-osflcyp077b11b1
tattggtctgagttgctaaagctggctgatgataatgagcctgccacagatgataagcaagatcagttccttcaaaaccgcattaaggaaaaattgcatatctggcttctccataaagtcggggatggaggcaaaggtcccagtatgttagatgaggaggggcagggtgtgcttcatttggcagctgccctagggtacgattgggcaataagaccaacaatagctgctggtgtgaatataaacttcagagatgctcatggatggactgcactccactgggctgcattttgtggaagagagcggacagtcgttgcacttatagcactaggtgcagctcctggagctgtaacagacccaacaccaagtttcccttcaggaagcacaccagctgatcttgcatcagccaacggacacaagggaatctctggtttcctagcagagtcttctttaacaagtcatctgcagactctcaatctaaaggggccatgcgtagcagtgcaggagaaatatctggtctacctggcattgtaatgttgctgatagagcgcctcgctttggcagtgag

SEQ ID NO: 20173 - DNA, 545 bp, Oryza sativa
  Clone ID: uC-osflcyp077c01b1
ggcttgcttgatggtgagcgcaggaggaagtctgtccgtggttgcatcgtcagccaggacctatctgttattaacttggtgattgtcaagaagggtgagaatgacctgcctggccttactgacactgagaagcccaggatgaggggacccaagagggcctgcaagatcaggaagctcttcaacctttccaaggatgatgatgtccgcaaatatgtcaacacctaccgcaggacattcactaccaagaatggcaagaaggtgagcaaggctcctaagatccagcgtcttgtgactcccctcaccctccagaggaagcgtgccagaatcgctgacaagaagaagaggatcgccaagaagaagtcggaggctgctgagtaccagaagcttcttgcccagaggctcaaggagcagagggaacgccggagcgagagcttgcaaagaggaggtccaagctttcttctgctgccaaggctgctgctacacaccgctaagttggtttagagcttgagagttttataatcgttatttctgagttataatagccc

SEQ ID NO: 20174 - DNA, 472 bp, Oryza sativa
  unsure (1)..(472): unsure at all n locations
  Clone ID: uC-osflcyp077c02b1
ggttagcacgccgctgttcggcgccggcgccggctgcggcgcctgctacgaggtcaagtgcgtggacagccccgacggttgcaaggtcggcgccgcccccttggtcgtcaccgccaccaacctctgcccccccaaccccggccagtccaacgacaacggcggctggtgcaacccgccgcgcgagcactttgacctctccatgccggcctttctgcagatcgcgcaggagaaggccggcatcgtgcccatatcgtacagacgggtgccgtgtgtgaaggtgggtgggatcaggtacacgataaccgggaacccgtactttaacctggtgatggtgtcgaacgtgggcggggcgggtgacgtggcagggctatcggtgaaggggaacaagagggtgaagnggactccgctgaagcgcaactggtggcaggagtggcagacgtccgaagttctcaccggagagtcgctgacgttc

SEQ ID NO: 20175 - DNA, 471 bp, Oryza sativa
  Clone ID: uC-osflcyp077c03b1
cgacgcatcgcgcatccatacagggtgggtttttttacatccagtcggccttcacaagctacgtctcttttcttgttattaagagcaagcaaacagtagtctagctaagcgagactgcgagagcagagcattgttctttttctttagctattagtggtggggaataatggctcccgccaccaccgcagcaatggccctcgcgccgcctccttcccatcaccatcaccatcaccatgttaagcagctgcagatccctacgtctgtctccgtctccgtgccccttcgctccggtttccttggacgcgcactgactgctgctgcccacccacagccgctgtttgccgtcgagagccgacgcagcagttccgtgttcgtgcggatgttgtgggacgggcccctctcctcggtccgcctcattatgcagggccacaacgtcaagctgaatgagatggtgaaggagctcatcgagga

SEQ ID NO: 20176 - DNA, 518 bp, Oryza sativa
  unsure (1)..(518): unsure at all n locations
  Clone ID: uC-osflcyp077c05b1
ctctgttcgatcgatcgatggagtgcctgcttggcttgcgcaaggtgcgcgtcatgcggggcctcaacctggccatctgcgacccgctcacccacagcagcgacccctacgtcgtcctccgccacggctcccagaaagtcaagtcaagtataagatatcattccatcaacccagaatggaacgaggaactcacgttatcaatcacaaacatgatgctgcctgttaaaattgaagtgtttgacaaggacaccttcaccaaggacgacagcatgggcgacgcggagttcggcatcctggacttcgtcgagatcgccaagcaggaccacagccatctcggcgacggcgcggtgatgaagacgatccacccggacatggagaactgcttcgcggcggagagccacatcacatggaaggacggcaaggtgtcccaagacatcgtcctcaagctcaggaacaccgataccggcgagatcatcctgcacctccaatgggttaacatcccanngtgtctccggtga

SEQ ID NO: 20177 - DNA, 556 bp, Oryza sativa
  unsure (1)..(556): unsure at all n locations
  Clone ID: uC-osflcyp077c10b1
tttgccctagcgccgccgccgccgccgccatgaagggcaacatcgccaacccgaccaccgggtgccagaagaagctcgagatcgatgacgaccagaagctccgggcattttatgacaagaggatctcccaggaagtcagtggtgatgctcttggcgaagaattcaagggctatgtattcaagatcatgggaggctgtgacaagcaaggtttccccatgaagcagggtgtgcttacttctggacgtgtccgccttctcctccacaggggtaccccctgcttccgtggatatggcaggcgtgatggtgagcgcagaaggaagtcagtccgtggttgcattgtcagccaagatctctctgttatcaacttggtgattgtaaagaagggtgataatgaccttcctggcttgactgacactgagaagcccaggatgaggggacccaagagggcatctaagatcaggaagctgtttaaccttgccaaggatgatgatgtccgcaggtatgtcaacacttaccgcagaaccctcactaccaagaacggncagagggtagcaag

SEQ ID NO: 20178 - DNA, 530 bp, Oryza sativa
  Clone ID: uC-osflcyp077d01b1
cggtccggaactgcattgtcgacccaaccctccgattttctttttggagcgttttagggatgccatgagggtggggttttattaactattagggtgcgtatatcgctccatcagtctcggcaaataccagaccaccgtatggacagggttcagagagttcgcgcgagtcgagagaaacgagccgcgaacattttgttgcgctcatctgcgatgcgcatagaaagcgccataccgttgacagcccaaccttcccagattcatcgagccaaaaagccacgttcgttgatggactttactccagagctatccaagctacatagacagcaccggtctttgctgcgttcaaagatgcctcctctccttgcaccacagaatgctttaaacagcagagcctccggtagttcatcaaggacagataaggaatacatccaatcattgaaagcatcaatacccaggacggtcgtactatggtccttcaacacatgagtgcccctactgtggtgcagtcttctgtttcaggagagaataag

SEQ ID NO: 20179 - DNA, 547 bp, Oryza sativa
  unsure (1)..(547): unsure at all n locations
  Clone ID: uC-osflcyp077d02b1
gttttcttttacgatcttcagctttttgggcactggaggggtttattagtgcttccaatggactttgggcgataccattcactttgggagttgcggtcttctgcttcgaaggattcagtatgactttggcactagaatcatcaatggcagaacggagaaaattccgctgggtactttctcaagcagttgtcggtatcataatcgtctatgcatgttttggagtttgtggttacttagcctatggggaggccactaaagacatcataacacttaatcttcccaatagttggtcttctgctgccgttaaggttggtctttgcatagcactggtattcacatttccagtcatgatgcacccaatccacgagatngtcgaggaaagattccaatcaagtggatgttttccgaagctctcgcacaagggtcgcggggctgaatgggtgggcctgcactcaagcccgattcgcatggaaactatcctgtctgtgttgcatcctttatacctgcgttcgggtccttcatcttctttgtcgggagcacggtttgc

SEQ ID NO: 20180 - DNA, 409 bp, Oryza sativa
  Clone ID: uC-osflcyp077d04b1
gatttatgctctccctagcccctagtgcgtggaggagtaggggtagtgcaaaccactgaaccacatcgccttctttctactggtttctaccgtgttcttgctgctgctgctgttcttcgtgagcctactcgacgacctcgatctgcttttcttcccggctccatggcggcagcggccgggccgtagtggattttgcggatttcattatcaaaacgggaaatagactatggattccaacgagggctctcatcgtataacacgaagtgggattgttagggcaaaacctgctgtcacggccgatggtaagattgagcctgctggggaggggttacctcatgggatggtgaaagaatacaggcccttgaagaaccaatctgggtctagagtcaagggtgatacgttctatttt

SEQ ID NO: 20181 - DNA, 552 bp, Oryza sativa
  unsure (1)..(552): unsure at all n locations
  Clone ID: uC-osflcyp077d05b1
ggttcccaggcaggcagagctgcaaagccaatcccaaatctccagctcatgaccaaggagggcggcagttcaagaatcatgcacgactacatcataaaggcaatcaacaagcatcccaacgctggctggacggctgcacggaatccatactttgcaaactatactactgcgcaattcaaacatatccttggagtgaagccaacaccgcatagtgtgctaaatgatgtccctgtcaaaacttatccaagatcgctgatgcttccaaaggagtttgatgccaggtctgcatggtcacagtgtaacacaattgggaccatacttgatcagggtcactgtggctcgtgttgggcatttggtgctgtggagtgtctccaggatcgtttctgcattcatttcaacatgaacatttcgctatctgtcaatgacctagtggcatgctgcggtttcatgtgcggcgatggttgtgatggaggctatcctatcatggcatggcgctactttgttcggattgggttgttancgatgagtgcgatccatactttgatcaggtcg

SEQ ID NO: 20182 - DNA, 548 bp, Oryza sativa
  unsure (1)..(548): unsure at all n locations
  Clone ID: uC-osflcyp077d07b1
cgcttgcgtacgtaggcgagacgggcactgaaggcgttgcgagggttggtgaagctgcaggccctcgtccgcggcaacatcgtgcggcggcaggcggcggagacgctccggtgcatgcacgctctcgtccgagtccagaggcgggcgcgcgcgtgtcgcgctatccgctcccagcatgtctcggcccatcccgggccaccgacgccggagaagtacgaccaggcgactcacgagggcgtgcctaagcacggccgttctggttctctgaaggggagctcgtcgaagacgccgggaagtgagagactgacccgggagaggtcagaatcttgcgggaggaactggcttgacaagtgggtggaggaacggtatttggatgacgagaagaacgccaagattctcgaggtggacaccggcaagcctgggcggcacgcctcacggaggcgcagcggcagccatcaccaccactcgtcatgctcgtccatgacatccgagcagaagagccggagctacgcgaccatgccggagtctncgttcaaggactncacgac

SEQ ID NO: 20183 - DNA, 151 bp, Oryza sativa
  Clone ID: uC-osflcyp077d09b1
tttaaggggaggaggaggatcgtaggagacagagctgggactattaggcggtgtgcactccatcacacaaagcttactctgatactcccataccaaaacgatccctcccaaccaggatcaacctaaccgctgggtttccgttgccaccacc

SEQ ID NO: 20184 - DNA, 547 bp, Oryza sativa
  unsure (1)..(547): unsure at all n locations
  Clone ID: uC-osflcyp077d11b1
tacacacaaaatatcagaggacgcagacagacttgataaccctcgttccccaaattcgcaatccctctctctcccatggccggctacccgccaaaccccggctccggctacccctacggcggcgccggcggctacggtgccccgccaccgccctacggctcctcccccgccccctccgccccgccctacggcgagaagcctcccaaggaaggtaagacctcctcctcttccgccccttactacggcggcggaggcggctacggcgccccgccctccacccagccctacggcagcggaggcggctacggcgccccaccctccacccagcggccccagtcctacggcggcggctacggggctccgccctccagccagccgtacggcgcgccatacggngccccgccgccctcgtcggcgccgtacggggcgcccggcgggtacggcagcccgttcgcgtcgctggtgccatcggcgttcccgcccgggacggatcccaacgtggtggcgtgcttccaggcggcggaccgcgacggcagcgggatgatcg

SEQ ID NO: 20185 - DNA, 554 bp, Oryza sativa
  Clone ID: uC-osflcyp077d12b1
ggataaatgcgtgctgctgctgctggtgttaagtacgtgacggggtatgctggttgagtagtagggaaggactgcaaggagaagcaccctaacgtcaagcaggtattttgtggcgcatttgggttgctctgctgcgttaactgctacaatgtgtgttctgacttggttgatttggtggtgacaagtgcaagtccatgtctgatgctgtgagttcctcacttcctgtgcccatgttctgaaccgttccatatgcatttctcacttgatgtaatttcaaattttgggccatatatctggtagttttgggccatatatctggtagtaattcaaacaaatatagttttacctggagttctagctaacatctcttcccgatccttgagatcacatccgtttggttctgcatgtcctattgtttgaaacttgctgcctattagaacctccttagttgtctcaatacttttacttttattactgccatattaattatcttgttgctgagtcctgttttgatgattatgcacaaagtatccagtttgtctggtacctaaatg

SEQ ID NO: 20186 - DNA, 497 bp, Oryza sativa
  Clone ID: uC-osflcyp077e01b1
ggtacaatgaattcccctatggctggtggtatggaggtggtgtccacttggagtcatgtgatggaagtgagcacttttgtcggtgtcatcttagtgacactgttgttctggagttcaaccaatacacacctggttcaagatggaggcaggcgctggtgaaccggaaggaccacagggaagagggcaatgagggcgacggtttctacggtggaatcaggaagctccgcagcaaggatgagatctcaaagtggagacagttgtggccaacagacattcttgagtagcaaggacagagattattattccactgttgttattcatcaagttgccaaattgatgctctccaattgctcattctgtattctgaaacctgacgaaaacgccacccatctcctccactcaagttgtatacacaaaggattggaacatggggtgacaaaatttggtagcttgggacacaattgtgaaacttactgtaaggcacggatgcacagatt

SEQ ID NO: 20187 - DNA, 380 bp, Oryza sativa
  Clone ID: uC-osflcyp077e02b1
ggctgcggtaatggggtcgccatggctgcgcatcaggctgctctccggaggtgccgccgcgcctcctgcggccccacctccgccggaccctctccgtccgcgcctccgcctccgcctcggcgtcaccggacggcgccggcggcccggtgcgggtccgcttcgcgccgtcgccgacgggcaacctccacgtcggcggtgcccgcaccgcgctcttcaactacctcttcgcgcggtccaaggggggcaagttcgtgctccgcatcgaggacaccgacctcgagaggtccaccaagaagtccgaggaggccgtgctcagtgaccctcgctggctcggccttgactgggacgaagggtccgatgttggtggggaatttggggcc

SEQ ID NO: 20188 - DNA, 339 bp, Oryza sativa
  Clone ID: uC-osflcyp077e06b1
cgttcttttagctctcgacccccgcatctcatccctccgcttgcttagatcagatcgagggcgcaaatggcgaagattaagatcgggatcaatgggttcgggaggatcgggaggctcgtggccagggtggccctgccgagcgacgacttctagctctgttgccgtttatctccccttcattaccaccgactacatgacctacctgttcaacgttgacactgtgcactgtcagtggatgcctcattgaggttctggcgaaggactccaagacctcttctcttccgtgagtacgtggtccacctcgttcggcctgtccgatccttctcgagattctattgg

SEQ ID NO: 20189 - DNA, 534 bp, Oryza sativa
  Clone ID: uC-osflcyp077e07b1
tgatttcgtccacgcacgcccgatcccggccgggagatgagctttcgcggcgaggagagcggcggcgaggatggggggcggacggcgtcggcgtcggacctgcggaagccgttcctccacacggggagctggtacaagatgtcgtcggcgggcggcggcggcgggatggggacgcgcctcggctcctccggctactccctacccgactccttcgtctccgccgtcctctgcaccctcatcgacgccctcggccccatccagttcggcttcacctgcggcttctcctcgcccacccaggacgccatcatctccgacctcggcctcaccctctccgagttctcgctgatcgggtcgctgtcgaacgtcggggcaatggtgggcgccatcgccagcggccagatcgccgagtacatcggcccgaaggagtctctcatgatcgcggcaatctcctacattattgggtggctcgcaatatcttttgcaaaggaactaaccttcttggttattggccgattgcttggaggatttggggtc

SEQ ID NO: 20190 - DNA, 527 bp, Oryza sativa
  unsure (1)..(527): unsure at all n locations
  Clone ID: uC-osflcyp077e10b1
tgcttctctcctcctctaatctcaagtctctgtctggtcgtcctcgcatctccactcgccatgggcaagattaagatcggaatcaacggtttcggaaggatcgggaggctcgtggccagggtggccctccagagcgaggatgtcgagctcgtcgccgtcaacgaccccttcatcaccaccgactacatgacctacatgttcaagtacgataccgtgcacggccaatggaagcacagcgacatcaagatcaaggactccaagactctgctcttgggcgagaagccggtcaccgttttcggcatcaggaaccctgacgagattccgtgggctgaggctggtgctgagtatgtcgtggagtccaccggtgtcttcactgacaaggagaaggctgctgctcacttgaagggtggtgccaagaaggttgtcatctctgccccgagcaaagatgctccgatgtttgtctgccgtgtcaacgaggacaagtacacttcagatatngatattgtctcaaatgctagctgcaccac

SEQ ID NO: 20191 - DNA, 557 bp, Oryza sativa
  Clone ID: uC-osflcyp077f06b1
ggttcctatcaactgggctgcatacatgcgttcaggctggggtcaagtaattttgcaatctttcagatggatcaagcatcacatcactcggagttggtgatcggtgcatcggtttcaattactgaaaatcgagatgtgctaaatggagagcttggtctgattgaagctcagtacgagcaatggtttcgtgaattaacaaggatgcgggaagaagctttggaaggagcccggaagaagtggttaccagataaatgatgatgtataaagtcaagttttgtgtttcatctgaacatcataagaaagaatgttcagatgttcatgttccagcttcctggttcaacatttcttgtgtttcatacataattgagcaacgttaataatttttagtttaaacgttgctgtagtctgcaatgcttgtaagccagcttgttggtaattattaagccgtttggcagagtttacagcatgatattttgatggtgtaaaaaaaataaaactctcttaccctcttccttacatccctctcatacttactttttttcctcttctccaaactt

SEQ ID NO: 20192 - DNA, 564 bp, Oryza sativa
  Clone ID: uC-osflcyp077g08b1
gttgcctttacaaaaggagggtgaggaagtagactacagaggggtcttgcaccgtgatggctctgttttgatgtcagtttccttggatcagttgaaggctcctgagctcctttataggtctcttgctgcaaagcttgtggttggcatgcctttcaaggatctggcaactgtagattctattcttttgagggagctcccacctgtagaagatgctcaagctaggcttgcactcaaaagattagttgacatcagcatgggtgtgttgactcccttatcagagcaactgacaaagccactcccacatgcaattgctcttgtcaatgtggatgaactgtcaagcggtgcacacaaacttttgccagaaggcactagattggctgtcacccttcgtggagatgaatcatatgaacagctagatcttcttaagggtgttgatgatataacaatgttactgcacagtgttccttatggtgaagagaagactggcagagtacacgctgcttaggaggttattgagtacttagaaaccaacggtttgaacttccctgtaatccatcacataga

SEQ ID NO: 20193 - DNA, 561 bp, Oryza sativa
  Clone ID: uC-osflcyp077g11b1
aagaaatcccaagcctgcagcccctaaggacattccgcctgtgagcatgaggcatgggcagcttggcaggatgaatgaagctcctgttgttcgagacgagtggcctgccaactttgggcgtctggacaatgtgactgacacaaacatttcaggtcgacttccccagcttgaacctgacttgaatcatttgaatatggaggagcaaatgcttctccaacagatccggagggagcaacggcagcaggagcagttgatggctcggaacaatctggagtttcctggaccatttccaggacaggtgtttgattctttgcaccaacacaggcagtctatgaatcaaccggttcctgaggtggagcatcttttgagagtccagtttgagcttgagcaacagcaacgccgccaacagctccagcaagagcagcaccagaggcaactgcagcagcgtcaagcccagcagcttcttcaacagcagcagcaacaacagcaacagcaacagctgattctagagcaaatgttgcagcaacagttgcaagcttcaaattttggaccaactaacat

SEQ ID NO: 20194 - DNA, 174 bp, Oryza sativa
  Clone ID: uC-osflcyp077h01b1
gtttaagttcactacactggcacactgcttgatggggagaagttttgattcaagccgtgaccgtgggacacccttcaagtttaagttgggacaaggtcaagtgataaaaggttgggatctaggtatcaagaccatgaagaaaggcgaaaatgctgttttaccattcctcctgat

SEQ ID NO: 20195 - DNA, 332 bp, Oryza sativa
  Clone ID: uC-osflcyp077h09b1
ttctcttaatcaagaaatgctgaagctgcaatctgagggggatagcttaaaacaaaagtgcgaggcccaacacgagcagcttcagatatcagataagaaaactaaaacagttgtctctatggccacggaagaatatactagatgcagtgctgtggtcgagtttgctaaatctttcgataccgagctcaatggtatagcgcatgaactgcccagcgatgcagcacaaagcttgaaagccttacaaaatcaggaagtacacgctccttgtccatgccacacgatgccagttctgcaagtccctctgccatttcacttaccaggcgacccccctt

SEQ ID NO: 20196 - DNA, 570 bp, Oryza sativa
  Clone ID: uC-osflcyp001a02b1
gttcaatttcatcaaagaatgttttgacaagggtaccctgcaccttattggtttgttgagtgatggaggcgttcactcccgtcttgatcaagtgcagctgcttctgaaaggtgccagtgagaggggagcaaaaagaattcgtgttcacattcttactgatggacgcgatgttttggatggcagcagtgttggttttgtagagacactagagagtgatctttctcagcttcgtgacaagggtattgatgcacggattgcatctggtggtggaaggatgtatgttaccatggaccgctatgagaatgactgggatgtggtcaaacgtgggtgggatgcccaggtgcttggcgaagcaccctacaaattccaaaatgcagtcgaagcagtgaaaactctaagagcagagaccaaggctagtgatcagtatttgcctccatttgtgatcgtggatgagagtggcaaatctgttgggcctgttgtagatggtgatgcagttgtgactttcaatttccgagcggatcgtatggttatgcttgccaaagcactagagtatgcagactttgacaaatt

SEQ ID NO: 20197 - DNA, 506 bp, Oryza sativa
  unsure (1)..(506): unsure at all n locations
  Clone ID: uC-osflcyp001a04b1
acgccttcacctagctctagagccttccctctcctcctcctccacatccaccggagagagtgtgtttcttggttcttggaggagagatgtccaagatggcggaggagaaggtgctggcggcgccggccaccgtcgacggcgggatgcagtcctccggggacctgcaggcttcgtcggcggcggcggcgcgtgtgcggcccgtcgagacgctcctccgcgccgcgccgctggggctctgcgtcgccgccatggccatcatgctccgcaactcggtcaccaacgagtacggcaccgtctcctactccgacctcggcggcttcaagtacctggtgtacgcgaacgggctctgcgccgcctactcgctggcgtcggcgttctacatcgccgtgccgaggccggcgacgttgtcccgctcctgagtcgttttcctcctcgaccaggtgttcacgtacctgatcctggcagcggnggcggcgtcggcggagctactgtacctggcgtacaac

SEQ ID NO: 20198 - DNA, 514 bp, Oryza sativa
  unsure (1)..(514): unsure at all n locations
  Clone ID: uC-osflcyp001a07b1
ctctaacacaaacagaaaaacacaacacattaagctagctagaagaagagagaaattaaagaagctaggagctaacgatcaggatggctgctggcatggtggcgacaatggtgctactgacgtgccttgctgcaggagggctggtcgtcggagctgaggaagacggtggcggcggcggtcttggccggctggggtcgccggactacggcgacgcgctggcgaaggccatcctgttcttcgagggacagcggtcggggcggctgccggcgaaccagcgagcgacgtggcgcggggactcggcgctcaccgatggccgtgaagaaaacgtgaacctgaccggtggctactacgacgccggcgacaacgtcaagttcgggtacccgatggcgttcacggtgaccctgctgggctggagcgccgtcgagtacggcgccgccgtcgcggcggcggtggagctcggcaacctccgggcggcgatccggtggggcgccgactttctccttcgngcccacgc

SEQ ID NO: 20199 - DNA, 571 bp, Oryza sativa
  unsure (1)..(571): unsure at all n locations
  Clone ID: uC-osflcyp001a09b1
ctctcctgccctggccggtggcccagccgctgctccgccgcctcgcgctgcgcggcgccgccgacctcctcccgtccttcgtcggcgtcgcgcgggagccaggtgatggcggcgcccgcgccgccgagtggaagggcgcctgcttctacgataaccgggcgtggatggagttccacaacgggactgatgggggccttggaggtggtacgctccatctcgagacaaacaaagctcatagctggacttgcatagacctttatgtgtttgcaacaccatatcgtgttacatgggattactactttgtaggtcgtgagcatacccttgatttcaaagaatgggaaagcgaggctgaatatgaatatgtaaaacgcaaaggagtatccatattcctgatgccatctggaacaattggaacacttagagcactttgggatgttttccccctgtttacaaatactcaatggggtgagaattcaaatcttgcatttctaaagaagcatatgggtgcaaccttcgaggacgtccgaaaccctgggtgcagacntaatgttgacgattccactctgagaat

SEQ ID NO: 20200 - DNA, 568 bp, Oryza sativa
  Clone ID: uC-osflcyp001b04b1
acgcctttgttcggcgtacccgtcgtatcccccctatgtctgcgagagctgtcagcgcccgacgaggaaagcaggttctttggccatggagagctgccgggcggcagtcgacgctcgtgccgttcttcgacggatcagcgcggcggcggaggcggcggctaagcaggacggccgtgtgtccgctgccagctatagcggcagcagtggcggcgtgaatgctccgtttggcttgggccaatatgcaaaccttttgagggcacaagcttttgcatccaggggagtcgcgctgaacttccatcagctgatccgcaatgctggaatatctaccacaaggaacctgcttgctgcagatgatgctatggttcctgattgttctcctttgacacctccacttggtgatggagaacaaactgacaaaaagggagcaatcgataagcggctgaaggtccaagccatcaagaaggatatcaagcagagccccaagaaggtgaatctggtagcaaagttggctcgaggaatgcgtagggaagatgcccttgtgcaattgcaagtgacagcttaaagggct

SEQ ID NO: 20201 - DNA, 510 bp, Oryza sativa
  Clone ID: uC-osflcyp001b05b1
gtttagcgtgcgagcgagcggagaccccctctcggctcgcccatggagttcggcagcggcggacgcgacgcccgcgcgcggcggcagctgcaggcggccgggcgcgccgcggcgtacctcggcggcggcttcctcctgctctccgccgcgtcctccgccgccgtccgctccctgcgatccctctccgacgccaaccaaaggaaattcgcggcgccgtgtggcgcctgcgaggggaaggggacctacgcgtgcaggctctgcaggggcagctcgacgatcgagtggtctccgctccacgacccggtgttcgtcaacccgtgcctctgccctacctgtgacgggactagggtgcagcgctgcttgaactgccttggaaaaggctacgcttgaaggggcaatgcgtccttgcgtttggcttatcgttggccactgggatttccgcacggtcagtctctgttcttgctaaagtttggtgaggacgtttcaagtgtttacagatgtggcttggtc

SEQ ID NO: 20202 - DNA, 551 bp, Oryza sativa
  unsure (1)..(551): unsure at all n locations
  Clone ID: uC-osflcyp001b06b1
ggttgagaggggggatcgaaaccctagggcggcgagctcggcggcgatggcggcggcggcggcgccggagtcgtacatcgggagcgtgataagcctcacgtcgaagagcgagatccggtacgagggcgtcctctacaccatcaacaccgaggagtccagcatcgggctcaggaacgttcgctcatttggaactgaaggtcgtaagaaggatggtcaacagattccagccagtgacaagatatatgaatacatactatttagaggaagtgatataaaggatttacaagtcaaatcctctccaccagctcagcctactactttacacaacgatccagcgattatccagtcacattatccttgtcctgcctctacgagcttaccgcctcctgcaagcacagcagctgatcctgcctcacacaatggtcagtcaggaattcagatgcctncaccattgccccaatttcaacctggggccagttnaccatcatggaactcatcacctatgccatcatctgcaaatggcgcttctgctagcacaacatcagctgatc

SEQ ID NO: 20203 - DNA, 522 bp, Oryza sativa
  unsure (1)..(522): unsure at all n locations
  Clone ID: uC-osflcyp001b07b1
gtttacacatggggtaagggtgcaaatggaagattgggtcatggtgatattgcagatcgtaagacacctacatttgttgaggctttaagggataggtctgtaaaacgcatcgcttgtggatcaggcttcacagctgcaatttgtcaacataaatcggtgtctgggatggagcagtctcagtgctcatcatgcagacagccatttgggttcacccgaaagaggcacaactgttataactgtggattagtacactgccattcctgcagttcaaaaaaggctctaagagcagcattgtcccctaatcctggaaagccatatcgcgtatgtgattcatgttacctgaaactaagtaaagttttggattctggaatcggtcataacaagaacaatacgcctcgcataccaggtgattccaaggctgataaaatggactcaaagggaaacagagttgcatccgctaatagctcagatatgatcaagaanctggatgtgaaggcagcaaagcagacaaagaagtatgac

SEQ ID NO: 20204 - DNA, 514 bp, Oryza sativa
  Clone ID: uC-osflcyp001b08b1
agggaagccttcagcacagcagccaagaattgggcacattatccaaacatccattttggcctaagccctggccatgagggtggcaagaagctcgtcgacgtcgaccccatcccaactgctccatcttccaagaagatccaaggtttctactcatagattgaggggatcaatctgccgataccgataccgcaaataggaggaagagcatcaagagcacaaaacatatatatactgtgagtaaagaagcaaaggaaaaaagaaaagaaatgctgccaccttacctttgttcatgaccaaaaaacttgtgaagacgtatgtcataagtacatagaagaaatcaactcatatagagtgaaaaaaaacatacaaaaaatcaagctactatagctcatcgatcgactgaaaggctgaataaaccattcgaccataatgttgttacatgtataagtatgtttgaagctagctagcctgctagttctttatttcctcttatgtcttcccatgaaattaattt

SEQ ID NO: 20205 - DNA, 533 bp, Oryza sativa
  Clone ID: uC-osflcyp001b10b1
tcgccctaccactgcatccgggtcggcgtcctcctcctcctcctcctcctggcagaatgcaacgggcaattcaagctatcgggtcacatggcagtctcctcaagtctgctgttctgcgacacatcagtgctccaaaaccatctattttacctgctgtatattcacgctccatgtcagtttcatctgctcaaatagaggagagtggatttgagactgccactgtggcagatattttgaagtctaaggggaagagtgctgatggatcttggctctggtgcactactgatgactctgtctatgatgctgtcaaatctatgacgcaacacaatgttggagctctggtggttgttaaacctggacaggataaatcaattgctggtattgctactgagagagattacctcaggaaaatcatagtgcagggacgatcttccaagtcaactaaagttggagacatcatgactgaagagaaccagctgatcacggtgaagcctgataccagagtcctgcaagcaatgcagctgatgacagag

SEQ ID NO: 20206 - DNA, 548 bp, Oryza sativa
  unsure (1)..(548): unsure at all n locations
  Clone ID: uC-osflcyp001b11b1
tcgcttttctcagatgggcatcctgttgctaaagatttcaaccgcatagtctgcacttgcttcaatggtgcatcatacattgctcaagccggtggattaggttgactatcttcagagggtttaaaggccatgagtgacgttgtcggcttctacaaggaaaatactaaaattattgttgacacatttacatcacttggattcaacgtctacggtgccaagaatgctccatatgtgtgggtgcacttccctggccgtaattcttgggatgtcttcgccgaaatccttgagaaggcacatgtggttactactcctggtagcggatttgggcccggtggtgaaggcttcgcaagggtcagtgcatttgggcacagagagaacattattgaagctgcgagaagactgaagcagctgtacaaatgagcagtgattcggcctttatattctcaacctcttggagagccatatgaaataaaaccaagcagagttcgaagacaaaattactctgtggnctatcagtagatgttagaattgaaaccctatactttata

SEQ ID NO: 20207 - DNA, 425 bp, Oryza sativa
  Clone ID: uC-osflcyp001c02b1
cctgctcccacttcacttggaattcgaaatccacacgagcgcggcggcggcggcggcggcgatggcgagcaccattaacgtggcgtcggccacctcgaggttcctgctggccggcgggaacggcggcagcggcggcggcggggccagccgtgtgagcttcgcggcgaacagggtcgggaggaggatggtggtggtccgcgccgaggaggaggccgcggagccctcgtcgtcgccgccgtccgcggtggaggataagccggctgaggcctaggctgtcgtgtcgaccaaggagcccgccgccgtcaagccgactaccattgtccccaatagaggcaccaaggtgaagatcccaaggtgggagtgctactggatcaacggtactggttccgtcgtcaccgttgatcaggatccccactctcgcttcc

SEQ ID NO: 20208 - DNA, 596 bp, Oryza sativa
  unsure (1)..(596): unsure at all n locations
  Clone ID: uC-osflcyp001c03b1
cggtcgcgtgggcagaaaaccaaacctacccaacatagtgtccgtggactaagaggacttggactgatacctgatattttagcatgtcgcagtactcagccacttgaagaaaatgtgaaagtgaaactcgcacaattttgccacgttccgatctcaaatattgtcaatcttcacgatgttaccaacatctggcacatccctttgttgcttagggaccagaaggctcatgaatctattctgaaagttttagatcttcaatgtgtgggaaaagtgcctcgagcacctaagctgactgaatggactgaaagagccagcaaattcgacaaactgaaaactcctgttaggattgccatggttggaaagtatactggcctatcagactcctacttgtcagttttgaaggctcttctgcatgcatcggttgctttggacagaaaacttgtggtggattgggttccttcctgtgatcttgaagattctgcaaccacagagactcctgatgcatatgaaaaagctggngatctactagagggtgcacatggtgtactagttccaggaggctttggagatagaggggtccagggaacaattcttgg

SEQ ID NO: 20209 - DNA, 578 bp, Oryza sativa
  unsure (1)..(578): unsure at all n locations
  Clone ID: uC-osflcyp001c06b1
acgcgctcgccgttctcctcctcctctcgccttctcccgtcttctccttcgagttagctacctccttattcaaccatgggtaaggagaagacgcacatcaacatcgtggtcattggccacgtcgactccggcaagtcgaccaccacgggccatctgatttacaagcttggaggtatcgacaagcgtgtgatcgagaggttcgagaaggaagccgctgagatgaacaagaggtccttcaagtacgcgtgggtgctcgacaagctcaaggccgagcgtgagagaggtatcaccatcgatattgccctgtggaagttcgagaccaccaagtactactgcactgtcatcgatgcccctggtcaccgtgacttcatcaagaacatgatcacgggtacctcccaggctgactgtgccgtgctcatcattgactccaccactggtggttctgaggctggtatctccaaggatggccagacccgtgagcacgctcttcttgtttcactctnggagtgaagcagatgatctgctgctgcaacaagatggatgccaccactcccaagtactccaagggccgttatgat

SEQ ID NO: 20210 - DNA, 537 bp, Oryza sativa
  Clone ID: uC-osflcyp001c11b1
tgcggctccggtccggagtcggagttccggggcacgcctacgcgtccggctgaaacaaacccctctcactcccactaccatggatccttgcaagttccggccgtcgagctcgttggacacgaagacgacgacgactaacgcgggagctcctgtgtggaacgacaacgaggcgctgacagtggggcccagggggccgatcctcctcgaggactaccacctgatcgagaaggtggcgcacttcgcccgggagcgcatcccggagcgcgtggtccacgcccgcggcgcctccgccaagggcttcttggagtgcacccacgacgtcaccgacatcacctgcgccgacttcctccggtccccgggcgcccagacccccgtcatcgtccgcttctccaccgtcatccacgagcgcggcagcccggagacgatccgcgacccgcgcgggttcgccgtcaagttctacacccgcgagggcaactgggacctcctcggcaacaacttccccgtcttcttcatccgcgacggcatcaagttccccga

SEQ ID NO: 20211 - DNA, 540 bp, Oryza sativa
  Clone ID: uC-osflcyp001d08b1
tcgagctcgccagcagcaaccacggcggcgcttcggatgcacggcggcggagcctccacgacgaccaccgccatcgccgccgcgcgggtagcacatgttgcatgagcagcacgcgccgccgccgcagccggagccggaggtttcgctacagctgtcggcgcccgccaccgccgccgacgatgtcgctgcaggcgacgacgaggaggtcaccgtcgtcaccacgtaccgcgacatccaccctctgacgccgccgtcgccgacgacgacgacgacgccacccacgcggctcgggtccgccgcgtactcgtgggacacggccagcagccaccggtccgtgtcgtccgaggagcagttcatgacgatgagccgggagttcacggccatggtcgccgccgggacgaccatgcagactggccccaacgacggcaacaacggcggtgaccagctcaccagcatcggcgaggacgagctggaggagaccaacccgctggcaattgtgccggacagccacccgatcgccacgccggccaggagcagggc

SEQ ID NO: 20212 - DNA, 547 bp, Oryza sativa
  Clone ID: uC-osflcyp001d11b1
cggacgcgtgggatcagaaataagttcacacagcctaataaacccctcgagaagacaagtgtaatcgccaggggaagcgcgcgagatggacgcagctggcgtcgccgcaaagccgtcgctgtcgaggaagccctcgccgtcgttccgcctccggaacggcagcctgaacgcgctgcggctgcgcagggtgttcgacctgttcgaccgcaacggcgacggcgagatcacgctcgacgagatggcgtccgcgctcgacgcgctcggcctcggcgccgaccgcgcggggctggaggccacggtcgggggctacatccccgcgggcgccgcggggctccgcttcggcgacttcgaggcactccaccgcgcgctcggcgacgcgctcttcggccccgtcgaggaggaggagcccgggaagcaaggggaggacgacgacgagggcgacatgaaggaggcgttccgggtgttcgacgaggacggcgacggctttatctccgccgccgagctgcaggccgtgctcaagaagctcggcctccccgaggcccggaac

SEQ ID NO: 20213 - DNA, 533 bp, Oryza sativa
  Clone ID: uC-osflcyp001e08b1
ggtataacgatgaaaaatctatcaatataaagcaaccatggaatactaacattccttacaattttagcattaatccaatagtgaagaatgcggtttcttgtcatacggagcatgacttgcatggaaataggaagaaccaagcacttattggctttaattttgagtcagtaactaatccatgtgaagcatattgtgggagaagtacttcttcccttgatgagtttgaagtcagatctgcaatggctgtacagtccaatgctcaggcttctaaacagtttgattgttccagcaagcttcttcaatcgaagacaacaagtcatgcttatcttacttccccaggagacatctcagcacaaacaaatcttctagaaaatccttcgggtggggcattctgggagaaatcattagagtacactgctaaatcaatggaaatagctggagataccacttcatcatctgatatgccacttgatatagctattgacaagtgcattatacaagaagttttgctgcaatataaatatgtaagcagc

SEQ ID NO: 20214 - DNA, 519 bp, Oryza sativa
  Clone ID: uC-osflcyp001e12b1
aatgaggcggagctccagttgtttgtatcgatgttgctgctcagctttgctgtgatttcaacaaaggtcaatcaactcggtcaccgattcttttgctggtccctctggttcttggtcttgacaaaattaatccaaggtacattcctttactaaaggagacgttgacatttcctcagagcttggggattttgggtggaaagcctggaacatcaacctacattgctggggtacaggatgacagggcgctctacctagatccccatgaagttcagatggctgttgatattgcagctgataacatataggcagacacttcttcataccactgcatcactgtacgagatttggccctagacctgatagatccgtcattggctattggtttttactgccgtgataaaaatgacttcgatgatttctgttctcgcgccactgagctagtagataatgccaatggagcaccactcttcactgttgtgcagtcagttcaaccgtcattacaaatgtacaatcaggacg

SEQ ID NO: 20215 - DNA, 526 bp, Oryza sativa
  Clone ID: uC-osflcyp001f01b1
gcctccgcttcggagcagcaacagcaggcgagcgacatgggagggtttgtcaagacccagaagacccatgcctacttcaagcgtttccaagtcaagttcaagagacggaggcagggcaagactgactacagggccaggattaggttcaccaaccaagataagaacatgtacaacacaccgaagtaccgctttgttgtgagatttacaaacaaagatatcacagctcaaattgtctatgctaccattgcgggtgatatcgtgatggctgctgcctactcccatgagctgcctcgttatggtcttgaagttggtctcaccaactatgcggcagcttactgcactggcttgcttctggctcgccgtgtgctcacgctccgtggtttggaccaggagtacgagggcaatgttgaggccactggggaggactactatgttgaaccagctgatgaaaggaggcctttccgtgctctcttggatgttggcctcattaggacaaccactggaaaccgtgtctttggtgccctca

SEQ ID NO: 20216 - DNA, 528 bp, Oryza sativa
  Clone ID: uC-osflcyp001f02b1
cggtcgattaaagaatagctgaatgttgtagaggattcggagctgatgtaataatgacatcagaatcatgcagaaatggatctgagcgttgctgtgaggctcttcaaaagctaaacaagcattatgatattgttgtcaatattcaaggagacgagcctcttattgaaccagagataatagatggtgtagttatggcactacagcgagctcctgatgcagtctttagcacagctgtcactgcactgaaacctgaagatgcatctgatacaaatcgagtgaagtgttttttagataaccagggttatgcaatatacttctcaagagggctgattccatttaataaatcaaggaaagtcaatcctgagtttccatatcttcttcatctgggcattgcgggctttgattccaagtttttgaagatctatccagagcttccaccaactccattacagctagaagaggatctcgagcaacttaaagttcttgaaaatggatacaggatgaaagcaatcaaagttgatcatgatg

SEQ ID NO: 20217 - DNA, 554 bp, Oryza sativa
  Clone ID: uC-osflcyp001f03b1
gtccctgtctcccctcttcttcctcctctcctttcccctcctctcttcccccctctcacaagagagagagcgccagactctccccaggattcagccatgaagggggccaaatccaagggcgccgccaagcccgacgccaagttggctgtgaagagtaagggcgcggagaagcccgccgccaagggcaggaaggggaaggccggcaaggaccccaacaagcccaagagggctccctccgctttcttcgtttttatggaggagttccgtaaggagttcaaggagaagaaccccaagaataaatctgtcgctgctgtaggaaaagcagccggtgataggtggaaatccctgaccgaagcggacaaggctccctatgtagccaaggccaacaagctcaaggccgagtacaacaaggccattgctgcctacaacaagggcgagagcactgccaagaaggcacccgccaaggaggaagaggaggacgacgaggaggaatctgacaagtccaagtccgaggtcactgatgaggatgacgacgagggcagcgaagaggatga

SEQ ID NO: 20218 - DNA, 137 bp, Oryza sativa
  Clone ID: uC-osflcyp001f10b1
tatgcggtggtggtggtcttggtggaggaggaagaatttattttgctggacgctcagctcgagctctactggaacaccttcgccgtcattaagtccatggctctcaagtcggcgctagacctccgcatcgccgtact

SEQ ID NO: 20219 - DNA, 513 bp, Oryza sativa
  Clone ID: uC-osflcyp001g03b1
gttttgactttcccaccccaaccataccggaggcggagagcttgacgccgccggcgacgagccgcatcggcggagcaagcgggagcgggaggtggggatggggtcgagcgacggggacaagccgctgcggcggatcgcggcgtcgttcgaggagctcgaggcggtggccaagcagcaggcccccggcccggccatggaggtgggctccttcgcccgcgcctgctccaacgtctccgtcctcttcggctgcctcggcatcgccttcaagttcgccgagatggactacgtcgccaaggttgatgatttgctggaggcatccaagtcaatctcaaaattgcctgagatggttgagttggacattcagaagggcaccgtcaggcaagctgggagccatactaggaatatgctgagggttaagcgtgggattgatatggttaaaattctgtttgagcaaatactggttacagagggcaacttcttaagggatgcagcatctaaggcttatgctcaggt

SEQ ID NO: 20220 - DNA, 534 bp, Oryza sativa
  Clone ID: uC-osflcyp001g04b1
ttccaatttctctctccacatctctctgtgtttcttttatttctcctctgctcgcggcgatggcggcggcgaacggcggcgacagcaaggggttcgaggtgccgaagctggagatcaagttcaccaagctcttcatcaatggccgcttcgtcgacgccgtctccggcaagacattcgaaacccgtgacccgcgcaccggcgaggtcatcgccaagatcgccgaaggagacaaggccgacatcgacctcgccgtgaaggccgccagggaggccttcgaccatggcccctggccaagaatgtccggctttgcgaggggaaggatcctgcacaagttcgcggacctggtggagcagcacgtggaggagctggcggcgctggacacgggtggacgccggcaagctgttcgcgatggggaagctcgtcgacatccccggcggcgcgaacctgctccggtactacgccggcgcggcggacatggtgcacggcgagacgctcaagatggcgccgccatgccacgggtacacgctcaaggag

SEQ ID NO: 20221 - DNA, 557 bp, Oryza sativa
  Clone ID: uC-osflcyp001g05b1
cggttcgcgtgggcggacgcgtgggctctacccttcaagaaacaagaaagataacaccaacaaactagctagctcgccaatggcctcgttgtcctccttccggctctctgtggcagtggcgccattgttggtcgtcggctcgtgcgccactgaggtcaccttcaaggtcggtgagggttctagcggaaaaagtctagagctcgtcaccaacgtcgccatctctgaggtggagatcaaggagaagggcggcaaggactgggtggcactcaaggagtcatcgactaacacctggtcgctcaagagtgaggcggcgctcaagggccccttctccgttcgcttccttgtcaagaacggcggctaccgtgtcgtcgacgacgtcatccccgaaagctttacggccggctctgaatacaagagtggtatcaacgtctaattaatagacatgagtattcttgcattgggttgcatgataattattaacctctaaataattttgtcttgaaagagatcatgctatgcgtgagcaagcatacaattaattttctgggggttatttt

SEQ ID NO: 20222 - DNA, 328 bp, Oryza sativa
  Clone ID: uC-osflcyp001g06b1
ccttgggttgcatcaagatacatcaattagttcagtcagtattactgatgtatgggaacccattgaggaaggccttgtaccattggagatgactcgtcatgtttcaatgatatcaatttccctgtcaccgaaggagcttaacaagagttcagctgggtatcaagctcccttgcatgcagagccaattaagccacaaagataccaacaaacccagcaatatcaacaacaacagcaccagtctaggccaagccaagttcaaacagattcatatgggcgcggccgtggtagaggcagaggaagaggaaggggttggggtggagggggaggc

SEQ ID NO: 20223 - DNA, 551 bp, Oryza sativa
  Clone ID: uC-osflcyp001g09b1
ctctgttcaatagtgattcattctccacgagaaggaagctagtctctgtactacaccatggagaacaacagcaacaaccagccgcctccagggtacccgacggcagcgggagcagctgagcaaggcgggaagaaatcgcggcgaggaagcaccaagtctaggggagacaaaggcttcattgaaggatgtattgctgcgctgtgctgctgctggatctgcgagatgtgctgcgactaagccagcacacatacgattatacgtacatacagagttaatacacagccagtggtatgtacgtgatgcgtgagacgacgctcgatcgctgtgctatatatgtactgtgtgtatgtatcagtgtatgatcattaaaaccagttgtttctcaccgagtttgttttttatccgagggactcgaccatcagaataactgaagaaattactatagctacgtgtgccgtgtgatagacaattttcatgtatactgcgtctggtgttggtacggcttcgtgtgattcattcacttaaatatcaccttttgtgtttactaccac

SEQ ID NO: 20224 - DNA, 556 bp, Oryza sativa
  Clone ID: uC-osflcyp001g11b1
ttcgcgatttccggcttgtcctgcttgatagagaagcaaatataacagaatcaccccttgacaatggggtgcgtgctttactgagaggctgcaccaagctccggaggttcgcattttatgtaagacctggggctctatcagatgttggccttgggtacattggtgaatttagtaagacaatccgttacatgttacttgggaatgttggggagtctgaccaaggactgcttcaactctcaacaggatgcccaagcttgcagaaattggagctgaggggttgtttcttcagtgaacgtgcattggctgttgctgttttacaacttaaatcactgagatacctatgggtgcaaggatacaaggcatctcccaatggcactgatctaatggcaatggtgcgacccttctggaacattgagattattgccccgaatcaagatgaagtttgcccggacggtcaagcacagattcttgcatattactcacttgcaggaatgagatcagattaccctcactcagtaattcccctctatccttcggtttgagtgtatatgtctga

SEQ ID NO: 20225 - DNA, 482 bp, Oryza sativa
  Clone ID: uC-osflcyp001h04b1
cattggcatcgagacggctaccacaccatattgcttgatagagatacttcgtgttcaatcaccgtgcttgttttggcacacgagggaataatgcaagatgccactgtgttgttttttctcatagacctggctggcgttacgagagcctattatttgttagtgagtgagtgaccaataacacgtgaaaaattgctgctatatgtggtgttacccgacatctgtggaaggcaaggaatgttgtggtgttgagcataaaaaacaaaaaaaagaacttaaacaataaaaacagaacaaaaataaaaagattactacagtgaaagaaaacctgaacatgtaagatataacagattgttcataacgaatatatactagtagaattgggggggggccgtttttaagaatccaattttctctgcggcggctttgcaagataaactgttttattgagggccccctatatctattaacatgcccccttttta

SEQ ID NO: 20226 - DNA, 544 bp, Oryza sativa
  Clone ID: uC-osflcyp001h05b1
aacgcaggttgcagattctacttggtcggagtttcagcctccggcgaactgctccgatcgatcgctcgctcgctcgcggggacgcgacgagagtacatcttgatcggacaatttcccgatatttcagagtgcaaggcttgccagcacgaggacaacttgatccgttgcaaccgagccgtcgacttccacaaccgaagaaccagagatggatcttccaaaggagatattcctgaaagaatacaaaaagcctgattacttatttgactcggtcaatttggaatctcaacttggcgaagacaaaacaatagttacatctaaaatagctgtatctacaggaactgaaggtacctgctctccacttactctatatgggcgtgatctgaagctgctatcaatcaaagtcaatggcgaggaccctaagagtgaagattatatggctgattcacgccatttgactgtttcaagaccacctggtggtacattcaactgtgaagatgctacagatatatatcctgagctaaatacatcattggagggactttac

SEQ ID NO: 20227 - DNA, 516 bp, Oryza sativa
  Clone ID: uC-osflcyp001h08b1
gctttttgaagagcgggcgcaaactgtcctactcatcctcaagcaccagttccctggggttcctcagtcatcacttgacatcagcaagatacaatacaacaaggatgttgggtatgccatcttggagagctactccaggactcttgagagcttagcctttgcagttttatctcggatcgaggatgttcttcacgctgatgccattgctagagacccaaagcgcacgaaatcaaggagaaggcccagtctagttgacatccccgagatcattgacaatgcactggaggaagaggagactgtgaacagcatagatgccaattcacaagtgaccaacaactctattcactggcaagagcaagaacacgaggacaaaggcgcgaggctgaggaaagtccaccgcatggtcacaaagaaacttttgcacattgagaaagttgataatttggggggtgggttgaaaagcttttcttataggtagctgtagccctgaaaaatggtcagacagctgcatgcttg

SEQ ID NO: 20228 - DNA, 552 bp, Oryza sativa
  Clone ID: uC-osflM202003a02b1
gtttatcttgaagaagatgaacaaccaaagaagaaagttcgacttggaagcccagcaaatcagtggatatcagtctataatgctaggagacccatgaaacaaagataccattacaatgtagcagatgccagacttcatcaacacatagagaagggaaatgatgatggattgttcattagctcagtggcatcttcagccaatctttgggcccttattatggacgcgggaactgggttcacatcccaagtttatgaactctcaccaatatttcttcataaggattggattatggagcaatgggagaataattactacatcagtgccatagcgggtgcaacaaatggaagttccttggtggtcatgtcaaaaggtttgtctcagctgttcttttgttggaggtctctcatgttactaccattgttattcttcataaaggaccatctatgtttagaaacttggcctgtttctctttccattcacttcgcaggtgtctcaattttttttttgggaagatggttgatatgtcctgatgtagtgatgtgtatatatcga

SEQ ID NO: 20229 - DNA, 559 bp, Oryza sativa
  Clone ID: uC-osflM202003a03b1
ggtatggttggctgcttcctccctcctctctcgcggcctcatcgcgaggccttctgctgcctcctccactggcgactccgctatccttggagcaggctcagcacggggcttcttgcctggatcacttcacagattcagcgctgcaccggccgccgctgccaccgccgcagccactgaggagccgatccagccgccggtggacgtgaagtacaccaagctcctcatcaatggcaacttcgtcgatgcagcatctgggaagacgttcgcgacggtggatccccgcaccggcgatgtcattgcccgcgtggccgagggcgacgcggaggacgtcaaccgcgccgtcgccgccgcccgccgggccttcgacgagggcccgtggccgcggatgaccgcctacgagcggtgcagggtgttgctgcggttcgcggacctgatcgagcagcacgccgatgagatcgcggctttggtccgaccgccggcgccgctctctccagccacatgggtgtcgacaagcttgcattcaccggttcgacgggcacgggcaagatcgtgcttgagc

SEQ ID NO: 20230 - DNA, 354 bp, Oryza sativa
  Clone ID: uC-osflM202003a04b1
ttttatcatgtcacgtcttgttagcaagcagatatggaagtatcccacgttatgggtcggattcccgaagtgtgctatcttgacgaaacctcagtcatatggtgtgctgctgcagttaccagctcctcaacttgaaaatgccttgaataagaatcctgtactgaaggcacctttggatgagcacgccaaccaacctaacgtacgatcaactcttccaaggtctaccttggtagttttgggtcttgctgaagatcaacagcaacctgcacctcaagcacaaagtagccaaaatcaggctgcagaaaccagcagttcagctgcagatactacgacagaagtgacccaggaatcttc

SEQ ID NO: 20231 - DNA, 508 bp, Oryza sativa
  Clone ID: uC-osflM202003a07b1
cttgtaggagccgcgtcctccgcgcgcgagcgcgtgttatcctcaccacccaccgctcgtcgcctccactccgatcgccgccgccgcggcaggggagggggggagggtatcctcaccgccggtgccctcaccgcggcgacccttcaaaatcccccaggacgccgggaggggatcggctccgactccgtccgagcacgcgccaccgccaccgccaccgccattgtgggccctcgatcccggggcggcgcgcgatgtggcgtcacgcggcgcggcggtcgtcggcgcagatccggcggagcggggtcatgtcgtcgtcgtcgtcgccggcggcccccgctgccgcggccggcgccgcggttcccggcccctgcatcgtccacaagcgcggcaccgacatcctccacgacccatggttcaacaaggacacggcgttccccatgacggagcgggatcgccttggcctccgcggcctcctcccgccgcgggtcatgtcgttcgagcagcagta

SEQ ID NO: 20232 - DNA, 554 bp, Oryza sativa
  unsure (1)..(554): unsure at all n locations
  Clone ID: uC-osflM202003a08b1
ttttcgnttttctatagcttcggaggatatggactctctatcttttggtgctagaaggtttcttcgccatttaaccgacctgagttttaagagatctcctgtaacagaattcgaagtgtcaaaggttttggaggaacttggactcacaatggatcagttcattgatttgtgtatccttagtggctgtgactactgcgagaatattagaggttttatcacgttttttcttttttcacacacttaatattagattctaccaatgatatcatattaccatgctgtattcagaatttagaggttgcttcattactttctcatgtcatgggtgctttagacatagcattctccattgctaatgtatctataatagaaatgtggaagtgtgatatcctattcttgagttaaaaacttcaaattatattttctgcaattgcttttatagctcaacgctttgtgcttctgttggctaaatcttgaataaatgccactcaaagttctaagaagattgtagagatatcataatgctggagaattgaatgttgtgtatgctgcat

SEQ ID NO: 20233 - DNA, 472 bp, Oryza sativa
  unsure (1)..(472): unsure at all n locations
  Clone ID: uC-osflM202003a11b1
catcgagttagatctcgagcgccgcagaggagagcagcaatgaggccgtcgctgatgagatccgcctcgcaggtcctccgccgccgccgcggctactcctccgcctccggccagccggagcggaaggtcgccatcctcggcgcggccggcggcatcgggcagccgctctccctcctcatgaagctgaacccgctcgtctcctccctctccctctacgatatcgccggcacccccggcgtcgccgccgacgtctcccacatcaaacgccccggcccaggtgaaggggttcatggnggatgaccagctcggngaggcgttggaggggtcggacatcgtgatcatcccggccggcgtgccgaggaagcccggcatgaccagtgacgacctcttaacatcaacgccggcatcgttaagaacctctgcaccgccattgccaagtactgcccgaatgctttgtcaacatgatcagcaa

SEQ ID NO: 20234 - DNA, 450 bp, Oryza sativa
  Clone ID: uC-osflM202003b03b1
cctatatctactggaccagggcagagcaacttctgccggttatattctagcctgttccagttgactgacgaagtactctgccagagtatcctgtcaaggttgtcaccaagagatatagcatctgttagctctgtgtgtaggcggttgtatctcttgacaagaaatgaagatctttggagaatggtttgtcagaatgcatggggcagtgagactactcgagctcttgagactgtccctgcggcaaaaagattaggctggggtcgattggcaagagagctgaccacactggaagctgttgcttggaggaagtcgacagttgggggtgccgcggagccattctcgatgaacttcagtgcctgtgctgtagggaatcgtgctgctccctttggtggggaaggtgtttacatgccaccaaagaatgacacattttgtgtggatttgaacgccttc

SEQ ID NO: 20235 - DNA, 553 bp, Oryza sativa
  unsure (1)..(553): unsure at all n locations
  Clone ID: uC-osflM202003b04b1
catacttgcagggacacaggtgctcttgtcaagattaaatttctttggatccaaacagacatctaatgctgaaaacatgggactcaaaatgtacagagacactgctgaagccgtcatttgtgggctcctaccagattctccatcagctactgccagtaggactggtgggggattggtgtggataagtggatggaattctctccagcatgccacaaatgcagcattccttgctgttgtttacagtgactacatgctcacatcgcaaacagcagcagtgcaatgcagtggaaagtactacagtcctacagatatacgcaattttgctatatcacaggctaattacatcttgggagacaacccaatgaagcttagctacctggttggatatgggagcagctacccacagcaggtacaccacagaggggcgtcgatccccgctgatgcanagacaggctgcaaaggattccagtatcttcattctacgagcccaaacccaaacgtcgccatgggagccctcgtgggcgggccgttccagaatgacactttcgtcgac

SEQ ID NO: 20236 - DNA, 502 bp, Oryza sativa
  unsure (1)..(502): unsure at all n locations
  Clone ID: uC-osflM202003b05b1
gttcagagtgaggagcaatgggatgtcgccggtggtggccatggcctccaccatcaacagggtcaagactgctaagaagccctacactcctccacgtgaagttcatctccaagtcaagcattcactgccaccccaaaagcgggagattttcgattcgcttcaaccttgggccaaagagaaccttttgaacctcctgaagccagttgagaagtcatggcagccacaggacttcctgccagacccttcttccgatgggttttatgatgaagtaaaagagctgcgggagagggctaaggagatccctgatgactactttgtttgcttagttggagacatggttactgaggaagctcttcctacctatcaaacaatgcttaacacccttgatggtgtccgagatgaaactggcgcaggcccaaccacctgngctgtttggacaagagcatggactgctgaagagaacaggcatggtgatcttcttaataagacatgtaccttactg

SEQ ID NO: 20237 - DNA, 305 bp, Oryza sativa
  unsure (1)..(305): unsure at all n locations
  Clone ID: uC-osflM202003b06b1
ngatcatttttccaccgcctccaagaacagcaaacgcaacttctcccccctcctctcctcgcatttcttcgacctgccattccacacccgcgcgcgcctcaaactctatgtgagggaagggaaacaatcgacttcccagctgagaaaccaagaagcagcagcagcagccatgcgtccgttcttcctcctcctcctcgtcgtgtttgccggcgtcttggccggcggggcgcgcgcggtgcccgcgttggcgggcgagaatctgccggggcagctgttgccgggcgagaagccgccggggcagccgt

SEQ ID NO: 20238 - DNA, 450 bp, Oryza sativa
  Clone ID: uC-osflM202003b07b1
tcgtgttaagttgcgagagagagagagagagagatcagttagtttgttgagtggaagcagatcaggaagatgctggagaagctgtgggacgacgtggtggccggtcctcgaccggagaccggcctcgagaagctccgcaaggccgctacaacccgcccccttgtcatcaacaaagatggcgacggcgaggcgagcggagtggcgtacaagcggacgcagtcgatgccgacgaccccgacgacgccggtgacgccgtcgtcttcgtccccgacgacggcgacgacgacgacgccgcggggcagcaacgtgtggaggagcgtgttccacccggggagcaacctcgccaccaagagcctcggcgccaacctctttgaccgcccccagcccaactcccccaccgtctacgactggctgtacagcgacgagaccaggagcagccatcgctgaact

SEQ ID NO: 20239 - DNA, 531 bp, Oryza sativa
  unsure (1)..(531): unsure at all n locations
  Clone ID: uC-osflM202003b08b1
ctttaggctgcgggcgcggcggcggcggcgggcgacggcgagggcagcatatggggcccggaacctggcgcaaggcctacggcgcgctcaaggactccaccaaggtcggcctcgccaacttcaacagcgagtacaaggatttggatatcgccattgtgaaggcaaccaaccacgtagagtgcccgcccaaggagcgatacctcaggaagatactctttgcgacctcggcgaatcgaccgcgatccgatgttggttactcaatatgtacattggctaggagattatccaagaccaagaactggattgtcgcattaaaaacattgatagtgatacatagattgctcagagaaggtgatgggacatttaaagaagacttcttgaactattcttatagaggaactattntgcagattccacaattcaaggatgattcgagccctttagcttgngattgctctgtttgggtgcgcacatatgcgtcctatctagatgaacgggtcgagtgctttagaattctaaaatatgatgttg

SEQ ID NO: 20240 - DNA, 400 bp, Oryza sativa
  Clone ID: uC-osflM202003b09b1
cgtggtcctggtacactgggcctacatggggagcttcatcacggggacctggcactctggctgctcaccgcacatgatcgactccagcacagccgttcgcgaggctacgctgtacaaggacggagcgaccaagcagcacgctcttctcgtttgcactcttgcagggacctagacgacctgttgctggaggatgcctgatgctaccacttgcacgggctctaaagcccgtaatgacgaaaacgacaagagaagtgtcatgctacctagacaacgtggggtacaatgctgacaagaatggactactacccatctgtgacttcgctggcgacaacacgactgagaggaccaccaaccttgactgggacaatgtccccaacttggttgacgctattgaccagat

SEQ ID NO: 20241 - DNA, 524 bp, Oryza sativa
  unsure (1)..(524): unsure at all n locations
  Clone ID: uC-osflM202003b10b1
ctttatccatcctttctttctttctttgtttcctaggcctaatcttacataaattattcacacggacaaatctagctaagcacaaggtatgccgccggcgccgtcgcaggagcaaactaagctggcgccggagaagcagcagcacatctccggccatggcgagcaagccgtccggtaccatggatggaaggtcatgccgtacgtcatagggaacgagacatgcgaaaggctggggacgatcggcacgacggcgaacctgctggtgtacctcaccaccgtcttccacatgcccagcgccgccgccgccaccctcctcaacgtcttctccggtacctccaacctcgcccctctcctcggcgccttcctctgcgacgcctacctcggccgctacgccaccctcgccgncgcctccatcgcctccttcctcggcatgcttgtgcttaccctcaccgncgccatcccatctcttccacccccaccttgtgcctcctcctcgtccacgtcgtgccaaggccccacgcacc

SEQ ID NO: 20242 - DNA, 501 bp, Oryza sativa
  Clone ID: uC-osflM202003c01b1
atttttcattatttttaggtcagtgtattgcttaactggcccctcgtcggcacagtggttggcagtgctctcagtctcaccttcacctaccatgcgtcacttgctgcagtcgtcggagcacctgaccgccgcgacggcgacggcggcggcgtcgggcggccggggcgtccacacggacacgttcctcatcctcgccgccgtgctctgcttcctgctctgcgtcgtcgggctggcgctggtggcgcggtgctcgcggctgtgcaacccgtcgtcgttcgccgtcgaggcggaggaggcaatgcccccggcgccatgcaaggggctcaagaggaaggcgctgctgtcgctgccgaccgtgtcgttcgccgaggcggcggcggcggaggaggaggaggagcggccggagtgcgccatctgcctcgccgagttcgcgcgcggcgacgaggtccgcgtgcttccgccgtgcggccacggcttccacgccgcctgcgtcgacgtctg

SEQ ID NO: 20243 - DNA, 549 bp, Oryza sativa
  Clone ID: uC-osflM202003c02b1
ctttgccattgcccctctcgtcaacgacctcgtcgcgcccgaggcacccaattcgcgccggccatggcggtggcgacgctgtcgtcgaggtcgaggcgcgcgtgcgcggaggcggcgtccgtgctcctcgtcctcctcgtcatcgcgccgtcggtggcagccgggggcgacaccaacggcgtgtacgagccgtgcgcggacgcggcggtgcagcgcggggacgggttcaccttcggcgtggccttcgcggcgcgcggcgacttcttctccggcggcgtgcagctctccccctgcgacggaaggctgtcgctggcgtccaagggcgccaagctcgcggtgttccgccccgaggtcgacgagatttcgctcctcaccgtcaacacctccgccgccggtggcttcgacccggcaacttctggtggctacatggtagcttttgctgggaggaaatatgcagcaagatcacctccggttttcgtcagtaacagctcatacaccgtgaccagctttaccctgtgtttgagttcacaaaggcacacttcagaacct

SEQ ID NO: 20244 - DNA, 510 bp, Oryza sativa
  Clone ID: uC-osflM202003c03b1
atcttacttcacatcggaagccaagccccaggaaagaggaacgcacgagcagcatatgtcacagagggccagcgtcccacactcctcctccatagccttcgccctccattcccatctcctcgtctccagtgagatgtgccccagctcctattggcagcaataggaatagaaaagattgctcctttcttttgagctttcttgcaattttggtcttctttccttttgatttggtttctttccgtccgatttgtgaagaggaggagcaatggggttcaagggatttgtggagggtggcatcgcgtccatcgtcgctgggtgctcgacgcacccgctcgatttgattaaggtgaggatgcagctgcagggggaggcgtcggcggcggcggcggcggtcgcgccggcgcaggcggcgctgcggccggcgctggcgttccacgcggtgcaggccgtggcgatcccgcatgacgtgattgcgccgccgaggaagcccgggccgatagccgtcggcgc

SEQ ID NO: 20245 - DNA, 573 bp, Oryza sativa
  unsure (1)..(573): unsure at all n locations
  Clone ID: uC-osflM202003c05b1
acttgctttacttcgtcttcctcctcctcctcgcgctagctcgatcgatcgcccgccatgtcgtccaagaagatcgtgatcaaggtggacttcgtccgggccaagtgcaaggccgtcgccatgaccgtggtggccaagatcccaggggtgaagtcgctggcggcggacgatgagaaggggacgatgacggtggtgggggaggtggacgtggtgcaggtggtgggcgagctccgcaaggccaagttcgcggcggaggtcgtcagcgtcgagccggagaagaagcccgaggcgcccaagaagcccgacgaccctcccaagaagcccgacccgccgccgccctgcccaccgccgccgccgccgtgctgccccggctgcaactcctgccgccccgcctgccagtgcgccgccgcccccggcggcggcgtcgtcctctacgaggtggaggccgatggctacggctgcatcaatcgctgatttttttttctccttctctgattaattaattaattactactactcgaccattgggaccattntctctttttttctttttgaaattaaattaagattaag

SEQ ID NO: 20246 - DNA, 420 bp, Oryza sativa
  Clone ID: uC-osflM202003c06b1
cttcgccttttacaactctctctctctctctccaaccactgcgtcgtctcgcatcggtcggtgtcgcgaccacccggtcgccgccggtggaggtttcgggtcggccacctgactaagccgcggccacgcaggtcgccggcgccggtgcgcgcggcagggatggcgccgacggtggggatcaagcggtcggcggcggcggtggcgacgcagaccatcagcgtgccgccgcccgacgcgcggttcgcggtgcgggaggccgtgcgggccaccatcgcgtcgccgccggtcgaggcgccccccgccgccgccgggaaggcggcggcgccggcgcccgcggtggaggggttcctgtgcctggaggaggtggacgggaggcggtggagctacgtggtggatgggggacaggggaaagggaaggga

SEQ ID NO: 20247 - DNA, 256 bp, Oryza sativa
  Clone ID: uC-osflM202003c07b1
tttcggtttattgagaggtgtatcacgatagtgcactgatatggttcagggaaagtagctcttccatatggatccaaggttgcatacatgtatattttcattctattacattcattgcagtcaggtacaaaggtggaatagggctgccaaaagcttgattttgtttatttgtcaggcgacataactatgaaaatgtaacagacacatgattgtgtaaattgcctccggaaatatgatacaaattgtctttttgagt

SEQ ID NO: 20248 - DNA, 534 bp, Oryza sativa
  Clone ID: uC-osflM202003c08b1
cttatcagttcagttctaccacgtacaacagcagaagtgagagagggagaagaagacacgggacgaggaggagcttagctagccagccatggcgaggcgctctccttgcctcgccgtcgccatgctcctgcttggggcgttggcggtggcgagcgccttcattgatgaagcggcggctgctggccgggggctcggccatggcgcccgcttcatgagcaagcagggtcgtgtgacatacgagaagctgccggagccggagccgaagccaaagccaaagcctcatcctaaacccacgccaaaacctgagcccaagccagagccggagccaaaaccagtacctgagcctgagcctaaaccggaaccaaagccagaaccaaaacctgagcctaagcctgaacctaaaccatacccagagccaaaaccggagccgaagccagagccaaaacctgagccggagcctaaacctgagcctaagccagaaccaaaaccagaaccaaagccgtacccagagccgaagccagagccaaaaccgga

SEQ ID NO: 20249 - DNA, 490 bp, Oryza sativa
  Clone ID: uC-osflM202003c09b1
tttatttttttttttacgtaataccatccattttttttattgtcgacgaatttatcagatatgctctagatacatatcttgtgtgtatatagccggagctttgttttcacatatcctcacccaacgataattgtagtactcttacaataaaaccggtcggagagggagggaagagattattacatatgtgttaagagcagaggccattgagatggtacataaccaaactgtaaaataaaaatatatagcatattatatattgatatatcatcaacatagcccaaaacaaagctgcatactattattataggcagcaatccaccagcgcgatgcttgatcttagcttagttgccaccagactcctcgcaacctgtgggcttgtaggcgatgaagctaatcaactgcacctgcctgacgttgtcgaagccgatgatacggacaaaggcatcagggtaggccttcttggcctcctcgagctccttgagcacct

SEQ ID NO: 20250 - DNA, 518 bp, Oryza sativa
  Clone ID: uC-osflM202003c10b1
tttcgtttgttgaatgcagtagtcaaagtttgcttctgtttgtttgagtggattctcatttaccttgccttttccaccatatactcatatgggctttgtttcacaagtgataacattggttaatggctatatgctatccttacagtttcattcttcttttaagatatgagtcaccatgcacatttcttcaacttctgattttgtctaatattgcagacacctaagagaacttgacctgcaagagaacgagattgaggattgttctattcattggctcagcctcttcccggaatcgttcacttctctagtaactctaaacttttcatgcttagagggggaggtcaatatcactgtacttgaacggttagtgaccagatgtcacaacctgaagactcttaagctcaacaatgctatcccccttgacaagcttgctagcctccttcataaggctcctcagctagttgaactcggaactggcaaattctctgctgattaccattccgatctgtttgcaaagc

SEQ ID NO: 20251 - DNA, 553 bp, Oryza sativa
  Clone ID: uC-osflM202003d01b1
gtctcctttcctgccaaaccagtctcccccaaatctcctttgcgtcctctcgattcctcagcaaccatgtcggcctactgcggcaagtacaaggacgagctcatcaagaacgctgcctacattggcactcctggcaagggtatccttgctgcagatgagtccactggcaccattggcaagcgctttgccagcatcaatgtcgagaacgttgaggagaaccgccgctctctccgcgagctgctcttcaccacccctggtgccctccagcacctaagtggtgtgatcctcttcgaggagaccctgtaccagaagaccaaggacggcaagcccttcgtcgatgtcctcaaggagggtggtgtcctccctggcatcaaggctgacaagggtaccgttgaggttgccggcaccaacaaagagaccaccacccagggccacgatgatcttggcaagcgttgcgccaagtactacgaggccggtgcccgcttcgccaagtggcgtgccgtcctcaagattggccccaacgagccatcgcagctttccattgacctgaatg

SEQ ID NO: 20252 - DNA, 546 bp, Oryza sativa
  Clone ID: uC-osflM202003d02b1
tgttgagtttccatcgctatcttctaagaagtgtaatggcaatgttgcatcatcatattcaagaatatgggattatagtgctgaaaccacatcagtcagacaatgctatggcgataaaatcccatcattgtctcaccattggcactaccgagataagatccccttgcattctggtcagtggtgccatgatgctgaggcacgcccattgtcgaactaccagcaaggtgcttcttatgggaatggtcgtttaagagataatatttccaggggtggtaggaatgagcaagtcaacattatctcaagcagacgtactatgacaaaacctagggtggctaacaaggttgtaagcagcaccgatcactacaagattaataaggataacctatggagaaattctgaggatatacgggatcaagttcgtggcccccgggcaaataaattaaataattcttcaacatcatctatcaagaataatgccatccctcctttggtctgtagagatcaaattaatagaccagagttcacagttcagtatgagcatgcaaa

SEQ ID NO: 20253 - DNA, 524 bp, Oryza sativa
  unsure (1)..(524): unsure at all n locations
  Clone ID: uC-osflM202003d09b1
ctgtggtccttgcaggtcttttatcatcactaaaggtggttggtggaaccctggctgaacacacttatttgttccttggtgctggtgaggctggaactggtattgcagaactcattgctcttgagatttcaaaacagacaaaggctccaattgaggagtgccgcaagaaggtttggctgctggattcaaaggggttgatcgttaactcacgaaaagaatccctccaggcatttaaaaagccttgggcacatgagcatgaacctgtaacgacactgttagatgctgtccagtccatcaaacctactgtgctgattggaacatccggagttggcaaaacttttactaaagaagttattgaggccatggcttcctttaacgagcgacccgtcattttctctctgtcaaaccccacatcacactctgagtgtactgctgaagaagcatataattggagccagngtcgtgcagtatttgccagcggcagtccgtttgaccctgtggagtacaatggaaagatacatgtg

SEQ ID NO: 20254 - DNA, 284 bp, Oryza sativa
  Clone ID: uC-osflM202003d11b1
ggtccggtttaccttggacgacccacgctttcggttctatccaaaccaataccccgcacgggcactttttactatgatgctctgcctcaccaccgccttctactacctatacataccttacacctacaagttgaatccgatccccctactccaccttcggttaccctccttctactgctaccgacgagccgagcgcctctgcgctcgccgtcttcgacgccgaggccgacgagcctgtcgaggtggaggaggcgcccccccgaggacggtgcggatgaggtggt

SEQ ID NO: 20255 - DNA, 458 bp, Oryza sativa
  Clone ID: uC-osflM202003d12b1
ttctcgtttttcatgaactaacggaaccgaagacggtggctctaattcctctccatagaagcactcaaacgcagacagctgtgctttgacaataaaaccaaggcaagagatggattcatctgatgaatacaaacctgatggaaagccgatcgagaaaaccgaagcagaactccaagcttctgtagaggcaatgtatgttgacgacatccctgctccaaaggatggcctgtatggagcatttatctatagcacacaccctcacgctcacataaaagatataaaactgagatcatcattggcttaacacaatgccatcacagagatcactagcaaggacattcctaccgctggagaaaatattgcatcatgctacccaatgctgggagatgaaacgcttctcgttcatcctgtttctgaattcgaccgccagaatattgatgttgcgattgttgaaacac

SEQ ID NO: 20256 - DNA, 486 bp, Oryza sativa
  Clone ID: uC-osflM202003e02b1
aaagaacgtccgattgtgtctccgacaggaggcgcgtctcctccctcctcatctccatgtccataaacacagcaggctcacgcacacgcctccgacccggaggaaggaaggaaggaaggcaaggaagccaagcccgcgaccccgacctacccccaccaattcaaccctccctcctcagatccaccaccaccgagcgcccgcgatgacggccaagggcggcgccgcgccgtcgccgggcggcgcgggcggcctcccgaacggccgcttcttcaccgtggggctcgtcaccgcctggtactcctccaacatcggcgtcctcctcctcaacaagtaccttcttagcaactacggcttcaagtacccaatcttcctcaccatgtgccacatgttcgcctgcgccctcctctcctacgccggcatcgcctggctccgcgtcgaccccatgcagctcgtccgctcccgcgtccagcttggcaagatcgccgc

SEQ ID NO: 20257 - DNA, 512 bp, Oryza sativa
  Clone ID: uC-osflM202003e03b1
cctatcttttctccgccaccatcagcaagaagcagctcaagaaggatgcgaggaaggcggagaaggccgagaaggcgtcgcagcgccagcagcagcagcagccgcaggccgacgccgacgaccccttcgcggccaactacggcgacgtccccgtcgaggagatccagtccaagaccatctccggccgcgtgtggaccgagatcggcggcctcgacgaggccgccgccggccgctccgtcctcatccgcggcgccgcgcaggcgatccggcccgtcagcaagaagatggccttcgttgtgctgcgcgagagcatgagcaccgtccagtgcgtgctcgtcgccagcgccgacgcaggggtcagcacccagatggtgcgcttcgccacctccctcagcaaggaatcaatcgtcgacgtcgagggcgtcgtctccctccccaggagcccctcaggccaccacgcagcaggtggagattcaggtgaggaagatctattgcatcaatagggcgatccc

SEQ ID NO: 20258 - DNA, 565 bp, Oryza sativa
  unsure (1)..(565): unsure at all n locations
  Clone ID: uC-osflM202003e04b1
cttctcaatcagcagccgcagaataacaattccaccaagcattcatatggctcgacaagcaggacttctagcattccggggacagggcatgggggttaccagcaagatggtacttatgattcctacaacaaccaaagcttccaatggaatcagtactccaagacaacacctgcagctggtacaaatgcatacggtacccaggccttggagaaaccgaaaaggaaacatgaagagagctacagttacaactattctgctactggcaattcatatggccatgagagaactaattcaaggcgtggccggttttcaaagaggagaaggcatagtaatgatggttacactactatggattttggtggagataacagagaaactgtagctgccagcacagaaacaactgctttcactgacgtggcagtggcacaagtcaatggcacttcaggggaaaagttgagatctgcagtgagtggaagaagagcaaacgttttgagagagatttctcagattgatacacnggctctacttattgagaaagccaaggctgccatccaggaaaaattac

SEQ ID NO: 20259 - DNA, 505 bp, Oryza sativa
  Clone ID: uC-osflM202003e06b1
ctttctctatcaccggcggagataaggcgcggcctcttccatgggcggcggcgggcgagctcccgtttccccacctgcttccccggcgccgacgaatacgacgacgccgatggcgacgggtttgaggatgccaccggtgcagcgattgggtgccagctgcgcgggagcagggcggcggcggcgcgctgggccccagggcgcaagcggccgtgactggcggcggaggcacgcgggagcagggcgtcggcggcgcgcggggccacagggcgcaagcggcggcggcgtctaggagggcgtcggcgcgcggggccatagggtggaagcggcgccgaggaggagggcatcgacggcgatgggccttctccgtggcggcgaggatctcctccgtcttcgacgcgcgccttgtcttgagcccaggggcaaatggctcggtatggcgaggagtggccctgtgactctaccccctaccccctaatcgtactacttcggacagagcatggcggca

SEQ ID NO: 20260 - DNA, 456 bp, Oryza sativa
  Clone ID: uC-osflM202003e08b1
gatacttcttcagtatcgaatcctctgttctccttgtgcccaccaccaccaccgtagcaatggcgggcaacgggccgatcaacaaggaggacccgctcaactggggcgcgtcggcggccgagatggccggcagccacctcgacgaggtgaagcgcatggtggcgcagatccgcgagccgctggtcaagatccagggcgccaccctccgcgtcggccaggtggccgccgtcgtccaggccaaggacgccgccggcgtcgccgtcgagctcgacgaggaggcccgcccccgcgtcaaggccagcagcgagtggatcctcaactgcatcgcccacggcggcgacatctacggcgtcaccaccggctttggtggcaccttccaccggcgtaccaaggacggccccgccctccaagtcgagctcctcaggcatcttaacgccggaatcttcgggactggct

SEQ ID NO: 20261 - DNA, 532 bp, Oryza sativa
  Clone ID: uC-osflM202003e10b1
ttctctttttttgtcatcagattcaagcatcagttcattttatagttcagactcaccctcactgtcaccttcaactagctcgccaacatcacttggtctttcgcccgcttcatctaatttttcccacactttggtgccatcatctaggtccccccttcaccaatcatctaacgaggaaccttcaaaatctggcctggggtcaatacgctctccctccaagacctcttctatagcagaaagaagaggagggttttcatctctgaagttaccatcattccaaaaggatctagtattaccaccaagggtaccgaccagccttcgcagagaagaggaagtcacagataagagtaataataatagtgtaaaacagcttactggtgtgtgctgcccagagaaatgcactggcaatacttcaacagtgcacactaaaactggaataactgagcgtactgacagtatctccaaggcttgcgggaaattacaactattagtctaccgttggcccagcaaggaaaagctaacctacttcact

SEQ ID NO: 20262 - DNA, 549 bp, Oryza sativa
  Clone ID: uC-osflM202003e11b1
tatcgctagtataagaaagctctaagaggtgcgaaggttgaggtgacgcatagaggaaacatgcgtacaaaatatcgtatatctggactcacttcacaggcaacaagggagatatcattccctgtcgatgatcgcggtactgtgaagactgcggtgcaatattttctggagacatatggttttagtattcagcacaccactttgccttgccttcaagtgggcaatcagcaaaggcccaattatctgcctatggaggtttgtaagatcgctgagggacagcgctactcgaagcggcttaacgagaaacagattactgcgctattgaaagtgacttgccagcgacctcaagagcgggaactggatattctgcggactgtatctcacaatgcataccatgaagatcagtatgcgcaggaatttggcataaaaattgatgagcgtcttgcaatctgtgaagctcgtgttctgccctcccaaggcttaaatcccatgatagtgggagagaaaaggatgtacttgccgagagttggccattggaacatgatgaat

SEQ ID NO: 20263 - DNA, 166 bp, Oryza sativa
  Clone ID: uC-osflM202003e12b1
ttctcaatctgcgaagcgagagagagagagagagagctcgaggcgagctctccccgcccttctcccaaaccctaatccttccgccgcgcggaggagagccgcgtctcgggcgcgcgcgtggaggcgtgaagcgatctgtattggtggaggggaggggaggggatgg

SEQ ID NO: 20264 - DNA, 473 bp, Oryza sativa
  Clone ID: uC-osflM202003f01b1
gttctatcttcggcatctctctggtgaaccccaagttcttccacatgaacgtgttcaagagtaagaacatcaccatcaaggacgtgaccatcaccgcgccgggggacagcccgaacacggacggcatccacatgggcgactcctccaagatcagcatcattgacacggtcatcggcaccggcgatgattgcatctccatcggccccggcaccgagggcgtcaacatctccggcgtcacctgcggtcctggccacggcatcagcgtcggtagcctgggcaggtacaaggacgagaaggatgtgacggatgttaccgtcaagaactgcgtgctcaagaagtccaccaatggcgtccggatcaagtcctatgaggacgccgcctcggtgctcaccgcctccaagtttacctacgagaacatcaagatggaggacgttgctaaccccatcatcatcgacatgaagtactgccccaac

SEQ ID NO: 20265 - DNA, 378 bp, Oryza sativa
  Clone ID: uC-osflM202003f02b1
cctatcttatcccaccaccaccacccatggcggccaccacccacgccgcctccctctccttcctcctctctcacccccaccccacctgccccaaccctaaccctaaccctaacctccccctccgccgcgccccccaccgcgtccgctgcgccaccgacgccgccgccaccaggcaccggcgcgcggccgacgagaacatccgggaggaggcggcgaggcaccgcgccccgaaccacaacttctccgcgtggtacgcgcccttcccgcccgcccccaacggcgaccccgacgagcgctactccctggacgagatcggttaccgctccagctggggcggcctcctagacgtgcgccacgacatggacgcgctcgcccgtt

SEQ ID NO: 20266 - DNA, 539 bp, Oryza sativa
  unsure (1)..(539): unsure at all n locations
  Clone ID: uC-osflM202003f03b1
ctttgctctatgccgcggccaccctgatgcagccggccaagctcggcggccgggcctcctccgccgcgctgccatcgcgcccgtcttcgcacgtcgccagggcgttcggcgtcgacaccggtgccgccggcaggatcacgtgctccctgcagtccgacatccgggaggtcgccaacaagtgcgccgatgccgccaagctcgccggcttcgccctcgccacctcagctctgctcgtctcgggcgccagcgcggagggcgtgccgaggaggcttaccttcgacgagattcagagtaagacgtacatggaggtgaagggaaccggcacggcgaaccagtgcccgacggtggagggcggcgtcgactccttcgccttcaaggccggcaagtacaacatgaagaagttctgcctggagccgacgtccttcaccgttaaggcggagggcgtggccaagaacgcgccacccgagttccagaagaccaagctcatgacccgcctgacctacacnctcgacgagatcgagggcccgctcgaggtcagc

SEQ ID NO: 20267 - DNA, 535 bp, Oryza sativa
  Clone ID: uC-osflM202003f04b1
cctctccttgctctccctcaccctcgactccgcgctcctccgcatcgcccacctccacgacctctcccgcctccccgaccacctcctcatcgacctcttccgtgtagagaactatagctgccggtaagctgacagaaaaagtcctgaagttgtttctggcaacggattgcgaggaaatcgccttgcttgttcagttgctcaacattaagcagccgcttgtaccggtccttcccacgaggtgctctgagaagttctagaagtgacactgattaggtcagtcttggttacctgagaaaagatgtctttggaaattcaggacagtgaggtcgacattgtgattgcagcactccagcccaacctgactactttctttgaggcatggaggccatttttctctcggttccacatcattgttgtcaaagatccagatatggctgaggagcttcaaatccctacaggttttgatctcaggtttatacgaagtcagatatgggagtgcttggagccacatccatcgacttctctggtcactcat

SEQ ID NO: 20268 - DNA, 549 bp, Oryza sativa
  Clone ID: uC-osflM202003f05b1
cataatcttctccccccctctcctctcctctccacccgtcggtgacccgagcccccccaccgcctcacgccgccgccgccgccgccgcggggagttccattccaccgggtcgccttccggccgtctcctgcagagaggttcatgaggggctcgaggatgaatccaggtgaccgtagaacgcggagcacgatgtccatcgtaattgtgatgagtttgtgctgcttcttttatatactaggagcttggcagaaaagtgggaccggaaggggggatagtattgcattgagggtgacaaaagagaccgactgtacaatcttgccaaacttgcactttgagacccatcatagcttaggtggtgttaatcctttggtcatgaccgataaagtctttgagccatgccatattcgatacagtgactatactccttgtcaggatcagaaccgagcaatgaactttcctagagaaaatatgaactaccgagagaggcattgcctacagagactaagacactgcgctgtctaatccagacccaaggctatgcaccccttt

SEQ ID NO: 20269 - DNA, 381 bp, Oryza sativa
  Clone ID: uC-osflM202003f07b1
ttctcggatatagaattagctgccatcaagatcaaccctgctgatgttgaaattatcgctcacgagcttgagttggacaagaagatcgcagagagtacacttcggcagcacataggcgatgctgtagctgcaagaccggatcttgcttggctgattcttacacattttgcaagatctatacaccatatgaagcagctgtagttaggtgttgcttggtgatgagaggaatttctgtatccacaatgaaacgatcatatttggcatctatgtagaactttttttccatgatgttgcaaactggtctcttgtggttttttgcaaaacttggttcactgaggagtttattggcggttatccaaaaaaaaaaaaaaaagggcggcc

SEQ ID NO: 20270 - DNA, 240 bp, Oryza sativa
  Clone ID: uC-osflM202003f08b1
gctacccctcctccgtaaccaccgcctcctcccatggccatcgcgtgcttgtccctcccattcctcgccgccaccgccgccgccgcgccgaaaccctagggcggcagcgtagggttcccctcccccccccctcctccgccccgatgacgccggtgcaggcgggggcggcgcccgcgtcgccgtcggcggcggcggcgctcgggttcctcctcccgacctgctgggagatcgaggtcacct

SEQ ID NO: 20271 - DNA, 486 bp, Oryza sativa
  Clone ID: uC-osflM202003f09b1
catcaggctagggtcctacgagggagccaatgagataaaaggacatccctttttccgtggtataaattggcctcttatacgcgccacggcgcctccaaagttggagatcccactattttccaaggatgacatggagaagaagggactagtaacaaataaccgcacggatatgttctgaagaccctgatgatgatcttcaataaaagagagggacatatattgttgcttgctttgcgtgcgtaggccaagattaagattatgtcatgtaaatatgtaatgtatcgtacagaccttgttgtgtttgaacctagtatgcgatccatcatcttaataagatgcaatgcagcgcaatgtgtgccagtgaacagtaatgagcttgacttgagtttatagtagtctagtatagtgagtagaggaaaaaaagagtcaattgtattgacggtacgtaaacttgtcaagtgggtgcaattaagtatacgaacttgt

SEQ ID NO: 20272 - DNA, 469 bp, Oryza sativa
  Clone ID: uC-osflM202003f10b1
tcggtttatgtctctctttcagcctctgggtcacacacacatactccccatggcagctgcaggggaagtggtgatgcttggtggcattctcctccctctcctcctggttgtcgccgtctccggtgagccgccgccgatcagccggaggagcttccccgaggggttcatcttcgggacggcctcgccgtcgtatcagtatgagggtggcgccagagaggggggcagaggaccaagcatctgggacacattcacacaccagcacccagataagattgctgacaaaagcaatggggacgtggctgcagactcctaccatctatacaaggaagatgtgcgcatcatgaaggatatgggagtggatgcatataggttctccatctcatggacaagaattcttccaaatggaagactgagctgtggcatcaacagagaaggcatcagctactacaacaatctgatcaatgaacta

SEQ ID NO: 20273 - DNA, 562 bp, Oryza sativa
  Clone ID: uC-osflM202003f12b1
tcgttttttcttctcttcttccatcttcgtcatgttttacctcctcctcctcgttatattagctctcgcatatcagatcggagaagaaggcgatggcgtccaactacgtcgacaccaccggcgacgagggcaggttccacggccaccacagcaccaacaccacgccgacgggcgccgcggcgtcgtcgccgaggacgatgcgccggagcttctccaacgcctcctccggcagccacggcggcggcggcggcgccaagtgcgtgtgcgcgccggcgacgcacgccgggtcgttcaagtgccgcctccaccgcaccaactcccagggccacggccacggccacccgcacccctcccctcccacctccccggccgccgccggcgcctccgccgcgccccggccgtcctccgcctcctcccgcaccgtcgaggcccagtgacccctgacctccccggccgcaccaagaaaccaaccaaccaagaagaggaggagaatcagagtgggggagaagagagtaaaaaagagcatcgcgtattcatatcatcagaagggagtttgttttga

SEQ ID NO: 20274 - DNA, 320 bp, Oryza sativa
  Clone ID: uC-osflM202003g01b1
tttcgcgtctttcccttgacctcctccttctcctcctcccctctccgccgcctcgccctcaagccctcctcctcccgcgccgccgccgccgccgccatgtcgtccgcccccgccaccgccatcgccgcgccggtcgagcacatcgtgctcatcaaggtccgccccgaggcggcggcgtcgggcgccgccgcggcgatggtgtcctcgctgcaggcgctgtccagcgtggtgcccgggctggcgtacatccacgtcgggcccgtgctccggcttcggtcgccggcggcggaagcgctggggccgacccacgtgctccactt

SEQ ID NO: 20275 - DNA, 455 bp, Oryza sativa
  Clone ID: uC-osflM202003g02b1
gttgtcccaatcatgaaacgaccaactataacagactatcaaagtgcagaatctgagcaactaatgaagcgattgaggccaagtggacatggtgttgatgaggccacctatcctgcaccaattccccaacctttatggtcagtggaggatcttcccaggacagtagcttgtacattgtcacagggatctagtgtaaccagcatggattttcatccaactcggcatacactattactagttggatctaccaatggtgaaattacactttgggaggttggtatgcgtgagagactgttttcaaagcccttcaaaatttgggacattcaagcttgttcaccacaatttcagagtgtggctaaagagtcttccatatccattaaccgggttacctggagtcctgatggagacttgataggtgtcgcatttgcaaaacatttgattcatctgcatgcata

SEQ ID NO: 20276 - DNA, 417 bp, Oryza sativa
  Clone ID: uC-osflM202003g03b1
ctttccggctttccgccggcgcccaggggtgtcccccagatcaccgtgtgcttcgacattgacgcgaacggcatcctgaacgtctcggcggaggacaagaccaccgggcagaagaacaagatcaccatcaccaacgacaagggccgtctgagcaaggaggatatcgagaagatggtgcaggaggcggagaagtacaaggcggaggacgaggagcacaagaagaaggtcgacgccaagaactcgctcgagaactacgcctacaacatgcggaacaccatcaaggacgacaagatcgcgtccaagctgccggaggccgacaagaagaagatcgaggacgccatcgacggtgccatcagctggctcgacagcaaccagctcgccgaggccgaggagttcgaggacaagatgaaggagctg

SEQ ID NO: 20277 - DNA, 546 bp, Oryza sativa
  unsure (1)..(546): unsure at all n locations
  Clone ID: uC-osflM202003g04b1
ctttgccttattaagggagaagagatttcctgcgaattcttcgaggaattctgttccaaatcgagtatgaaattcgggaaggatttcaggagccacctggaggagacgctgccggcgtggagggacaagtatctggcgtacaagtccctcaagaagctaatcaagaacctgccccccgatggagatccccctcccgtcgccgcggcggcggaggtgcctgcgggagatggggatggggatgggggcatcgccctggggaactggttcgccagggtcctcgacatggagctccagaagctcaacgacttctacatcgagagggaggagtggtacgtcatccgcctccaggtgctcaaagaaagaattgaacgtgtcaaagctaagaagaatggggcttttacatctaagagcgaattcactgaagagatgttagagatacgcaaagcttttgtcatcatccatggggagatgattcttctgcaaacctatagctccctaaattntgccggacttgtgaagatacttgaaaaatatgacaggagaaca

SEQ ID NO: 20278 - DNA, 538 bp, Oryza sativa
  Clone ID: uC-osflM202003g06b1
gttctcgtttagtcggagtccgtggagagcgtcgtcgtcatcgacgtcgccgccgacgcaaacgccgaggttgccaaggaggaggacgccgtggtgaagaagccccaagaggaggtcggcggcctccggctgctgaaaagcccggacttctggctctattttttcagctacatgttcagtggcaccctcggcttggtcttcctcaacaacctcggtcagatcgccgagtcgcgaggaatcgggcagacttccactctggtctcgctctcgtcttcgtttggattcttcggccgtcttctcccggcgttcatggactactactccgcgaaaagtggctactccatatcgaggacggggtccatggcgtcgctgatggcgcccatggcgggggccttcttcctgctgctcaaccagcgggacttcttcctgtacctggccacggcggtgatcgggacgtgcacgggcgccatcacgtcggtggcggtgtcggcgacgcgcgagctgttcggcaccaagaacttcggcgtcaaccacaacg

SEQ ID NO: 20279 - DNA, 243 bp, Oryza sativa
  Clone ID: uC-osflM202003g09b1
cttcttcctccctccggcggtccccgaggtcgtgtcgcctggcctcgccgagccgccgcaccgccccagacccggcccgcctccggccatccccgccgacagatccggtcacggacggcatccacatgggctactcctccaggagcgcaggattagtcccggaggaggaggcgcagcgaggtggtggtagcgtccttcgcgagcacgagggcgtcaacatctccggcgtcacctgcggacctg

SEQ ID NO: 20280 - DNA, 499 bp, Oryza sativa
  Clone ID: uC-osflM202003h04b1
atttagtttagggagagaggttctgccaccgctgttttggagggaaggaaaatcctaagaaggggaaagagtttagcttggcaggtggttctcaggctcaatggctttgagcaagagaatgctattcatcttccaggccatggtttgcctctgctccttcagtttatcccaaggcaaccagcaattcagcttaaggaatctccctaccctccagaaggcgagcagcttcccagcgatgcgccacgagacatacgactacattgtcgtcggcgggggcaccgccggttgccccctggcggcgacattgtcgctcaagtacaaggtgctcctgctggagaggggagggtctccgtatggcaaccgcaacgtctcctacatggagaacttccacattggcctgagcaatatggcgccggactcggcgtctcaggccttcatctccactgacggcgtcatcaatgcccgagcgagggtgtttggaggtggcacctgcatcaat

SEQ ID NO: 20281 - DNA, 527 bp, Oryza sativa
  Clone ID: uC-osflM202003h05b1
gtggactggctcggctcgctcactcggtcagctgcacacacactgcacttcggctcactctctccactgttcttcttcctcggcgaggggggaaggaggaggcgagagctcgaggcggctaggaggaggagatggagggagattcggcgaggaggctcgcattgctggggctgtgcctgggcctgcttctgctggcgccctcccatctggcctcggccgctgcggtggaggatggcttgctcagcaatggtgactttgagacagcaccagctggtggttttgtcaaatctgcttcagttgctgaaggtgcatcatcgatccctggctggacgatcaatgggacagtcgagctcatctcagcaggccagcaccagggtggcatgattcttattgctccacagggggatcatgctgtacgtcttggaaacgacgcaagtatagggcaggtggtgcaggttgagaagggctcagagtatgctatcacgttcagtgctgcccgaacgtgtgcacagctagagtcactcaat

SEQ ID NO: 20282 - DNA, 487 bp, Oryza sativa
  unsure (1)..(487): unsure at all n locations
  Clone ID: uC-osflM202003h06b1
catactcatcatcgtgtagttttaggccatctgagggcctttgaatggctctcggcctccttcatttttcatagcatttgtgtagtgtgtgcaaatccatcatcgcatcttcatatctgaagaaatgaaggtgaccactcagctcaagcccatggcctcctcgtcgacgtcgccgtcgccgtcgcggctgccgcggagcgcgagcggcaaggcgcccacctcgccgccgtccagctccaacgcctcgcgccgccaccaccagcagccgccgcgggcctcggcgtcgacgcccgccaccccggcgccgtcgcgccaccacctcaggtcgctgtccatcagctgcatgacgatcaggaccgacgacgactcgccgccgncggccgccacccacaaggaccaggcggcgacggccaagccgctgtcctactactcgtcgatgctgtcgccgaggaagctcatgcagcgcgcgtcccgcgcgttccgccgc

SEQ ID NO: 20283 - DNA, 207 bp, Oryza sativa
  Clone ID: uC-osflM202003h09b1
atttggtattgatacatgagacactccggaacatactgctgtggttgtttatgcattgagtcctgaagcaatgcttcagatgacagatactaatggatgtcatgttgcacaacggtgcttgacgaaattgttacctgagtgtaaagcgttccttcttgatgttggcggattgggttcttttagattacccaaagaccaacatggctg

SEQ ID NO: 20284 - DNA, 472 bp, Oryza sativa
  Clone ID: uC-osflM202005a03b1
gtttctttcaccacggcttccagctctggccgtagcagcagcagcgcgcgcgcgggtgcctgtgcccgccgctgctcacggctcctcgccgccggcttgtgcctccgatacggggtgcgagggggtctggaaaccggcggatctcggccgctcgccgccggagtccggcacgggtggaggagtacggcgacccgcttttttcttagcgattttctttcctcttctctcaggctgagctccccaagcgccgtgaattggtaggacttttgtgggaggcgctggtttctgctctactcacagcaagtttctaaagactcggaagcaattgattgtgaagtattcctttcagttcggcttgaagtagtcctcttagaccattgccgcatataagagtagcttattaccttgtataggaaaaagtagaaagcttattccgagcatgtcttgttcataatagactggactctttgat

SEQ ID NO: 20285 - DNA, 283 bp, Oryza sativa
  unsure (1)..(283): unsure at all n locations
  Clone ID: uC-osflM202005a04b1
gttgtgttaggccttggggttttctatctctttgcatcgttttcgctctcatttgtttagagatttgttctttgaacaaagcatgcagaaatctctgaggactgaagtgtttctctctgcttgtcactttctccccaattgtggaataactaacaggaatcgacatggggtctatgctcacattccacatgatatgcatcttgcccatgaatcttncaagaaaatctggatctcttacttcctttctttttctttaggtcttggcttgcaaactaggataaag

SEQ ID NO: 20286 - DNA, 379 bp, Oryza sativa
  unsure (1)..(379): unsure at all n locations
  Clone ID: uC-osflM202005a06b1
ctcgccatatctcgcggccaacgagagagggagagggagtgctaggaccaccgccactgcctcgggaagtaggtggctcccctgctttccctcctctcctccgccgtcgccgaggcagccagccaagtcgtcccagcaggtggtaggctactagtccgggtggccggcagtgagcaggaggaatcatctctggcgttcttgtctccgaggaactttgattctttctgggaggggatttggggtgctgctgctgctccagatgcttcccaccaacaggaacaggccccagcagaggcctgccagatnctggtatttcatctcaggtctgtctgcttccttccatctcaccctatcttactgataaccttgcctctttctc

SEQ ID NO: 20287 - DNA, 242 bp, Oryza sativa
  Clone ID: uC-osflM202005a07b1
tcgctatttccgtccccttgccctcccacactttcgccgagtgtccgagacgcagccgccgccgccgccgccgcgcacccatcgcctcctcctcacatcgcacccccgagcagccgaatcctccgtcgcgcggccgcccttcctccccgctctccgccgttgccgtgccgcaagggccggcggaccttttcgaatgggagggttgctggttaccaatggagccttggcctggctttggtggt

SEQ ID NO: 20288 - DNA, 300 bp, Oryza sativa
  Clone ID: uC-osflM202005a08b1
tcgctcgaatcgaaaccgccattggagggagctgctgccgtttcttggtttcatttcttgggagttcaattggagagcgcgcttgaggtgtttgttgttgttgcgccatgcaccataccagggctggcgccgccgatggcgccggcggcggaggagaggacatcgtggaggccggggcggaggcgccgccgccgcagagggagcggctggtgccgcacagcgggccactgagcaagaggtccgggatgaggaagagcgcgaggttcgcggagtcggtgtcggcgccgctgtccgcgccgt

SEQ ID NO: 20289 - DNA, 440 bp, Oryza sativa
  Clone ID: uC-osflM202005a10b1
tcgcttctcgacgacgatggagatgggcgcgtgacggggaaagacgcgctcaagttcttcgccatgtcgaatctctcccgccccgagctgaagcaggtctgggcaatcgctgattccaagcgtcagggttatcttggattctcggagtttatgaccgcaatgcagctggtttctcttgcacaagctgggaatgagattagtcaggacacccttgcacatgcagatttggagacgttgctacctccgacaatggaaggtctggacaaaaaactaaaaaataattctatgagcaagagcaactctgatattgtcgtacgtcatccgtcagaattgcctgcatcagccaactggtttaactccaagtcagggaaagaagattcctttaagatcagttacttcgatcatcgatgggttaaagaaatcttacattgagaagttga

SEQ ID NO: 20290 - DNA, 529 bp, Oryza sativa
  Clone ID: uC-osflM202005b03b1
tttttctttgtcttcctctcgccgctgattcgattcgatccgatccgatccaaggggaggggaagcaatggcgacgaagaggagcgtggggacgctgggggaggcggatctgagggggaagaaggtgttcgtgcgggccgacctcaacgtgccgctcgacgacgcccagaagatcaccgacgacacccgcatccgtgcgtccgtgcccactgtcaagttcctcctcgagaagggcgccaaggtcatcctcgccagccatctgggccgtccgaagggtgtcacccccaagtacagcttgaagcctcttgttccacgcttgtctgagctacttggagtcgatgttgtgatggccaatgattgcattggtgaggaagttgagaaattggctgctgctttgccggaaggtggtgttctactcctagagaatgttagattgtatcgggagaagaaaagaatgatcctgagtttgccaagaagcttgcaactgtcgctgacctctatgtaaatgatgcttttggcactgcacaca

SEQ ID NO: 20291 - DNA, 469 bp, Oryza sativa
  Clone ID: uC-osflM202005b04b1
gtcgtcgtctgtttgccgctgccagccccgcgttatccccctccgttgtccactcatcctcctccacaacagctcgtctgacttccgtgttgtcgtccatctgccgccgctgccgtcatcatcatcgtccgtccgccaccaccgtcgtcatcatcgtcgtcctgtggagctcacgacccacctgcagagctccgcctcgagtgcgcccgcagcggtggccgcgtgtgcccacagctgtggcagaggacgacgatgatgatggcagcggcggcagatgactccaggcaagttgcggtggaggcggcaggcggacgatggtgcggcagacgcggggcaggctgtgacgaaggacgacgatgacaacggcggaggacaatggcagcagccggacggacgacggcgcggctgatgatgaccgtggcggctgacagaccacgtcgcggaagtcagaccagcagttgtggatgag

SEQ ID NO: 20292 - DNA, 316 bp, Oryza sativa
  unsure (1)..(316): unsure at all n locations
  Clone ID: uC-osflM202005b06b1
cttttactgggagtggtgaagcatggtggaggatgcaagacggtgcggtgctcgagaggcgggcgcgaggtgatgtccggatgaggtcggcatcgggtgggaagaggacggtggggtttggagttgcactaaatcaaaaccgcatttcatcaatggtatagggagctccgtttcagatttggggaagcacagaacttgtccatgtttgaggatggcaccgttgtgtcaaagtccgaggaggctggatttacttactgttaaagatgatgagaggccctctgtgatttacctgtangatcatgtgagaatacaccaa

SEQ ID NO: 20293 - DNA, 445 bp, Oryza sativa
  Clone ID: uC-osflM202005b07b1
gtggatttgtgatggggtcgaacgagcagatccaccgggacaagctcatcatcgacacggatcccggcatcgatgatagcatgacaatccttatggcgttcagagctccaactgtggagatcatagggctcacaaccatatttggcaacaccaccacaaagaatgcgactcagaatgcgctcttgctgtgtgagagagcaggacatcctgaggttccagtagcagagggcagcgcagagcctctcaagggaggagagccacgtgttgctgactttgttcatgggtctgatggcctggggaatttgtttcttcctgcacccactagtaagaaggttgatgaaaatgctgctgagttcatggttaataaggtctctcaatttcctggagaagtttctatactcgcattgggacccctgacaacgtggcgctggccatcaaaagggac

SEQ ID NO: 20294 - DNA, 526 bp, Oryza sativa
  Clone ID: uC-osflM202005b09b1
tcgcttcgcttccgccgctgcagccgatacgggagattggatcggaagcttctagaagtttccgtgggcgatggcgatccgcgcgaggtcctcctcctacgccgccgcggcggtcgcgctggcgctcgcgctggcgtccgtcgccgctgtcgccggcgaggtcttcttccaggagaagttcgaagatggatgggaaagtcggtgggtcaagtcagaatggaagaaggatgagaacatggctggtgaatggaaccacacatctgggaagtggaatggagatcctgaggacaaaggtatccaaacctctgaggactacaggttctacgctatttcagcggagtacccagaattcagcaacaaggataaaaccctggtgctgcagttctctgtaaagcatgagcaaaagcttgactgtggtggtggatatgtcaagttgcttggtggtgatgttgaccagaagaaatttggtggggacacaccgtacagcattatgttttgaccagacatctgtgggtacaagcaccag

SEQ ID NO: 20295 - DNA, 501 bp, Oryza sativa
  Clone ID: uC-osflM202005b10b1
atcaaataagttgcggagtctatcgtctgaagggtttgttcagcttttatcggctatatttaggatagtacaggtacatctagtgcaagcagctgaagttaaaagaatagttgaatggatcatgggaaacctcgaggggagcttaagttctgatgcttcaaattctgtacaaaagcacagtggctcggtttctgatttttcccaagaaaatgaccacggtgtcacttcacgggtgtctaatactcttaccaggagtaattctaagtttcccttctttcaaggaaaaacgaatgacatgtccagtacaaattcaataaagaatgtccgagctgatgtcttgagagaaaacacagaagctgtttttgctgcatgtgatgctgcccatggacgatgggctaaacttcttggtgttcgtgctgcccttcaccccaaattaagacttcaggagttcttgatcatctataatgtaacagaagaatttgtagctgccactgaaaaaga

SEQ ID NO: 20296 - DNA, 316 bp, Oryza sativa
  Clone ID: uC-osflM202005b12b1
ttcgtttcactcaaccaacacaccactgaaaagcaagattttgttgaagaaataagcatcttgccatgatcgcagcaagggctgcaaacctgcaggtggccatgaaggccctggcgctggccgtgctggccctcgcctacgccgcggcgacagcgcgcgccgagcagtgcggcaggcaggccggcggcgcccggtgccccaacaggctctgctgcagcaggtgggggtggtgcggcctcaccgacgactactgcaagggcggctgccagagccagtgccgcgtcttccgcgacggcggaccagttcgagcgcatgc

SEQ ID NO: 20297 - DNA, 519 bp, Oryza sativa
  unsure (1)..(519): unsure at all n locations
  Clone ID: uC-osflM202005c01b1
gttggtttcccaagatcggaggagcctaggagagatgagcgtcgtgcagatagggaccgcgagaagtctcgtgaaaggccacgggaaagagatcgtgatgagagaactcgtgaacgatcccatgaccgtactcgcgagcgtgattcaaaagaagatagacaccaccatagggatcgggacaggactcgggacagggaacgaggaagggaccgggagagagatcatggtcgtgaccgtgaccgtgagcgtgatcgtcgtgatagagatagggacagggatcgtggtcgggattatgagagagaccgtgaccgtggtcatgatcgccatcgtgagagaggcagggaccgtgagagagattacgagcgtgcaagtcatgaacgggaccgtggtcacatgcatgagagagatgctgaatttgcaacggtgagccaaaacatgatcaggaatatggctataactatgaagcacacaaaagccatgatgcttatgagacngagcgctcaaagcgacatgagcatg

SEQ ID NO: 20298 - DNA, 534 bp, Oryza sativa
  Clone ID: uC-osflM202005c02b1
tttggctttctactccgacgcggaggagaaccccaaccgcctcttctccagcaccatctacgaggtcggcgaccagcgctactggcgcgactgcctccgcctcgcctgcggcttccccgtcgccgacgacaccaacacccactggcccgacaagccccaccatctccgggatgtcacggagaagttcttcgtggcgacgaggggattggggatcgagctgctgcggctgctgtgcgaggggatggggctcaggccggactacttcgagcgcgacctcaccgccggcgatgtcatcatcaacgtcaaccactaccctccatgcccggatccgagcctgacgctgggcttgccgccgcactgcgaccgcaacctcatcaccctgctcctccagggcgacgtcttcggcctccaggtctcctacaatggcgactggatcaacgtcgaccccgtccccgacgccttcgtcgtcaactttggccacctcctcgagattgcgacgaacggagtgctgaagagcatcgagcacagggcgat

SEQ ID NO: 20299 - DNA, 460 bp, Oryza sativa
  Clone ID: uC-osflM202005c04b1
atccaacgtggcatttccacatacagctgttgattgtttatccctatgtataagccagcctccgcgtcgctctcacgcgggtggctcggggcgaaaccctagccgcccgcgccgccaccttccccacccgctctagccgccctcgccgccgccggagcccgccgccggaaaccgcgcggccggccaggaaggcggcggcggggaaaaccagccggcgacgatcctccccctcggcgtgggaggtggagtggcgagcgtcaggcggaagacggcgtccgaagaggtccacagggcgaatccggccacgccggaggcggattcggccccctcggcggctgatctggcctccccgtggccggatcgggagctggcgactccggtggcggcggaactcgcgggcggtgcgtcgactggcagaagaggctgacgtcatcgccagcacgtctctgaccggcggagc

SEQ ID NO: 20300 - DNA, 516 bp, Oryza sativa
  unsure (1)..(516): unsure at all n locations
  Clone ID: uC-osflM202005c05b1
gtaatccctcctaactgtgatagatatacctagctaggctgatctccatcatctgatcaaagaggggcggtgtagaaagggagggagaagatgttccgcactggagccaagaacatgagcagcgatctcccggttgaaggtgtggtgagggtgaggaaggtggaaaagatccangcttacaacctcgtcaccaagccatcagcgaccacaagcaggatatcgccgataacaggtcaggccgaaagcatggccgtcaccgttgttcgggttggagctgcggctggaaaaccagacgacatcgttccagtggctagaatgaacaactaagttatgatcggagaaatagacggtgtacgtcatcgtctagtggctatacataacaactaattagcacgcatgggttactagggaaaatgtgagtttctacttggattactagggatgatggtataggctctgcatatgtcatgtgtaaccggccagtcatctaccactgtgcgctagatgcatgaacgt

SEQ ID NO: 20301 - DNA, 503 bp, Oryza sativa
  Clone ID: uC-osflM202005c06b1
atggaagtccggagttggaagcgatcgatggcggctactacgacgggacgagttgttgcactcggcgcggtggccgtggtggtggcgctgacattcctcgccggcggcgcggacgccgactgctacgacttctgcttcaaggactgcatggccagggagaacaacatggtcgactactgcagctacgcctgcgacaagacgtgccagccggacaagcccacgctgtactcgtcgtcgtcgtcgtcccgcctcgccggcgacatggagtgccaactctcctgcgccttgggctcctgccaccgcctccttccggacggcaagggcgccgtggaggcctgcttcgggcagtgctacgacggctgcaagaccacggcggcggccagactgccgaggcctctccgcgccggccactacgtgctctctagtccccctgatgacgtagaccatgatccggaccaccgctacgtgttctctagcccccatgatgacgtagaccatgatcc

SEQ ID NO: 20302 - DNA, 505 bp, Oryza sativa
  Clone ID: uC-osflM202005c07b1
cccacgcgtccgccgtcctcgccttcgccttcgcctttgtagcaccacctccatctccacctcctccgtgcagctgagacccaaccaaaagctgcttccttttcttcttcttgggattgggatccccccccctcccttcctcggctccgtttcttgccatggccgaaatggcagtcaccgccgccctccggccctgctccggcgtctcgccggcggtgtccgggaccagccaccgccgccgccgccccgccgcgtggcgggctctcgcgccgccgccgccgcacgctgggctgaggctgtcctctcctgctgtcagggttcctagagctgcttcctctgcggctgtcgagcaggatgggagctctagcaacactgacacagttcctaccccgaaagttataatagatcaagactcagatccggatgcgaccattgtagagataactgtgggtgaccgtctcggtggatctcttgataccatgaatgccctgaagatttagggcta

SEQ ID NO: 20303 - DNA, 487 bp, Oryza sativa
  Clone ID: uC-osflM202005c10b1
tttcgattcgcttcgtttcgttctcgctgttgatttgttcgtgagatttgaattctagcaatggctcctctcggtgacggagcggcggcggcggcggcggcggagcccaacctggtggtgtcgttcggggagatgctgatcgacttcgtccccgacgtcgccggcgtctcgctggccgagtccggcggcttcgtcaaggctcccggcggcgcccccgccaacgtcgcctgcgccatctccaagctcggtggctcctccgccttcgtcggcaagtttggtgatgatgagttcgggcacatgctggtggacatcctgaagaagaacggggtgaacgcggaggggtgcctgttcgacgagcacgcgcgcacggcgctggcgttcgtgaccttgaaaagcaacggcgagcgcgagttcatgttctaccggaacccgagcgccgacatgctcctgacggaggcggagctcaacctggacctgatccggcgcg

SEQ ID NO: 20304 - DNA, 492 bp, Oryza sativa
  Clone ID: uC-osflM202005c11b1
atagaagtctagcagtagtcgttcctccctgatgtacgaagctcccctcggctacagcattgaggacctccgacctgccggcggcatcaagaagttccgctctgctgcttactccaactgcgcgaggaagccctcttgatagcccccttggctaccttgacctagtagtttagttactcctctgaattctcgttttgggctttcttacatctctctggctagctgcttcccagtgaccgggaaggtcatcagtcctgcttcctttcttcctcatctctggcatcgtccttcgaaacaatggcagtcctgtcagttgctgactctccaccggtctcggcgatcgggtttgagggatatgagaaacgcctcgagatcactttctccgaggcgcctgtctttgctgaccccaatggcagggggttgcgtgcactgtcacgtgctcagattgactctgttcttgatctggcgaggtgcaccattgtgtctgagctc

SEQ ID NO: 20305 - DNA, 523 bp, Oryza sativa
  Clone ID: uC-osflM202005d01b1
gtcgttttagatgacgctggagggcgcgctgaagctgctgggcgtcgccgagggcgcatccttcgacgacatcatgcgcgccaagaacgccgtcctcgcatcctgcaaggacgaccaggacgccgtcgcgcaggttgaggctgcctatgacatgctgcttatgcagagcttatcacagcgaagggctggcaaggttgttgataacagcatccgctatgctgacgtcaaacctgtaaaaagtgcaggttcaggcacagtaccacagtggatgcaagcaaccatgaagaacgcacccgtgacatttgaggctccatcttcgagcagcttgggtatccaatcatgcgtttatggtgcactgatggttttcacttatgctagtggaagcgctacatctttaccatcaacatacactagccctgatgtgcctggatttatcttagcaacaggatttggtgcttcattggatttcctgaccaagaaaatatgaacttaggtaaagcggcattgattactggtgggggtc

SEQ ID NO: 20306 - DNA, 506 bp, Oryza sativa
  Clone ID: uC-osflM202005d02b1
ctaacattctacttgtactaggtagatcgctagaacaatggcgtccggtggcgaggagaagaagagcaggatcctggtggtgggcggcacggggtacatcggccggcacgtcgtcttggccagcgcgcggctgggtcatcccaccaccgccctcgtcagggacctctccccctccgaccccgccaagtcgcagcttctccagagcttccgcgacgccggcgtcaccctcctccacggcgacctctacgaccacgccagcctgctcagcgccgtccgcgacgccgacgtcgtcatctccacgctgggcgcgctgcagatcgccgaccagaccaagctcatcgccgccatcaaggagggcggcggtggcaacgtgcggaggttcctgccgtcggagttcgggctggacccggaccacacgggcgcggtggagccggccaggtccatcttcaccgggaaggccgccgtgcggcgcgccgtggaggctgcgggagtgccgtacacgtacg

SEQ ID NO: 20307 - DNA, 406 bp, Oryza sativa
  Clone ID: uC-osflM202005d04b1
gtagcctaccggaggcctcgccttcccccgccgcggcggcgccggcagccgacgcggcaatgtgggcctgcacaagcttgaagaacctgaagagtaggttcttctccctgagctggagggtggtgtccttgaagatggcctgcctcgagtccggcaccgggtagagatcgccgtcccagtagaggagggttcccccctccacgctcttgaactccacatggtggcttccccctgacctgaggaggaggtcgacggcctcgtcggcgcagtagagcagcctggggcccaccaggtcggcggtgaagcgcctggacggctcgggcaccgcccccgaggtctccacctccgagtacgggctgcggcggcggagatcgacggcggcggcggaggagggggaaggggaggg

SEQ ID NO: 20308 - DNA, 531 bp, Oryza sativa
  Clone ID: uC-osflM202005d05b1
gtgagacggtcgccctcccagtccagtacagtgactcactctcactccagactcctccctctctctctcgtctctctcctgccggcggcgccgtggcggcgagcggcggagcactaggggaggagggggctcgcgctcgtctgtcgctgggtgtgtcgggggcgccgcggatcactctgcctcgagctgcgcgctcgcattccgctccttcgatctgggttcatctgttctgagatggctggcgacattacgtgtggatccttgctgcagaaactgcagttgatatgggatgaagtcggtgagagcgacgaggaccgcgacaaggtcctgtaccagttagatcaggagtgcctggatgtttacaagaggaaagttgaccaggccaccgactctagggatctccttatccaggcgctggatgactcgaagattgagctggcccagactttatctgctctaggagagaaggccatagcaggaactcctgagaagacgtctgggacactcaagcaacaacttgctgctatagcg

SEQ ID NO: 20309 - DNA, 530 bp, Oryza sativa
  Clone ID: uC-osflM202005d06b1
tttatccctagaatccactgcgacgagcagctgaggaagaggaggaggaggaggaggcgttctcctgggaggggaccccgtcccgcccgtttccgccatggcggcggcggcggcttcgtcctcctcctcgccgtgggcggggcggatggcggcggcgttcggggcgccgctcctgtggctcgtctgcctgatctacttcatccagggtttcaggtcttttgtctggacagctgtctcgtaccaaatgaaggacatgatgaaactgtcaccatcaacatcacagtttttggtctcagttgcatatttcccttggagtataaagcctgtatatgggattttgtcagactgtattcccatcaagcagaggaagcgtacgccctatttgatcatttctagctgtctatctctatttccgtggctaatccttgggatgtcagaacctttgaggagctcaagcaattttcttactggtttgctgatagtacagaacttgggatctgccatggcagatgttgttatagatgcaatga

SEQ ID NO: 20310 - DNA, 489 bp, Oryza sativa
  Clone ID: uC-osflM202005d07b1
gtgggcgctggtgctgtacgaggtgggcgaccgcgacgacgccatcgcggagatggaggacgcgtcggtggcgctgcggggttacccggagatccacgcggcgctggcggcggcgctctacgccgacaagcacgcggcgctgctcgccgagaaccagttcgccatcgccacgctgctggacccgcactacaccgacctcgcctacgtcagggacaccaagcactggccccccagcctcgtcgactcgctccgccacttcatcaccctctcctgatcattgcttgatcaattgagctttgatttgattaattaatcaagctatagctgttcgtaatccacaccacaatttgatggactcttatcgtatggttttggggttcatctaaattatgtatctatacgtgaaattgttcatgtctgaacgatttttgaacattggattagtggtatgtataatgggcaggaaatgaattactagagaggagaatc

SEQ ID NO: 20311 - DNA, 534 bp, Oryza sativa
  Clone ID: uC-osflM202005d08b1
tcgctcaggccgacgcctacgagtatatggtcgagtactccaccatcaacaagcaggctggaaggttggagaatgtggttggctggtatcactcacaccctggttatggatgctggttatcaggcattgatgtgtctactcagatgcttaatcagcaatttcaagagccattcttggctgttgtgatagaccctacaaggactgtttctgctggtaaagtggaaattggagcttttaggacatatccaaaagattacaagccaccagatgaacctgtgtcagagtatcagacgataccactcaacaagatagaagattttggtgtccactgcaaacagtactatgctctggatataacttatttcaaatcatccctggattctcatctccttgatctactttggaataagtactgggtcaatacgttatcttcatcacctctcctgggcaacagggattatgttgctggccagatatttgatttagctgataaactagagcaagctgagggtcaactggcacacagtcgatatg

SEQ ID NO: 20312 - DNA, 530 bp, Oryza sativa
  Clone ID: uC-osflM202005d09b1
tcgttataatggctcccgccaccaccgcagcaatggccctcgcgccgcctccttcccatcaccatcaccatcaccatgtcaagcagctgcagctccctccgtctgtctccgtctccgtgcccctccgctccggtttccttggccgcgcactgcctgctgctgcccacccacagccgctgctcgccgccgagagccgccgcagcagcgccgtgtccgtgcggatgtcgtgggacgggcccctctcctcggtccgcctcattatgcagggccgcaacgtcaagctgaatgagaaggtgaaggagcacatcgaggagaaggcggggagagcagtggcgaagcacagccagcttgtgaaggaggtggacgtgcgcctctccgcccgcggtggcgagctcagccgaggtcccaagatttgcaggtgcgagatcactctcttcaccaagcgccacggcgtcatccgcgccgaggaggacgccgagtccacctacgccagcatcgacctcgccttctccatcatcaagaggaagctc

SEQ ID NO: 20313 - DNA, 511 bp, Oryza sativa
  Clone ID: uC-osflM202005d10b1
cttcttcttcttctttcgaggagaggaaggaggcagccgcgcgcgcgcggaggcgggcaacctctcctcgactcctctcccccaccgtttcgtcgtccccgcgtgagaggaaggggaggaggcggagatggcgggggaggagcggccggagcggatcgtggtgtcggtgcggctgcggccggtgaacgcgcgcgaggcggagcgcggcgacggctccgactgggagtgcgccggcccgaccacgctcacgttccgcggcgccgtccccgagcgcgccatgttccccgcctcctacagctacgacagggtgttcagccatgagtgcggcacgaggcaggtgtacgacgaaggcgccaggcaggtcgccatgtcagtgctcagtggaatcaacgcgagcatattcgcgtacgggcagacgagcagcggcaagacctacaccatggttggcatcacggagtacagcatgtcggacatctacgactacatcgagaagcatcctgagagagagttc

SEQ ID NO: 20314 - DNA, 435 bp, Oryza sativa
  unsure (1)..(435): unsure at all n locations
  Clone ID: uC-osflM202005d11b1
actagcagcaggcgaagctgggcatcgccatccagttcctcgacaccacctacatcagtggcttctgtcagctcagcaaggatctgaacaagatctgcacgctccatgccaactgctgtgttggcctcggcgccaagatgcacgacctccgaggcgtcctcgacgtctggaggaactacacggcggcgccgcccgacgagcggcgctcgggcaagttccagtggaagctccccggcatctgcatccactgatcgatcgatcgatcatatgttcatatgcatatacacgcagcgttcagcattgctggattgccttggctgcttggttaatttagctaggcgatcgctcgactgcaggccggttatcaaaaagtaaattctgaaattagaaaaaaaaaagatttcaattatgaataaaatttataaataactaana

SEQ ID NO: 20315 - DNA, 394 bp, Oryza sativa
  Clone ID: uC-osflM202005d12b1
ttttcgtttcgcacgcagtaaacagtgacagggctagcacagacacaaacgcacgcgcatacacccaccctcaccgcacaaggaaggaaacaagccgaagaatccacaggattctctctttctctctcttctttccccattttgctcttgccgacggccacgccgttgctgctccgtcgatggtagcctctgctgctacgagggcgctgggatctggacatctgatacggaggattgcgggatggaggccagcaccagactggccgccatctcccacaaccggaacgagctcgatgtgatacgtctggacggagagcccgggccgaagccggtgaagcatactaatgggcaagcgtgccagatttgcagcgaccacgtcggccttacccccgac

SEQ ID NO: 20316 - DNA, 476 bp, Oryza sativa
  Clone ID: uC-osflM202005e02b1
ccatcaacatcaccacagcgggtaggccgagagcgcaaatggcgtccctggcgcagcacgtcgcggggctggcgagcccgccgctctccggcgcgccgcggcgccgccccgcggcgcccacgcggccgtcggcgctggtgtgcgggacgtacgcgctcaccaaggaggagcgggagcgggagcggatgtgccagctgttcgacgaggcctccgagcgctgccgcaccgcgcccatggagggcgtctccttctcgcccgaggacctcgactccgccgtcgagtccaccgacatcgacaccgatatcggctcactcattaaaggaacagtgttcatgaccacttcaaatggtgcatatgttgatatccaatcgaagtctactgctttcttgcctttggatgaggcatgccttctcgatgtcaaccatataagagaggcagggaaccgtgcaggtttggtagaagagttcatgattatt

SEQ ID NO: 20317 - DNA, 511 bp, Oryza sativa
  Clone ID: uC-osflM202005e03b1
cttagcccgtcttcgccccccatcgcatcgcctcccgcaccatcaagattccggggccggagtcatgcccccagcgcagcaggtggaccctccgccccatggccgcatcgcctccccccagcgctgcagtcgcccctcccgctctgccctgcgacgtcgcaccctagcgccgcaggtgcctcacacccccagcagccgcctcccagcctcttcgcctccttggcttgtatggagaaagggaaccatcgttgggcgcacgctgaaacggaaaccgttcgatccccgagtcccatctattcatcttcagttttttgaaacagtacgtcgccgcttgctttatactggccttctttcccgtcctatttatgtatgatgatacacacaacagctgaagaaaagtggtacacagcagctggatcaatctgctcggccagctagtagcttctcctccatacaagcacatccttggattgatctgctctaggttggccactgcttgccgatctcacat

SEQ ID NO: 20318 - DNA, 528 bp, Oryza sativa
  Clone ID: uC-osflM202005e05b1
cttcgttatcgcgcgggcggcggcggcggcggtgaggggttgacgataccgagcgccgaggggttcctccacgccgcgagctgcctcccgtgcacggcggaggaggagcgggacctcgtcgtcgcgctcaccagggaggccgaggagaatgtcaaggacggcgatctccgctacctcgtctcccacagctggtggcttaactggcaaagctatgtgggcttaatcaaacctgatgagaatgatgctgacatgcttcctcaagctccaagtagaccaggagagatagataactcaaagctagtttcagaggaaagcagcagtattggtgatgagccagagcttcaaagaaccctgagggaaggagatgactacgctttggtgccccaggaagtatggaggaagctacatgaatggtacaaaggtggaccagaactctcaagaagagtaatttgtagtagtccaacttccagaagttacattgtggatgtctatcccctccgtctgaaattatttgatggaagagacagc

SEQ ID NO: 20319 - DNA, 481 bp, Oryza sativa
  unsure (1)..(481): unsure at all n locations
  Clone ID: uC-osflM202005e07b1
ttctaattaagtactaataaataactcgataatattcacagatgtattgcatggcatttaaatgaaaaatgagattttatgagaccttgagaccacaatacctgtgttatgtgccacaaccgtagtatgtagggttttctgcaattttgacatgagaatatgggttttcttaaccttactcttctttgtatggatgactgaacaacttcactcctgcggctgcacaacaactgcaaacatggtttctttttcatgaggtgtaattggttatggtattctctcctaaaactcagggacaaatggtaaaggtgcagcctgtgccagggaggcaaaggagaatgcagcctcgtgagttgatgatgttaatgttcctggatgctacacatgagacgtgagaagcangcaatagtcatccttaatattgcaagggaagccaggatcgatgctgctcttgagaaaacgtctagagtcatgtcaggaa

SEQ ID NO: 20320 - DNA, 526 bp, Oryza sativa
  Clone ID: uC-osflM202005e09b1
ttcttttcgccaagccgcttctcggcctcctctccgacgccgtccccatccgcggccaccgccgcctcccctacgtcgccatcggcgctctcttgcaggcaatttcatggttagcaattgccctctggccagctatttctcttccagttcttaccatttttctcctcttgagcaactttggtgcatccatatgtgaggttgccaatgatgccattgtagcagaagctgggaagcaagcaaccttgtcctcagggtcaggtcagcttcaatcctttgcttggatgtttggctcatctgctggcgctttaggaaatcttgttggtggcattgcactcagatacttttctccaaaaatcatgtttctgttttttgcaatccttctcgtgctccagttctgcactactgtggctatacctgaaagctccctccaactcccaaaggcaaatactaatctatcagctgtcttcagcgttcgtaagcaaatcaaagagctgtcatatgcgctgtgcatgcctgaaatattttg

SEQ ID NO: 20321 - DNA, 524 bp, Oryza sativa
  Clone ID: uC-osflM202005e10b1
tcggtcactgcattcatgcttgcacaactggttgcgacattcctcgctgtctatgccaactggggctttgccaggatcaagggcattggctggggctgggctggcgttatctggctttacagcattgtgttctacttccctcttgacatcttcaagttcttcatccgctttgtgctgagtggaagggcctgggacaacctccttgagaacaagattgcattcaccaccaagaaggattacggtagggaggagagggaggcacaatgggccaccgcacaaagaacacttcacggccttcagccaccggaggtcgcctccaacacgctcttcaacgacaagagcagctaccgcgagctctctgagatcgctgagcaagccaagagacgagctgagatcgcgaggctgagagagctgaacactctcaagggccacgtcgaatcggtggtgaagctgaaggggctggacatcgacacgatccagcagaactacacagtgtgaggaaccccctcggcattcaacgagag

SEQ ID NO: 20322 - DNA, 518 bp, Oryza sativa
  Clone ID: uC-osflM202005e11b1
ttgttttgggggttgtgttgctgctatgccattgctcaagaagatcccgacttctgtcctctggggctacttcgccttcatggccattgagagcttgcctggtaaccagttctgggagaggatcttgctgctcttcactgctcccagcagaagatacaaggtgttagaagagtaccacaccacgtttgtcgagaccgtgccattcaagacgatagccatgttcacactcttccagacaatgtatctactcgtctgcttcgggatcacatggatcccgattgctggggttcttttccccctcatgatcatgctgctggttccagtcaggcagtacatcctcccaaagctcttcaaaggtgcacatctgactgatctggatgcagcagagtatgaggagtcaccagctataccgttcattgccgcgcaagatattgatgttgcattggcgcgcacccagagtgcagaaatccttgatgacattgtcactagaagccgtggtgaaatcaagcgcctgaaca

SEQ ID NO: 20323 - DNA, 476 bp, Oryza sativa
  Clone ID: uC-osflM202005e12b1
tcgttctttctatcacacaaacggctcgttggattgggggagtctcctctgcgcgacggacatggcctcctcgctcgtctcgcgcacccacctcactccgcgccccgccgccgccgcctcgacggcctctccttgcagcgcccgcttcgcggtccggcggcgccgtggcctcgtcggcggtgtgcggtgccaggcgcaggcgagcgacatggacggccactacatgcggcggtgcgtggagctggcgcgcaaggcggccggacacaccagccctaaccccatggtcggctgtgtcgttgtccgcgacggccgcgtcgtcggcgagggattccatcccaaagccggccagccccacgccgaggtgtttgctctgagagatgctggggatttagcagaaaatgcaacagcctatgtgagcttagagccctgcaaccattacgggcggacaccttcctgcactgaagcactcatcaatg

SEQ ID NO: 20324 - DNA, 440 bp, Oryza sativa
  Clone ID: uC-osflM202005f01b1
tttgatttggaatggatcattatattgcacttcatttaagatatgagaaagacatgctgtccttcactggttgcaatcacaacctgacagtacatgaggcagatgaactgacggacatgcgactcaaagtgagacactggaaggagaaggagatcaacagtgaggagaagcgactccaaggcggttgtcccatgactcctcgtgaagctgctgtcttcctcaaagctatggggtatccttccaccacaaagatatacattgtggctggtgaaatatacggcgcacatagcatggatgcattaaaacttgaatacccgaacatttacacacactacagtctagccacagcagatgaattagaacctctcgagttgtatcagaacaggctagctggctgggattatataagaactcttcaagtgatgtttttgtatatacat

SEQ ID NO: 20325 - DNA, 433 bp, Oryza sativa
  Clone ID: uC-osflM202005f02b1
gtcggtgttctactccgacgcggaggagaaccccaaccgcctcttctccagcaccatctacgaggtcggcgaccagcgctactggcgcgactgcctccgcctcgcctgcggcttccccgtcgccgacgacaccaacacccactggcccgacaagccccaccatctccgggatgtcacggagaagttcttcgtggcgacgaggggattggggatcgagctgctgcggctgctgtgcgaggggatggggctcaggccggactacttcgagcgcgacctcaccgccggcgatgtcatcatcaacgtcaaccactaccctccatgcccggatccgagcctgacgctgggcttgccgccgcactgcgaccgcaacctcatcaccctgctcctccagggcgacgtcttcggcctccaggtctcctacaatggcgactgg

SEQ ID NO: 20326 - DNA, 442 bp, Oryza sativa
  Clone ID: uC-osflM202005f03b1
ctccatttctctcagctctcacagctcactgcatcaatggccgcggccaccatggcgctctcctccccggtgatggcccgcgcggcgccgtcgacctcctccgcgctcttcggcgaggcgcggatcaccatgcgcaagaccgccgcgaagcccaagccggcggcgtcgtcggggagcccgtggtacggcgccgaccgcgtcctctacctcggcccgctctccggcgagccgccgagctacctcaccggcgagttcccgggcgactacgggtgggacaccgcggggctctccgccgacccggagacgttcgccaagaaccgggagctggaggtgatccactcccggtgggcgatgctgggcgcgctcggctgcgtcttcccggagctcctcgcccggaacggcgtcaagttcggcgaggccgtgtggttcaaggcgggctcgc

SEQ ID NO: 20327 - DNA, 525 bp, Oryza sativa
  Clone ID: uC-osflM202005f04b1
cttgattctcctcatcgcctccgcttctgcttttttttttcttttttctcgttgatcggtttgttcgatcagatcggttctttggagagatggagcagtccttcatcatgatcaagcctgacggcgtccagagaggcctgattggagacatcatcagcaggttcgagaagaaaggattctacctgagggggatgaagttcatgaatgtggagaggtcctttgcacagcagcactatgccgacctttccgacaagcccttcttccctgggttggtggagtacatcatctctggccccgtcgttgcgatggtttgggaagggaaggatgttgttgccactggccgcaggatcattggggccaccaggccctgggaggcagcccccggcaccatccgtgctgactatgccgtggaagttggcaggaatgtcatccatgggagcgacttcgtggacaacgggaagaggagatcgctctctggttccctgaggtttagctgatggggagcaaccttaccctggatctatg

SEQ ID NO: 20328 - DNA, 398 bp, Oryza sativa
  Clone ID: uC-osflM202005f05b1
catggctactcacatactgcccacggtctctgaatacagaaaactataccagtatggaaaaattacagcggaatgaatacatcagcatacgaaaaaactggcacactgctaaaagaattgaatcgaatccgacaaattttatacagtaggcacatttggtataggtggtgctggtgatggctcacctgaagatggctcatgctgctgactccggtgtctcgggagaaggcgcaccatttgtaacttgaccaggagaaacagtaggtggatcggggccattagaatcagttgacggagctgtatcaccagaaggagcatctgcattacttgctgcgtacggtgccgacggtgctgtaccttgcacattaccagtgcatgctgacggttctgaaaagggt

SEQ ID NO: 20329 - DNA, 533 bp, Oryza sativa
  Clone ID: uC-osflM202005f06b1
ctctcgactatctctgaggagctgttcaggttggaactggctgatggtgacaactgttcaaggtcaatttgtgcggagatgaaaagagtgcagaaagcaaccatcaactttgacaataccctgagccccgcacacacactgctccaaattaactgtgctgatcaaaaggggctcctttatgatattttgagaacaatgaaggactgcagcattcaggtaacatatggccgattctggtcagacaagaaaggttttcgagaggtggatctttttatcaagcaagcggatggaaagaagattattgatcctgagaaacaggatgttctcagctcacgcctgaggtcagagatgctccatcctctcagggtgatgattgtcaaccggggtcccgatgtagaactccttgttgctaaccctgttgagctatccgggaagggacgaccacgtgtattctacgatgctacatttgctctgaaagcgcttgggatctgcattttctctgctgaaattgggaggcaggcagcatcagagcg

SEQ ID NO: 20330 - DNA, 375 bp, Oryza sativa
  Clone ID: uC-osflM202005f07b1
gttttattatactcatcacataggattcacatcccaaacattcaggcacgattcaaccggcacagagataaaaagaagccaggggaaacaaaacaactcctttagacctttctgcagacgtctccctcgcacacatacccagcgggggcagcctcagcattctcctctcccatctccacatcgcccttctcctccagcgcgcacttgggatgcagatcgaagtcacattccttgcacctgtaggaccatgagtcgcccatctcgtcgcatccatcgcagccatacgtggtgcagcgagtcagcacaagctcatgatcgtgcagatcatgctttagcttctcaggccacccctttgccatgtcattgatcttcttc

SEQ ID NO: 20331 - DNA, 337 bp, Oryza sativa
  Clone ID: uC-osflM202005f10b1
tcgatctcccaccccgccgcacgccgccgcatcgatcggaaccaaaccctaaccctaaaccctagcccccccacctcgccttccaccccccacgctcccatggcggggcgcggaggctacgcgtagccacatcgatcgaacaccctgtatggattgaggtgggtttcccgaggcatgggtacaaaccctagcctgcacgagctggcggcgggggcggcgccgcggggacgcgtggtgcgtatcctcgtgcgcgacgccgacgccaccgactcgtcctccagcgaggacgaggcggttgcggtggcgcagcctcggccgcggcggaggggtaaggtgg

SEQ ID NO: 20332 - DNA, 521 bp, Oryza sativa
  Clone ID: uC-osflM202005f12b1
ttgtttcagagtgagtgctcgtgtgttgtgcgatcagtgcccgcagttcgatcgatccgtgttgatctttgaaagaaagatgtcgtgctgcggaggaaactgcggctgcggatccggctgccagtgcggcagcggctgcggaggatgcatgatgtacccggagatggctgaggaggtgaccactacccagactgtcatcatgggtgttgcaccttccaagggtcatgccgaggggttggaggccggcgccgccgccggagcaggagcagagaacgggtgcaagtgcggcgacaactgcacctgcaacccctgcaactgcggcaagtgaagcaagcaacctcctgacgaaaccaaggagatggaagggcctagtactgctaagctagtagtttgatccagttacaagtgatgagttattgtcactgtaactttgtgtttcctgagtttgtgatctaagacctgagactgaagaaatgcatcctagttaaataagtgcttagaataagatgtttgagacatct

SEQ ID NO: 20333 - DNA, 431 bp, Oryza sativa
  Clone ID: uC-osflM202005g02b1
atctccttgcgacctcgaaaccctagcctcctccggccaccgtcgccggccacggtgagcggccccacccccccgcagccatggcctccccggagggctccacgtgggtcttcgactgtcctctgatggacgacctcgccgccgccgccggcttcgacgccgcccccgccggaggcttctactggacgacgcccgctcctccgcaggcggcgctacagccgccgccgccgccgcagcagcccgtcgcccctgccaccgcggctccgaacgcctgtgctgaaatcaatggctctgtggactgtgaacatggcaaagaacagccaacaaataaacgtccgagatcagaaagtggcactcgaccaagctccaaagcatgcagggaaaaaagtaagaagggacaagttgaacgagaggctcttggaactgggtgc

SEQ ID NO: 20334 - DNA, 508 bp, Oryza sativa
  Clone ID: uC-osflM202005g04b1
atgagacccacatcgtcaagagttccatcgtgcagtgatcagatgggtgcctgatgatggatctggtagacctggatatgttgctgaaagcacgggccaacaagctagtagccgcctcctaagtatgaaatctgcgaatgctttactggaagtaccattagtggggcagatgttggaggctggaacatctatgcaagctatacttatttctgatatgaccagttcaccttttgacaagctacccactgcttcaaatccgttgccatctcatttatttccttctgcaaaaagtgtttccacagatttgtctcaggttccagcctcacagaatactgaagttaaagtagcaattctgacagtgagcgacactgtttcattgggtgcaagccctgacaggagtgggccaagggcaatatctgtagtgaattcttcatcagagaaattgggtggagcgactgttgttgctactgctgttgttccagacgatgtggaaaaaatcaagaacatt

SEQ ID NO: 20335 - DNA, 428 bp, Oryza sativa
  Clone ID: uC-osflM202005g05b1
cttgcagttgcatccagagcccgccccgcgtctctactcgctccgccgcgccgtcgtctctcccgacttcggcgacaagcgagcgacgcaggccaccgcgcgcggttcgttttcgcgagggaggccgccgccgaccagccgccatggtctcgccggacaccatccgcacggccatcggcgtcgtaggcaatggaaccgccctcgtgctcttcctctccccagtgccgacgttcatacggatctggaagaaggggtcggtggagcagtactcggcggtgccgtacgtggcgacgctgctcaactgcatgatgtgggtgctgcacggcctccccgcggtgcacccgcacagcatgctggtcatcaccatcaacggcaccggcatggccatggagctgacctacatcgtcctgttgctcgccttctccctc

SEQ ID NO: 20336 - DNA, 424 bp, Oryza sativa
  unsure (1)..(424): unsure at all n locations
  Clone ID: uC-osflM202005g07b1
tttacaaacattgcatctggcacttcggagaatacaaaggttgtcattgatcatggggctgtaccaatatttgtgaagcttcttggttcttctagtgatgatgttcgtgagcaggctgtatgggcattgggcaatgttgctggtgattcccctaagtgccgtgaccttgttcttgccaatggtgcattgctgcctctgctagcacagttgaatgagcacactaaactctctatgctaaggaatgcaacttggactttatcgaacttctgcagaggaaaaccacagccatcatttgaacagactaggcctgctcttccagcactggcacggcttattcactccaatgatgangaagttctcactgatgcgtgctgggctctttcatatttatctgatggcactaatgacaagatccaagccgtga

SEQ ID NO: 20337 - DNA, 371 bp, Oryza sativa
  Clone ID: uC-osflM202005g09b1
attctcgaagaaggagaagaaggagaggagcagccatggcgtcgtcggtggcagcggcggcgagcacgttcctggggacgaggctggcggacccggcgccgcagagcgggaggatcgtggcgaggttcgggttcggcggcgggaagaaggcggcggcgaagaaggcggcgaggccgtcggcgccgacgacggacaggccgctgtggttccccggcgcggtggcgccggactacctggacgggtcgctcgtcggcgactacggcttcgacccgttcggcctcgggaagccggcggagtacctgcagttcgagctggactcgctggaccagaacctggccaagaacaacgccggcgagatcatcggcacccgg

SEQ ID NO: 20338 - DNA, 532 bp, Oryza sativa
  Clone ID: uC-osflM202005g10b1
tcgatttggtgcgaccttattttcttaggcgcaccaaggaaagtattgaaagccttttacctaataaagctgatcttgtcatctggctgaagctaacgccatatcagatataattatatgaaacatttatgaagagcaatttgattgataagacagtgaagggatcaacatttgttgcaacaatgctgctccaaaagatatgcaaccatcctcagaacttgacagctgtagattcctgtgaggaacaattagcgttgaaagaaaacaggacgttacagggcattgtcaaaaaacttgaagctttgattgcaaagaataccacaaagacatcaaattgtctcaagttcatgcaagcttacatttatactgcaattgttggaaaaacttaaggaagaagggcacaaggtgctaattttctcacagacgcgcctaatgcttgatgaaatagaggaggcactaaccaacaagggagtacattctgctcgtatggatgggactgttacagcttctaaagagaagctattattaaggg

SEQ ID NO: 20339 - DNA, 405 bp, Oryza sativa
  unsure (1)..(405): unsure at all n locations
  Clone ID: uC-osflM202005h01b1
atttccatanagcttnctagccttttgcctctctttctactctctttcttggccgtctctcttatatccctcaatttaaccatcgagggcggccaaaaaaaagagagaaaggaagagcaaaataacacattacaccatggcgcgattcgccatcatctccgtcgtcgtcgacgccgccttcgccgctgccgctgtcgttgaggcccgggttggacctatcgacgtcgctccgaccaacctgatcaccaacccactcggtgccatcatcgacaatggccgcaagatcaccggcgccgtcgtcgacgagtgcgcctggacctgcgatcatgtcgcggcgggtaacaagaagatgtgcaacacgctgaggaaacttcccggggtgagctcgcccaaggaactcctgac

SEQ ID NO: 20340 - DNA, 527 bp, Oryza sativa
  Clone ID: uC-osflM202005h04b1
cttagcctgtcttcgccccccatcgcatcgcctcccgcaccatcaagattccggggccggagtcatgcccccagcgcagcaggtggaccctccgccccatggccgcatcgcctccccccagcgctgcagtcgcccctcccgctctgccctgcgacgtcgcaccctagcgccgcaggtgcctcacacccccagcagccgcctcccagcctcttcgcctccttggcttgtatggagaaagggaaccatcgttgggcgcacgctgaaacggaaaccgttcgatccccgagtcccatctattcatcttcagttttttgaaacagtacgtcgccgcttgctttatactggccttctttcccgtcctatttatgtatgatgatacacacaacagctgaagaaaagtggtacacagcagctggatcaatctgctcggccagctagtagcttctcctccatacaagcacatccttggattgatctgctctaggttgtccactgcttgccgatctcacatgttccagcatagcttc

SEQ ID NO: 20341 - DNA, 518 bp, Oryza sativa
  Clone ID: uC-osflM202005h05b1
cttttcttgagctcaatcagcaacaacatctatctccttcttgcttagttaagtccttcgccctcccaagaagaagaagatgtcttgctgcggcggcaactgcggctgcggcagcggctgccagtgcggcggcggctgcggcggatgcaagatgttccctgatgtggaggccacagccaccaccaagaccttcgtcctcgctgctccatccaacaaggcgagctctggaggaatggagatggcggtggagagcggcgagaacggcggctgcggctgcaacacctgcaagtgtggcaccagctgccgcggctgctcctgctgctcctgcaactgaatctatcgtcgtcgtcgcccggctgcatgaggatttatcgtatggatgctgctactgtcgatcagagctttgatcgaggccttaatttgcttgcattagtacccagcttatatgtaggcaggccttggccttttgctctgacgcctaaataaaaccgtcgtcgtcgttgtcagtgtgtgcgtgt

SEQ ID NO: 20342 - DNA, 441 bp, Oryza sativa
  unsure (1)..(441): unsure at all n locations
  Clone ID: uC-osflM202005h07b1
gtactagatcgcgagcggctccaccggcggattccgctgccgtggcggcggtggcgaaggaggcggaataccagaagggcgtgcagaagctggtggacctgctgtccaagctgaacccggctgccaaggagttcgtcccctcgtcggcggcggtctcgtcgccgtccaggaaggcgctgtcggcggacgcgccggtgttcgactacaactcgatcggaggctggaacgggggcggcaaggaatccggcgccgacgcctaccagcagcgtcggaggaggaatggatgcctcaatcaaaggaggaggaggatgaacgagagagcaaggcatgcagacagggaagacagcatttcgcgaactgtttatgtttctgatattgaccatactgtgacngaagaaagacttgctgatatatttgctaactgtgggcaagttcgtgact

SEQ ID NO: 20343 - DNA, 365 bp, Oryza sativa
  Clone ID: uC-osflM202005h08b1
tcggtatgctgctactcatcatcagcgagagctagctagctgtgtgtgccacttacactgctgctgctgctggttctagctaagctcaccgatcgtcgtcttcgtcatcgccggtgacctggtgaattagtcgagagagatggcggcggcggtgacggtggaggaggtgaggagggcgcagagggcggaggggccggcgacggtgctggcgatcgggacggcgacgccggcgaactgcgtgtaccaggccgactacccggactactacttcaggatcaccaagagcgagcacatggtcgagctcaaggagaagttcaagaggatgtgtgacaagtcgcagatcaggaagaggtacatgcacctga

SEQ ID NO: 20344 - DNA, 396 bp, Oryza sativa
  Clone ID: uC-osflM202005h09b1
gtatccccagcagcagcagcagcagcagctgagcttgaagcagcagagcgaggtagacatggccgccgccaccatggccctctcgtccccggcgctggccggcaaggccgccgcgaaggtgttcggcgaggggcgcatcaccatgcgcaagtcggcggcgaagcccaagcccgccgcgtcggggagcccgtggtacggcgccgaccgcgtgctctacctcggcccgctctccggcgagccgccgagctacctgaccggcgagttccccggcgactacgggtgggacaccgcggggctctccgccgacccggagacgttcgccaagaaccgggagctggagggtgatccactccaggtgggcgatgctcgggcgcgctggctgcgtgttcccggagc

SEQ ID NO: 20345 - DNA, 447 bp, Oryza sativa
  Clone ID: uC-osflM202006a01b1
gtcgcattttcgacgaatttctcgctagggtttcgcggggcaaggcggcggcggcggctggggtttcgaggcgggccacatggcctcgccggcggcggagggggacgcggtgagcgcggggttcgcggagctggagcgggagcagcagctgctggcgagctgcacgaggctgtacaagcagctggaggagcacttcgcgtcgctggagcgcgggctggcggcgaggtcggactcgctccgccacaagcgccgcgcggcggaggcgcgggcctcggccgccatggactcgctccgccgccgcgaggcctccatcgatggctccgtctcccgcgcgctcgaccacctggacgacctcgcctccgcctcgtcggtgccgtccgacgccgccgcggcggcggagggggtggccgagagcctgagggcgatgtgcgccaggatggacttcgc

SEQ ID NO: 20346 - DNA, 411 bp, Oryza sativa
  Clone ID: uC-osflM202006a04b1
gtctcggatgcttcgctccttgcgccatggggcggttgaacaggggaggtggcgagcagagcaggggaggggaggggatcctgcaggttctatagtatattatatacttgatgactggttaatcccattggtctggtggggagatcttgagagatagatatttatctacagtaaatcatcagcacagcagaaaatgccggcaattatgttatgcagttgtagcggggaccaatccaagtttgaagaaatgcctcgatcgcctgaatctcttgcgacgcgggattactcagcaactggttcttcttcaaggataggaaatcgagaatcaactcctgatgacaaccaagttagcgaagtggaatcagacctgagagagacccttttactaaattatgaggaagcccgggcatt

SEQ ID NO: 20347 - DNA, 430 bp, Oryza sativa
  Clone ID: uC-osflM202006a05b1
aaactacttcagtttagccccactccgcagtgtctccctgggatcctcgattccgggaggtggtcctcgtcctcgtccatggcggcggcggcggcggcgaagacgacgacgaggcggcggcggcgagggggtgctggacctggaggcgcagttcgccttcttccggtcgcagcaccggcacccggagaacgccgcggcgcacgcgctcctcgcgtggcccatcctcttcaccggcctcctcgtcctccacttcctcccctccccgcccgcgctcccgctcgacccggcgctcgccctcgccctcgcctacgccgccgcctacgtcgcgggcgaccgccgcgcgggggcgctcggggggcttctcctcgccgccggctgggctgacagccgcgccctcgccgagcgcctcgggttcgcgctcgcctggaag

SEQ ID NO: 20348 - DNA, 399 bp, Oryza sativa
  Clone ID: uC-osflM202006a06b1
ccacgttcttcggccatcgcgggtggagcagggccgccgcggagggctgggggggagcgcgagtcccggggatccgagccatctgccggtgggcggcggcggcggcggcggagttggggttcgtcgtctaggtcttgggtcttcttcgtccctcgctgcgggtgggtagcgcagcgtcggggcagatccggctagccactgcgacgctgaattctggagatccccgcacatggagtcgcagcgagggcaatcttctgatcgtggatcagacgcatcaggaccaaaacagtctagtgtttcatcacatggtagacaaaggaattcatcatcttctatctgtaaagattttctccggaagtttgtggacaatgaactattgacatcaagcctagaggactg

SEQ ID NO: 20349 - DNA, 424 bp, Oryza sativa
  Clone ID: uC-osflM202006a07b1
ggggtaggatctaaacataatgtcacggggctgttacgagcagaagccagaaggtggatcatctctgctccattgaccggggagtttcaggagaagaactgtcagcacagatgctgaacattttcctaggatattttcagaatgttaggttgattgccgtctttcttttcggtcatcgtaatgttaggttgatttgcttcctttccagtttttgtcactttggtatcaaaaaggatatcttttttccccagctgctagtcctagggtagatgaattaatggagatcttgatactcaaggtgttgtacaggttttcgttctgcagacacggctgtgtaatgtcattctttctccaaactacttaagacgcattaagcatttatttagaatgcaacaatggcatctttacatttagatccccccag

SEQ ID NO: 20350 - DNA, 512 bp, Oryza sativa
  unsure (1)..(512): unsure at all n locations
  Clone ID: uC-osflM202006a08b1
aatctttttagcttctcagccttttgcctctcttgggggctctctttctaggccgtcgggcttatatccctcaatttaaccatcgagggcggccaaaaaaaagagagaaaggaagagcaaaataacacattacaccatggcgcgattcgtcatcatctccgtcgtcgtcgtcgccgccttcgccgctgccgctgtcgttgaggcccgggttggacctatcgacgtcgctccgaccaacctgatcaccaacccactcggtgccatcatcgacaatggccgcaagatcaccggcgccgtcgtcgacgagtgcgcctggacctgcgatcatgtcgcggcgggtaacaagaagatgtgcaacacgctgaggaagctgccgggggtgagctcgccgaaagagctcctgacggcggcggtgaagctgtcgatgaggaaggcgaaagcggcgagggcgaagtttcaggcggcggcnaaggccgcggacaaagggacgccgatggagtccatcctggaca

SEQ ID NO: 20351 - DNA, 427 bp, Oryza sativa
  Clone ID: uC-osflM202006a10b1
acggacttaatctctctcgccctaatcatcatcggctgcctcctcttggatcttctcctctgccatggcgggcaacagaggaggcgatgccggggaaggggagtggctcaaggtcgccgagctcagggccacggtggaagcccaggacccccatgccaaggaagtggacaacctgacgctgaggaggttcctgcgggcgcgagaccacaacgtggagaaggcgtcggcgatgctgctcaaggcgctccggtggaggagggaaggcggtgcccggcggctcggtgccagaggagaaggtgcaaagcgacctcgacgacgacaaggtctacatgggccggcgcccgatcggaccggccgccccatcctcctcgccttccccgtcaagcacttcttcggcaaacgcgacatgcctaagttcaagagttat

SEQ ID NO: 20352 - DNA, 398 bp, Oryza sativa
  Clone ID: uC-osflM202006a12b1
ggggattacacctttctctcgctttctctctcgttggcgagcggtggagcggacgctggggctgacggacggtagagacggcgccgggcatctggaggttaggaggctgatctagtgagattgtttttaaacggaccgcttcctgtgttgtcaagctaggatatggacaccaacaacggaaagggagttgtagcctcatggacatcatccatgtcatctttgatgctctccaatttggccaatctggtggctagtggcacaaggacatcggctggttttaagcaggtgcatctcaatgcatgtgctagagctgtggatgaaaagttttcgacaacactcaccggggatcagaataaaaatcatttgaagacatgggataagaaggtttaaaagattag

SEQ ID NO: 20353 - DNA, 488 bp, Oryza sativa
  Clone ID: uC-osflM202006b01b1
ggttgttcttggacaaagaacggtggtggaagaagggggtgaaggccatttcggaggggaagctagccgtcgtccttttagccggtggtcaggggactcggcttggtagctctgatcctaaaggatgtttcagtatcggacttccgtctggaaagtcgcttttccaactccaagctgaacggattttgtgtgttcaaaagcttgctgctcaatcaagtgatagtccaaataacaccgtacctattcattggtatataatgaccagccccttcaccgatgacatcactcgcaaattcttcgaaagccgtaaatactttggcttagaggcagaccaagtgacatttttccaacaaggcacccttccatgtgtttctgctgatggcagatttattatggagacaccatacaaggtagcaaaggctcctgatggcaatggtggagtttatgctgccctcaagtccagaaggttgctggaagatatgtcttca

SEQ ID NO: 20354 - DNA, 552 bp, Oryza sativa
  Clone ID: uC-osflM202006b03b1
tcaaactttgaaggagcttgtggttttaactccttgtggttatggtattgatacaacagctagtcatcgtggaaaccatttctatattaagaggagaagtgaggaattctacaactctgagttgattgcttgcccattggataatgtagctgagaccactgtcttgctaccacacagagaaagtgtgaaaatacagagtttccagctctttgagaatcatattgctgtatatgaacgtcaaaatggtctaccgaaagttactgcgtatcgcctaccagccactggagagccaattgggcaacttcagggaggtcgggagattgattttgttgatccagcatatgacgtggaacctgagcaatcacagtttggttcatctgttgttcggttccattatagctcaatgaggaccccaccctcggttttcgactatgacatggattcaggagtgtctgtgctgaagaagaatgatactggtttaggtggatttgatgcatcaaactatgtaacagaaagaaaatgggctgccgcttctgatggcactcaaatacc

SEQ ID NO: 20355 - DNA, 451 bp, Oryza sativa
  Clone ID: uC-osflM202006b04b1
cgccttgttgtcgctgttcccgtgctgctcctgtctctgggagggagcggaggaggaggaggacgacggcgaggtgcgcttgatggggctcgccggagaggccgctggctcgcctggcagtggcggcggggttcagtgcaaatggtaaatttagctatggttatgcgagctctcctggaaaaagatcctccatggaggacttctatgacaccagaattgatggtgtcgatggagagaccgttggactgtttggtgtctttgatggtcatggtggagctcgagcagcagaattcgttaagcagaacctcttcaccaatttaatcaagcacccaaagttattcagggataccaagtctgcaattgctgaaacttacactagcacggactctgaacttttgaaagctgaaaccagccacaattgagatgcagggtcgactgcctccactgcaat

SEQ ID NO: 20356 - DNA, 308 bp, Oryza sativa
  Clone ID: uC-osflM202006b06b1
gaaaatttttgagaaaaagaaaagaaaaaaaaagaagaaggggagagaactagaactctggcctaccatttcgcccccctccgcaagcaatccaccactgcatcggcggcgagggctcaccggcggcgagccatgtgcggcggcgccatcatccaccacctgaaggggcacccggaggggtcgcgccgggcgacggaggggctcctgtggcccgagaagaagaagcccaggtggggcggcggcgggaggcgccacttcggggggttcgcggaggaggacgactaggacttcgaggccgactttgagga

SEQ ID NO: 20357 - DNA, 519 bp, Oryza sativa
  Clone ID: uC-osflM202006b07b1
atgttgtgtagtacccagccagaccagatctcgaggtcttggactctgccggcgccggcgttggtagggtagccatggcggaggaggccaccctgagccacccgtcgcggtacgtgaagctgagcagggagcacgacgcccccgcccccgccgaggacatccgccccggcgagctcaaccagccagtccacgtcccgcagctcgagggcaggaggtgcagcgagtgcggccaggtcctgccggaatcctacgagccccccgccgacgagccctggaccaccgggatcttcgcctgtaccgacgatccacaaacctgccgaacggggttgctctgtccttgtgttctttttggacgcaatattgaggccctcagagaggatatcccttggacaacgccttgtgtttgccatgctgtctttgttgaaagagggattgcgcttgcaattctcaccgcaatatttcatggtgttgatcccagaacgtttttcctgattggagaaggttggtggttacctggtg

SEQ ID NO: 20358 - DNA, 483 bp, Oryza sativa
  Clone ID: uC-osflM202006b08b1
gcatatttaagcctcccatcaacttcttgcacacacggtgcctttggctttcatctgcatctattcagttgcagattgagagccaaagacattatattgattctatcaggagggttgtgctagcgaattcttgttagcaacaaattgacatattgctcggcacatccccaccgagaataccaagatgacgttctctggtacacaggacaagtgcaatgcttgtgacaagaccgtgcatttcattgatctccttaccgcggacagtattccctaccacaagtcttgcttcagatgcagccactgcaaaggcacactttcgatgtgcagctattcgtccatggatggggttctttactgcaagacccattttgagcagctattcaaggaaacaggcaccttcaagaagaacttcccctcaggtacaaaggcaaacagtgaacaggctaagattcccagcaggctgtcctctgtgttctgtggaac

SEQ ID NO: 20359 - DNA, 361 bp, Oryza sativa
  Clone ID: uC-osflM202006b09b1
agatatttgtacacagagagagaaagatgtagagggggaaataatatacataaaggagcgggtatgcctagatcttggacaacattctccgggaggactatgaccctagaggcggaggcctatgaccacattgagcgagcgaagggtaagaggcaaaatcaggaggggagctgccaccaccagcggcgcctgatgaggcgtgctacgcagacgcagggatggtaggacccttgctgatgacacaacgacatggagtcgaccgtgacggttgcagttcctgttaggagcatcttgtacactactgtgacgactttgaggggaacgactataaggcttgagggggggtcttcacactccatag

SEQ ID NO: 20360 - DNA, 508 bp, Oryza sativa
  Clone ID: uC-osflM202006b11b1
atttttatatttttttcctcacgctttctcggttccaggtggctttattaataattaattagactttttcctcttggctttataaaagagagcgcttaaaccctctccacctctccatatccggcttgcaaacgcttctctcctcctctaatctcaagtctctgtctcgtcgtcctcgcatctccactcgccatgggcaagattaagatcggaatcaacggtttcggaaggatcgggaggctcgtggccagggtggccctccagagcgaggatgtcgagctcgtcgccgtcaacgaccccttcatcaccaccgactacatgacctacatgttcaagtacgataccgtgcacggccaatggaagcacagcgacatcaagatcaaggactccaagactctgctcttgggcgagaagccggtcaccgttttcggcatcaggaaccctgacgagattccgtgggctgaggctggtgctgagtatgtcgtggagtccaccggtgtcttcactg

SEQ ID NO: 20361 - DNA, 563 bp, Oryza sativa
  unsure (1)..(563): unsure at all n locations
  Clone ID: uC-osflM202006c03b1
acaccttatccgagcgagcagctagctagctgcggcgatggcctccagagcggcggcggtcgccgtcctcctcctcgccgtggcggcggcgccgctcttcgccgcggcgagcgcgcatggccgaggctaccttggtgccaagtcctggcctcctgacggcagcctgagctcatcaagctccggcgaggctgcagcggcggacgtcgacgacggccacacggactggaagtgctactcctcctgcatgagcaagtgctgtcaccgccacgacgacgacgacgacgacaaggccaatgccaaggccaacgccaccgccggcgccgccgccgtcgggctcgacgatgactacaagtgcaagaagcagtgcctcggcaactgcttcaaggacgtgccggccgtttgctaccacaagtgcgtcgacgactggtgcgcgaagctgccaccatatagctccgcgaaggtgcagtgctacaagaagtgcggcgataaatgctttcaccacggnccgaagcctgggcccaagcccagcccaagccgagcccaccaaaacccagcctggaccg

SEQ ID NO: 20362 - DNA, 422 bp, Oryza sativa
  Clone ID: uC-osflM202006c04b1
gcgttttattgcatgtgttcttgacgagagttcttcttgggggggtccaatcccaagattgatctatattatatagatggctctttatatagaatcttatcttgagatggaattgtcatcctagctacatgggaactctaccaagaacaatttattacaagatgaagctctagcatcatgctgccctaggatattttggcagtttctttaggttagcaaaacagtcttacatagtagagatgatgccccaattctccatgaggagatagaattgtaattacaccagacttgcaatcttattaggaaaaactttagctgtgccattagaagtgaaacagcccagaatagcattgccgttgtgaaagacttgccccatgcagttcagtagcctacctgcttttatcagatactcgcgatttcct

SEQ ID NO: 20363 - DNA, 410 bp, Oryza sativa
  Clone ID: uC-osflM202006c06b1
ggcctttttaggcacagcatgctcctcttcaaggtctggtgggtgctcgccctggcgctcagcgtgttccgggaggtggcgagccggaaggagtggcgcatccggcgctacatcccgagcaccatcggcatggccatcaccttcttcatgccgccgcgcgtgcccgtcggcatgtgcatcggcagcctggtggcgtacctgtgggagaagatggacgccggccgcgggcggatgctctcgccggcgctggcgttggggctcatctgtggcgacggcgtcggctcgatcttgctgtccatgctgacactcatgggtgccagggcgcccatctgcatcaagttcttgtctcgaggagacaatgtcaagttggacgccttcttggcaacactccatgacatgagatagctact

SEQ ID NO: 20364 - DNA, 209 bp, Oryza sativa
  Clone ID: uC-osflM202006c07b1
cgatgtccaagagatttttcttttttttttcctcttatatttaatttaattcgaggaggagaagaagcagaggaggagtcggttgggagaggaggactgtcatttcccttgggcttggtatccccccctcttcttttcctccgtttcgttctttgccatggccgattgggttgtcaccgccgccttccggccctgctccgttgttttcg

SEQ ID NO: 20365 - DNA, 542 bp, Oryza sativa
  Clone ID: uC-osflM202006c09b1
cacttttattcctttcgaccatggaggagtatgtgagagaggctccacgcatggttccaattaaggaacctttggtcagttcttagttaaaatgacctgctatttcttttaaaaatgccttctacgtttcgatatgcctcctttatattataataatcaagcagcagccctgatgatgatgtttgtgcaatatttatcttcaattgaaatttgaaaccatagcaaaagaagaatcacatgtgttgtgtcaccacagtaaaataatcacatgttgatttgtactaaaataatcattcgatctataaaacggattcttaaactcttaataattgttatttcaccaggagtttcctgagagactcctcctgacatacaaaccagaagaatcagaagagattcctgagcctggttctgctgaggaggaaaaaccacaaattgaagaacctgctgttgcagtgccatctactgaaggagttccaccaccacctgctaaacctgaggtcgtagacacccgtgatttattgggattaagcgatcccacc

SEQ ID NO: 20366 - DNA, 493 bp, Oryza sativa
  Clone ID: uC-osflM202006c10b1
acttatactcgcctgctacagaaaaaatcccctttgtgcgacccctcttcctcctcgattccggcggactcgtcaccggcggcgggaggaagaggggtcgtccccctcccctagtttagtacagtagtcgggcctaatctcgttaggtcgggttcttcccgttcttttctcgttggtgcggtatggaagctggagacggcggctgctacgtggatgcagcttgtgacggcgatggcgacgcggaaacgacccgagacgatggcgacagcgcggatccggtccgcggcggtggcggcggcttggaggcggtccacggaggcggtagctgctcggatgcggttcacggcggcgacttggttgcggtccacggaggcggcggctgtgcggctgcgacccgcggtcgaggcggcggctgcggctgcgcgggtgctgcccgtggcggcggcggctgcacggatgctgctcgcggcggcggcccctgccaggttgccgc

SEQ ID NO: 20367 - DNA, 367 bp, Oryza sativa
  Clone ID: uC-osflM202006c11b1
atagtagtttaccagaagccgatcctccctgatgggggaagcttccatcggctacggaggtgaggacccccgacctgccggcggcatgaagaagtaacgctctgctgcttactccaactgaccgaggaaagcctttctgaaaatccacccaggctacgcttgactcacgagcaaagtaactcctgtgaaagctcgatacgggctttctaacatctatctggcaagctgcttgccagtgaccgggaaggttatcagacctgcatgctatattcctcaactccggcatcgttcttcgaaacaaatggcagctctgtcagttgttgactctccaccggtctgggtgatcgggtttgagggatatgagaaa

SEQ ID NO: 20368 - DNA, 456 bp, Oryza sativa
  Clone ID: uC-osflM202006c12b1
cattttgttggtcatcgagctcgagctgaatctaaggggttgcaacaatggcggcgcgggttgttgtggcgttcgcggttgcgtccgccatgttcgtggccgtctccggccagaagttcaacgccatctttagcttcggcgactccatgtccgacaccggcaacctctgcgtgaacggcccccccgccggcctgacgctcacccagcctccctacggcgagaccttcttcggccgcgccacctgccgctgctccgacggccgcctcgtcgtcgacttcctcgcggagaagttcgggctgccgttgctgccgccgtcgaagaggggcggctcctacttccggggaggcgcgaacatggggatcatcggcgccaccaccatggactccggcttcttccagtcgcttcgcatcggcgacaagatctggaacaatggccctctcaacacccagatccagt

SEQ ID NO: 20369 - DNA, 477 bp, Oryza sativa
  Clone ID: uC-osflM202006d01b1
cggcgtgtttgagatcgaagcaagctgctacacagatggcacgacatggccgaggcggcgtcggcggcggcggcggcgacgacggagcacgcgaatgggagcagcggcggcgagcagaagacgcggcactcggaggtcggccacaagagcctcctcaagagcgacgatctctaccagtacatcctggagacgagcgtgtacccgcgcgagcacgagtgcatgaaggagctccgcgaggtcaccgccaaccacccatggaacctgatgacgacgtcggcggacgaggggcaattcctgaacctgctgctgaagctcatcggcgccaagaagaccatggagatcggcgtctacaccggctactccctcctcgccaccgccctcgccatccccgacgacggcacgatcttggcgatggacatcaaccgggagaactacgagctggggctcccgtcgatcgagaaggcgggagtggcgcac

SEQ ID NO: 20370 - DNA, 515 bp, Oryza sativa
  Clone ID: uC-osflM202006d02b1
ctcctagtttgcggctatcaaacccccacaccactgctggatcgatcgtcgcagccggagtaactaaggcagagatcagatcaggcgaattaggagcatatggcgctgtcgacggcgcagacaggggagtcgatgcactcctcgacgttcgcgtcgcggtacgtgcgcacggcgctgccgaggttcaggatgccggagaagtcgatccccaaggacgcggcgtaccagatcatcaacgacgagctgatgctcgacggcaacccgcgcctgaacctggcgtccttcgtcaccacgtggatggagcccgagtgcgacaagctcatgatggccgccatcaacaagaactacgtcgacatggatgagtaccccgtcaccaccgagctccagaaccggtgcgtgaacatgatcgcgcatctgttcaacgcgccgatcggggacgaccagacggcggtcggggtgggcacgcgggggcgccggaggccctcatgctggcgggctggcgttcaagaggaagt

SEQ ID NO: 20371 - DNA, 262 bp, Oryza sativa
  Clone ID: uC-osflM202006d05b1
aatcaattcataaaggcttacaagagaagcaaccatccggaagaagatggccatggcgacgtgctccgcatccaccgtctccttctccgcccgcccgtccgccgcgagcgcggtccggccgtgcgccgacccggggagggcgagggcgcgggcggcggcggaggagagcggcaagtggtgggcgccgctgctggggcggtcggggaaggccgactacatcgaggccccggcgccgcgggtgagtgcaatgaccgggaacatt

SEQ ID NO: 20372 - DNA, 347 bp, Oryza sativa
  Clone ID: uC-osflM202006d06b1
ggtacaaaaacaaatggggttggctatattcatttttggcatgagaccagtgaatcaagaacattgtgattacaacgagatcgagtaacaatatatcaaatcctttattttggtgttatctagcatggtggaactgacatatatactttgacatgacaaagatgtactgatggatgcaagctcagtgagactgaaatcttcaatgctgaaacttgtcatacagctgctactttggcaatgcatacagacaatggtgaaatctggtggatctggtttcagtgacgcttaaagaagtcgaccattggtccgtatatgagttctggagcattgtaggccatgattaagtc

SEQ ID NO: 20373 - DNA, 457 bp, Oryza sativa
  Clone ID: uC-osflM202006d07b1
agctctatagcggataatccccccagcgagcgagcgagcgaggctgctgctgcgaaatgatgacactgtcgacgtcggagcggcagccgcagccggagaagaagccgccacggacgaggccgccgctgccaggcaaggccgtggccgcgctgtgcgtggcgagctttgtcgcgggcttgctgctcaacggccgggtggcggtgccgttgctacctccgggctcgtcgtcgccggggagcaactacaagacgttcttctctactggctgcgagaacaaacgcgctaagctaggcgagagcagtccaacggacatcatgaacgaggtgtccaggactcaccacgcaatccagtccctggacaaggcggcgtcctctctggagatggagctcgcccgggagcgcgctcggagcagcgactcagtcggcgccggacgagccgttgatccctgggcccacag

SEQ ID NO: 20374 - DNA, 545 bp, Oryza sativa
  Clone ID: uC-osflM202006d08b1
gcatgttcctcctggaggactccgtggacgacctcaggggcatggtcgagatggccggcggtgacgtcaaggtgctgttcagccgctccgacgacctcgagcactggctcaccggcgtcatgacattcatggacacctgcgccgacgggttcgccgacgagaagctcaaggccgacatgcacagagtgctgcgcaacgccagcgagctcagcagcaacgcgctcgccatcaccaacaccctcggcgccatcttcaagaagctcgacctcgacatgttcaagggtgagaatcccattcaccggagccttatcgcggagcaggaaacggtgggcggcttcccgtcgtggatgaaggcgcccgacaggaagctgctcgcctccggcgaccgcaaccggccgcagcccaacgcggtggtggcccaggacggcagcggccagttcaagaccatccaggaggccgtgaacagcatgcccaaaggccaccagggccggtacgtcatctacgtgaaggtccgcctgtacgacgagatcgtcatggtccccaag

SEQ ID NO: 20375 - DNA, 455 bp, Oryza sativa
  Clone ID: uC-osflM202006d10b1
ttgtttttggtgccaacgatggtttacatcatgacaaacagtccatgacagaaaataagaatcttccatcacatggcaactccagtgaaatcagagatgtcaaccgcaatggcaatgatggcacgaatgtgacatcctcgatggtaaataaaattgacaaggataaggtgaaagcacaaatggaaaagcaaaggaaactgaaaggtgatgttgctaggaaggtagaggtaatagatgatgatgatgatcttgagaggcaactagaacatgacattgaattggctgttgaggataataagataaagcaggagaggaagcagagttcccctcatgttatgcatcggggggatcatagaaatgctgatcaagttacaggcaatgggcaccttggcaagcagaatacaccagagactgctcaagatgccccaatggacgacattaaagaacagcgcaat

SEQ ID NO: 20376 - DNA, 526 bp, Oryza sativa
  Clone ID: uC-osflM202006e02b1
gcaggttcttaccatgcatggtggtcaagtgtgcagcattcttgctcccgctactcatttgattatagtttcagttctacaagcctacaattttgacatgctgtacaagagcctccctcctgccgagaggcgttatctacatgacaaaagattgcaggttgtcagtaacaagtggttggaagattcagtggaaaaacaaacaaggctgcctgaaaccacttacagccttaaaccggatacactagaagaaatagaaattgaacgaagtgaggaaactgttcagccttgtaatgacaagcttgaggaaaatgagaaggctgatacatctcatgttaagcatgcaccaaggaaaaggggaaggccatccagtagtgcctcaagaactgcaaagcctgctcctagaccagtccgaagaacaagagctagaagaggaaatcaacatgcaaaaatagatgatgttgagcctgaagaaagtgaccatggtgaaacaagtctagatgatcaaataccagacacagataacatc

SEQ ID NO: 20377 - DNA, 504 bp, Oryza sativa
  Clone ID: uC-osflM202006e03b1
ctcttctcttcttcttcttcttctttcccttctcttctccgccgccgacgaccgaataaggagagtagaggagagagagagagacagagagatggctgcggcggcgcgtctcctcgcgcgtatctcgaggcagggcgtggcctcggccgcggcggcgaggcggtaggcggaagcggcggcgctgctcggcgcttcggcggggcggcacttggccccgccctgctcttcgatcaagggcttgcctctgctgaatcagccgaggctgtactcaacttcaacctttcaaaggtttgggtttatatcttctgctccccagcaagatgataaggcaggatataaacagacagaggatggagttaataaaagcacttaatctgaagctttcaatgaaaccaatagttttcctggaaccgagaatgcatcttacgcagatacagaagaccttgacctgtcaaaggaggacctgacaaagctaggtttgggaaagaagaattgttgaaatct

SEQ ID NO: 20378 - DNA, 564 bp, Oryza sativa
  unsure (1)..(564): unsure at all n locations
  Clone ID: uC-osflM202006e04b1
gtctattttgcttgagttatcaagaagcaacaataaggatggtagagaatctagtaaacagtaagcctgctgtagccacnttggccttgagtttcaacagtctgatagggaggaagaaagaagtntcttgctcctttccacatnaacaatgaagcttttgagaagaactggatcttctaaggaggcaaatggggagtcagcacggtggtttcttactagtttttgtgctggttattgctattctgggaatcctgcttggttttctcattaagagatgagcgtctgtgatcatatatcttgttccacttttctgtgaaagagttgatagtcgtgggccttgtctgttgtgttagccatttgtaccaactcatgatcgtcttatcttaggacctgattcctcttgtaatttctgactatcaaattccaatcagtagctactgcatccagtcaataagtcgtttgtccatttagcatgtttgagtataagttttttttggtcaattgtattcatcttttgacacctgtaaatatgacacttcccttacattatggcttgcgatatgt

SEQ ID NO: 20379 - DNA, 476 bp, Oryza sativa
  Clone ID: uC-osflM202006e05b1
ggcagttttcaagaaggctgtttcacatccattttttttggccgggagagagagcatctagctagggagagaaaggaagagacgagaggagagagatggccactgcttatgctcccatggcgagccagctgatgaagagcagcttggtgtgctccaagccgagggggctgtctggtgcttcgctgacaaggaggccccgcttcacagtcaaggccatccagtctgagaagccaacgtaccaggtggtgcagcccatcaatggcgaccccttcatcggcagcctggagacgccggtgacctccagcccgctggtcgcctggtacctctccaacctcccggcgtaccgcaccgccgtcagcccgctgctccgcggatcgaggtcggcctcgcccacgggtaccttctcgtcgggcccttcgcgctcaccggcccgctcccgaacacgccggtgcacggccaggccggcgccctcggcg

SEQ ID NO: 20380 - DNA, 496 bp, Oryza sativa
  Clone ID: uC-osflM202006e06b1
ctcccgaccgagcaagggggcgaaaggacgagctactgtaccgagccatggaggaattcaaggctcgctccttcgtcgccttgtctccctcgggtgaaatttcatcaatataggaaaatagattataccatcagtttttgcacacgcggatgaaatttgactaggagaggcaccatggagaaagtcgaggtcgatgggaacttcattggtacgggtaattggaagctgcatggagcactatgtaagcaacttcacaaagtagttcttgaagtattggatgttattcctgtccttgaagctacaaggcctggaaacagttctggacttcttgcattgagttccttgcgcatagctgttgagaaggccaagaatctacttcagtattgctcagagtgcagcaagctatacttggcctttacagcagaaaatgtcctggcaaaaattgagaaagcaagatatgcgcttctggaaagccttcaccaactggaagaaacac

SEQ ID NO: 20381 - DNA, 192 bp, Oryza sativa
  Clone ID: uC-osflM202006e07b1
gttgctgctattccggttgagtgagttggtgattatgtgtagggggtgaaaatggcgcaggcggtggtgccggcgatgcagtgccaggtcggggccgtgcgggcgaggccggcggtggctgcggcggcggctggggggagggtgtggagagccagttggaccatacccgtgtctggtggattcactgtgata

SEQ ID NO: 20382 - DNA, 402 bp, Oryza sativa
  Clone ID: uC-osflM202006e09b1
ctgctgctgataccatatccccccggggatcgtctgaagcccgcattgcgtgggctaaaaatggtgtactgacaactggtggtgatgacttctttgatcttgggggatcaaaagaagaactagaaaacctcattgatttagttgagaagtgggatggacatcaagaggagttctacttagagcaggtatgaatagttaattctgctatttatactacagtgaaccagcttggagcataggcttttgtattacaaggctcatgatgttacaaaacacctaacagatatatggttatgtgtgatgaggtctatgatgaccgaagctgaatggcagaggacaaaatatgtgccgacaatggaagaatatatggaaaatgctgtagactcattcgcactgggacct

SEQ ID NO: 20383 - DNA, 467 bp, Oryza sativa
  Clone ID: uC-osflM202006f01b1
gccacctcacactctccgtctcctcctcatggcgatcgggaaggcttggatctcgctgctgctcgcgctcgccgtggtgctgtcggcgccggcggcgagggcggaggaggcggcggctgcggaggaggggggcgatgcggcggcggaggccgtgctgacgcttgacgcggacggcttcgatgaggccgtcgccaagcacccgttcatggtcgtcgagttctacgccccgtggtgtggacactgcaagaagctcgctccagagtatgagaaagctgcacaagagctaagcaagcacgatccaccgattgttcttgccaaggttgatgccaacgacgagaagaacacgcctcttgctaccaagtatgagatccagggtttcccgacactcaagatattcaggaaccagggcaagaacattcaggaatacaagggcccgagggaggctgagggcattgttgaatacttga

SEQ ID NO: 20384 - DNA, 528 bp, Oryza sativa
  unsure (1)..(528): unsure at all n locations
  Clone ID: uC-osflM202006f02b1
tgagtgtcttctggacaaggcttgggatattctgaagaattcatcgtttctgtgttctagagacagagtcaagattatcagtggcatggatgaagcttattatggatggatagctcttaaccatcatttgaatatgcttggcacctcatcttctaaaatgacatatggttcacttgatttaggtggatcatcattacaggtgacatttgagactgataattccattcaggatgaaacaagtatgagtctaaggattggttctatcagtcatcaacttagtgcttattctctgtctggctatgggctaaatgatgcatttgacaaatctgttgcacatcttgtgaagaagttgggaggggcagctggtaatggaaaagttcaagttaagcatccttgtctacaaacgggatacaaagaagattatatttgttcttactgccacccgctcaaactagatggcngtcccagtgttggagggaagacaacaggctaagagaagcanggaatggcagatgaactgatcgggat

SEQ ID NO: 20385 - DNA, 501 bp, Oryza sativa
  Clone ID: uC-osflM202006f05b1
cggacgtgtggggcaaagtcctcaaggcgaacggcctccatcttctccttccagctcctcccatggcgtccctcgtcgccatcgccatcgccatggctctcatggtggttcaacctggccggcagatgactgcctttgctgctcggacgtcgccggcggcggcggcggaggcgttctggcgtgccgccatgcccggcgctcccatgccggacgccatcgtcgagctcctccaccatgagcacggcgttgctagcgccggcggcaaggccaacggcggtcggcgacggtccaccgccgccgatgaacttcaactacgacgactacagggccctgcctcggagcgacgccccttccccggatgcattgaaccgcgtcgccgccgtacagaacgccgacgagaacggtgtgtcctcgccgacgtcgtcgtcgacgacggtggtctttttcgaggacgccgtgcgcgttggcgagagccctgccctaccgcgaccggtggccgac

SEQ ID NO: 20386 - DNA, 478 bp, Oryza sativa
  Clone ID: uC-osflM202006f06b1
cagaatcttacccctctcactcccagatacctgctgctggggctagcccactaccatggatgcttgcaagttccggccgtcgagctcgttcgacacgaagacgacgacgacgaacgcgggagctccggtgtggaacgacaacgaggcgctgacagtggggcccagggggccgatcctcctcgaggactaccacctgatcgagaaggtggcgcacttcgcccgggagcgcatcccggagcgcgtggtccacgcccgcggcgcctccgccaagggcttcttcgagtgcacccacgacgtcaccgacatcacctgcgccgacttcctccggtccccgggcgcccagacccccgtcatcgtccgcttctccaccgtcatccacgagcgcggcagcccggagacgatccgcgacccgcgcgggttcgccgtcaagttctacacccgcgagggcaactgggacctccttggcaacaacttcccc

SEQ ID NO: 20387 - DNA, 395 bp, Oryza sativa
  Clone ID: uC-osflM202006f07b1
gtgttttcccgggcatgaaggtggacaagggcaccatcgaggttgccggcaccgagaaggagaccaccacccagggccatgatgaccttggcaagagatgcgccaagtactacgaggctggtgcccgctttgtcaagtggcgcgccgttctcaagatcggtcccaacgagccgtcgcagctcgccattgatctgaatgcgcagggcctagctcgctacgccatcatctgccaggagaacgggctggtgccgatcgtcgagcccgagatccttgttgatggccctcacgacatcgaccgctgcgcctacgtctcggaggtggtccttgctgcgtgctacaaggccctcaacgagcaccatgttcttcttcggggtaccctcctcaagcccaacatg

SEQ ID NO: 20388 - DNA, 454 bp, Oryza sativa
  Clone ID: uC-osflM202006f08b1
gggcacttaacacttggggctcttcctcctacgttccaaggaattaaagtttatgaaatgagagaaaaagagttggtaattgaacctgtgattcggtgggccagcatagcaaatgtaattgtgaaagtgaaggtgcattctttacaagtgtcggctcagcttttagatttacatataatgctgacaccacgtgtgactctgaagcctcttgtgccaagctttccctgctttgcaaacttgtgtgtttcactgatggagaagccacatatcgactttggattcaaattgctgggtgaagatgtcatggcaatacctggcttgcatcggtttgtccgggagaaaatatcaaagcatatcgcatacttgtatcactggcctaagcttatacaaattcctattttagatgaagcgagtggtgcgacaaaaaaaccagatggaatattacatgtaaagg

SEQ ID NO: 20389 - DNA, 475 bp, Oryza sativa
  Clone ID: uC-osflM202006f09b1
atcgggggaggtcggtgatgatggcgtgcgacgacgtcatcgagatgcgcgtgctgcgggggatcgacgtgaaccgtgcgccggcgggagagacgaccacgacgacggcgagggggcccatctgcagcgaggaagacgaggagcccggcgcgtccttccccaacagcacgctctgcagcctcaggggcaagcgcggcgcaccatctgccgccaccgccgccgccgccgccgtcagcgacgacgaggactccggcggcggatcccgcaagaagctccgcctctccaaggaccaagccgccgtcctcgaggacaccttcaaagagcacaacaccctcaatcccgtaagcaaaacaatcaatgaatcaaactaattaccaatccaccatgaaatcgatcaagaacaatccgattgacttggtcttgctggattgatcagaagcagaaggctgcgctggcgaggcagctgaatcttgag

SEQ ID NO: 20390 - DNA, 484 bp, Oryza sativa
  Clone ID: uC-osflM202006f10b1
agcttttagaaacaaacccctctcactcccagatacctgctgctgccactagcccactaccatggatccttgcaagttccggccgtcgagctcgttcgacacgaagacgacgacgacgaacgcgggagctccggtgtggaacgacaacgaggcgctgacagtggggcccagggggccgatcctcctcgaggactaccacctgatcgagaaggtggcgcacttcgcccgggagcgcatcccggagcgcgtggtccacgcccgcggcgcctccgccaagggcttcttcgagtgcacccacgacgtcaccgacatcacctgcgccgacttcctccggtccccgggcgcccagacccccgtcatcgtccgcttctccaccgtcatccacgagcgcggcagtccggagacgatccgcgacccgcgcgggttcgccgtcaagttctacacccgcgagggcaactgggacctcctcggcaacaacttcccc

SEQ ID NO: 20391 - DNA, 445 bp, Oryza sativa
  Clone ID: uC-osflM202006f12b1
cattttctttatattgcagcaatggcatcctcctcggggctactttactgtgatgtgggggcggctatggtgtccgccgtctcctgcgggccacccaaggtgccaccgggccccaacatcacgacaagcttcggggacaagtggctggaagccaaggccacctggtatggtgcgcccaagggtgctggccccaaagacaacggcggcgcctgcgggtacaaggatgtcgacaaggctcccttcctcggcatgaactcctgcggcaacgaccccatcttcaaggacggcaagggctgcggctcatgcttcgagatcaagtgctccaagccggaggcctgctccgacaagcccgcccttatccacgtcaccgacatgaacgacgagcccatcgctgcctaccactttgacctctccggccttgccttcggcgccatggctaaagatg

SEQ ID NO: 20392 - DNA, 513 bp, Oryza sativa
  unsure (1)..(513): unsure at all n locations
  Clone ID: uC-osflM202006g01b1
ctttttgtacttgctttatgctatacaaagagtatagcggtgtggcatttatgagattgcacttcctggcttctcagaagcgttgtgctgatcagttcactgtgattgttagaaacatacctcatgttttaagccattcaacatctgaaacagtggatgaattcttccgtaggaatcatccagaccactatcttggtcagcaggctgtttataacgcaaacaggtatgctaaacttgtgaagaaaaaagagaggcttcaaaactggttggattactaccagctgaagtttgaaaggcatcctggaaaaagaccaattggaaggacagggtgccttggtttctgcggtagagaagtggatcaaatcgactattaccgtgctagaatcagcgagcttgataagaagcttgcatctgagcgtcaaagagttctcaatgacccaaaagctgntatgccagttgcttttgtgacatttgactcgagatggggagctgctgtatgtgcacagacacaac

SEQ ID NO: 20393 - DNA, 279 bp, Oryza sativa
  Clone ID: uC-osflM202006g02b1
ccgatttttatatctcgctctcaagtcgcagcagcactcagcatcgcggcggccggggcccggggcaacggcgacgaggcggcgcgccggcagcgcgggcgcatcggctccaagcagatactcaaatatttcctgttaactagagtatcttccccttcccttggcgtaaaagaaaaaaaatctcccgtctcgtctcctccgctccttgcgccatctcgctgctgaacaggggaggggcgccgatctccatccggcgagcagagcaggggagggggaggg

SEQ ID NO: 20394 - DNA, 481 bp, Oryza sativa
  Clone ID: uC-osflM202006g05b1
tggagttttaatgtgaagcatggattaaacaaggggatccaaaggaagtcatctgcagcgaggtgaagagagttcaaccagatcttctagttgtgggaagtaggggccttggaccatttcagagggttttcgtgggcacagtgagcgagttctgtgttaagcatgccgactgtccagtcatcaccatcaaacggaaggccgatgaagcaccgcaggaccctgttgatgattgatcccttcaatgtcatacttgagaatgagatattcttcactgctcaatgggtttaatgtacaaaatacaatatggtagtagtgcttggaactagtacaaatctttgcccagtccaccccaaaactagagtgaagatgaagaacactattgcgacaagaggttgtatcctatatgagatacatccaagtttgttatgaacctaagctaccttgatgatgaatcacgtactgggcttcgcagaacataaaa

SEQ ID NO: 20395 - DNA, 425 bp, Oryza sativa
  Clone ID: uC-osflM202006g07b1
gcttctcttttttttttttttttttattttttttaaaaaacggcagtttttcttaccataatttatagagaactccagctacaaaggtgactgacaagcaccagttttaccaaggaatgtgttgcagaccggccaagggagcccaaacactggtatttggtaaggtggctgaaacacggtgttacagtcaggtgctcagggctccggcaatatgggattgctgagatcctctcctgtgacactggaactggcatcaatgacaccgttaggaagggttgctctgttagcgatagctgggctggaatacggggagtatgaagaagccgcgctaccattgttgttcctagatcgaccagcggaactacttcttgttggttttgggcgagctttgcgtcccttgcccatgcacttttagaggtgagggg

SEQ ID NO: 20396 - DNA, 546 bp, Oryza sativa
  Clone ID: uC-osflM202006g08b1
gttttgttttcccctccgactccgactccgatcgatctcaaccccgaatccctcctcctcaccgccggcgagcttccggctgcggcggagatggccacacgttattggatcgtgtatcttcccgtgcagactcctggatacaccgtcaattttctctgggcgcgcctgcaggactccatctcgcgccactccttcgacacgccgctctaccggttcaacgtccccgatctgcgcgtcggcacgctcgactccctcctcgccctcagcgacgatcgtggtgaagtccaacgtcttcatcgagggggtctcgcacaagatccggaggcagatcgaggagctagagcgcgccgggggtgtcgagagtggggctctcaccgttgacggcgtccccgtcgacacctacctcaccaggtttgtgtgggatgagggcaaatacccaacgatgtcaccgctaaggagattgtcggcagcatccaatcacaggtctccaagattgaagatgacatgaaggttcgaggagcggaatccataatgtaaggagccagc

SEQ ID NO: 20397 - DNA, 444 bp, Oryza sativa
  Clone ID: uC-osflM202006g09b1
atcctattcaaatcgaaacccctctctgggatctcgtcgccgaggaattaggaggagagagagcaatggccgccgaggagggagtcgtgatcgcctgccacaacaaggacgagttcgacgcccaaatgaccaaggccaaggaggccggcaaagtggtcataattgacttcactgcttcctggtgtggcccttgccgcttcatcgccccagtgttcgctgaatacgccaaaaagttccctggtgctgtcttcctgaaggttgatgttgatgagctgaaggaagttgctgaaaagtacaatgtcgaggcaatgccgaccttcctattcatcaaggatggtgctgaggctgacaaggtcgttggcgccaggaaggatgacctccagaacaccatcgtgaagcacgtcggtgccactgctgcatctgcttctgcctaagaattctcgc

SEQ ID NO: 20398 - DNA, 227 bp, Oryza sativa
  Clone ID: uC-osflM202006g10b1
gattgtttctccaatatagcaggaaccggtctgtcctttctcgcgtgaagtacctattttccgctgaatcagtggcgtcagataggcgatgagaactggttatgtccatgcaacatgggagagctactcggagcatttaccctttgaaattgttattcattttgtgcctattgtaaacactattttgtttcaataatgagatgtcgaccaaccagttgaattacagc

SEQ ID NO: 20399 - DNA, 564 bp, Oryza sativa
  Clone ID: uC-osflM202006g11b1
agctttcgctcctcatacgacagagagagcgtgacagcgcgagggggttcggaggcgggagcgggcgacggcggcggcggcgggcgccagcgagcggcgaagggcgcgctggagatgaaggagaaggggtcgagggcggcggtggacgagcgctacgcgcagtggaagtcgctcatcccggtgctctacgactggttcgccaaccacaacctcgtctggccgtccctctcctgccggtggggaccccagtttgagaaggctacctacaagaatcgtcagcgtctttacctttcagagcagacggatgggactgtccctaatactctggttattgcaaattgtgaagttgtcaaaccaagggttgcagctgctgaacatatatctcagttcaatgaggaagcacgatcaccttttgtaaagaagtacaagactataattcatccaggcgaggtgaacaggattagggagcttccgcagaacagtaagatcattggcactcataccgacagcccaaatgttcttatttgggatgtcgaggcccagccaaatagacaagctcaactg

SEQ ID NO: 20400 - DNA, 249 bp, Oryza sativa
  Clone ID: uC-osflM202006g12b1
caactcatcataatgttccatccgacggagttggtgaagagggcacactgaattatccatatgagttgtccggtgaacggcggcagtccagctcatgagcagaagcagttggcctccagcaagatcgcttcgtttcaacagttcattcgcccatgacttctatgccagtgattcatggcacgtcgagcttcccggctgctgttgctcataggatcggcacactggatattagaatttttacacactgac

SEQ ID NO: 20401 - DNA, 553 bp, Oryza sativa
  unsure (1)..(553): unsure at all n locations
  Clone ID: uC-osflM202006h04b1
gcactgttcactctaggcggctgaagcgaacgacaccggcgtcaagagtatcaagcacggccatggcggcggcgaacggcgatgccagccatggcgccaacggcggcattcagattcagtccaaggagatgaagacggccatccacagcaacgatagccccaagaccctcctcaagagtgaatccctccacgagtacatgctgaacacgatggtgtacccgcgggagaacgagttcatgcgcgagctccgcctcatcaccagcgagcacacctagtactatttgtctcctaatttatactctctctccattccaaaaaaaaaaaactaattctaagtttaaatctggacacactcctaggttttgaacctagacacatatatgttcagattcaaatctaagattaggttttttttatggaggtagtacatgctaaattcagcgtgattaattagaagctgatgatatgatgctgtgttgtgtaacatttttgttggattcgatcagtgggttcatgtcgntcgcccccgaggaagggcagctgctgtcgctgc

SEQ ID NO: 20402 - DNA, 444 bp, Oryza sativa
  Clone ID: uC-osflM202006h05b1
gttagtttgtcttacattgtgaaatggaggtagtaggagtgattatcatgttctgttggtctatatgtaacactaaatattacctcaatgtgatcatactaggcactagtttgagttgaatcatggagtggggctgtgataataactttgtgtggtctttgtagaactctgtaacccttcaattttctgacctattagtctcctttctcagcacctatccaatttcgattctgaaaagggagttttttttaggggaaaaagggaggtgtttggtctagcttcatagttcatagagatatcatggcgacatggtgtggtaggctaaactgttgcgaactttgaagcatgtaggattttatttgtacatattatgcgtgttcgatactccgtacaggctacacagtctcttactttctataaggtgcttctctgccatagatgaaa

SEQ ID NO: 20403 - DNA, 495 bp, Oryza sativa
  unsure (1)..(495): unsure at all n locations
  Clone ID: uC-osflM202006h10b1
gattgtgtttagagagagggggagagagagaagggagctgcagtctgcattgcaatgccccacccaacccaacccatgaaatgaaatgaattcaatgaacccatatcgatcgattgatatgtgcctccgcctccgccgatctgcctcctcctgggccgccgacgtcgctgaccacgctcgctccggtcgccacgacgccgcgctcactgtcttccgccgcgttctcgccgtccacccgaccaccgccgccgacgacgagctcgcctgctccgccctcctccgctgctgcgatgcccgcttggcctaccagatacacgcccaggcatgccggcgcggcttggtggcctccaatcccgtcctggcctgctccctgctcgccttctacgctgacgccgactactatgccaccgtcgtaataccgnctgcctgcaacctgttcgacgaaatggcacacaaggatgccgtctcctacacaagcatgatctttgctctcgt

SEQ ID NO: 20404 - DNA, 379 bp, Oryza sativa
  Clone ID: uC-osflM202006h11b1
aatatatgcgcggtgcgcgaggcgagactcgagaggggggatatgagccacaaatcgggcgctgaacactataattaggcagctatctccgtggaaagagagagtaggctgtcatggacagcttaactgattatgaacagcgggggcgttgccggtggtggtagtggcgcgaggttatcgtcggactcggcattactgtggtgttgctgactaggccatactgcgtggccgaagaaacaccaaggcaggggatctacggtccggctccagcaacgatcctggaggggaaccaccctgagatcaaggacaaggtagtcgccactaacacaccagaggactcaacttggggaactaaggagaccgcctacttctgtggtgg

SEQ ID NO: 20405 - DNA, 455 bp, Oryza sativa
  Clone ID: uC-osflM202007a01b1
ggtctttagtccaagagcgtgacgcatgttcggtaccacgcgcacaaactgccgtgctcggcttctccatcgatcaccggcataggtgagccatgcaaagctcgccgggcgcccccaagctccggccaccccctataaaacccgccgctcctcaccgtcaccggcaagcacagcaaagcagcagcagcaaaggtaaggtaatatttgcagcatcgtctgaagaagcacaggagcaggggagatatggcggcgagcaaggggaacgcggcggcggcggcgtgcgcgctcgtgctggtgctgctggccgcgggcgcggaggcgcacggcggcggccgggaggagtgcgtgccgcaactgaacaggctgctggcgtgccgcgcgtacgcggtgcccggcgccggtgaccccagcgcccgagtgctgcagcgcgctcaggttcttcttccagggctgcg

SEQ ID NO: 20406 - DNA, 486 bp, Oryza sativa
  Clone ID: uC-osflM202007a02b1
gtggttttaaggatatcagatgcaaccaaccttgtggaaagaaccggcaatgtggaatgcacgcttgcaacaggtcttgccatccttccccttgtgatccaccacctgcaaatggagatgctagctcaagtactggtggtagagcttcatgtggacaggtatgtggtgccccaaggagggaatgtaagcacacttgcacagctccatgccacccatcatcaccttgcccagatttgagatgtgaattccctatgaccattgcctgctcttgtggccgtatcactgcaactgtgccatgcagtgctgggggaaccgccaatggcgataatatgtttgaagtatccatcatacagaagctgccaatgccactccagccggtggaatctgatgggaggagggtaccacttgggcagaggaagctcttttgtgatgaggactgtgcccagatggagaggaagagggtccttgctgaagcatttgacatca

SEQ ID NO: 20407 - DNA, 249 bp, Oryza sativa
  Clone ID: uC-osflM202007a03b1
gtcgtttatcctgccgatgacgctcaagaacgccatcgagctgggcctgctcgagacgctgcagtccgccgccgtcgccggaggaggggggaaggcggcgctgctgacgccggcggaggtggccgacaagctgtcgtccaaggcgaacccggcggcggccgacatggcggaccgcatgctccgcctgctcgcctcctacaacgtcgccaggtgcgagatggaggaggccgccgacggcaagctctcccc

SEQ ID NO: 20408 - DNA, 395 bp, Oryza sativa
  Clone ID: uC-osflM202007a04b1
cattattctccgctccctcaaggagcacttcctcgaggtctccaagatgacgcccccgcccaagatcagcccgcccaagccctacacgatcgtcaagggcgccctggaccaggcatccggccccgtgctccgccgcgggtacggggatgccggcgaggagatctcaatctccgtcgccaggctcgccaacatcatgccccccggcgccgactacgactcggacgacgacgacggcggcgggggtggggtgagcgagtcgattagccagcttttcctccacgtcgacatctccaggccagggagcagcaagtcgctgcagttcctgtgcgggctgtaccccgacgccggggggatccattccgtctgcctccggccgaagactgccgagtctggga

SEQ ID NO: 20409 - DNA, 494 bp, Oryza sativa
  Clone ID: uC-osflM202007a06b1
cgcaatttaaaccttcgtgttcgtcttgctctcgccgctgattcgattcgatccgatccgatccaaggggaggggaagcaatggcgacgaagaggagcgtgtggacgctggtggaggcggctctgagggggaagaaggtgctcgtgcgggccgacctcaacgtgccgatcgacgacttgcagaagatcaccgacgacacccgcatccgcgcgtgcgagcccactgtcaagttcctcctcgagaaggtcgccaaggtcatcctcgccagccatgtgggccgaccgaagggtgtcacccggacgtacagcttgaagcctcttgctccacgcttgtctgagctacttggagacgatgtcgtgatggccaatgattgcattggtgttgaagttgacaaattggctgctgctttgccggagggtggtgttctactcctagagatgttagattctacaggaggaagaacagaatgatcctgagtttgccaagaagcttgc

SEQ ID NO: 20410 - DNA, 351 bp, Oryza sativa
  Clone ID: uC-osflM202007a07b1
cattcacttgaagaaaaaaaacacgacgaacacgttaaaaaaaggtcgaagagaagtgggagacccaaaccgcgaacaatgtgtggaggcgccatcctcgccgagttcatcccggcgccgtcgcgcgccgcggcggcgaccaagcgggtgaccgccagccacctgtggccggccggctccaagaacgccgcccgcggcaagagcaagagcaagaggcagcagaggagcttcgccgacgtcgacgacttcgaggccgccttcgagcagttcgacgatgactccgacttcgacgacgcggaggaagaagacgaaggacactttcgtgttcgcgtccaaatctcgtgtcgtcgc

SEQ ID NO: 20411 - DNA, 458 bp, Oryza sativa
  Clone ID: uC-osflM202007a11b1
actgcttccagctctggccgtagcagcagcagcgcgcgcgcgggtgcctgtgcccgccgctgctcacggctcctcgccgccggcttgtgcctccgatacggggtgcgagggggtctggaaaccggcggatctcggccgctcgccgccggagtccggcacgggtggaggagtacggcgacccgcttttttcttagcgattttctttcctcttctctcaggctgagctccccaagcgccgtgaattggtaggacttttgtgggaggcgctggtttctgctctactcacagcaagtttctaaagactcggaagcaattgattgtgaagtattcctttcagttcggcttgaagtagtcctctcagaccattgccgcatataagagtagcttattaccttgtataggaaaaagtagaaagcttattccgagcatgtcttgttcataatagactggactctttg

SEQ ID NO: 20412 - DNA, 245 bp, Oryza sativa
  Clone ID: uC-osflM202007b05b1
gctgttccgtgagtcctacgcaaataagagggcttcacactaaaccttttcttccaacattaatgtgactttttaatttttgcactttattatgttgattactggaacacaactagtgaaacacagttatggaatagaatgtgttgcacgacaggggagggctgtgcttctgtgtatttccaacattgtctctgaatctgttcatgtagttgttcaagttttatgcttatgacagattggtggtt

SEQ ID NO: 20413 - DNA, 397 bp, Oryza sativa
  unsure (1)..(397): unsure at all n locations
  Clone ID: uC-osflM202007b06b1
gtgaatcagaaaaaaggaggagactagggctctgctcctccccctgcgccggttggtcggagctctgcctcctcctgattctgctgtcccctcccctccccgatccacctcctcctccatctccttctcctcccgccgatccgatgcgtcatcactagcctcccctcccgcgcttccaccaaccactgcccctccaccctcacctcgtggtttggtaatttggttggccgcttgtccccttccatccaccgatccaccttcccgttgctgcgnggaatggccgtcgtagagacctccgccgaccacgccgcgcctccgccgcccgagggggacgccggcgagagggagatgccggacttggaggacctgttttcaagctcaacccatggccgaggag

SEQ ID NO: 20414 - DNA, 491 bp, Oryza sativa
  unsure (1)..(491): unsure at all n locations
  Clone ID: uC-osflM202007b07b1
tcgatgcgttccgagatgccagatttaaacttataccaagcattgttgagggttattggatggtaaaacgtgcagttggaacaaaagcttgtcttctgggaaaagcagtaacatgcaattaccttcgccaggataactttctagagatagatgttgacattggttcttcatccgttgcacggagcattattggtctagtcctgggatatgtcacaggccttgttgttgatcttgctattctaattgaggcaaaggaagagaaagagctgcctgaatacattcttggcacagttcgcctaaatcgtgcgaatcccgactctgcagtacccatctaaagtcagttctatatttcttggctcaattatccttttctcccacagaaaaggtgggattttttttggcagatctgcttttctgcaattttctttattatctgnggttgcataccatttgtaaaaaagaaggtagcatcaatttcacatgtacagatt

SEQ ID NO: 20415 - DNA, 490 bp, Oryza sativa
  Clone ID: uC-osflM202007b08b1
cgctcgtgctaccaatgttagcgctaggttggacgcacagcagaagaagctcaaccttccagtccttcctacaaccacaattggttcattcccacagactgtggagctcaggagagtccgccgtgagtacaaggctaaaaagatctctgaggatgagtacgtcagtgccatcaaggaggaaatcagcaaggttgttaagatccaggaagagcttgacattgatgtgcttgttcacggcgagcctgagagaaacgatatggcttgagtactttggtgagcagctttctggttttgcatttactgccaatggatgggtgcaatcctatggatcccggtgtgtcaagccaccaattatcttgggtgatgtgagccgccccaacgccatgactgtgttctggtccaagatggcgcagagcatgacctctcgccccatgagggaatgttgactggttccgtcacaatccttaactggtcttttgcaagaatgacc

SEQ ID NO: 20416 - DNA, 133 bp, Oryza sativa
  Clone ID: uC-osflM202007b09b1
ctctctcctctctctctctctcttgagttcttggttgatcgccattgccgcggaggagctagaggagatgagatgaggggtgcggggtttctgctgctcgttgtgttcgccgttgccgtcgccggtggggcgg

SEQ ID NO: 20417 - DNA, 486 bp, Oryza sativa
  Clone ID: uC-osflM202007b10b1
ttataagacttgcatctgtataatccttcagaagcctcaccagaatgggtttcagacaacgcatacccgaccaaccaaccattgatatggtacaagaccaagtttacggctcctgcaggtgatgaccctgttgccatagacttcacaggaatggggaaaggggaggcatgggtgaatggccagagcattggtcgctactggccaacaaatttggctccacaaagtggctgtgtaaactcatgcaactacagaggagcttatagttcgaacaagtgcctaaagaaatgtgggcagccatcacaaactctgtaccacgtgcccaggtcatttctccaacctggtagcaatgatctagtcctctttgagcagtttggtggtgatccaagcatgatatccttcacaacaaggcagacaagtagtatatgtgcacatgtttcagagatgcattcagcccaaattgatagctggatctctccccaacagacg

SEQ ID NO: 20418 - DNA, 431 bp, Oryza sativa
  unsure (1)..(431): unsure at all n locations
  Clone ID: uC-osflM202007b12b1
gttctttgtgtgcggttttgaggggagtacatcggcatgaggatccagtgcgacgcgtgcgaggccgcggcggccacggtggtgtgctgcgcggacgaggcggcgctgtgcgcgcgctgcgacgtcgagatccacgccgccaacaagctcgccagcaagcaccagcgcctcccgcttgacgccgngcttcccgccggccttccgggctgngacgtctgccaggagaaggcggcgttcattttctgcgtggaggacagggcgctcttctggcgggactgcgacgagcccatccacgtcccggggacgctctccggcaaccaccagcgctacctcaccaccggcatccgcgtcgggttcagctccgtctgtagcgccaacgccgaccaccttccgccgtcagcgccaaggggaacttccagccgcccggcagc

SEQ ID NO: 20419 - DNA, 482 bp, Oryza sativa
  unsure (1)..(482): unsure at all n locations
  Clone ID: uC-osflM202007c01b1
ctctttatttcactagctacttctccaagttgaagagatcaaagctagaatgggcagctgcaagattctcctggtcacagctctcctggtcggcattgcctcccagcagagctctgccaccaggaacctgcacggagatcatcacgtcgcggaaaagaagttcggcggcggcggcggcggctacggtggcggtggcggtggagggtacggcggcggtggcggcggcggcggctactcaccgtcgcccacgaccggtttcaccgggagctgcgatttctggaagagccacccggagaagataatatcgtgcatcgggtcgctggggagcatcgtggggtcgttcggggacgtgtgcagcggcttcttcgggagcaagctgcagacgctgcaagacgcgctgtgcagcacccgcaaggactgctacggcgacctgctccgggagggcgccgncgcgtacatcaactccgtggccgccaagaagc

SEQ ID NO: 20420 - DNA, 461 bp, Oryza sativa
  unsure (1)..(461): unsure at all n locations
  Clone ID: uC-osflM202007c06b1
ccccgttccccgcgtcccgtctccgatccacccaaacacccgcaccgccgcgctacgcgagcacggcaccgcggcgcggcgcgactccgcaggcgacaagccgaggagaatcccgcgcccgcccgcccgcatcaccgccggatggccgccggccgtcgccggtagggcgataggcgggtagatccagatccggcggggcgggatcatatacaccccggccgatggcggcgcggtgtgngcgctgttccttctggacatcaagggccgcgtcctcgtctggcgcgactaccgggnnngacgtctccgcccttcaggctgagcgcttcttcaccaagctcctcgaaaggagggcgactccggaggcgcatcgccggtggtctacgacgatgccggggtcacctacatgttcatccagcacaacaacggggtcctactaaccgcctcccgccagaactgcaacg

SEQ ID NO: 20421 - DNA, 303 bp, Oryza sativa
  Clone ID: uC-osflM202007c07b1
cccacctcagattagtcccaaagattattcgcgattaagcttgtttttttttgttcctaatcgcagatacaaagaattcgctttgcgttcgccactcgagaaagattttgttttttttttttggttaacggataattaagcgccgcccctcctcgtcgtcgtcgccgccgcatggaggccgtcggcgtggctccggcccccgcgggggtgccggagaagaagctgctcgaagtgaaggagtcccggaaggcggcgccggcggcgccgaccacgttcttggcggccaagtgggctatgaataag

SEQ ID NO: 20422 - DNA, 486 bp, Oryza sativa
  Clone ID: uC-osflM202007c08b1
ctctctcctctcttcgtccctgcgtagagagggagagagagagaaggaaccccttttgcctcctctttcctgccaagaaccacattttcccccaatctttcttcagattttccacacaaatctgtacgccttttcggtctaaagaaaaattcagcatcgatattggtgtctttctgcaagaaaggtgggcattggcagcaccaacgctccatccatttaccttctgagcaaacagcttcctgtgaagatcaccttttcttggtgctgcaatctgcattggcaccaaatcaagattcaacatttgctcccatatcatcaaaccaagattcagcagtgtgattttggttgccttgaagctgcattgaggaacctttcatgtgatttttttgatgcacattgatcatccatggctgcgaaaaaccatgcgagatcccaggacttctggaggagattctggtccatgctgtcttatgcttgcagcgagct

SEQ ID NO: 20423 - DNA, 487 bp, Oryza sativa
  Clone ID: uC-osflM202007c11b1
caccattggttcctgaaattgagtcatggctgccaagctagctcgcctccacagtctccgcgaacgcctcggtgccaccttctcgtctcatcccaatgagttgattgcactcttctctaggtatgttaaccagggaaagggaatgctccagcgtcaccagctgcttgcggagttcgatgccttgatcgaagctgacaaagagaaatatgctccctttgaagacattctccgggctgctcaggaagccattgtgctgccgccctgggttgcactggccatcaggccaaggcctggtgtctgggactacattcgggtgaatgtaagtgagttggcagtggaagagctgagtgtttctgagtacttggcattcaaggaacagcttgttgatggacacaccaacagcaactttgttcttgagcttgattttgagcccttcaatgcctccttccgcgcccgtccatgttcaagtccatcggaaatggggtgc

SEQ ID NO: 20424 - DNA, 462 bp, Oryza sativa
  Clone ID: uC-osflM202007d01b1
tctctttcctttctttattattctcccgctcccgagacgacaggaggaggtggagggggagagccatttcttcctcttcttctctcgccggcggcaaccctgcgagcctgcagtgacgccgccgccgccgctgcgtcggttctgagtttgcttcgtctccgggctcgctggattgagctttgtcaagagcagaagaagtcatgtttagctttaggaaaaagcatgcctctcgcttcgattcagatgacattgagcaacaagaagcaaagatccaagagctcagagctgcacttgggccgttgtcttcctctggtaagaaatattgtactgaagcatgcttgagaagatatctagaggcccgcaactggaatgtcgataagtccagaaaaatgttggaagaaagtcttaagtggagaacagcttacaggccagaagacatttcgtggcccgagatttctgttg

SEQ ID NO: 20425 - DNA, 469 bp, Oryza sativa
  unsure (1)..(469): unsure at all n locations
  Clone ID: uC-osflM202007d03b1
ttctgttcacagcaccaccccttctgctgcatctcccacctccctctgaattgtgggcctgaggcgatggcggcgctcgccccgtccaagatgctcggcacccggctcaacttcgccggctcctcccgctacgccaccgcggcaccgaccaccggagcgcagaagatcgtctccctcttcagcaagaagcccgccccgaagcccaagcccgccgccgtcacctcctcgagccccgacatcggcgatgagctcgccaagtggtacggccctgacaggaggatcttcttgccggagggtctcctggaccgctcagaggtgccggactacctcacggnagaggtccccggagactacggctacgacccttttggcctcagcaagaagccagaggacttctccaagtaccaggcctatgagctgatccatgccaggtgggcgatgctcgggccgctgggttcatcatccccga

SEQ ID NO: 20426 - DNA, 463 bp, Oryza sativa
  Clone ID: uC-osflM202007d04b1
ctcgagctgaactgaagcaggggaggggaggagaggagaggagagagcaacgcgttcaccgttgagagaagagaaggaagtaagacgagcgcaatgcgtcgcgtcacggtgctcgttctgctcctcgcctgcgcggcggcgcgcgccgccgccgccgtcgtcaccgacgggctgttgccgaacggcaacttcgaggagggcccacccaagtcggacctggtgaacggcacggtggtgcgcggcgcgaacgccatcccgcggtgggagacgtccgggttcgtggagtacatcgagtccgggcacaagcagggggacatgctgctggtggtgccgcagggcgcgcacgccgtgcgccttggtaacgaggcgtccatccggcagcggcttgccgtgaccaggggcgcctactacgccgtcacgtttagcgcggcgcgcccctgcgcccaggcggagcagcttaacg

SEQ ID NO: 20427 - DNA, 488 bp, Oryza sativa
  Clone ID: uC-osflM202007d05b1
cctccttcttcccctctccgctcgcctccgcgattcccttcccatttcgccgccgatgaagggcggcgggggcgcggcggcggcgtcggcggcgccgggggactacgtctacttcaagtccgtcgtcccgctccacaagatctcgattggaccgaaattatggaggtactatgattttggaccaaagactgttccacctcttgtctgcatcccaggaattgcaggaacggctgatgtgtactacaaacagatcatgtctctctctatgaagggttatcgcgtgatgtcaattgatgttcctcaagtttggaatcaccaggaatggattcattcatttgaaaaatttttggactccatgaatatccatcatgttcatatttatggtacatctcttggcggatttcttgcacaaatatttgcttaacaccgttccagtgttaattggaccccttcctttttgctgaagcgggacctattgacaggaatcc

SEQ ID NO: 20428 - DNA, 488 bp, Oryza sativa
  Clone ID: uC-osflM202007d07b1
atcgcattactcttggtgaaggtcttgtatgcaacacattgtccacaaagaccatggtgcagttcgagttttcatgcacaaaatgtagacaacaacataaacaattgataagcatgataatattaattcgtactattctacatttgataatacaccacaaacaactttatcacatacttacaagatgataaacttgttgtctcatggtatagtaaacttttgcatgcaaaacaaccttttgatatgtcacaataactgaacatttagtacagaactaatagataaaatcacaagtgtatctcagtgtggggacaagaacaaaattaccccaaataatatctttaccttaataaaattgccgcaaataataccttaaattgaacaaaattgccccaagaaatagctatgctagagatatttagcgtttgtatgcagtcaaatcacagaacttcatttacatgaataagattgtaaatcatgatagctat

SEQ ID NO: 20429 - DNA, 480 bp, Oryza sativa
  Clone ID: uC-osflM202007d08b1
gtggacctctccgactgcgggccgatggtgctcgacgtgctgctcaagatcaagaacgagcaggacccgtcgctcaccttccgccgcagctgccgcgaggggatctgcgggagctgcgcgatgaacatcgacggcgacaacggcctcgcctgcctcaccaagatctcgtcggcgtcctcggcctccacgatctcgccgctcccccacatgttcgtcatcaaggacctcgtcgtcgatatgaccaacttctacaaccagtacaagagcgtggagccgtggctcaagcgcaaggacgcgccgccgcagcccgggaagggagatcccgcagaccaaggccgaccgcgccaagctcgacggcatgtacgagtgcatcctctgcgcctgctgctccacctcctgcccctctactggtggaacccgaggagtacctcggccccgccgcgctcctccacgcaacaggtggatacaggacagccgtga

SEQ ID NO: 20430 - DNA, 473 bp, Oryza sativa
  Clone ID: uC-osflM202007d11b1
tgtgtatcagcaccccatggtgctcgtccagattcctatgtgcaatgaaaaggaggtctatgagcagtcgatttcggcggcttgccagctagattggcccagggagaagtttctgattcaggtgctcgacgattccagcgacgagagcattcagctgctgatcaaggcagaagtttccaagtggagccatcagggtgtgaacattgtgtatcggcatcgggtgctgaggaccggttataaagctgggaacctcaagtctgcaatgagctgtgactatgtcaaagattatgaatttgtcgccattttcgacgcggacttccagccaacaccagattttctcaagaaaacgataccacattttgaggggaatcctgagcttggattggttcaagcacgatggagctttgtgaacaaggatgagaacctctgacccgtcttcagaatatcacctgtgcttccacttttgagtagag

SEQ ID NO: 20431 - DNA, 457 bp, Oryza sativa
  Clone ID: uC-osflM202007d12b1
ctccaccccccaccggccggccccgtctcgccgtcgccgccgtcgtctccgccacccaaaaccctagccctgcagcctcccctccgcagctcgccccctctcctcgccatggccaccaacggcagctccccgagggcgagggagactgagagcagcctggagaaggtgaagcggcagctctcgtcggggtccgggcggtacctgctgcaggggccactgctgaagcgatctgagacgttgaggaaatggaatgagagatgggtaattttagaccctacttcaggaaagatggaatacaaaattcggagaaatgaaactgccattaaaggaaccattatatttgatgcttcaagcactattaccttgtcccctgtaaatttccaagggatgccaaagtatgatggctgctgtttctacattggaactcctcaaaaaaggattactttctttgtgctga

SEQ ID NO: 20432 - DNA, 445 bp, Oryza sativa
  Clone ID: uC-osflM202007e01b1
atcggtaaaggttaggtcggtatgctgttgagtcgtacctggagcagatcttatctcatggatttttccatgcagatccgcatccaggaaatattgctgttgatgatgtcaacggtgggaggcttatcttctacgactttggaatgatgggaagcattagtccaaatatccgggaagggttgctcgaagcattctatggagtttatgaaaaagatcctgataaagtgcttcaatcaatgattcaaatgggtgtccttgctcctactggagatatgacggctgtcagaagaacagctcaatttttccttgatagcttcgaagagcgtttagcagcacaaaggaaagaaagagagatggcgactgaggaacttggatttaagaagcaattaactaaggaggagaagtttgaaaagaagaacaaaggcttgctgctatcgggaggatc

SEQ ID NO: 20433 - DNA, 462 bp, Oryza sativa
  Clone ID: uC-osflM202007e02b1
cttttgtgacacatatagtgtaggtttacttccagcttcgtcgattaccagacggcaccggcgtcgcgcgagcgagcttgatcttgcgccttgcgcctgctagctgcttcggcggcggcggttatcttcttgcgatctgtaacagccccgatcaagaaaggatccaacccacctaggaggactaacctgaacgtgctaatgagttcaaagctagtaacatcacctctgaaatccatggagcagggccatctagagcaacctctgcgcgatccgcaggcgccggcggagcagcatgacatggggttatctcccctgacgctcctcggcttcgccttcctgaccttcaactcgggaatggcagtgtacagatcagatagagacttggcaaccatctttttcgtggtcttcttctacgttgacctcgtatcggttctttactttctccgattatttgagaagacg

SEQ ID NO: 20434 - DNA, 483 bp, Oryza sativa
  Clone ID: uC-osflM202007e04b1
cgacgcactacttcgtggaggaggtggtgaagggcgtcgacgagagcgacctccaccggacgtggatcaaggtcgtcgccacccgcaacgcccgcgagcggagcacccgcctcgagaacatgtgctggcgcatctggcacctcgcgagaaagaagaagcagctggagcttgagggaatcctgaggatttctgcacggaggaaggagcaggagcaggtgcgccgcgagacttcggaggaccttgcagaggatctgtttgaaggcgagaaggcggacaccgtcggtgaattggcacagcaagacactcccatgaagaagaagttccagaggaacttctcagagctcaccgtcagctggtccgacgagaacaaggagaaaaagctgtacattgtgctcatcagtcttcatggtctagttcgtggcgataacatggaacttggtcgggattcaaatactggaggacaggtgaaatatgttgttgaac

SEQ ID NO: 20435 - DNA, 439 bp, Oryza sativa
  Clone ID: uC-osflM202007e05b1
tttagcttctcagccttttgcctctctttctactctctttcttggccgtctctcttatatccctcaatttaaccatcgagggcggccaaaaaaaagagagaaaggaagagcaaaataacacattacaccatggcgcgattcgtcatcatctccgtcgtcgtcgtcgccgccttcgccgctgccgctgtcgttgaggcccgggttggacctatcgacgtcgctccgaccaacctgatcaccaacccactcggtgccatcatcgacaatggccgcaagatcaccggcgccgtcgtcgacgagtgcgcctggacctgcgatcatgtcgcggcgggtaacaagaagatgtgcaacacgctgaggaagctgccgggggtgagctcgccgaaggagctcctgacggcggcggtgaagctgtcgatgaggaaggcgaatgcggcga

SEQ ID NO: 20436 - DNA, 492 bp, Oryza sativa
  Clone ID: uC-osflM202007e06b1
aacccaccgtggccacgcccccggaggcatcgagggcagcacagttgcgccgcgccgacggtgccggacgagcagccgaccggccgtcgaccagtggctcccaccgagtccaggttcctcccgcggcgccacccaaaggcgcagccgcgcgaggtaccccgggcggcggctgcggcaagtgagtatgaaagcattgaaaaaaaaactcctttgctgggccggtggaaaaaagaacaagtacattgagatgttcttgactccagaggatgcatttgagctggctacaaaagagctacagcatactgctgtgtccaggatattattgatttgaagaaaggctatttgaggcatgctgcttgtgatgggacacattttaagcttatactccactatgccccttttacacgtgccaaggtgtgatccattgtgagttcttgtcaatagctaatttgagtatttattcatatcatgggctcattgctaatcttagtt

SEQ ID NO: 20437 - DNA, 481 bp, Oryza sativa
  Clone ID: uC-osflM202007e08b1
gttcagtcacagaggatatcctgactgggtttaagatgcactgccgtggctggcgatccatctactgcatgccgataagacccgcgttcaagggatcagcgccaatcaacctttctgatcgtctccaccaggttctccggtgggctctcggttccgttgagatcttcctcagccggcactgcccactctggtacggctacggtggtggtcgtctgaaatggctccagagattgtcctacatcaacaccatcgtctacccgttcacctctcttcctcttattgcatactgttgcctgcccgccatttgcctgctcacaggcaaattcatcattcccacggtaagatgcctgtctctatacatgtttttggtttgagttctgatgttgaacattgcttagtgacattattcatttgtcgttcttaatttcagctctccaacgctgcaaccatatggtttcttggcctcttcatctccatcatc

SEQ ID NO: 20438 - DNA, 489 bp, Oryza sativa
  Clone ID: uC-osflM202007e09b1
gtacaatggcacatcaaagaagctctccctttctcgcaatgtgctctgctccaagtgcaatggcaagggctcgaaatctggtgcttccatgaagtgctctggttgtcaaggttctggtatgaaggtccaaattcgccagttggggccaggaatgattcagcaaatgcaacatccctgcaatgagtgcaagggaactggtgagaccatcagcgacaaggatagatgcccaggctgcaagggtgagaaggtggcgcaggagaagaaggttcttgaggtggtggtcgagaagggcatgcagaatggacagaagatcaccttccctggtgaggctgatgaagcgcccgatactgtcactggagacattatcttcgtcctccagcagaaggagcatcccaagttcaagagaaagggagatgacctcttctacgagcacaccctgaacctcactgaggccctttgtggcttccagtttgttctcactcacttgga

SEQ ID NO: 20439 - DNA, 468 bp, Oryza sativa
  Clone ID: uC-osflM202007e10b1
gtgaaaccacagcgcggagcgagggaaggcggcggcggcggcggcgcaccactccaagcgggggagggaccgggcggaggagttcagcgatgggggagagtactgctcctacctcaacagcggcggaggtggcggcggcgcggggaagaagggccgcggcgggggcggcggtggcgggggcggggtcgcggccggctcgtcggagtaccgcaaggaccgggaggagtggacggacggcgccatcagcagcctcctcgactcgtacacggaccggttcgagcagctcaaccgggggaacctgcggggtcgggactgggaggacgtcgccgccgccgtgaccgacgggcagggcaagagcagcgggggcaagagcgtggagcagtgcaagaacaagatcgacaacctcagaagcggtacaggggagtgtgccagcggctcgccggtcgggggcctctgccgtcagccact

SEQ ID NO: 20440 - DNA, 483 bp, Oryza sativa
  Clone ID: uC-osflM202007e12b1
tcgggaagaccctggaggcggtggacatcctcaagctcatgacctccacctacatcgtcgccctgtgccaggccgtcgaccttcgccacctcgaggagaacatcaagagctccgtcaagaactgcgtcacccaggtggccaagaaggtgctcaccatgaaccccaccggcgacctctccagcgcgcgcttcagcgagaagaacctcctcaccgccatcgaccgcgaggccgtgttcagctatgccgacgacccgtgcagcgccaactacccgctcatgcagaagctccgcgccgtgctcgtcgagcacgccctcaccagcggcgacgccgagcccgaggcctccgtgttctccaagatcaccaagttcgaggaggagctccgctctgcgctgccccgggagatcgaggccgcccgcgtcgccgtcgccaacggcaccgcccccgtcgccaccggatcgtcgagagccggtcgttcccgctcta

SEQ ID NO: 20441 - DNA, 491 bp, Oryza sativa
  Clone ID: uC-osflM202007f01b1
actttttcgagagggtgaccctacttttcgagaagagcttcttaattttgcacagagggggcgtattttgcagctctcaaacttcaaggatgactccagtccaattgcttgggactgttctgcatgggttcgtacatatggtctgtttctggaggaaagattggaatgcttcagggtcctcaagtatgacgttgaagctgaacgtttgtccaaacaaggtcaaggtcctgaaaaggggcacagcagaaccagagaattggagtcccaggatctgttagagcagttgccagctttgcagcagttactatatcgacttgttggatgtcggccggaaggagctgcaaataataactacttggtgcaatatgctctagctttggtgctaaaagagagcttcaaaatatattgtgcaataaacgatgggattattaaccttgttgatagttttttgagatgcccagacatgaagcactcaaagcccttgaaattta

SEQ ID NO: 20442 - DNA, 482 bp, Oryza sativa
  Clone ID: uC-osflM202007f02b1
ctgattcacgcggcgcggcggaccagctcaatttgcctgccgctcctcgtcttccggtggggcggaggagggggacgccgggcgggcgggcgctcgcattccggagcggggagcgcgagctcgatcgggcggggatatggcggtggggggagccgggagctccagatccgtggcgccgtgctgctgctgcgccgtgctgctcgcggcggcgctgctcttctccgcgccggccaccacagaggcttatgatgcgctggatccaaatggaaacatcacgataaaatgggacgttatgtcgtggactcctgatggctatgttgctgtggtcacgatgttcaactatcaacaattccggcacatccaggcacctgggtggcagctggggtggacatgggcaaagaaggaggtcatttggtcgatggttggagcacagaccactgagcagggcgattgctcaaagttcaagggtggcacgccccact

SEQ ID NO: 20443 - DNA, 301 bp, Oryza sativa
  Clone ID: uC-osflM202007f03b1
gtggttttgtgccacaccctggacggacaggctagctcaaaacaatggagactcgggtattggcactcgcaccatggctgctacaggtacctctgcagctggccacagcgtacgatgtcatccaccgaagcctacaggccatacacgcgccgagctcgtgacctgcctgcatggtcagccccgtgctcacgacaggagaccacttacaggcacggaagaactggatcaacaatccaaacgggccactgccatacaagggatgtgaccacctattataccagtacaaccccaagggagctga

SEQ ID NO: 20444 - DNA, 471 bp, Oryza sativa
  Clone ID: uC-osflM202007f04b1
cagtatcgaatcctctcttctcctcgtgcccaccaccaccaccgtagcaatggcgggcaacgggccgatcaacaaggaggacccgctcaactggggcgcggcggcggccgagatggccggcagccacctcgacgaggtgaagcgcatggtggcgcagttccgcgagccgctggtcaagatccagggcgccaccctccgcgtcggccaggtggccgccgtcgcccaggccaaggacgccgccggcgtcgccgtcgagctcgacgaggaggcccgcccccgcgtcaaggccagcagcgagtggatcctcaactgcatcgcccacggcggcgacatctacggcgttaccaccggcttcggcggcaccttccaccgtcgcaccaagggacggccccgccctccaagtcgagctcctcaggcatctcaacgccggaatcttcggcactggttccgatggccacacgctgccgtcgg

SEQ ID NO: 20445 - DNA, 488 bp, Oryza sativa
  unsure (1)..(488): unsure at all n locations
  Clone ID: uC-osflM202007f06b1
cgtaattctagctccggccttccaccaggcttcgatcggcgacggcgacatggcaggcggcacgggcatcggcgcggacgagcaagagcttcctctgttccacccttccccgtgcgcctactacgtgcagagcccctccgccgcgtcgcacacgctcagccacccggcgtcggagtccacggcgatcatcctctccccgttccccgacgccgcgttcgccgccccgcgccactcccgcgtagtcgacgacgccaccgcgcacgacaacgacgtcgaccaggaaggcgtcccgcctcaccctgtcccgctactcctcctcccgcggctccaacaactccttcctcgccgccgacaagaagctgcctgccggcggcggccaccggggccggcaggtgctgtcggggcggtcaggcggcggcgtcgacgaggaggaggaggacgacgcnagggtgcgaggagcgnggcgtggaggtacgtgaagctggacc

SEQ ID NO: 20446 - DNA, 86 bp, Oryza sativa
  Clone ID: uC-osflM202007f07b1
ttctatagttccccacataggctcgtgtcgctccagccccaggggcgatgcgagcgcccccacacgcgccggccgccgccgtgcct

SEQ ID NO: 20447 - DNA, 305 bp, Oryza sativa
  Clone ID: uC-osflM202007f08b1
ctgctggcctgctgaagccgccgcgccggaattgccgggaccgaccacgccgctgagtagtgccagaggaacgcctaccactcgagggaccgcctcaaggaagctggggtcggagccatgctgaacgagcagagcagcaccggggagtccgaccggccaatggacgaggcggtcttccggaggtggcagctcgactgcaagggcaacatctctaagtgtttggtgatgcccaatgttgacataaactggtggcactacgtgcgactctaaaacctgttgagccaagctaaccgtgccctgcaaac

SEQ ID NO: 20448 - DNA, 446 bp, Oryza sativa
  Clone ID: uC-osflM202007f09b1
ttcagatcttcagcgagggcgggctcgactacctcggcaacccgagcctgatccacgcgcagagcatcctcgccatctgggcggtgcaggtggtgctcatgggcgccgtcgaggggtaccgcatcgccggcgggccgctcggcgaggtcgtcgacccgctctaccccggcggcgccttcgacccgctcggcctcgccgatgaccccgaggcgttcgcggagctcaaggtgaaggagatcaagaacggccgcctcgccatgttctccatgttcggcttcttcgtccaggccatcgtcaccggcaagggccccctcgagaacctcgccgaccacctcgccgaccccgtcaacaacaacgcctgggcgtacgccaccaacttcgtccccggcaagtgaagtgggggaccgtagcttagcagtggttaattgtggctggatggatttgtg

SEQ ID NO: 20449 - DNA, 490 bp, Oryza sativa
  Clone ID: uC-osflM202007f10b1
attatagccaccccccctcccccccctccgccgcctctcgcccgcgtcaactccatttcctcctccgccgccgcctcctcctccctgcttgtcctcgccttgctgccgccccccgccgcggcgaccgagcacgcgcacgagcaggagccatggatgaggagtacgacgtgatcgtgctcgggacgggcctcaaggagtgcatcctcagcggcctcctctccgtcgacggcctcaaggtgttgcacatggatagaaatgactactatggaggggattccacctcgctcaaccttaaccagctgtggaagaggtttagaggggaagacaaacccccagctcatctgggtgcaagcagagattacaatgtagatatggtcccaaagtttatgatggcaaatggcacattggtaaggaccctgattcacactgatgtgacaaagtatttgtcattcaaagctgttgatgggagctacgtcttcagcaaagggaa

SEQ ID NO: 20450 - DNA, 480 bp, Oryza sativa
  Clone ID: uC-osflM202007f12b1
gtaaaatggcgtcgtccgtcgccgccgccgccgcaccgaccgccggggggccgccggggaagcggcaggcctccggcgggcgggagggagaccagctcatcatcactccgctgggcgccggcaacgaggtcggccgctcctgcgtctacatgtcattcaagggccgcaccgtcctcttcgattgcggcatccacccggcttactccggcatggcggcgctcccctacttcgatgagatcgatccctccaccattgatgtcctcctaatcacccactttcacttggaccatgctgcctctcttccctacttcttggagaagacgacattcaaggggcgcgtgttcatgacccatgccacaaaggccatctacaggctgctcctttccgattatgtcaaagtcagcaaagtttctgtggaggatatgctgtttgacgagcaagacattcttcgttccatggataaaattgaggtcatagact

SEQ ID NO: 20451 - DNA, 502 bp, Oryza sativa
  Clone ID: uC-osflM202007g01b1
gtcgttctgcctcgggggcgatgcgggcggcgaaacaagccgcgtcgcccccgtccctctcctcccctcccacgcctcgccgccgccggcaaagctgggcggctgcaaggacggcggcggcagggctctctctctccaccgctcgcagtggagttggacggggcgccggcaaggcgccgacgacgaggaagaaccgacgacggcgaccagatccggcgccgggatgcacggatccggtacccccatggccggatctgctgctccgggcggcggcgagccgggtcggcaagtcgcagcatcggcggcgtggaggtggtgccttcggcggccggagggccgcgtcgacggccggagggcggcctcggtggcgtggagttggcagcggggcggaagacgcggcggcatgaccgtggctgcggcgacaaacggcgagcgtggccagatctggccggacggctggcggcggcgctcgggcccgggtgcaactgcggcggaggtggat

SEQ ID NO: 20452 - DNA, 501 bp, Oryza sativa
  Clone ID: uC-osflM202007g03b1
atggttagcaatggtgggaatctgatggcaggtgggcgcattgggttcggcgagcactctgacccgcagatccttagcttgctccgagcaaacgatgtggaagggctacaggtgtttgtgccggaccacgagggcaaggagatgtgggttcaggtgccatcggacccatcggccattttcgtcaatgttggtgatgtcctccaggctctgacaaatgggaggctgataagtatccggcacagggtaattgcaaccgcctgcaggccaaggctgtccacaatatacttcgcatcaccacccctgcatgcacgaatctcgggactcccagagacaatcacagccagcagcccacgccgataccgatcattcacctgggctgagtacaagacgacaatgtactcactccgcctgagccacaggcgtctagacttttcaaaattgacgatgatgacagcgacaatgccagtgaggggaaaagcataggaaatgctgggtaaattg

SEQ ID NO: 20453 - DNA, 154 bp, Oryza sativa
  Clone ID: uC-osflM202007g04b1
aatcatttcaagaacagctcgtgcttagatcgctctctcgcttgctgttcttccaatccactcctcttgtttgtggcaaagatctgggttctttttttttctttttttgccgggtttttttggagaggttttgcgagcatggagggtctaaggg

SEQ ID NO: 20454 - DNA, 491 bp, Oryza sativa
  Clone ID: uC-osflM202007g05b1
aatgactgctgaaactggcacgtatagatggatggcacctgaggtaataaaccataagccttatgaccataaggcagatgtcttcagctttgctattgttctatgggagttggtcactacaaagataccatacgaaaatctgacacccttgcaagctgcactgggagtaaggcagggaatgcgcatggagatcccaccgaaggtgcatccgaggttgtccaaactgattgaacgatgttgggatgaaaatcctcatgtgcggccccttttctcagagattactgtagaattggaagatatcttacggcatgtcctggtttccaagacaggaagtcgacatcccaaagcaaagatacaaaagaaatcggcgcgatagagaatacatgggctccttgtgacctttgtgaaaacagcttagaggttttcttcaaaactaccaggctactgtttgttgctagcacggcagcataaaaatgattttgtatatatgt

SEQ ID NO: 20455 - DNA, 472 bp, Oryza sativa
  Clone ID: uC-osflM202007g06b1
cgcaaaccgcatcgatcaactccttccccaagtcgaagcaaaatccctagcgatgtcgtcgccgccgcccgccgccgccgccgcgatggccgtcgacgacgccgacgacgaccagctcgcctccatgtccacggaggacatcgtcagggcaacccgcctcctcgacaacgagacccgcgtcctcaaggatgagctgcagcggacgaaccttgaggtggaatcctacaaggagaagatcaaggagaaccaggagaagatcaaactcaacaagcagctgccttaccttgtcggcaacatcgtcgagatattggaaatgaaccccgaggatgaggctgaagaggatggtgcgaacatcgatctggattcacaaaggaaaggaaaatgcgttggtttgaagacattcacaagacaaataatattccttcctgtaatcgggcttgttgaccctgaaaagctcaagcctggggaattg

SEQ ID NO: 20456 - DNA, 496 bp, Oryza sativa
  Clone ID: uC-osflM202007g09b1
gtggtatgggacatcgtcgccggcgtgtgctccaattggagtaagatggccttgctcggccactacatcaggcacgagccacagtggcgtcggtgtcgccgcgcccacgcggcgctcgacgccatgctgcggttcaggcccgcgaggcggtggcgcaacaagatcgggcagaactcggtgctggagccccgccgcttctgccggcggtccggccttctctccgagaagctctacggccgcgccgggctcatgaggtcggtggaagtctcgccggcggtgaaggacacggtgctcaggtccttgatgagcagctacggcaggtcgagcagaggaagcgttagcgcggcggagcggcgagtcggcggcaaggtcgactggctgtggtatggctcccgaaagagctgggcgtgcgacgacggcgaacgctgcgtcagcaccaccgacatcatcctcgcgtgggacgtcgccacgaggctctacgagatgagatgctcgc

SEQ ID NO: 20457 - DNA, 454 bp, Oryza sativa
  Clone ID: uC-osflM202007g10b1
ttgtttgaccaaaccttcttgtaggaattgctctggcctttgtttcgatacgatccgatccgatccaaggggaggggaagcaatggcgacaaaaaggctcgtggtgacgctgcgggaggcgaatcttacggggaagaaggagcctgtgcggtccgacctcaacgtgccgctagagcgacgcactataagatcaccgataacaccacgtatacgcagcgtacgtgcccactggcaagttcctcctcgagaggggcgccaaggtcatgcttgccagccatctgggccgtgcgtaggatgtcaccccctattacaggttgaagcctattgtaccacgctggtctgagctactcggagtcgatgctgtgatggccaatgattgcattggctaggaagttgagaaattgattgctgttttgccggaaggtggtgttctacttctagagaatgttagatt

SEQ ID NO: 20458 - DNA, 482 bp, Oryza sativa
  Clone ID: uC-osflM202007g12b1
tttgcccccactcccgctggactggtacccggagggcgtcgtctcccacggcgggatgctctggtgggtggacctctcctacggcctcctcgcgtgcgatcccttcgccgaggagccgaacctgatccacgtcccgctcccacaagttcccgacgagcttcctgttgatgaccaggttaaccgcggtgcccaccgctgcgtgaaggtgagcggaggaaggctgatgtacgtgcagatacacggcaatcctgttgtgccggtggtcagcacatggttgctcgacgaatcgacctgctcgcccggggagtgggagtggaacccccagctcagcgcgcccttggccgagctctggattgaccagagctatgtggacaccatgctgccgttgaccattcctgcccttgcgctcccccaccccacagatcctaacagggtatatttcttcctcaaatcttgcatcttcgcagccgacctacggttga

SEQ ID NO: 20459 - DNA, 504 bp, Oryza sativa
  Clone ID: uC-osflM202007h03b1
gctttttgcgccgccaacgccaagacgagtggcggctgaacaggggaggggcggggatctctatctggcgagcagagcaggggagaggatcatgtcgaagaagaggggtctttctttggaggagaagagggagcagatgctacaaatattttatgacagtcaagacttctatctgcttaaagagcttgagaagttgggtcccaaaaagggtgtcatcagtcagtcagtgaaggatgttgtgcaaagcctggtggatgatgatcttgtcttgaaagataaaatagggacttcagtgtacttttggagtcttcccagctgtgctggaaatcagctgaggactacttacagcaaactggaatctgatcttttaagctttaaaaagcgcttcatagagcttgttgagcagagagagaatttgaaaagaggcagagaggactctgatgagagagaagctgctttggaggagctgaaggctgtagagcaacaccacaagaagttaaagga

SEQ ID NO: 20460 - DNA, 480 bp, Oryza sativa
  unsure (1)..(480): unsure at all n locations
  Clone ID: uC-osflM202007h06b1
gtgagatcctgagggtggcccgcctcaataccgcagtagcactatctttgaggatgcatcgccagaagttgtcagggatttcttctgggatgacgagttccggattaagaacacttgggacgacatgcttcttcagcacgatacgttggaggagtgcacaaagactggaacgatggttctccggtgggtcaggaagttcccgttcttctgcagtgacagggagtacattatcggtcgcaggatatgggcatctggaaagacgtattactgtgtaacacagggtgtgcctcgcccctctgttccaaggtgcaacaaacctcgtcgtgtggacgtgtactactctagttggtgcatccgtccagttgaatcaagaaacggtgatggctcaatgaccgcatgtgaggtgctcctgttccatcatgaggaaatggggattccagggaaattgccagctcggtgttcggcagngatgtggggctg

SEQ ID NO: 20461 - DNA, 404 bp, Oryza sativa
  unsure (1)..(404): unsure at all n locations
  Clone ID: uC-osflM202007h07b1
cttaagcccaaaaagctcccgaaacgccaggaaagcggaaggtctcgttctcctcctctccccaaaaccaaatccccctctccgaaaatctccaaaaatccagcgaaaaccatccgatccatcgatcgatcgatcgccgcaagactgcttcgggtttttttttgctcttgctccgatcgactgcgtgcgcctcgaatcgaaatctcgagtgatatcacgcgggagttgatccagacttaaaccggattgcctgagaagttgatgggatcgcgcgaattctcggcgctgacgtgagatcgtgaaagggttggacatcaaattgctaggaggttgcggcgatttggctgcacgactgcatgaactgnttcgtgaacctgggactcaactcgaactcgaaccactac

SEQ ID NO: 20462 - DNA, 379 bp, Oryza sativa
  Clone ID: uC-osflM202007h08b1
tttaggaggaggaggaggaaaagctctctctctctctctctctagattcgattcctttcgtccggcgcggccaacccgaaaggctgcggccgtcgcagtccaatcgattccccccctgcgctgcgctgcgctttcccacccctcgaagccgaatccgatggttcctccacccgttgaccgcctccgccatcggaggccgcgccgcgccctcgaaccccgcgccgcctgctgctgcctccgccgccttcgcctcctatagataccgccccggctcaccgcggcccggccctcccgactggcggtcggcggcgacgacgacatgcagagggacttcgccggcaggctccgcctcgcgcccttccccgtctccccgaccacc

SEQ ID NO: 20463 - DNA, 53 bp, Oryza sativa
  Clone ID: uC-osflM202007h09b1
tttcacggcagcgccacccactgcgccttcgccggcggcggaggaggagggag

SEQ ID NO: 20464 - DNA, 430 bp, Oryza sativa
  Clone ID: uC-osflM202007h10b1
tttttatgatcgatctctgtttgtagatccgatgaacccatctctaaaattgcaggttgtctctgagtggatgaggccttctgatattgcgaaggaggtatctatcagttcacaaccgtgcttattttctggttctgtgaattcgccagatgtgtgtcagggtcggctgggcgactgttggttcttgagcgctgatgcagttttgacagagatggcccgtatatctgaagttataatcactcctgagtataatgaagaagggatttacactgtcagattctgtatccagggtgaatgggtggcagtggtggttgatgattggatcccctgtgagtctccggggaaaccggcatttgctactagtagaaagcaaaatgagctgtgggtatccattcttgaaaaagcttatgccaagtttcatgggtcttat

SEQ ID NO: 20465 - DNA, 231 bp, Oryza sativa
  Clone ID: uC-osflM202007h11b1
tcgctgctgcaaggaggggctcatcgctgctctctcgctgcctgctgtccaggcccgccgccgccgcctcgcctgctgtcccctctgcgctccgcagggcagatgggacacaaggattgttgccgggaatccttcagagggtcagcactgcagcagtagcagaggagcccatatcacccccagtccaagtgaactacactcagcttcttattgatggaaaattcgttgatt

SEQ ID NO: 20466 - DNA, 483 bp, Oryza sativa
  Clone ID: uC-osflM202007h12b1
ctttcaaggggattttgtaggggtttctgatccgaggagcgggcgatgtcggactccgaggagcaccacttcgagtcgaaggccgacgccggcgcctccaagacctacccgcagcaggctgggaccatccgcaaaaatggctacatagtcatcaagaaccgcccctgcaaggttgttgaggtttcaacctctaaaactgggaagcacggtcacgccaagtgccactttgttgcaattgacatctttactgccaagaagctcgaagatattgtgccatcttctcacaactgtgatgtcccgcatgtgaaccgtacggagtaccagctcattgatatatctgaggatggatttgtgagtctgttaactgaaaatggcaacaccaaggatgacctcaggctccctactgatgataacctgcttagtcagatcaaggatggatttggagaagggaaggacctggtggtgactgttatgtctgccatg

SEQ ID NO: 20467 - DNA, 190 bp, Oryza sativa
  Clone ID: uC-osflM202008a02b1
ccactactatgggggatgctgctccggctgctaccgctccggcggaattggctggtcccacgcctccgttcttgtgcgtatgcgctggtttccttgcgagattgagtgatggaatcggtttgattagaaccacgcgttctggaactcccttaccggctcgatgcccgtgaccctgtcggcgctgttgtct

SEQ ID NO: 20468 - DNA, 388 bp, Oryza sativa
  Clone ID: uC-osflM202008a03b1
ctcgtatcgcaaagctcggcagcaaaagcaaagcaaagccaagccaagcttgaagctccccgcactgagccaagaagcctccacctcaatccgaaagagatctcgtgcgcgcacggcgatgcggtgaatcgggcatggcgccgccacaggagcgggactacatcgggctgtcgccggcggcggcggcggcgctggcaacggagctgcgccttgggctgccggggactgcggaggaggctgagtcggagggcggcggaggaggagggacggatgcggctccgctgacgctcgagctgctgcccaagggcggggccaagcgcgggttcgcggacgccatcggtgtgggtcccgccggccagcggcgggaggcggccgggggcaaggcggc

SEQ ID NO: 20469 - DNA, 425 bp, Oryza sativa
  Clone ID: uC-osflM202008a05b1
ttcatgtccaggagtactggcgggtctgcgacttcttgtcccaccaccccgagagcctccacaccttcttcttcctcttcgacgacgtcggcatccccaccgattaccgccacatggacggcttcggcgtcaacacctacaccttcgtcacccgcgacgccaaggccaggtacgtcaagttccactggaagcccacctgcggcgtcagctgcttgatggacgacgaggccacgctcgtcggcggtaagaaccacagccacgccacccaggacctctacgactccatcgtcgccggcaacttccccgagtggaagctgttcgtcaggtgatcgatccgtggagggtagaagggctcgactttgaccacgtggatgacaccaagacatggccggaggacgaggggccgctccggtccggggggcgcc

SEQ ID NO: 20470 - DNA, 179 bp, Oryza sativa
  Clone ID: uC-osflM202008a06b1
gtggttacgaactttgccaccgatttcgatcctttttttttggcagtgacgcgagagagaaatggcgagcatgaggagcgtgggcaccctgacggagtcggatctgaaggggaagaaggtgttcctccgcgccgatctgaacgtgccgctggatgacagccagatgatcaccgacgaca

SEQ ID NO: 20471 - DNA, 377 bp, Oryza sativa
  Clone ID: uC-osflM202008a09b1
ttcaatggcatcctcctcccttctactcgcctgtgttgtggtggcggctatggtgtccgccgtctcctgcgggccacccaaggtgccaccgggccccaacatcacgacaagctacggcgacaagtggctggaagccaaggccacctggtatggtgcgcccaagggtgctggccccaaggacaacggcggcgcctgcgggtacaaggatgtcgacaaggctcccttcctcggcatgaactcctgcggcaacgaccccatcttcaaggacggcaagggctgcggctcatgctttgagatcaagtgctccaagccggaggcctgctccgacaagcccgcccttatccacgtcaccgacatgaacgacgagcccatccgtt

SEQ ID NO: 20472 - DNA, 494 bp, Oryza sativa
  Clone ID: uC-osflM202008a11b1
tcggtctacgcggaagcccctgcaggacgtgtccaacaccgccaagccccgagggcgcaacatttctgatggcactaccttgaagaagactgctcttcgcagccatgaggccaccaagaacccagtgaagaagactgtaatcttttctgatgagaccgcaaaatgtcatgaatgggctaaggatggggtggagggcacccacttcactgggaatgattctcagaagttggaaaaggacagtcaagacaaacgtgtcaagaagaaggtggagaaaataatgtcagcattgcacgactggccagacgcggtatatgatcatgtgctttttccatctgaggtatgtatgtcaaagagcacagtgttcagacttttccagattgcttttacttttgaaatatttctggggatttgaatttcaaggtcgaagaagacagcttttgattttttctatgtacaaatacactacctaacttggctaactagcttggctgata

SEQ ID NO: 20473 - DNA, 254 bp, Oryza sativa
  Clone ID: uC-osflM202008a12b1
tggcgttcgtgtccaacgtgctcgacgccgcgtcgcccgcgggggcgtcgctggcggtggtgtcgaaggtggggcacgacttcgcctacgccaccgcggcggcgcccgcgcggcacccgcccgtgctctgcgcctcccccacgacgtccttccacgcgcgcttctccgacgacgcggcctcggtgcacgcgcccgaccggcagctccggcgagtccatgcctgcgacccgatctaccccgtcgacctccccgac

SEQ ID NO: 20474 - DNA, 502 bp, Oryza sativa
  unsure (1)..(502): unsure at all n locations
  Clone ID: uC-osflM202008b01b1
atttgtgttattgcagtttcatgtgagggtgctcctcctgtccaaatgggagaaagatatcctcacatgttcttgatcctcctactttttcatggagcccatgcggctttgaaagatccagtacagaaatggcagactcttggaggtcagcgtcctcttgtcattgctcgtggagggttctccggcttgtttcctgattcaagccagttctcgtaccagtttgcaatgtcgagtagcttgcatgatgtggttctgtactgtgatctgcaattgtccagtgatggtttgggcttctgcaaaactggattgacattagagaactcgacgcttatcgccgaagccttccctaagagggccaagacatacaaggtgaatggagaggaaatccatgngtggcttgctttggatttcaccgcagacgagctgtatcagaatgtcacattgatccaagacatcttttctcgcccaagcacatttgatggagccatgggaatgtttaccc

SEQ ID NO: 20475 - DNA, 493 bp, Oryza sativa
  Clone ID: uC-osflM202008b02b1
ctccaccgccgccgccgcctccgcgaaatggcgaatctgccgccgtcgctctccatcggcgccgcctccttcgccgcgccctcgcccccgccgccctcgcctggcgcctgctcgtcgtcgtcggcggcggcggcggcggctcccggggccggccagggccggaagattggcgtccgcggagcagttcgtgctcgacctctgcgaccccgagctgcgggagaacgccctcctggacctctccaagaagcgagagatttttcaggatctggctccactccggtggcactcttatggaacaatggctgcactactccaggagatggtgtcaatctatccatcactttcacccccaacattatctccaggggcttcaaaccgtgtctgcaaggcactggcacttcttcagggtgtggcctcacacagtgacacaaggattcctttcttgaatgctcacatcccactgtttctgtaccctttcttgaatactactagc

SEQ ID NO: 20476 - DNA, 392 bp, Oryza sativa
  Clone ID: uC-osflM202008b03b1
tgcatggataagctcacattaacccgtcaattttggatccaattcgggatttttcttgggaagtttcgggaagaaattggaatggaataatatagattcatacagaggaaaaggttctctattgatgcaaacgctgtacctagaggatagggatagaggaagagggaaaaatcgaaatgaaataaataaagaataaagcaaaaaaaaaataagtcgaagatagaagagcccagattccaaatgaagaaatggaaactcgaaaaggatccttctgattctcaaagaatgaggggcaaggggattgataccgagaaagatttcttcttattataagacgtgatttgatccgcatatgtttggtaaaagaacaatcttctcctttaatcataaat

SEQ ID NO: 20477 - DNA, 389 bp, Oryza sativa
  Clone ID: uC-osflM202008b04b1
ccaataagtaatggaactacaatcatcatgggctactttctttgccgtcgtgcttgccaccgtcgtcttcctcctccgggccgttctgctccgccgccgccgagcttacaagctgccaccaggaccaaagccatggccgatcatcggcaacctgaacctcatcagctcgctgccgcaccgctccatccacgagatatccaagcgccatggccccatcgtgcagctctggttcggctcctgccccgtcgtcgtcggctcctccgtcgagatggccaagctcttcctccagaccaacgacgcggtgttcgccgaccgccccaggaccgccgccggcaagtacaccgcctacgactgcaccgacataacctggtcgccctacggcgcctact

SEQ ID NO: 20478 - DNA, 485 bp, Oryza sativa
  unsure (1)..(485): unsure at all n locations
  Clone ID: uC-osflM202008b06b1
gtagcaatggcatgctcctcccttctactcgcctgtgttgtggtggcggctatggtgtccgccgtctcctgcgggccacccaaggtgccaccgggccccaacatcacgacaagctacggcgacaagtggctggaagccaaggccacctggtatggtgcgcccaagggtgctggccccaaggacaacggcggcgcctgcgggtacaaggatgtcgacaaggctcccttcctcggcatgaactcctgcggcaacgaccccatcttcaaggacggcaagggctgcggctcatgcttcgagatcaagtgctccaagccggaggcctgctccgacaagcccgcccttatccacgtcaccgacatgaacgacgagcccatcgctgcctaccactntgacctctccggccttgccttcggcgccatggctaaggatggcaaggacgaagagctccgtaaggccggcatcatcgacacgcagttccgccgcgt

SEQ ID NO: 20479 - DNA, 441 bp, Oryza sativa
  Clone ID: uC-osflM202008b08b1
ttcacggattttagtcaccaaaatcccagctatggtagataacctgataaatcgaacatttgcttgggaaaatgcaagaaacaagcccttcctctatgtggggggcggtttatttttggtcttggagaattccgacttaaccgagagcaaaaggaggaggaaaagaggccataccgggaccagaagaagttggagagcatcctactcaaagagaaagaagctatttttggatctaaaggaagcccaaaaagggcagtcagcttaaatagaaggacaaatgggtaccgttcaagtggaactaccagtggactaatgactccaaatccccggagatcatctcttggtggtgctactcctgagcttttgacacccagatcgtgttctggtcactataatagatactttagtgattcaaggaggctatcagctactcaattgaac

SEQ ID NO: 20480 - DNA, 294 bp, Oryza sativa
  Clone ID: uC-osflM202008b10b1
ttcttagaagctctcctcctcctcccatggcggcgacgatcgtgttcgtcaaggcgcgccagatcttttacagcaggggcaaccccaccgtccaggtccatgtgtgctgctcacatggaacctttgcaagggctgcagttcccagtggtgcatcaactggtgtctatgaagctctcgaattgagggacgggggatctgattacttgggaaagggtggttccaaagctggcgacaatgggaactcggttattggcccagctctgattggcaaggaccctacgtcacaagctgggc

SEQ ID NO: 20481 - DNA, 327 bp, Oryza sativa
  Clone ID: uC-osflM202008b11b1
ttgtgaagggaatgtttgaaagaaagaaaagaaaaaaaaaaggaaaatcgtgtctcgtctcgtctcgtcttcgtctcccccgattcccgagcagattctggaaaccctcgcggcctcgattccggcgatggcggagcccaacccgcaagtggagagggaggtggaggtggaggaaggtgaagaagccccaactgatgtacttgctattggttccgggggcgcaagccctggccaaaatctgtctcggggggctttccccccttgccaaggaccacgccggcccgattcgaccaggtggcttacacccttgggtccgccgttgagggc

SEQ ID NO: 20482 - DNA, 289 bp, Oryza sativa
  Clone ID: uC-osflM202008b12b1
ttggtaagtgcgggagcgcgctgatccggaggaaggcggtggcggcgagcctggcggcgctgaagagcgccggcgtggaggggaacatggtggacgtgtggtggggcatcgtggagagcgagggccccggccggtacaacttcgacggctacgtggagctcatggagatggcccgcaagaccggccttaaggtccaggccggcatgtcctttcaccagtgcggggggaacgtgggggacattcggaaaatatccggttcgaggggggtggtgggggagagagtaaaaag

SEQ ID NO: 20483 - DNA, 501 bp, Oryza sativa
  Clone ID: uC-osflM202008c02b1
tgcttgtgtgtatgcgcttgtgttcttgtgagattgagtgagtgaatagctttgatttccaacagtcgcgctgggctcctcgtcctcctcgttgcagctgcccccctcgccgtcgttgtctccgccggtggcgccggccggttcatgtcgatcgacgcgtcgccgccgctgctccaccaccactctcgcccgccgttgcagaggccgcaaggggagcaaggcgtcggcggcggcgaggcggttctcggccgtggccagctcgacctggagtctctcgagctcctcgccgggggcatggagggacaacgcggcggcggcaagccaggcgcaggagggacgacacggcagcggcatggcgggatgacgcggctgcggcaagccaggttgaagatgatgtgtgacgatgcatgcaccgctgcatgcgcaggatgatactgatctcttaggcacgcgtcgctcggggcgtcgtggtgcgcagagaaggagaacagtgggcagcgt

SEQ ID NO: 20484 - DNA, 417 bp, Oryza sativa
  Clone ID: uC-osflM202008c03b1
gatcggaggagggatagggcgggcggcgatgggggcagttcgggggattttggtcgtggcggtggttcttgcggtggcggcgattcttgctggggcggcggaggggaaggtgaacggcaaggcgaaggggaagaacagggcgctgttcaacttcggggactcgctggccgacgccggcaacctgctcgccaacggcgtcgacttccgcctcgctaccggccagctcccctacggccagaccttccccggccaccccaccggccgcttgccgcacggcacgctcgtggtggaccacctcgacgacgagttcgggctgccgctgctgacggcgtccaagctcaagaactccagcttcgctcacggcgccaacttcgccatcaccggggccaccgcgctcgacaccccctacttggaggc

SEQ ID NO: 20485 - DNA, 500 bp, Oryza sativa
  Clone ID: uC-osflM202008c04b1
gtcatacacacctctgttctccctcctttgcttcgttcccataccaattaatcaaccactttcacctccacatggcctaagaagccataatcttctattgacgtctgcatttgcacggcggtcgccagcgattgggcacgacgggcatggcgtcccgccggcatgtcctgattgctgcacttattatggttggggttctcgaattcgccaacgcagacaaatacaagccaactgagtccatacttgtgaactgtggttcagacaaggagggccaggacatcgacggcagaaaatggctttctgataaggacagtaagtggctcatcgacggcgagaagtcatctatcatggcaaatgcagatttccaagatccctccctccatcgccggtgccgtatatgacgggcggggtgttcaccaaggagaccatgtacaacttctccgttggggaggagcgccactgggttaggttacacttctacctgcgtcctacacgatctg

SEQ ID NO: 20486 - DNA, 505 bp, Oryza sativa
  Clone ID: uC-osflM202008c05b1
attcatgccatgaattttgttactagctaggtgttgcttatgtgggcatcggtttgctggtactggtagaagaagcctcatattgtcgtggcaacgagaaagagaaaacgaaccttgaaacataaccggagtggaaccactacaaccaaagaagaaagagatggattttgaaacaagacatggatgatgctcaattgataattcattcatcaacaacatgttgatttgtttgtctgtctgctcaatgatgtacagttgacaccattgttctcctcgttgcaggatatattgacttgttgaataccgccatcatcgccacatcagcccggctgccatctggattcttttgccctgatgtgatgaacacatctgaaggagagcagcagagtattcaagtacatgtggcaaagcagcaggtgaggataatcattttatcaccataggcaaaagtatgccccaaacattattgccagcggttgattaggagacaattagattgaatatc

SEQ ID NO: 20487 - DNA, 219 bp, Oryza sativa
  Clone ID: uC-osflM202008c07b1
ttccaccctcgcgagccaagctaccattctcctcctcggcggcggcggcggtggtggtgtcggcaatgcatatggtggcgaccaccaccaccaccgactcctaccaggcggccgtgccgcctgaccaccctaacattaacgcccacccgtactcgtacgcgcacccgtaccctgaccaccttatggcgcaggttcggtggttcgttctgtgttacacaa

SEQ ID NO: 20488 - DNA, 488 bp, Oryza sativa
  Clone ID: uC-osflM202008c08b1
gtaagaagcaattcttgagctcaatcagcaacaacatctatctccttcttgcttagttaagtccttcgccctcccaagaagaagaagatgtcttgctgcggcggcaactgcggctgcggcagcggctgccagtgcggcggcggctgcggcggatgcaagatgttccctgatgtggaggccacagccaccaccaagaccttcgtcctcgctgctccatccaacaaggcgagctctggaggaatgtaatggctgttggagagcggcgagaacggcggctgcggctgcaacacctgcaagtgtggcaccagctgccgcggctgctcctgctgctcctgcaactgaatctatcgtcgtcgtcgcccggctgcatgaggatttatcgtatggatgctgctactgtcgatcagagctttgatcgaggccttaatttgcttgcattagtacccagcttatatgtaggcaggccttgccttttgctctgacgccta

SEQ ID NO: 20489 - DNA, 452 bp, Oryza sativa
  Clone ID: uC-osflM202008c09b1
cccaaactcgtcttctccaccggagcagagcagcggcggcggcaatggacgccctcctcgtggagaaggtcctcctgggcctgttcgtggcggcggtgctggccctagtggtggccaagctcaccgggaagaggctccgtctcccgcccggccccgccggcgcgcccatcgtcggcaactggctccaggtcggcgacgacctcaaccaccgcaacctgatggcgctggcgcggcggttcggcgacatcctcctcctccgcatgggcgtccgcaactggtggctggtgtccagcccggacctcgccaggaggtgctccacaccagggcgtcgagttcggctcccgcacccgaacgtggtgttcgacatcttcacgggaaggggcaggacatggtggtcaccgtgtacggcgaccactggcgcaagatgcggcggatcatgaccgtgcccttct

SEQ ID NO: 20490 - DNA, 330 bp, Oryza sativa
  Clone ID: uC-osflM202008c10b1
acacaccccagcagcagcagcagcagcagctgagcttgaagcagcagagcgaggtagacatggccgccgccaccatggccctctcgtccccggcgctggccggcaaggccgccgcgaaggtgttcggcgaggggcgcatcaccatgcgcaagtcggcggcgaagcccaagcccgccgcgtcggggagcccgtggtacggcgccgaccgcgtgctctacctcggcccgctctccggcgagccgccgagctacctgaccgtcgagttccccggcgactacgggtgggacaccgcggggctctccgccgacccggagacgttcgccaagaacc

SEQ ID NO: 20491 - DNA, 419 bp, Oryza sativa
  Clone ID: uC-osflM202008c11b1
tgagatcagaattcagaaagaaagcaaacggaatccagatctcacccaccccaccccacccacacgacgagagaccaaaacacgcgggaaaacgctcccgcgccgcgccaaacctggcctcgcgtgaaccggcggcgggcccaccgccggcgtgcgcacacgtgccaccgccaccggcgtccagccggaccgacgacgacgagggcgacgacgacgtcacggtgttggtacagtgccagccgacgctgcaggccgggcccacccaccacctgcccccaccaccgtgctgcttgcctgcctctttcttgtctcgctttcttgagctcgtctcctcgtgctctctctctctccttgctgcgacctttgccttcgatccgacgacgacgacggccgccattgccgattgcttccggcgcgct

SEQ ID NO: 20492 - DNA, 320 bp, Oryza sativa
  Clone ID: uC-osflM202008c12b1
tttactcacggagctatgggaatggacgcggcggtagtaaggcagaactggaggcattaaatccgatcgtcgaagcccgtggtgatggccaaggactgcacatggcctgcatgatttcagggcctgatctaagtgaaggggatgaacactgggatgaacctgactagcggcagcacggacgatcggacgtgcatacaggggaggcttgataccgttcaccgaacctgtctagccacgcggctcgctatagtaacaaacgaactggatcgctacatgcttatgcgcaggatgatacacctgtacgccgatacactatcggg

SEQ ID NO: 20493 - DNA, 510 bp, Oryza sativa
  Clone ID: uC-osflM202008d01b1
tgagtatagacaatattctgggtgtgaaaaaactgtcagcagtagacatgagcaaaagctcaaagaaagtacaagtggcttttgtgatgatggaagcatgggtaacatagacaagctgagggctgataatgatgataccagcagccttgaagatggagacgtgagcaaaaagtatgaagaaaaaatcaaacaagatgacaacaactttcaatcagaattcattactgagcgatatagcaaatgcagcaaagaagataataacagtgtcattcaagttgaaactatagctacgatatgcaaacaagatgacttagatgattgttatagtgaattgctctccccaaattctgaacatgccataatgccatcgaagcttgagtcatcagttaatgagcgcacaaattctagttctcgtgtttcttctgaggctgaactagacgaagttcagtctgcagctactaagaacggggattcaaagttttctgctggttctttgaagaaaggtttgaa

SEQ ID NO: 20494 - DNA, 501 bp, Oryza sativa
  unsure (1)..(501): unsure at all n locations
  Clone ID: uC-osflM202008d03b1
ctctcgtctcggagaaggcaacgtcgccctcgccgccgcggcggccggatccggcggatggcgaactcgaagcggctcccgtactccacggccggcggcggcgggggaggaggaggaggaggggggangtccggaccnnnntaccgaccaccggngcgcagaagatcgtctccctcttcagcaagaagcccgccctgaagcccaagcccgccgccgtcacctcctcgagccccgacatcggcgatgagctagccaagtggtacggccctgacaggaggatcttgttgccgggggggctacaggaccggtcagaggtgccggactacctcaacggagaggtccccggagactacggcttcgacccttttggcctcagcaagaagccagaggacttcttcaagtaccaggcctatgagctgatccatgccaagagggcgatgctcggggccgttgggttcatcatccccgaggcctgcaccaagttggcgcaaactgcggccc

SEQ ID NO: 20495 - DNA, 502 bp, Oryza sativa
  Clone ID: uC-osflM202008d04b1
gtactccaagagactgaaccagaatcagataagggctcttttagaggagacatgtcagcgcccacacgatagggagcgtgacataattcagatggtgaatcacaactcctaccatgaagatccttatgcaaaggagtttggcattaagatcagcgagcgtctggcctcggttgaggcacggattttacctgcccctcggctcaagtataatgagactggcagagagaaggattgcttgcctagagttggtcagtggaatatgatgaacaagaaaatggtaaatggtggtagagtcaggagctggatatgtgtcaattttgctcgaaatgtgcaagagagtgttgctagtggattttgtcgtgaactggcccgcatgtgccaggcctcaggaatggactttgctttggagcctgttcttactctatgtatgcacgtcctgatcaagtggaacgagctctgaaagccaggttccatgatgcaatgaacatacttgggccacagc

SEQ ID NO: 20496 - DNA, 314 bp, Oryza sativa
  Clone ID: uC-osflM202008d05b1
ttccaacccaaatcattcgtgcgattccgcggcctcgttggattgacgcggcaactaactccaccaccaccaccaccacctcccccaccaccggcggcggcggcggcggcggcgacgaggaggccccattgcgctcgcggaggcgtggtgttgacgggggaggcgctggatctcggatggcatcggccaagtcgtcgcggtcgaggccggccgggcattccggggtgttcccggtgagcggcgccgtggggggggagaagaggccgcctgccggtggccgaagaggaggaggaggaggaggcgatgtcggggcg

SEQ ID NO: 20497 - DNA, 269 bp, Oryza sativa
  Clone ID: uC-osflM202008d08b1
gtcggcgggtgccgggctcgcgttcccgcccgaggcgtcggcggcgcaggaggtggcgaggctggcggcggaggcggcggcggcggagggcggcgacaaccgcggcctgctgctgctgttcgtggtggcgccggcgatcgcctgggttctctacaacatcctgcagccggcgttgaaccagctaaaccgcatgcggtcagactgagagcttgagcttgaagattgcatccgtacatgtgtgtacgtggtgtgttttgagggtgtgcagt

SEQ ID NO: 20498 - DNA, 503 bp, Oryza sativa
  Clone ID: uC-osflM202008d10b1
tcgtccaccaccacgagtaatctaacagaataaatcatgggaccagcccacggccacctcgtcctcctcgtcgccgcggtggcgttgctgtcagctggcttcctcccgcacgctgtggcgaagaagggcggcgccgtgccaccggcggttgctgacatatgctctcgcactccattcccagacacgtgcaagagcaccgccgggcggcacgcgtccaagtacccggtgatcgacgtcgtggctgtgctcaacatgcaggtggacgcgttctccaagcgcacggcgcatgcgagggagcgcgtgaccaaggtgtcccgcggcgcacagcctcagcagacgcaggcgctgagcttctgcgacaccatgtacatgaacacccaggacaccatcggcgccgcggagcgggcgatcaccttcagagacaaggctacggcgaagatcatgctgcagctcgctgtgcaggactttgagtcgtgcgatcggcccttcagcagtccgggatc

SEQ ID NO: 20499 - DNA, 186 bp, Oryza sativa
  Clone ID: uC-osflM202008d11b1
tctgttgcttcctgcccctcccctccttcctctctctcctcgacgaggtctcccggcggcgcgatgtctggcggcggcgaggtgtcggggagggcgccgcggctgccgaggtggacgaggcaggagatactggtgctgatagaggggaagcgggtggtggaggggcgagggaggcggaggggtcca

SEQ ID NO: 20500 - DNA, 498 bp, Oryza sativa
  Clone ID: uC-osflM202008d12b1
tctcatttccttctcctctccaaaccctagcaaaggctatctctctcttcgccgccatggaggatgacgacgcggggggcggaggcggaggcggcgaggcgtccccgccgcacgcgggctccgccgcggcgatggcgggggcggggagggacatcgcggcgtcgccgacgagctcgcggtcggtgacgcagacggtgaacgggtcgcacaggttcgtgatccaggggtactcgctggcgaaggggatgggggtgtgggaagcacatcgcgagcgagacgttcacggtgggagggtaccagtgggcgatctacttctaccccgacgggaagaaccccgaggacaactccgcctacgtctccgtcttcatcgcgctcgcctccgagggcaccgacgtccgcgccctcttcgagctcaccctcctcgaccagagcggcaaggcccaagcacaggtgcactcccacttcgaccgctccctcgagtccggcccctacaccctc

SEQ ID NO: 20501 - DNA, 508 bp, Oryza sativa
  Clone ID: uC-osflM202008e01b1
gtgtgtttaggacctgatgatgcaattgtaaatttgtaatacgatttgcaacgtccatatgtccacagcaacccaaatttattgtttagtaaattcaacattttggacctacatgagttgattaacaagtccattccattgtccttcatggaggcttcatcttggttgtgctaccaagctcgtggttttggttcatccagagtatggttatggcttcttctagctcttgttcttctgaattgcagcctggtactctcagcctcgccgtatctggtcggtatggggagcttcgacataacaggacctgcagcagatgttaacatgatgggatatgcaaatactgagcagattgcatcgggaattcacttcaggctgtagttacgtgcatttattggggctgcgcctaatggaaagcgcgttgtgtttgttaatatcgatgctcgtatggaatcacagattgtgactataaaggtgcttgaaaggctgaatgcatggtatggtgatcttt

SEQ ID NO: 20502 - DNA, 443 bp, Oryza sativa
  Clone ID: uC-osflM202008e02b1
gtagtggagaggagagagcaacgcgttcaccgttgagagaagagaaggaagtaagacgagcgcaatgcgtcgcgtcacggtgctcgttctgctcctcgcctgcgcggcggcgcgcgccgccgccgccgtcgtcaccgacgggctgttgccgaacggcaacttcgaggagggcccacccaagtcggacctggtgaacggcacggtggtgcgcggcgcgaacgccatcccgcggtgggagacgtccgggttcgtggagtacatcgagtccgggcacaagcagggggacatgctgctggtggtgccgcagggcgcgcacgccgtgcgcctcggcaacgaggcgtccatccggcagcggctcgccgtgaccaggggcgcctacttcgccgtcacgtttagcgcggcgcgcacctgcgcccaggcggagcagttaacgtgtcggtgag

SEQ ID NO: 20503 - DNA, 479 bp, Oryza sativa
  Clone ID: uC-osflM202008e03b1
caaccgccgccgcatcgccctcgttagaacgatggccgcgtcggcgctgcaccagaccaccagcttcctcggcaccgcccctcgccgggatgagctcgtccgccgcgtcggcgactccggtggccgcatcaccatgcgccgcaccgtcaagagcgcgccccagagcatctggtatggacctgaccgtcccaagtacctgggcccgttctcggagcagacgccatcgtacctgaccggagagttcccgggagactacgggtgggacacggcggggctatcggccgacccggagacgttcgcgaggaacagggagctggagggtgatccactcgcggtgggcgatgctgggggcgctgggctgcgtcttccggagatcctgtccaagacgggtgaagttcgggaggcgtgtgggctcaaggccggcggcagatcttttcggggggggctcgactaccggggaaccccacctgtgcacgcgc

SEQ ID NO: 20504 - DNA, 498 bp, Oryza sativa
  Clone ID: uC-osflM202008e04b1
ctcacatatacaacgaaaccaacatcgacagtggctttgcgatgagcaggcaatcaggctgccctcgtagctcaggctcaggtgacaacaatctggcacctttggatcttcagacgccaaccgtgttcgagaacaactactacaagaacctcgtcgtcaagaaggggctcctgcactctgatcaggagctcttcaatggcggagctactgatgctctggttcagtcttacattagtagccagagcacattctttgctgattttgtgacgggcatgatcaagatgggggacatcacaccgttgacgggatcaaatcgggagatcaggaagaactgcagaaggattaattaactaagtgattaagaggcaagcggtgtgcatgtccagtagtgcaaatgcacattgtgtcgtgtgttctcgaggatatgtttgcaacatcttccttaatttctttatgtgttatgtaacatatgcttagtttatgtggtggtaaatgatc

SEQ ID NO: 20505 - DNA, 489 bp, Oryza sativa
  Clone ID: uC-osflM202008e05b1
ggccgcccttttttttttttttttttttttggctcccatgtaaaacggtataagcatctaatattggattccaccatcatttttcagcactattacactgcaaacgcaggacagagcttcacctgtgcaacaacagaaggggcctgccacctccttggctttgaccactacacacaggtatgcttgtttttgcatttgccccgcccatatttacatgtttctaacacaatatacaccacccacctgacctggatgcgcaatttcgcgcatgagcaacttcagttatcttctgaagacggccggtgatcggtgaggctgcttatttttggagtatatattctgtttagatagtctgccctccttatggtagacccattagcatgcacaacaggaatgcaagagcccattgacacgaatgctgccgcgtggcatgtgatgagtgaggagcaggggccacagctggcgattgggcagtactatgtgcatgag

SEQ ID NO: 20506 - DNA, 499 bp, Oryza sativa
  Clone ID: uC-osflM202008e06b1
gtaaccacaggctaatttaattagcaccagaaatatggcttcttccaagatgacgctgctccccgtcctcctcctcctcgccgcggcctcgccggcggcgctgggcgccttcgacgtgaaccagatgctcgccgacaagtcccagtacgggtcgttcctgaagttgctgacgcagacgaaggtcgcggaggagacgaaccggctcaagtcggcgtcgctgctggtcctccaagacaaggccatgaagccgatcacgtcgctccccgccgacaagcagcggatggccatggccaaccacgtcctcctcaagtacttcgaccccatccagctgggcgagatgaaggaccgcaccgccatgctccccacgctgctgtccaacaccgacaagaagctcggcgtcgtcaactacaccaaggccagcgacgggcagatgtacctgggcgcccccggcgcggcctgcgtcgcccagctcgtcaggtcgtcgccgcgcgcccctacg

SEQ ID NO: 20507 - DNA, 491 bp, Oryza sativa
  Clone ID: uC-osflM202008e07b1
ttgattcgagcacgctggccggcgacctgcagaggattctctccaccatgcgcgagctcgacgagagggctcatggcattatgggacagaccaaagaacagataaagtatctactcggagtgccatcccatgggttcgacaggtcaaacatggatgatgatgaatctgcctcagagagaatgaaaaaggacatcgaagctagtcaggacaatgcgttgagtctctgcaccgagaaagtgttgcttgcacgccaagcttatgacctggttctgcatgcacccttcatttttttctagtcccgtaactcaggaacttgtacatttcatttcatgttaagtgccatcttagttgcccgcttttcttttagacgagatcttagataccctttaattgatacacctaaacaaactgatcgttctatataaagtccaacttatttgacagttgggtttgtcagttcaatccagattcatatgatagtaccaactaga

SEQ ID NO: 20508 - DNA, 505 bp, Oryza sativa
  unsure (1)..(505): unsure at all n locations
  Clone ID: uC-osflM202008e09b1
gtgaagaccccttcgttgctcacctcgtcaccaaccaaccccaccccccaaccctctctctccctctcggcctctccgcttctccgcccacctcacctcgccgccgccgccgccgtcgccgccgcggcgcaggcagcggagctcggcgcgcctcggccgcgccgtcgtctaccgtgcgggcgccgctcccgcgtcgcgcctcgcgcgcgcgcgcgagcgcgagctaccctcctctctgtgcatctggcgacgactcggtaaggtagnggttgtgcgccgcccatgcgcgcggctccctcgtcgccactgcctcccgctcgccgtgtcctctgccacgggcgcgggtaccctcccatccggcggagttgggagtcgtgcctagggggaatctcagctgtcgggccaccgatctaccctccacggtgttgctctacgtccgtgaatagctctctctgtgatataaatctaaatgttcactcgacgctggcagtctctgctgaagcgt

SEQ ID NO: 20509 - DNA, 499 bp, Oryza sativa
  unsure (1)..(499): unsure at all n locations
  Clone ID: uC-osflM202008e10b1
ctctctctctctcccacgtgagcgcgaggcggcggcggcggcggcgcgaggtgagcggggcaccagcggcggcggaggagatggggaaggcctcgaaggggtcgcggagagggaagaaggcgtggcgcgccaacatcagcaccgacgacatcgaggacttcttcgagaagcagacgcgcgacgcgcacgccggggccgccgccatcccgtccctgccctccgactccctcttcttcgtcgacaagccggcctccgccgcgtccacctcctccgccgccgacgccgtcgcggtggatgtcgcccccaaagatattcctgtccaaaggaagattgagaagaagagaaggaaggttctatatcatgagagtgtattgaagcggaatcnatatgtacaaccagtcccgtcttctttaacgacaaagaggataagaagaagtcaaagaagaaggaatcgaaagagacatcaggtgcgacaattgttcccatggcagatgattca

SEQ ID NO: 20510 - DNA, 455 bp, Oryza sativa
  Clone ID: uC-osflM202008e11b1
ttgttcagatcatcgttgcgagaccgatcgatcgatccatcttgttgttgcgttgctctgtttggtttccgtagtagatcgtttcttggttagccggcctgttgaattgttaatcacgagaatttgggtattttctgatcgatgacgcagtgggcggatctggacgcgctccggccggcggtggccgccgacgtgcaggtcgtcacgtcggacgggaagagcatcgccgcccattcgttcgttcttgtaagatggacttctggttcttctctgttcagggcacggcgtcgccggtgctggagcggatgatcgagcgggcacggcgggggtggaacgccgagtgcaccatccgcgtcctcggcgtctcctccgacgccgtcttcgccttgctccagttgctctacgcttccagggtgacgccggaggacgaggaggtggtgaccgcgcacgggccg

SEQ ID NO: 20511 - DNA, 502 bp, Oryza sativa
  Clone ID: uC-osflM202008e12b1
tgtgtggttgcaaaataatacaagtatggaggggggccaacattgagcagtgatgatttttgcatggagtgccttaaggatggagcaaaaaattcagtatctgcagatgtttatcgtgatcggaaggcatcattaagaagtattgcagaagcagcgcttgctggaaataatccagatggtcctttgtactttgtttccaggccatggttgacccaatggttgcgcagaaaaaatgtggatatcccttcagatgctgacagtggaccaacaattgctctaacgtgcacccatggaaatcttcttccggaacatgcttcaggcgcaaagcgggtcactgtgccagaggacctatggttatttctctatgaaaccagtggaatgaagattgatgatattgtgacttttccgtcagatagtcaaccatgcggaatttgtagccagcaattatcagttgttgcttctgttgaggataatcttagagcagtgaaactcaagcaacgac

SEQ ID NO: 20512 - DNA, 501 bp, Oryza sativa
  Clone ID: uC-osflM202008f01b1
cccacgcgtccgctctcttcttcttcttcttctctcctcacttcgctcgctccctcggtcgctcggccgccatgtcgtcgcaaggagcaggaggaggggtaggggacccggagctgttcgcggagctgtggcgggcctgcgcggggccgctggtggaggtgccgcagcgggacgagcgggtgttctacttcctccagggccacctcgagcagctgcaagagccgacggacccggcgctgctggcggagcaaatcaagatgttccaggtgccgtacaagatcctctgcaaggtcgtcaacgtcgagctcaaggccgagacggaaaccgacgaggtgttcgcgcagattaccctgcagcctgacccggatcaagagaatctgccaacattacctgacccgcccctgccggagcagccgaggcctgtggtgcactccttctgcaagatcctgaccccatccgacaccagcacccatggcgggttctccgtgctccgacggcatg

SEQ ID NO: 20513 - DNA, 515 bp, Oryza sativa
  Clone ID: uC-osflM202008f02b1
gtcatacccgctcctcctcacttgtccgcttccccctccactccactccactccagcacaagcgagtgactctctcactgagcgagtgacgcagcgccaccaccaccagagcagagcccagagccagacggttggcgctcgcacttaactccgccacctccacctccccacgcccgcgccgccgggcgcatgggggaccaccaccaccaccaccacccccgcaggggctcacgccacgccgccgccggggacctgcgccccccggagccgccgctcgacccgctcgagttcctctcccgctcttggagcgcctccgcctccgccctcgacgccccgcgcccgcccccgcccgcgccctcgccctccgcggtgctcggtatcggccccatcgccgaggacgcctcctccgccgccaccgacgcatgcgaggtggtcgacgacgggtccgccttcgccgcggcggggagctccttctacttcgcctccgctgccacctcgcagctcatcatggagcg

SEQ ID NO: 20514 - DNA, 374 bp, Oryza sativa
  Clone ID: uC-osflM202008f03b1
ttacgcgtccgtacataccagggtgatgctgtgctcggcgagggtgcctctgagagccttcacgtcaaggactacaagtactgatctgcctctggtggtggctgaagatccgattggacatcctccgtatgcatatttagggttctgagtgtggtttggctatcaagcgtccaatcttacgggtatcaaaaacttttgtcgcaataatctgaaccagtgctttttaataattaatacctgtcatcggtagtagttttttggtattcctgtaatcaaatgctgcgtatggtaaattggagcagcggctttaattccatgctatctttttattgctattttctgctgtactcctatgttaattaaaccttttacct

SEQ ID NO: 20515 - DNA, 515 bp, Oryza sativa
  Clone ID: uC-osflM202008f07b1
tcggtctttgacaagctgctactcgacagcctctacgaagacgagacgaggcggcggcagatcgccggagtcacctacaccggtagcattggaggaggagcacccaaccctttcgacaccaacgatccatttgctacgtcgagcagcttcttgcccccatccaatgtccagtttgcaatgctgaaccagcagcagcatcagtactaccagtctcaacaccagcaacaatactaccagcctcatcatttccaggatcatcaacatcaccataacatgtattttcagacacattatcaacaaaatcagatataccaacaacagcagcagcagcagcatcagtaccctgcacctcaggctggatcttccaatccgtttggtgaccctttcggtgacctcgtaccaatggcaatggctgtctctcaaaaacatggacattcaagtttgatatgaatttgccatattcatgttgttaatgatcccaggcaattttaacatagatgggttaacttagtcac

SEQ ID NO: 20516 - DNA, 506 bp, Oryza sativa
  Clone ID: uC-osflM202008f08b1
tgcgtgaagcagcggcaagaacacaaaaatggcggacgagaagctcgccaagctgcgtgaagccgtcgccggcctctcgcagatcagtgacaacgagaagtccgggttcatcagcctcgtcgcccgctacctcagtggcgaggaggagcatgtggaatgggcaaagatccacacgccgacggacgaggtggtggtgccgtacgacaccctggcggcgccgccggaggacttggaggagaccaagaagctgctcaacaagctcgccgtgctcaagctcaacggcggcctcggcaccaccatgggatgcaccggaccaaaatcggtcatcgaagtgcgcaacggattcacattcctcgacttgattgtgatccagatcgagtccctcacaagaagtatggcagcaatgtcccactgcttctgatgaactcattcaacacccatgaagacaccttgcagattgttgagaaatacaccaattcgaacattgaagtccatactttcaatca

SEQ ID NO: 20517 - DNA, 506 bp, Oryza sativa
  Clone ID: uC-osflM202008f09b1
atcaacactagaaccggaacatgacaaatcagctgtgacacaaggacaatgtgatgactcttctttagaagaaatcactcagaacgggaaaaagtggatgagtgaggaggcgatggtagcatttgaaaagtatattacaagaagagatgatcttaaggaatatgattaccaatttgatgagctgctacatcagtgctttaacgtggaacattattacaagatttttcatcacttcaacttcactgtcaagatgaaggcgccctgttcaactgattggacatcggtgttatattttgccgaagtgaaggaattattgggccataaaatttacttctgctctcctttagagcccaatgaagatggtaattgctatgcatgtaagaaccaagggatggagaatttgaagcatcaatagttggcgtgtttgatcgaggctttccactcaagtgttcccctacacatactcgagtggctctgaagcatggctctgatcatcgatggagctg

SEQ ID NO: 20518 - DNA, 482 bp, Oryza sativa
  Clone ID: uC-osflM202008f11b1
ttgtgttattgcagtttcatgtgagggtgctcctcctgtccaaatgggagaaagatatcctcacatgttcttgatcctcctactttttcatggagcccatgcggctttgaaagatccagtacagaaatggcagactcttggaggtcagcgtcctcttgtcattgctcgtggagggttctccggcttgtttcctgattcaagccagttctcgtaccagtttgcaatgtcgagtagcttgcatgatgtggttctgtactgtgatctgcaattgtccagtgatggtttgggcttctgcaaaactggattgacattagagaactcgacgcttatcgccgaagccttccctaagagggccaagacatacaaggtgaatggagaggacaatcatgcgtggtttgctttggatttcaccgcagacgagctgtatcagaatgtcacattgatccaggacatcttttctcgcccaagcacatttgatggag

SEQ ID NO: 20519 - DNA, 497 bp, Oryza sativa
  Clone ID: uC-osflM202008f12b1
tggttttattgtgaggcggagggagtagctaattagttcattagacggttacattgtttttccgtacatgcatgtattcagagttcttagacttttgatctagtgaattcaagaaagtgatatatactgcaactggtttatacaacttgccatgtattataaattgcacttgaattttagagttcaattttttggtttgaaggtctaaaaacaaatactttgttgccagtatagtatggaatagcaccaattttgacattgaactgcttggaattaggaactgcagtactgcacacatctttcttgacttcaaatactgacttttgttgacacttggaattaatgaatcaaaaaggatactgtattcccattggaattggttagaatgcatgatacgaagttatgaaggcaaacattcgtaaaaaaaattctaatgtataaaccaaacagaatgcatatattcaaattcttaacagggggatggctcaaagagtgca

SEQ ID NO: 20520 - DNA, 435 bp, Oryza sativa
  Clone ID: uC-osflM202008g01b1
ctcctttatcactaggcagtagccacagtagccagtagctagctagcttgtcaagctaggagctagcatctgtgtgtcgtcgatggcatccaccgtcgccttcctgtccacgctcgccggctcgaccagcctgggcggcgccacgccggccagtggcggcgggagcggcaggagcacgacggctaggttcttgaggaggcggcggcgcggcggcgcggtgagggcggcggtgtccggcacggagcaggcgccggagacgacgaagaagaagggcggcggcggcggcggcggggacgagcgggtggtgcaagtgcacagcgcggaggagctcgacggcacgctgcgggcagcgaatgagcggctggtggtggtggagttctcggtgagccacagagtgaacagcagccgcatctacccgtgcatggtggagctgaa

SEQ ID NO: 20521 - DNA, 501 bp, Oryza sativa
  Clone ID: uC-osflM202008g04b1
gatgactagacgatggttcgtggcgggagtcgccgatcaaacactgtcaaaaccgcatccggggcgtctacttctagcgccgagagtggcgcagtggaggcgggcacggagaaatccgatacgtacagcaccaacatgacgcaagctatgggagcagtgttgacgtatagacatgagcttggaatgaactacaatttcatacgcccagacttgatcgtgggctcctgcttacagagcccacttgatgttgataaacttagggacattggtgtaaaacagtattctgcctgcagcaagatccagaccttgagtatccctattattgatttttttttctcatcatgcttataaaaagaaaggagcatgccaattatgttgcctggtttagagaatctgagcctcttgattcttgaaatgtatgctgtcacttactgtgaatcacaccaactatatcgaagagaaattataaattctggtgatggctttttatcaaaataacta

SEQ ID NO: 20522 - DNA, 503 bp, Oryza sativa
  Clone ID: uC-osflM202008g05b1
ttgacgcgtgggcggacgcgtgggcggacgcgtggggctgtaagcccttcaatccacttcttggggagacctatgaagcagattatccagacaaaggcctccgttttttctcagaaaaggttttgtctgtggacctttgaaagctacttatattttgtaatatgaagaagattttcttactatcggttcagcatagccaacctttataacttaacacagactttttaaagtagtactactgcttttgtacaggcatgataatccagttagtaaaggtttggcagaaaaaatgtattacaaagttgtcacttgactgttccctgacaccaaagccatgttacattatgttggtacctgtgtcttcttggtaaatgttacattatgttttaaatttttaattcgtagttctatttcttccgattgtccgtatttctctttatgttcacagatcactggaaactctgttctctgactatttgatcatcagatggtctatcctgtat

SEQ ID NO: 20523 - DNA, 500 bp, Oryza sativa
  Clone ID: uC-osflM202008g06b1
gctctcccttatctagtctctctctgatctgcatctgggttttctcctctcatctcacctctcttcttcttctcttcttccttgcatgctctaacaaggaagcaaggaaggattgctcgtgttgttgttgtccatgtgaaaatggatatatatagtattattgtatatgtgtcctgctggtgtctgtttggttggccttgtctcctggcttgaggaagtggggaaaggttggaatcttttcttggattttggaggctctctcccccccagcccagcccagctggtgatacggttgaggtctcttgttggtgacgcaacctctgtgtgtgtgtgtgtggcctttctcctctgcctctggcgttagataaagatgaactgaatcggcttggcagtcacacttcgattttcttggcagctgcagaagaagaagaagaattcctcatccaccatcgcttcacaatcgtctcttccaggtgtggcgacctcttttctggagcatc

SEQ ID NO: 20524 - DNA, 503 bp, Oryza sativa
  Clone ID: uC-osflM202008g07b1
tggacgcgtgggcgcgcgggtcgtcgccgtcgccgccgcccccgccgcatcgccgccgccgcgctcagatccagacccctgagacatggtctctcgccgagcgatgcgagcgccggagatgctccggtggctcgccgcggcggcggcgctcgtggctctgctcgccgccgcgccggccgccgggttctacctgcccggcgtcgcccccaccgacttcgggaagggtgattcacttcccgtgaaggtgaataagctgacatcagtaaaaactcaactaccctatgcatattactcccttcctttctgcaagccagaaactatcgttgacagtgctgaaaatctcggtgaggttcttcgtggtgatcgcattgagaactctccatatgtgtttcaaatgagagagcccaagatgtgccagattgtctgcaaattaactgctggtgagaaagaagcaaaggagctcacggaaaagatagaggatgaatatcgtgtgaacatgattc

SEQ ID NO: 20525 - DNA, 309 bp, Oryza sativa
  Clone ID: uC-osflM202008g08b1
tcggttcaaaaagaatttgcaaaccccaaatgcgccgagccgccgccgccgtgggggtggggcccgccgacccgcagctgctggcggcggggttcgagtcggacattgtgttgagctcgccgcgcctcggccgggccgtgcacgcgcgagcgctgaggctgatcgccccggcactcttgcccttcatctgcgcgcaccttgtcaacctctacttcaagctcgacctccccggggcggcggaggcggctctcgccttcgacccacaccccaccgtggtttcgtacaccgctttcatattcggcgcggggc

SEQ ID NO: 20526 - DNA, 505 bp, Oryza sativa
  Clone ID: uC-osflM202008g09b1
atgaagaagaactcactcgcaggagcaccaatggcgaattctgcgtcagggctggcggtgaacgacgagtgcaagttcaagttccaggagctgaagacgaggagggggttcaggttcatcgtgttcaagatcgacgacaaggccatggagatcaaggtggagaggctcgggcagactgccgagggctacgaggacttcgccgccaccctccccgccgacgagtgccgctacgccgtctacgacctcgacttcgtcaccgacgagaactgccagaagagcaagatcttcttcttctcctggtcgcctgacacggcgaggacaaggagcaagatgctgtacgcgagctccaaggacaggttcaggagggagctggacggaatccagtgcgagattcaagccacagaccccagcgagatgagcctcgacatcatcagagccagagctcactgatgatcatatcatttcatcatccaacaccaccagattaattaattcatttccaacg

SEQ ID NO: 20527 - DNA, 484 bp, Oryza sativa
  Clone ID: uC-osflM202008g10b1
ttggccggcctcccgtcgctgctcccaaccgctgactcccactcgccgcgatccgatcgccacctgccctcccctcccagatccgccgccgcggaaacctcaccggcgccggcgacgcgagggcaccatgccgggcctcctcgagtattccgcgggcggcctgggcctcctggcgctcgcggcgctcgagtccctcccgctccgccccctcctcctccccgccgccgcggcgtcgcacctcccgcgccgcctcggcctcgccacgccgctgcacctccgccacctcctcgcggggatcgtctccgcgctcttcctcctctccgcgctcttctccgcgcgacaccacctctccctcccgacgctcgccgccaccgcgctgttcctcctctacgcgctggcccccctcgccccgctccgcgcgccgctcccgctccccttgctcgacctcgtcctcgccgccgcgttcgcgcaggagctcctgctc

SEQ ID NO: 20528 - DNA, 505 bp, Oryza sativa
  Clone ID: uC-osflM202008g12b1
aggcattatccatgttgtgctgttggattgaaaatcccaattcagatgcattcaagcgtcatttggctagagtagctgattttctatgggttggagaagatggcatgaaagttcgggtctgtgcgggtcaattatgggatgttgctttcgcagtccaagcgatattagcgtgtagcatcgcagaagaatttggaagtacccttaagaaagcacatggtttcataaaaacttcccagaaagtaccgtcacatatctaaaggaggatgggccttccaggttgcagatcaggggtggcaggtttcagattgcacagcagaagctcttaaggtgcagatcaaaatttaaatattaagtgaagaacaaattagcgctacctgatgcagacatgggtcaagcagggttgattttccatttctattcatctgtctaggtttaattgattctgattgattattctcgaaagtaaaatgaacactgaaaacaagataaaggcatgggttgattt

SEQ ID NO: 20529 - DNA, 382 bp, Oryza sativa
  Clone ID: uC-osflM202008h01b1
ttcatgttaggtgcatgccatggcaccattcatggcgtgcgcctcgccaccggtactcacgctggccctgctcgcgtcgtgcggtgcccttctcgccacctccatgctcccggcgcgtgcgacggcgggcagttgcttggacgtcggcgacatggtgatgatggacaggttccgcgcttggcagggagctcacaaccggtcgtacccgagcgcagaagaggcgctgcagcggttcgatgtgtaccgccgcaacgcggagttcatcgacgccgtcaacctgcgcggcgacctcacttaccagctcgccgagaacgagttcgcagacctcaccgaggaggagttcctggccacgtacaccgggtactacgccggcgatggcccc

SEQ ID NO: 20530 - DNA, 502 bp, Oryza sativa
  Clone ID: uC-osflM202008h03b1
attctgtgtgtgtgtcttggttgcaaaaaccaagacatacacacagaatcaaataataacaaaggtttcctagcctcaaaggatacatatatatagtttccctacaatacaatggagcctgtcaatgatttccaggaaggcatttcaacagagcatgcctttgaggcagagcctgtgccatcattgtcggaaacaataacgccacgatcaatggtggtgagcttcatccttagtgtaactctcagcatcgtcgccatgaaggtcaccttgagctctggcttcattccgtcgttcagcatcccagccggcctcctcggtttttgtgtatcccgtgcgtcgatccgcattcttgactacttcgcagtggcacaactaccattcacacgccaagagaacaccatcatccagacctgtgtcgtcgcatgcacctagatcacattcaccggtggctttgggacatatattcttgcaatgggaaaagaaagcagctgtaggggatgtc

SEQ ID NO: 20531 - DNA, 307 bp, Oryza sativa
  Clone ID: uC-osflM202008h04b1
cgttgagctagcgccgcggcgacgccgtcttgcccatggagtccgcctacgcctccgccggtggcggcggcggcgacgacgacacaaagatgatggaccgctgcaacaacgagggggacgacaccgacgagaagccggagacatacaccggacaaggccgaatacggaagcacgccgccgcccgccccgccgacgtaaagatcaacgacctgacaggggacgcgatgatggtggccgtaccgacgacgatgccgatcagggcggaggaggcaccgatgaaggtgacgcgcagaatcatgatcaagcg

SEQ ID NO: 20532 - DNA, 501 bp, Oryza sativa
  Clone ID: uC-osflM202008h05b1
gttccatccatcactcgatcgtaacaactttgtagtcacgcgccatgcagccgacgtggctcgccacgatgccggcagcgtcgtcgctggtcgtcggcgtcgcgttcacggccgccgtggccgtggccgtggccgccgccgtggcgaggcgcgcctggaggcacaggggcctccggttgccgcccgggccgccgggttggcccgtcgtcggcaacctcctgcaggtggtgttcgccgggaagccgttcatccactacatccgtgacctgcggcgggagtacgggcccatcgtgaagctgcagatgggggtgcgcacgctggtcgtcatcagcagcgccgagctcgtgcacgaggcgctcgtcgagaagggccgggagttcgcgaccaggccggcggagagccccatccggagcatcttctccagcggcaagttcaccgtcaactcggcggtgtacgggcccgagtggaggtcgctgcggcggtacatggtgtccgggatgc

SEQ ID NO: 20533 - DNA, 492 bp, Oryza sativa
  unsure (1)..(492): unsure at all n locations
  Clone ID: uC-osflM202008h06b1
ttcttcagtctccactccactgaatcctcccacctcggctcgaaggaatggcaagcggtagtgaagctgagaagtcacctgaggttgtgctggagtggcctaagaaggacaagaagaggcttctacatgctgtttaccgtgttggagatttggatcgcaccattaaatgttacacagaatgctttggaatgaaattactgaggaaaagagatgtgcctgaagagaaatatacgaatgcatttcttgggtttggacctgaggacaccaactttgcacttgaattgacatacaattatggtgttgataagtacgacattggagcaggatttgggcatttcgctattgcaactgaggacgtgtacaaattggctgagaaaattaaatccagttgttgctgcaagatcactcgtgaacctggtcctgtcagggaggatccactgtgattgccttgacaggatcctgacgttacatgttngagcttatccgaggggt

SEQ ID NO: 20534 - DNA, 440 bp, Oryza sativa
  Clone ID: uC-osflM202008h07b1
gtgggcgacgcgcgcgacgggtgcgcgggctccatggtcgccgaggcgtacgcggcgagggcctccatcaaggtgccgtacgagtccaagggcaccggcgggtacaagcgcgccgtcctcgagttcgccgccatcgccaaccgcacccgcgtcgtgttccagagcacgttctaccacaccatgaccgacggctcgctctgcgggccggtcatcgacgacgcctccctcgtcggcctccgcaagaagacggccggccggcggctgctcctgtaagacgaacggccgcgtggcatcgaacgccgtcgcattccctccattctatgaatatatgaatacaaggcgcggttaaacttgggggcagctggcacgacaaagttgggtgcttaatgggtaggattgctaggctcggttttttgggtttgggggggtctctggtatat

SEQ ID NO: 20535 - DNA, 294 bp, Oryza sativa
  Clone ID: uC-osflM202008h09b1
ttacccctcgtgatggacacccgcctccccctcctcctcctcctcgccggcgtcgtcgccgccgcggcgccactgctcgccaccgcccagctctccgccgacttctactcctccacctgccccaacgtcgagaaggtcgtctccaccgtcatcgagcgcaagttcaaggaggaccctaccacctccgccctcctcctccgcctcctcttccacgactgcttcgccaatggatgcgacgcgtcgatcttgatcgacccgctgtcgaaccagagcgcggagaaggaggcggggccc

SEQ ID NO: 20536 - DNA, 500 bp, Oryza sativa
  Clone ID: uC-osflM202008h10b1
ttgagcaagtgtgtgtcctgcctcgcgtgaaagataagcggcgctctgctctgctcgccgaggagagagagaagagagagagagagagctagagatggcggcggcctcagcggcggcgcaggcggagggaacggtgatcgcgatccacagcctcgacgagtggaccatccagatcgaggaggccaacagcgccaagaagctggttgtgattgacttcactgcatcatggtgcggaccatgccgcatcattgctccagtttttgccgatctagcaaagaagcacacaaatgctgtttttctgaaggttgacgtcgatgaactgaagcctattgctgagcaattcagtgttgaggctatgccaacattcctgtttatgaaggagggagatgttaaagacagggctgtcggtgctatgaaggatgaactggcgagcaagcttgagctacatatggccatgtagtgttatagtggattagtactgatatcctaaataaaacggg

SEQ ID NO: 20537 - DNA, 495 bp, Oryza sativa
  Clone ID: uC-osflM202008h11b1
ttcgaagaaggagaagaaggagaggagcagccatggcgtcgtcggtggcagcggcggcgagcacgttcctggggacgaggctggcggacccggcgccgcagagcgggaggatcgtggcgaggttcgggttcggcggcgggaagaaggcggcggcgaagaaggcggcgaggccgtcggcgccgacgacggacaggccgctgtggttccccggcgcggtggcgccggactacctggacgggtcgctcgtcggcgactacggcttcgacccgttcggcctcgggaagccggcggagtacctgcagttcgagctggactcgctggaccagaacctggccaagaacaacgccggcgagatcatcggcacccggttcgagaccggcgaggtgaagtccaccccgttccagccctacaccgggtgttcggcctccagcgctttcgcgagtgcgagctcatccacggccgctgggccatgctcgccaccctcggcgccctctc

SEQ ID NO: 20538 - DNA, 500 bp, Oryza sativa
  unsure (1)..(500): unsure at all n locations
  Clone ID: uC-osflM202008h12b1
tggtccataccatagtttggagctcccagtttacgagaggaggagaagaagaaccgcacgacaccccaccccacctcccgatcgccaagaaccacaatccccaatccacccaataactctaattcctcccccgattcgccctcgaccaagaaccactcggatcgatcaaagccgccacctttccaccaaatccccaatctttttttttcttcttcttttcttgcaattgatgcgcttcgccatcgggatttgaggggaggaagaagaaggggatggcgtgcagggggttcttcgagtgggtcctgaagctgctcaacttggtggtgatggtggtcgggctggccatgatggggtacggcgcctacctcctcgtggcgtggctccagctgctgccttcgccgccgccgctgccgactgcgccggcggtggctcccggcggcggcggaggccgctagatggtgcggctcgngaggccgctgctgctactactcgacgtgtcg

SEQ ID NO: 20539 - DNA, 423 bp, Oryza sativa
  Clone ID: uC-osflM202009a01b1
cttctttcaagagaaagaatattgatgggagtcttgcagagtcttctgccaatggtagttcacgtaataatcagcgaaataatattatactggaaccttctccatccagtcatgaaagcacttctggtttaactgcacctgcccctacaaaccatgttttttcatactctcctgtggaacagctaaaccagaataccaatatgtctgcaaatgctatgttgtctgatcattattcactatatggtgatcatgagcgcgagagatttctgaggaatacccggatgagaacaagccctaatgagtatgatcaatcatcgtccaatctcttgcctgaaggaagtctcaggtgttctgtttatcagcctactcagcaacagtctttgtttattccagtacaacctagagcatcgagctcttaacaag

SEQ ID NO: 20540 - DNA, 416 bp, Oryza sativa
  Clone ID: uC-osflM202009a03b1
gtagccgttaatccccggagaggcatttcctcgaacacctgccgcgcgcgccgtccgcccccaaaaaccctcgccccaaaccccgcgccggccgaagcggcggctccgtgcggatgccctcccgtcccgtcccggcgcgccccggccggcggtagtaggaagtggggggcgccgagcgtaagatgcggcgcttctccccggccgccgcggcgctgctcctccgacgctcgctcgccgccgccgccgccgccgcctcaccagcgctccgctcgggtccgagacagctggtgcgtgcctcgcttcttgacgaaagtttgtctacacagacgagttcagcggcttcaaccatggctgtgcagtaccaccaagggtgtagttcagcagaggggatgagtttgaggttcttgaggctttca

SEQ ID NO: 20541 - DNA, 414 bp, Oryza sativa
  Clone ID: uC-osflM202009a07b1
gtgaagcagtagcatagcagcggaagaactcaagcggagtgggcgaagaagcaaagcccgatggatcaacaccaggtggtcggcgagaattatgcaaatccaaagacatgtttcttccatgtcctcttcaaggcaggggcattggcgttctacatactgtctgcgctgttcgtgaccaactttgttattatctttgtcatcaccgtgctcctggcagcacttgacttctgggtggtcaagaacgtcagtgggaggatattggttgggctgcgctggtggaatgagatcgatgatgagggcaatagcgtgcggaagtttgagtgccttgatggagagcctcttgctaggatgaacaagaaggactcatggctgttctggtgactctgtacttgactgctgctgcatggattgatc

SEQ ID NO: 20542 - DNA, 317 bp, Oryza sativa
  Clone ID: uC-osflM202009a08b1
gttacttggtgcaggtggacctgatggagtcgaagacggcgcacgggccgccgacggggaggtggacgccgatgagggagtcgtggggctccatctggaggctggacaccaaccacaggctccaggcccccttctccatccgcatccgcaacgagtccggcaagacgctcgtcgccaacaacgtcatcccggccaactggaggcccaacacattctaccgctccttcgtccagtacagctgaaccgccgctcgccggcggcgaccctcggcgccggcatcgccgccgctgctgctgctagtaatactactactgcta

SEQ ID NO: 20543 - DNA, 298 bp, Oryza sativa
  Clone ID: uC-osflM202009b07b1
tcgttattccagtggagcacgcgatttcccatctgctcgatcccctcctcctcctagggtttcctgctcctccgcccgcctcgccttgctgctgccgttgttggtgcgatggctctcacttcggctcaacggattgctctcactgtctctttctttggccttctctccttcttacttggtgtcatcgcagaaaacaagaagcctccttatggaactcctatcaaaggaaaggatgttgtcatctgcaagttcccaagtgacccaactattgcaatgggaagcctctccgtggtgtcac

SEQ ID NO: 20544 - DNA, 336 bp, Oryza sativa
  Clone ID: uC-osflM202009b08b1
cgggccggattttcggggagagccccacgcttcctttaaaacagtagtagcttaattggctaccatgtcgatgtccactagcatgctggggcggaagcagaacgcgcagcagaagggcggaggcggcggcggacgcaccgacggtggcggcggcggcaagatcgagccggtgagcgtggacatcatggagccgttcatggacgcgatctcgctgacggcgttcgcggcggcgccgtcggcgggggacgcggcagcgggcgtgccgtcgactgcgagcatggactggaaggagacggcggcggcgcacgtgttcatggcggacatgcccggagtgcg

SEQ ID NO: 20545 - DNA, 417 bp, Oryza sativa
  Clone ID: uC-osflM202009b09b1
cttgcagaaaaaaaaaactctcatcttttgcaggaagagacatcactgtttctgcattcgtgtgcatttggattaagctttgcttatccctttttagtggagattgttgagtatatcaggtctatatattggcagctctggttggagatagacactcacactgagccaagatggggagtttgcacaagttcagtgttattctcctcatgttatgttttgctacgttggggagcgctcagtatgtcaagtataaggatccgaagcagcccgtctctgttcgtgtcaaggatctgctcggccggatgactctcactgagaagattggccagatgacccaaatcgagagggagaatgccacggcggagcagattgccaagtacttcataggcagtgactgagtggtggaggcagcgtgcc

SEQ ID NO: 20546 - DNA, 333 bp, Oryza sativa
  Clone ID: uC-osflM202009b10b1
tcgtttctcacaagggagaagagaagagaagcttcgagagagtggtggaggaggtgacgagcgcgtggtggtggtggtgttggcggcgatggatcgggttcgcggatgcgcgttcctgctaggtgtcctgctcgcaggatccctgtttgcattttctgttgcgaatgaggagaccaagaagctcggtaccgtgatcgttattgatgttgttacaacctactcgtgtgtcgggttgtgcacgaatggtcatgtcgagattatatgcaatgaccagtgtatccgtatcacacccatggtgggttgcatttaccgttagcgtgtggctgatacctg

SEQ ID NO: 20547 - DNA, 426 bp, Oryza sativa
  Clone ID: uC-osflM202009b12b1
tcggtaaaatattgtggctaaaaccatggatgatacattgagacccaaagaatatacttactacaggaagaggaaactgaggaaaaactgtgaagcatcatcatcagaaaaaccaatggatgagcagctctccagacctcttcgtgatcttgttgaatgcaaggttaatatgaaaaatatccatcgatcaagcaaggctgggatttcgcagagagtttctgttgtggagaagccctccaaaaagcgtgccaaaccttcacataatgataatattaatctgaatatccagcaggacttgaaactcctttccgacaaggtgccaaagagaaacaggtcttcccatcctaccagtaagcctcttgttagtagcaaagtgcctactgaggatagaactacatcagcaatgcctgcaagaaaagaaagcag

SEQ ID NO: 20548 - DNA, 322 bp, Oryza sativa
  Clone ID: uC-osflM202009c01b1
tggatgttgaagcggaaggcggcgacggccgacttcggcgggaagagcttcgtgcggcggtcggagctggagcagaagcagctccagaagcggcgccacgaggagcaccgccagctcctctccaaggccccgccggcgacctcctccgcctccgccgcgggctccgaccccagcaaccccaacgccgacccggcccagtcctccgccgcaaaccctaaccctaactcctcctcgtgcgccgccgccgcgtccgtcccgccgggcctcgcggggaagaagaccgcgaggaaggggcgctcctttccgcggagcgcccaatcga

SEQ ID NO: 20549 - DNA, 417 bp, Oryza sativa
  Clone ID: uC-osflM202009c02b1
ctaattgtgatctaacatatggggggaaaggtgatgctaaaaaatatgcacatggacagaaaccaaaaactgttctcctacctgttggattcgctgctgacgataacacggagaaacaatgtgatcttgaaagcagggatactgctagtgatatcagtgagaagaaaataagtttgcatgagttacttaagcttgaaagtgcagaagaatccaaggaaagacttaaacttgaaagtgcagaagaatcccagacccagcatcaaagcacaacttctgcaataaatgaaaaaaacatgccccctgttcatgaagaggctattgcacaggtttccacaaatgactgcaatgatgttgcaactgcatcaaaaactgatgaacttattactagcaacgtatcatgtatcaataacaccaacg

SEQ ID NO: 20550 - DNA, 417 bp, Oryza sativa
  unsure (1)..(417): unsure at all n locations
  Clone ID: uC-osflM202009c03b1
gtcttttctgttccatgcgttttctgctctgcaactgcaagcaagtccctctgctagctgcgagcctcacgtgcccattcactctctttatttattgctgattcccgatcgatcgatcgatcgatcgatcagcaggcaatagttaatcgatctcaacaactacccatcagttattcaatacaatacagccattcagacagaagcaaggtctatcgagtcagagagatcgacatctcggcgagcgagatcggcgaattgacgggtgatcatggacgccggctgcaggcggcggcgccgctgctggagaagaagggcagcaccggcaccggcgtggacgatgggtactgcattgaggggtgccccggntgcgttgtcgatccgcggaaggccgcgagctacggcatcccctacgggagc

SEQ ID NO: 20551 - DNA, 435 bp, Oryza sativa
  Clone ID: uC-osflM202009c06b1
cttctttgtgtcactctccgatggctacaataagcttgtgtctacttgcgcaggcatacaatcatgcaatttctgttatccagtctttgggagaggaagatataaatgtgaagtttctcgtgcaactagacaaattaatccgtcttttagagactcctgtatttgcttacttacgtttgcagcttcttgagcctggaaaacatacctggcttctcaaaacactttatggtctcctgatgctactgcctcagcaaagtgcagccttcaagatcttgagaactcggctgaagactgtgcctttcagtgaaaatttgaaacgcacatcttcaacaaatccatactctcagattctacaagtgacagaagatggtaatcgaaatcacgacactcagagctacaatgcaatcaatttcccatcccggcttcaccagtttg

SEQ ID NO: 20552 - DNA, 447 bp, Oryza sativa
  Clone ID: uC-osflM202009c07b1
tcgttgaggaggaggaggaggatgaggaggaagcggctgtggctgcggctaggcgtgtcaagagggaggtcgcggatgacctgaacggggagcccgcggaggaggaggatgacgacgaggaggaggtggtggtggaggaggacgaggaggtggcctgttctctcaccctgtcccgcagcaccccatgtagcctgcatcagtgggtaagatttgctttaccctacttacctcttcacactttgataaaaccttccattcgcactacgtccgtctgctatatgctactcactttagtagacgtgcttcatcctcgcgccatattctgcaggtttgagacagtcaattcaaactctttctgcaaatttttctcacaactaatcagtgaactgatgaacttattactagcaacgtattaagtattaataacaccaacggttcatcagcaac

SEQ ID NO: 20553 - DNA, 312 bp, Oryza sativa
  Clone ID: uC-osflM202009c08b1
tcgttttaagaagatgcgcatggtggtctgctacgagtatgctgtgcttgccaagcttggtatccgccccttctcatatgggctggttattaccaatgtctatgacagtgggtcagtcttcagccctgaggtgcttgacctcactgaggatgacctgacggagaagtccgcttctggtgcttctatggctgcctcaatatccctggcaattttgtacccaactattgctgctgcaccacacatgttcctcaatgggtacaagaatgtgcttgctgctgcttgggggaccgaatactcgtacccacatgctga

SEQ ID NO: 20554 - DNA, 316 bp, Oryza sativa
  Clone ID: uC-osflM202009c09b1
tcgtttgcatctagctagggagagaaaggaagagacgagaggagagagatggccactgcttatgctcccatggcgagccagctgatgaagagcagcttggtgtgctccaagccgagggggctgtctggtgcttcactgacaaggaggccccgcttcacagtcaaggccatccagtctgagaagccaacgtaccaggtggtgcagtccatcaatggcgaccccttcatcggcagcctggagacgccggtgacctccagcccgctggtcgcctggtacctctccaaccttccggcgtaccgcaccgccgtcagcccgc

SEQ ID NO: 20555 - DNA, 423 bp, Oryza sativa
  Clone ID: uC-osflM202009c10b1
ctaccctctctcctccatccagcaccgaccatggccgccgtcacggctgcggccgtctccacctccgccgctgctgcagtcaccaaggcatcgccgtcgccgccgcgccggccaagaaggagaagatatccaagaagcatgacgagggcgtcgtcaccaacaagtacaggcccaaggagccctacgtcggcaagtgcctcctcaacaccaagatcaccgccgacgacgcgcccggcgagacatggcacatggtcttcagcaccgagggtgagatcccctacagagaggggcagtccatcggcgtcatcgccgacggcgtcgacaagaacggcaagccgcacaagctcaggctctactccatcgacagcagcgctctcggcgacttcggcgactccagaccgtttgctctgcgtaagaggctcg

SEQ ID NO: 20556 - DNA, 437 bp, Oryza sativa
  Clone ID: uC-osflM202009d01b1
tttcttctagccagtaagctagctaactaactacgtggctatggcccccaccgtgatggcctcctcggccacctccgtggctccattccaagggctcaagtccaccgccggcctccccgtcagccgccgctccaccaactcgggcttcggcaacgtcagcaatggcggaaggatcaagtgcatgcaggtgtggccaattgagggcatcaagaagttcgagaccctatcgtacctgccaccactcaccgtggaggatcttttgaagcagatcgagtacctgcttcgatccaagtgggtgccttgtctcgagttcagcaaggttgggttcgtctaccgtgagaaccacaggtctcccggatactacgatggcaggtattggaccatgtggaagctgcccatgttcggctgcaccgatgccacccaggtgctcaaggagc

SEQ ID NO: 20557 - DNA, 435 bp, Oryza sativa
  Clone ID: uC-osflM202009d02b1
ttggttgtctccgactggccacggcgcctcgctccgatggccaaagcgacgggctaggaagaggtgggcggtagatcatgttgtcgttgcgtcgtcatcgttgttcttcgtcgacatcctcgtcaccctcatcgaggtccactgccgtcgccgggcctcctaccgcccggcttcctcctccggcctcgctaggggatctcgtcactggtgccctccccatcctcaggctcgtcgtcatgggactgcgccgccgcggtccccgtcgcggcacccccgactcccttcggctcctaggccgccgccacctccactgctacctcggcttcctccgaccaacactcacctaccagcggctcgatctgcggggctcccatggcgatagagggcctttgggcctgcatccgccgctgtttttccaccattggttgcccgcca

SEQ ID NO: 20558 - DNA, 435 bp, Oryza sativa
  Clone ID: uC-osflM202009d03b1
ttcatccctctatcaatcaagaaacaagcaagattattctagccaactagctagcttgcgaatggcttccttgtcctccttaatgctcgtcacggcagtggccgcattgttggtcattggctcatctggcactgaggtcaccttcaagatcggtgagtcctctaccacctctacactggaactcatcaccaatgtcgccatatctgaggtggagatcaaggagaagggtggcagcgactggagggggctcaaggagtcatcggctaacacctggaaaatcaaaagtgatgcaccgctcaagggccccttatccgtccgcttccttgtcaagaacggtggctatcgcgtcgtcgacgatgtaatccccgaaacctttaaggccggctccgtctcaagagtggcatccaggtccagtaatggacatgcatgtccttg

SEQ ID NO: 20559 - DNA, 427 bp, Oryza sativa
  Clone ID: uC-osflM202009d04b1
ttgttttactctactactactagccagtaggctagctaactaactacgtggctatggcccccaccgtgatggcctcctcggccacctccgtggctccattccaagggctcaagtccaccgccggcctccccgtcagccgccgctccaccaactcgggcttcggcaacgtcagcaatggcggaaggatcaagtgcatgcaggtgtggccaattgagggcatcaagaagttcgagaccctatcgtacctgccaccactcaccgtggaggatcttttgaagcagatcgagtacctgcttcgatccaagtgggtgccttgtctcgagttcagcaaggttgggttcgtctaccgtgagaaccacaggtctcccggatactacgatggcaggtattggaccatgtggaagctgcccatgttcggctgcaccga

SEQ ID NO: 20560 - DNA, 424 bp, Oryza sativa
  Clone ID: uC-osflM202009d05b1
ctgtcttacatagtagagatgatgccccaattctccatgaggagatagaattgtaattacaccagacttgtaatcttattaggaaaaactttagctgtgccattagaagtgaaacagcccagaatagcattgccgttgtgaaagacttgccccaagcagttcagtagcctacctgcttttatcagatactcgtgatttcctgaggtctcatggaggcatcgatatctccaccaggctcatcaaagcaagcacgtcttcgtagaccttctcctggaaactctcttaaggatctgtgtcttgtttccaagcaaggatcaatagctgaagtagaatctgcttagctttgttgaaaagagtggtggaagcattgatggcagaatgtgtttggtctttgtgctctccacctgcaacgtggagaaatcat

SEQ ID NO: 20561 - DNA, 430 bp, Oryza sativa
  Clone ID: uC-osflM202009d06b1
ttcagttgcagctcagccgccgccgatggcgtccacgatcatggccccaacctcccgcgtcctcgccgccaagacccccttcctcggccatccccgtccctccaatgcccccgtccgcgacatcgccgccgccgccaccggccgcatcaccatgagcaaggagctgtggtacgggccggatagggtgaagtacctggggccattctcggcgcagacgccgtcgtacctgaggggcgagttcccgggcgactacgggtgggacacggcggggctctccgcggacccggaggcgttcgcgaggaacagggcgctggaggtgatccacggccggtgggcgatgctcggcgcgctgggctgcatcacgccggaggtgctcgagaagtgggtgcgcgtcgacttaaggagcccgtgtggttcaaggccggcgccc

SEQ ID NO: 20562 - DNA, 240 bp, Oryza sativa
  Clone ID: uC-osflM202009d07b1
tcgtttaagttggctgacgatgctggcggccgtccaaaatcaagcaaataataagcgacaacatcgagttcacaacacaaaagcaagcaaaaataagccacgggttcatgtgtgtgaataaattagttgacgagctcccaacccaccccctgttgttgttgtcgcaaacctgaaactgtacagcgtacattactgctgtcacatacagtgacaaaaacaattaaacctcatttgatcttc

SEQ ID NO: 20563 - DNA, 427 bp, Oryza sativa
  Clone ID: uC-osflM202009d08b1
gtgggaggcacatgcttataccgttcgtgctggagttcctgatcgatgtcgcctgtgatcagtgagatcctcctctcggggtttatgatcaactccacactccggcgccgcacccatctcgtccagtctttctccgtcgtcttcctctactggttctatgtcttctcataagctactcgccatccatttccctctcctcctctctctctagcttccttctacaataatcgatctcgtgttcgtcgtcgtcgttcttgtcgatctctgtgtgtgttcttcgtcgtcgccgtgttcgttttggattttggtttcagtttagtatatgcacttcttgttcttcactgctgctgctgctgctaagcttgtagcaatctagtggtgcttgttgttcttcttctcccgaaatctttgcgatcgattgattgat

SEQ ID NO: 20564 - DNA, 419 bp, Oryza sativa
  unsure (1)..(419): unsure at all n locations
  Clone ID: uC-osflM202009d10b1
tcttttaaagatgtcagtggcctgcaagttcagagggatggccagtggtccaacgttgaggcatctcctcacacattgctgatcaacttaggtgacaccatggaggtaatgtgcaatggcatattgaggagcccggtgcacagggtggtgacaaacgccgatatggagaggatctccctggccatgttatacagcgtgaacgatgagaaagacattgagccggcggctggttcgctggatgagaatcgacctgcatgatacaggaaagtgagcgtcgaagagttcatggccgggatctttggaaaattgtttcgaggagagaggtacatcgactacctgaggatctgatctcgaagagagcatgattgttgcaagctcagcagctttcagtagcangtatttccttgagaaaacaaaca

SEQ ID NO: 20565 - DNA, 426 bp, Oryza sativa
  Clone ID: uC-osflM202009d12b1
ttatgcttaggttctcttcatatgaagaggcttaagagggatccatttcaccgtgccattccatatccgaatggttgccctgagctgaagggtctgttctcatactgtggtctggtgccttaccctgggcagcttccttggacccaatagctcgaaggatatacgaaccttggactatacaaccttctttcattgcctcggctctgaagtctgaactgacaaaataactacttgtgaaatgtgatgtattcttcctgaatcctgactaagaccacatttacattagtgagattgtttttttgtaacggtgtatatcacatgatcaatatatgttttttcagtgtgatttggcatctctgtactaggaaacttgaaattattagtgaaaacaatgttctctctctgtttttttttaaagataaatgt

SEQ ID NO: 20566 - DNA, 421 bp, Oryza sativa
  Clone ID: uC-osflM202009e01b1
ttccttcacacccatgggttgaagcaatcaccaagaaggccagggacaatgttcttaagatggaggctcagcttgccaaggatgttgtgccattcaatttcctgacacctttgcggattatccgggatgctatacttgctgagggaaaccctgctcctgtagtggtctcagaaggggcaaacaccatggatgtcggcagggcagtgcttgtgcagaacgagccgaggactagactggatgcaggtacatgggggacaatgggagttggattgggattctgtgttgcagctgcagttgctgagcctgatcgacttgtggttgctgcggagggtgattctggatttggattcagcgcaatggaggctgagacattggtaaggtaccagctgcctgttgttgtaattgtcttaacaatatggag

SEQ ID NO: 20567 - DNA, 325 bp, Oryza sativa
  Clone ID: uC-osflM202009e02b1
ctcctcttcgctccgtcgcctcctctctctctctctcctcgccccgccgctttttagggtttttgttcgcgccgccccggtgagaggtagacgggtctccccggcgagatgggccacgtcgacgcatcggccgccgccgccgccgcgcgcgacgcgaagaagaagagggggaaccggtcgtcggcgaagctgaagcagtgcaagctcgacgcgcgccgcgagcagtggctttcgcaagtcaaggatggaaaggaggctaaggcatcgacttcgccgacaggtacagagccaaatgctgggtccatgaccgttccttcgccacacc

SEQ ID NO: 20568 - DNA, 438 bp, Oryza sativa
  Clone ID: uC-osflM202009e03b1
gtgaatcaaaccgctctaactgccagatacctgctgctgccactagcccattaccatggatccttgcaagttccggccggagagctcgttcgacacgaagacgacgactaccaacgcgggagctccggtgtggatcgacagccaggcgctgacagtggggccgaggggggcgatcctgcttgaggactaccacctgatcgagaaggcggcgcacttcgcccgtgagcgcattccggagcgcgtggtccacgaccgcggagtctacgccaaggggttcttcgagtgcacccacgacctaaccgacataacctgagcagacttcctacggtgccagggcgcccagacccccgacatgggtcgcttgtacaccgtcatgcacgagcgcggcagtccagagacgatccgcgacccgcgcgggttcgccgtcaagtgctacac

SEQ ID NO: 20569 - DNA, 415 bp, Oryza sativa
  Clone ID: uC-osflM202009e05b1
gtctccccggccgacgcctcctcccctccccggggatccctccgccgccgccgccgccgaatccggcgtccccagcctaggcgagatttgggggcgcgcgatgaaggagaagcgcgggctggaagccgcggcggccggtggcgacggccaccccgaggccaagcgcgcgcggcctcccgcactggccagtgttattgttgaagcattaaaggtggatagtctgcagaggctttgctcatcactggaaccaattcttcgtagagtggttaggaagaagtggagcgtgcgttgggcagactgggtcctgcaacaataactggaaggtcttccccgaagcgaattgaaggtcctgatggaagaaatctgcaactccagttcaggacaagactgtcttttcctcttttactggggaaaa

SEQ ID NO: 20570 - DNA, 423 bp, Oryza sativa
  Clone ID: uC-osflM202009e06b1
ttgactcgtggggccgcttcgacggagatgggcggcgccgccgccgccgccgccgtggccctgctcgcggccactcgccggcgccccgctgcgggcccgctggcgttcctcctccctcgcgcggcccgcgcggggctccacgaggctgctgctccggcggcggaggaggagaaggggaggacccggaggaggcggaggaggaggagcagcagcagccgccttctcgggccggacatccccgacacctgggactcgcccccgcgcgccgcggcgcggccgtctcccccgagcggcgccggagttgattatgactccactgcgaccattattgatggcaagtctgtcgcggaagacataaggtttcagatcgctgaagaagttcgtcaaatgaaaatgcagtggggcatgtgcctggcctagctg

SEQ ID NO: 20571 - DNA, 429 bp, Oryza sativa
  Clone ID: uC-osflM202009e07b1
ttcttcaaactagcaggctagagctcttcctgtctgctgccgcggcccgtggtccgggttccctacgcgggctgtcccgctgagaggcggacacgatgccaccgccgacggcgtccggcgtactctccgtcgcgtgcaggtgaaacagggcactctcagttcttaggaggctccgcttccttggttactgcacaccaactgttcgacagaatgcctcagaggaccttcctggggcaggcttacatgcacgctctcaccagagcgttctgccaattgactgcgctcttgggtctctacgggtttggcatcctaccgatctggatggttccaaggatggccatgtgagcgaaaacgtgaaaatcctcaagtctagagatggcgacagtgagctcgacgaagttctcaatcagtaatcagacgagatggatg

SEQ ID NO: 20572 - DNA, 427 bp, Oryza sativa
  Clone ID: uC-osflM202009e09b1
tcgcttcgccgtgccgcagggcgcccgcgccgtggagctggtggggggcaaggagtcggcgctggtgcaggaggtgcgcaccgtgcccgggtggacgtaccgcctgtcgttcgccgtgggcgacgcgcgcgacgggtgcgcgggctccatggtcgccgaggcgtacgcggcgagggcctccatcaaggtgccgtacgagtccaagggcaccggcgggtacaagcgcgccgtcctcgagttcgccgccatcgccaaccgcacccgcgtcgtgttccagagcacgttctaccacaccatgaccgacggctcgctctgcgggccggtcatcgacgacgcctccctcgtcggcctccgcaagaagacggccggccggcggctgctcctgtaagacgaacgttcgcgtggcatcgatcgccgtcgcattccc

SEQ ID NO: 20573 - DNA, 423 bp, Oryza sativa
  Clone ID: uC-osflM202009e10b1
ttgttttttcgtaacagcttcagatgactcaagtgtcaagatatgggatacaagaaaattggaaaaggacattgccttcagatctaggttaacatatagcctcggtagtagccgagctctatgtacgacaatgcttcatggtactccccaagttattgttggtgctagtgatggaacattgcacttgttttctgttgactgcgcacgtggtgtagggagtgtcatcgaaaggtattctggcattgttgatgtaaaaaggaaagatctgaaagaaggtgcaattctcagtgttgtgaactgttccacagagagttttagcccaaccattcttttcagcactgaacattgtggcatacataaatgggatacaaggaccaatgctgagtcttggtcatttagatcttcaccagaggagggctatgt

SEQ ID NO: 20574 - DNA, 418 bp, Oryza sativa
  Clone ID: uC-osflM202009e12b1
gttcacacctcaccgagcgagcagctagctagctgcggcgatggcctccagagcggcggcggtcgccgtcctcctcctcgccgtggcggcggcgccgctcttcgccgcggcgagcgcgcatggccgaggctaccttggtgccaagtcctggcctcctgacggcagcctgagctcatcaagctccggcgaggctgcagcggcggacgtcgacgacggccacacggactggaagtgctactcctcctgcatgagcaagtgctgtcaccgccacgacgacgacgacgacgacaaggccaatgccaaggccaacgccaccgccggcgccgccgccgtcgggctcgacgatgactacaagtgcaagaagcagtgcctcggcaactgcttcaggacgtgcggccgtttgctccacatgtgcgtc

SEQ ID NO: 20575 - DNA, 445 bp, Oryza sativa
  Clone ID: uC-osflM202009f01b1
gtcagtggaggacatgcgggcgcgcatccgcggcgagtgcccgggcgccgacgtcctcgttctgccgctcgacctcagctcgctcgcctccgtccgcgccttcgccgaccgcttcctctccctcggcctcccgctccacctcctcatcaacaatgccggcaagttctcgcatgggcagctcgctctgtcggaggacggcgtcgagatgacgttcgccaccaactacctaggccatttcctgctgacgaagctgctgctggggaggatggcggagacggcggcggcgaccggcgtgcagggccgcatcgtcaacgtgtcgtccagcgtgcacagctggttcgccggcgactgggcggagtacctcgacctcgtcacccgccggaagatagcttacgacgcgacgcaagcgtacgcggtgtccaagctcgccaacgtgctgcacacc

SEQ ID NO: 20576 - DNA, 429 bp, Oryza sativa
  Clone ID: uC-osflM202009f02b1
gttcttctagttccagcttccaagtcaagggcaaggcgagcagccagccatcccgcgaaggcgactcgatccggcgacatggtttgcctcgcgtgcttgcttcccctcttcttgatccccgtcgtcaacgccgtccccttgctcttccacctaatccttgtaacgccccaatccctttcccctctgtctctctatctctctctgtcctctctgtgtgtctctgtctgtctctctctttttgttcaatcagatcttctcacgaatggttatctcatggtgtgctgctctactagcgagcgtgtaatctaaccatcttcggttagcctgatctggtcgcttgattgactagaacaaacaggaaggaactatctataactgcacattctggtttaaccacagttatcgaatactgcaggtatgtggcaacta

SEQ ID NO: 20577 - DNA, 406 bp, Oryza sativa
  Clone ID: uC-osflM202009f05b1
aatcattcccctctcactcccagatacctgctgctgccactagcccactaccatggatccttgcaagttccggccgtcgagctcgttcgacacgaagacgacgacgacgaacgcgggagctccggtgtggaacgacaacgaggcgctgacagtggggcccagggggccgatcctcctcgaggactaccacctgatcgagaaggtggcgcacttcgcccgggagcgcatcccggagcgcgtggtccacgcccgcggtgcctccgccaagggcttcttcgagtgcacccacgacgtcaccgacatcacctgcgccgacttcctccggtccccgggcgcccagacccccgtcatcgtccgcttctccaccgtcatccacgagcgcggcagcccggagacgatccgcgac

SEQ ID NO: 20578 - DNA, 403 bp, Oryza sativa
  Clone ID: uC-osflM202009f06b1
ctcttctctcctcctctaatctcaagtctctgtctcgtcgtcctcgcatctccactcgccatgggcaagattaagatcggaatcaacggtttcggaaggatcgggaggctcgtggccagggtggccctccagagcgaggatgtcgagctcgtcgccgtcaacgaccccttcatcaccaccgactacatgacctacatgttcaagtacgataccgtgcacggccaatggaagcacagcgacatcaagatcaaggactccaagactctgctcttgggcgagaagccggtcaccgttttcggcatcaggaaccctgacgagattccgtgggctgaggctggtgctgagtatgtcgtggagtccaccggtgtcttcactgacaaggagaaggctgctgctcacttga

SEQ ID NO: 20579 - DNA, 439 bp, Oryza sativa
  unsure (1)..(439): unsure at all n locations
  Clone ID: uC-osflM202009f07b1
gtaccctcctctctcctcctccgaccaccatggccatggccacgcaagcctccgccgccaagtgccacctcctcgccgcctgggcaccggcgaagccgcgctcatccaccctctccatgcccacctcgagggcacccacctccctcagagcggcggcggaggatcagcccgccgcggcggcgacggaggagaagaagccagcccccgcggggttcgtgccgccgcagctggaccccaacacgccgtccccgatcttcggcgggagcacggggggactcctccggaaggcgcagggnnaggagttctacgtcatcactgngacgtcgcccaagagcaggtgttcgagatgcccacgggcggcgccgccatcatgcgcgagggccccacctgctgaagctggcagggaggagcagtgcctggccctgggcaccaggctccg

SEQ ID NO: 20580 - DNA, 444 bp, Oryza sativa
  Clone ID: uC-osflM202009f08b1
tctgtgcgcgtgtctatggtagacaaaccaagagatacacacagaatcaaataataacaaaggtttcctagcctcaaaggagacatacatatagatcccctacaatacaatggagcctgtcaatgatttccaggaaggcatttcaacagagcatgcctttgaggcagagcctgtgccatcattgtcggaaacaataacgccacgatcaatggtggtgagcttcatccttagtgtaactctcagcatcgtcgccatgaaggtcaccttgagctctggcttcattccgtcgttcagcatcccagccggcctcctcggtttttgtgtatcccgtgcgtcgatccgcattcttgactacttcgcagtggcacaactaccattcacacgccatgagaacaccatcatccagacctgtgtagtggcatgcacctagatcacattcaccgg

SEQ ID NO: 20581 - DNA, 356 bp, Oryza sativa
  Clone ID: uC-osflM202009f09b1
tcgttgacgacgaagtggagcgcgtgcgtgatcgggtcgcacgatctgtccgtgcacccacacatctacgaccgcgagtacttgccggcggtgaagggcggtgagttcggggtcaaccttctcgtctgcggggtcatatgcccgaagaggtgggaggaggcgctgccgctcgacgcctgggtccctggtgactacatgatcccggggtgcacggccgttctcgaggcgtaccgcgacctcggcaccagtggcgaccaacggaagacccgcatgatgtggctcatcgacgaacttgtgaaccatttttttctccattcatccacgagtagggccactttgtcgtcgtcacctgccga

SEQ ID NO: 20582 - DNA, 398 bp, Oryza sativa
  Clone ID: uC-osflM202009f10b1
tcggtgctcctctggacagaccagttggtgagttcacattgagggaggcaacaagggaagggcgctgcccgccccccacgcggatctgactgcgacgctgccgtcctgcgagcctgatacatctacacaacgctaactgactaagatgggtgccagccgcatggatgacggcaatggagctggaggagcaacagaagctgctcggtcggaccaggcacgaagcggccgttcaccggtcaccgacggacaacccggcgacaacgctggggcagatcaagtaggccataccgactcactgtttgcaggactagctgatcaagaacttgtgctacctgactcataacctcccgatcgaacacgggactgtctacttctggctggacatgaaccccatgctg

SEQ ID NO: 20583 - DNA, 417 bp, Oryza sativa
  Clone ID: uC-osflM202009f11b1
tcgctagtacctgcttcgatccaagtgggtgccttgtctcgagttcagcaaggttgggttcgtctaccgtgagaaccacaggtctcccggatactacgatggcaggtattggaccatgtggaagctgcccatgttcggctgcaccgatgccacccaggtgctcaaggagctcgaggaggccaagaaggcctaccctgatgcctttgtccgtatcatcggcttcgacaacgtcaggcaggtgcagttgattagcttcatcgcctacaagcccccaggttgcgaggagtctggtggcaactaagctaagatcaagcatcgcgctggtggattgctgcctataataatagtatgcagctttgttttgggctatgttgatgatatatcaatatataatatgctatatatttttattttaca

SEQ ID NO: 20584 - DNA, 192 bp, Oryza sativa
  Clone ID: uC-osflM202009g01b1
gttgctgtgacacttgctgatcgcgcatccgcagagggggtattgaccctcgcgacaacacacacacagaggcggacagagatataccgatggtcgacgcagtcatgaagaggctcggggggttgtggaccccgacgaacgacatcatcaagaaggagaaccagtggctgctgaggggggcgccggtgatgg

SEQ ID NO: 20585 - DNA, 229 bp, Oryza sativa
  Clone ID: uC-osflM202009g02b1
gtcgttattacccgctgtgcttaagcacataaataggtcagagaggctaccgggacacgaccgatcacacattcagcgagaacatatcatgggccttcgaggacgacttgagacacgggtgccgatcgacttcgtctccgtggctggagcggattgtcagggctgcgccagaggcggcagggccggacacacagcaaggggccacgcgttcgcggccggcagcgtggct

SEQ ID NO: 20586 - DNA, 446 bp, Oryza sativa
  Clone ID: uC-osflM202009g03b1
ctgctttttcttcttctccctctcctccagcggcggccatggcgagattaggccttgccgtctgcgccgactccttccacctattgcttcttcttgcgtagacctcctcgctccggcgagctcccacggaggcggacacggccaaccatgccaaaagaactgcctatcacttccagcctgcaaagaactggcagaatgatccgaatgggcctatgtaccataacggtatgtaccatttgttctaccagtacaacccgcatagcgcgctctgggacatcggcaacctctcctggggccactccgtctccggcgacctcctcaactgggccgctctcgacaccgcgctcgaccccacctagactttagacgccaatggctgctggtcgggctccgacaccatcctccccggcgccctcccggccatcctctacaccggcatcgacgcc

SEQ ID NO: 20587 - DNA, 418 bp, Oryza sativa
  Clone ID: uC-osflM202009g04b1
ttatcatcccatcagcaacaatggcatcctcttgtctccttctggcctgtgtcgtggcagcggccatggtgtctgcagtgtcatgtgggccgcccaaggtgccgcctggccccaacatcactgcggcctacggcaaacagtggctggaagctaggggtacctggtacggcaagccaaagggtgccggccccgacgacaacggcggcgcttgtgggtacaaggacattgacaaggctcccttcctcggcatgaactcatgtggcaatgaccctatcttcaaggatggcaagggctgcggctcctgctttgaggtcaagtgttccaagccagaggcctgctccgacagcccgtcatcatccacatcaccgacatgaacactgagcctatcgccgtctaccacttcgacctctccggccat

SEQ ID NO: 20588 - DNA, 420 bp, Oryza sativa
  Clone ID: uC-osflM202009g05b1
gtcggttacattggggttggatgcgatgcagggaacattacagtgctgaattttgccaggatggggttcagtgggagcatctccccagctatcgggaagattacaacacttcagaagcttattcttgcagacaacaatattactggcacggtgccgaaggaggttgctgctttgcctgctctgacggaggttgatctgtcgaataacaatctttatgggaaactccctacctttgcagcgaagaatgtgctggtgaaagctaatggcaacccgaacattggcaaggatgctcctgcaccgtctggatcaggtggtcagtggcggcagcaatgcgccagatggtgggaatggcggtgatggaagcaatgggagtccctcttcgtcttctgctggaatcattgctggctcaatggttggtgc

SEQ ID NO: 20589 - DNA, 173 bp, Oryza sativa
  Clone ID: uC-osflM202009g08b1
tttgggatgtatttagatgcatttaactagcattttttttcttggcctgcctcatgccaatgtcatatagatacgatggaattcttgatcaagtaattgtctatttattttccaatccaaataatacatagcaatgctcatcttctaaaaaaaaactgaaaaaaaaaaccaag

SEQ ID NO: 20590 - DNA, 376 bp, Oryza sativa
  Clone ID: uC-osflM202009g09b1
ttcggtcggttgccttggctgctttggagagttgggaggagcagcgagagagtgggggttgatggcggcgatggcggcggccgtggcctcgtccccctccccctcccccgcctccacccgcctcctcctcggtcaccacccgcccccgtcgtgctcggcgccgtcgctgctccgcctgaccaggtcgtcgcggaggctacggctgcgcgccgtggcggcggccgaggaggccgacgtgctccccggccctggggccgagggggagatggcgacgggcgggaggctggaggagcaacccgaggggccgatcgggggcagccaggtcgacatcggcgggctcgccttccagggcgacatgggcggaggagggttcgcc

SEQ ID NO: 20591 - DNA, 417 bp, Oryza sativa
  Clone ID: uC-osflM202009g11b1
cctcacgcgtccgatccgaaccctcccccccccccccactcctctgcgcctccctcctccgcggcctccgccatggcctccctcgcctccgcctccgcatccacctccctggtcttctccacctcctcctccaagccgcgcctcggctcctccgtcggattctcctcgcccgcgcggttccggcgcacggcggcggcggcggcgtccaggggcacggggcggcgcgcggggctgctggtagtgcgcgcggcgagggggaagttcgagcggaccaagccgcacgtcaacatcggcaccatcggccacgtcgaccacgggaagactacgctgacggcggcgctcaccatggtgctcgcctccgtgggcgggagcgccccaagaagtacacgagatcgacgcggcgcccgaggagcgcgc

SEQ ID NO: 20592 - DNA, 421 bp, Oryza sativa
  unsure (1)..(421): unsure at all n locations
  Clone ID: uC-osflM202009g12b1
ttcgttagcagcagcagcagcagcagctgagcttgaagcagcagagcgaggtagacatggccgccgccaccatggccctctcgtccccggcgctggccggcaaggccgccgcgaaggtgttcggcgaggggcgcatcaccatgcgcaagtcggcggcgaagcccaagcccgccgcgtcggggagcccgtggtacggcgccgaccgcgtgctctacctcggcccgctctccggcgagccgacgagctacctgaccggcgagttccccggcgactacgggtgggacaccgcggggctctccgccgacccggagacgttcgccaagaaccgggagctggagngtgatccactccaggtgggcgatgctcggcgcgctgggctgcgtgttcccggagctcctcgcccgcacggcgtcaagttcgg

SEQ ID NO: 20593 - DNA, 403 bp, Oryza sativa
  Clone ID: uC-osflM202009h01b1
cttgctttcactctagctgacgggtggggcccacctgtgatctccctcctcgcgccgagccgtcgaccggccgtgcccggggatcctgatcctgctcatggtgatgctgctgctgggggtgtgggggatctttacgtacgaggacttcatggaggaggcggcggagcagctcaggtgggcgctggtgctagcacccgtggaggtcgtactcctgatccgatggatgtccttcgtagacaccttcgacggctactttagcttgtacccaaccgagcgcctttggaaccgctactaccagaaccccgacgagaggagctacccatggggcgtcgccatggacgtcctgctcatactagtgctggactacttgcactacaccttacaggacatgtggaagccctga

SEQ ID NO: 20594 - DNA, 379 bp, Oryza sativa
  Clone ID: uC-osflM202009h02b1
attgttattattttactttgcgtgccagcttatcaaatagtatgctctctagttcaaataatagcacatgtacaagcaatgctcatacagtcaaatagtggtcatggtatgtcaggtggtttgggccaaaactctggggtgccgacttcttcaggtgggggagttgaacctgttggtgccaaccgaccaaacaccacagcaagtggaatcaatgcatctaactttgtttctagaagtggctattcctgccaacaattgtttgttctgatgattcaagcttgtggtctgttgctggcacaactcccaccagaatttcacacactgctatatgcggaagcagcccggatcataaagattgttggtggctgctgatagttca

SEQ ID NO: 20595 - DNA, 430 bp, Oryza sativa
  Clone ID: uC-osflM202009h03b1
ctctctactcctcctggccgccgaccgccgacgccgccgcgagtcgtcttcgccggccgggcagcagcaggaagagggaggaagggggggcatggcgctacagtggctgatccaggggagcgtcctgccgcggatggcgggcagagccgccgtggcgccgctctcgacggcgtccggggagaccgaccgagccacgctcttcccaggcgacggcatcgggccggagatcgccgagtcggtcaagcaggtattcaatgctgcaggggcaccaatagaatgggaagaacactatgttgctacagaagtcgatcccagaacagatagttttctgacttgggaaagcttggagtcggtgcggataaacaaagctggcttgaaaggtcctatggctacgcctatgggaaaaggccaccgttcattgaatcttaca

SEQ ID NO: 20596 - DNA, 369 bp, Oryza sativa
  Clone ID: uC-osflM202009h04b1
gttcattcttacattgcaaaggcgactctcacagctcgcgctgcggcggctgttgtcgacgacggcggcgacctccgtcgtactggccgaaccgacggctttggttgctcattccggcatatgagcgacagccctacttagaccggcgggtggatccgcggtggcatcagcctgatggaggggcggtggatcggggcttatcttggcttgtacgctatgcacctacgagcagagacacgacaggtcactagaggaggatgctgagaagacatctggatggacactgaagatactctttataggaactgctgcgtctcgtgtggtacacaattttttcttagatcggggataacctgctgtagctgggca

SEQ ID NO: 20597 - DNA, 415 bp, Oryza sativa
  Clone ID: uC-osflM202009h05b1
cccgatcggatcaagtcgattcttcctgctggcgaattccccatctccgtcttcctctccaaaccctaatccccccgccatggccgccgccacggtctcctcgccggcgaccgccgccgccgccaactccgatgacgaagacaactacgaggagtacatccccgtcgccaagcgccgggccatggaggccgaccgtctacgtcgcctccgcctctccaagcccgcgcccccatccttctccgccgaggaggccgcctcggatctcccgtctacccctcccccaccgtcgaaccagccctcagccggcggtggcggcggcggcctcgaagcctccgcgaagcccaggctcctggtcaaggcgacgcacctcaagcgggccgcgccggatgtgacccacacggagcagctcatcatg

SEQ ID NO: 20598 - DNA, 412 bp, Oryza sativa
  Clone ID: uC-osflM202009h06b1
cttactcttggggcagaagcagcagcagcagctcagccgccgccgatggcgtccacgatcatggccccaacctcccgagtcctcgccgacaagacccccttcctcggccatgcccgcccctgcaatgcccccgtacgcgacatcgccggcgacgtcaccggacgcattaccatgagcaaggagctgtggcacgggccggatagggtgaagtacctggggccattctaggcgcagacgccgatgctcctgaggggcgagttcccggtcgactacgggtgggacactgcggggctgtccgaggacccggaggcgttcgcgaggaacagggcgctggaggtgatccacaggcggagggcgatgctcggggcgctgggctgcatcacgccggaggcgctggagaagcgagtgcgcg

SEQ ID NO: 20599 - DNA, 439 bp, Oryza sativa
  Clone ID: uC-osflM202009h08b1
tcgttttgcatcatcgtcgtcgtcttcttcgatcgatcggctgatccagtaattcctcgatcggtggacgtacgccacgctactatcatcatatcaatccccgatcgacaggttaacatcgatcgatcatccaagccagccatcgatccatcagaataagcagctagcttggagaccgatcgatcgatcgatcatatgtcgattcgattcgatccgatggagagcagaagcagcagcagcagcagaagcgtggtgatgatgtgctgcgtgctgatgttgatgattgcggcggcggcgcatgcgggcgagcaggaggcggaggagtgcgctagcccgatgagcatcgaggaggcgtgccggggggcatcggagacgcacacgcggtggcctacgaccctgcgtggcgtctctgacggcggaccccgcagcacagcagcga

SEQ ID NO: 20600 - DNA, 455 bp, Oryza sativa
  Clone ID: uC-osflM202009h09b1
acgcgttcgctctgccacctccgcctcgcgcctccgccgccgtcgtcgtcgccgtcgccattgccgtagcgtcgccgtcgccatcgctgtagcgtcgccgtctccgagcgcctccacctcctgtccattcccctcgcaaaaaatcgacaccaccggcaggcagaaccgatggctgccaagtgccatgagaggagatggggagcagatgagtttcctgtggggatggcgttcgattggttgcggtcgttcaacctccagtctcgccactccccatccatgcaaggcgatctttcgggtcgatgccaaaggagacgaagaagccattgacatcagtgcagcgggcgccctgacctggtccatgtcgtcatcttcctctgggcaaccactgacgtgaagcttcgctaactagcgatggatcttccggctctggctccgccaaccatagcgcaggccga

SEQ ID NO: 20601 - DNA, 421 bp, Oryza sativa
  Clone ID: uC-osflM202009h10b1
ttgctttttttgtttttgttcaataaaacaaacaagctaaaaattcatcaacattgctataattgatttaggcgagtacacaggctacaaacaaaagtataaagagttctccaaaagcggtaatgatacaaatagcccagccccgtatgacgattctagtaacacaatatttcaggtgaacaacaaaggtgtatcacaatttattggaacccaaattccacaatgaactgcgacacaaataatggtgaaacccaactattaagtatgctccagtgacatatttcgccaaatgcgatgcagcagcttaggcctggttcttcttgggcacttggaggcgctcccggaaatcatcttccatgagcaccaagccattacgcataacgatcttgggctcccaccccaaaacttcctttgcctttgt

SEQ ID NO: 20602 - DNA, 400 bp, Oryza sativa
  Clone ID: uC-osflM202009h11b1
tcgtttctgtggaattgggagtttgaagaagaatttcaaaggtatcttcctacatatcttgatgtgctgcatgaagttgatacaatggattgtcaagagtgttgttgtttggatagcgccaagatttttgagaatctgagcctggaatttcgatccaggcatggtgttaggagccatacagatcatgttgtttggatgatatcaaatttgttacaacggaagatgcctggagcatattcagagcaacgtgctgatcgtatttccaaatggacttgtgaacttattaaatcgaagccttacatcaagctctctaatggttggaacaatgctatgaatcgattgaaggaaaactttgtgataaatgtagatactaaaccggatgcaatgatgcagttatatc

SEQ ID NO: 20603 - DNA, 420 bp, Oryza sativa
  Clone ID: uC-osflM202009h12b1
ctcgttttggcggaggcggcggcgcaaccgacaaggaaaagcaaagcgagagcaggaaaacctcgccggcggcgacaccaccaccaccagcaggcagggatggcccggtacgaccgcgcgatcaccgtcttctcccccgacggtcacctcttccaggtggagtacgccctcgaggccgtccgcaagggcaacgccgccgtcggcgtccgcggcaccgacaccgtcgtcctcggcgtcgagaagaaatccacccccaagctccaggactccaggtccatgcgcaagatcgccagcctcgacacccacatcgcgcttgcctgcgcggggctcaaggcggacgcccgcgtgctcatcaaccgggcgcgcgtcgagtgccagagccaccgcctcaccgtcgaggaccccgtcaccgtcgagtac

SEQ ID NO: 20604 - DNA, 388 bp, Oryza sativa
  Clone ID: uC-osflM202011a02b1
gcgttctttgtctggtgtatctgccctgcctcgtgcgcggccagatccggcagggatgggggcggcagcactgggggtggtggcagatggtggcgtcggacgtcgacgtggtgatggcgcaggcgaactccgagggcgacacgctgtacgacactgagacggagcctcagggaccccccatgagtgctgcagagctggaaccccacgatcgggaaccactgcaccgtggtccacgtaacctgcgaccgcgacaaccgcgtcacgcacctggatcttgaaaatttgaacttatctggacatctggtgcctgagcttgggaagagggatcgtctgcaatatatggagctatacatgaataatattcaaggaacgatcccatcggaacttg

SEQ ID NO: 20605 - DNA, 351 bp, Oryza sativa
  unsure (1)..(351): unsure at all n locations
  Clone ID: uC-osflM202011a04b1
atgtattcctagccgctttccccatctcctcctcccagaactagaatttcgccaccccgaatcccttccatggtaggacttccgtttgattccgggtcgaatccgtcgcctccgatgccggaacggngaggttttccctccctttatatggacaacacgcgtttgttttttctgttgcgcaggtttcagatcttggatggacttgctcatccttcggcggccatggatctatcggcggaagctgctgctgctgctcgtcctcgcgttcggcgagtcagatctggagccgatctgacctcttagaggtccggttggggcatgctccgtacgagctggcgtggatgaaagcgc

SEQ ID NO: 20606 - DNA, 404 bp, Oryza sativa
  Clone ID: uC-osflM202011a06b1
ctttgttcgtacgcctctccaactcgaatcatcccatctgtcggtgatttccgtccaatctttgatcggattccgggggccctcatcatcgtcgagctcttcggtcgttcgatcgggcgcgcgaaattcttccggcgctgattttgacggctccggccgccggcggcggttggttggttggttcttggcccggattttcggggagatttgagggggcaggtttctcctcgccccgcggtggctgtgtgggttcttggattcgttgtttggtgactgtttaagcggggatggagcggcggaaatggctgcagccgcggttctgtgttgcctgctggtgctttgctccgggagagaacttaagactaaacacaccccaatatacaactcgaccttagccaggacgc

SEQ ID NO: 20607 - DNA, 490 bp, Oryza sativa
  Clone ID: uC-osflM202011a07b1
tttagacagaaataaagcattgggtcgaactcttctttggtgttaaggtagtagctgtgaatagccatcgactacccggaaagggtagaagaatgggccctattctaggacatacaatgcattacagacgtatgatcattacccttcaaccgggttattctattccacttctagatagagaaaaaaactaaaggagaatacttaataatatggcgaaacatttatacaaaacacctatcccgagcacacgcaagggaaccatagataggcaagtgaaatccaatccacgaaataatttgatccatggacggcaccgttgtggtaaagggtcgtaattccagaggaatcattaccgcaaggcatagagggggaaggtcataagcgcctataccgtaaaatcgattttcgacggaatcaaaaagacatatctggtagaatcgtaaccatagaatacgaccctaatcgaaaggcgtacatttgtctcatacac

SEQ ID NO: 20608 - DNA, 471 bp, Oryza sativa
  unsure (1)..(471): unsure at all n locations
  Clone ID: uC-osflM202011a08b1
tcgcttagagaagcatctgcgcgccgccggggcacgcccgccgcgccacgccggagtcgaacacgacgcggccgggatccatgctctcctctccgacaacgaccgcctncgcgcgcaggtaatctcattaaccgagaagctgcaagacaaggagacgtcgccgtcgtcggcgaccatcaccaccgcggcgcaggaggtcgaccagccggacgaacacacggaggccgcgtcaaccaccggcttcgccaccgtcgacggcgcattggcggcgccaccgcccggccaccagcagccgccgcataaagatgatcttgtgagcagcggcggcaccaacgacgacngcgatggcggcggcgcggcccggggtggtcttcgacgtcaccgagggcgccaacgaccgcctcagctgcgagtcggcgtacttcgccgacgccgcggaggcgtacgagcgcgactgcgccgggcactacg

SEQ ID NO: 20609 - DNA, 492 bp, Oryza sativa
  Clone ID: uC-osflM202011a09b1
tgctttttcagtctcttgggatcctatctatgagcacaagacgtttaaatattctaagtggctatgcagaccgcattcgtgagttactggatgtttcacgtgaactgtctggggttcgtgataaatcgttaaatcataattcctctgctggaaattatatcagtgaagcaaaccatatcgaattctcgggtgttaaggtggtgacgcctgctagcaatgtcttggttgatgatttaactctccgagtagaaaggggttctaatcttttgatcactggtccgaatggtagcggaaaaagttctctttttcgggtccttggaggcttatggccattagtttctggtcatattgtcaaaccgggtgttggctctgatcttaataaggaaattttctatgtcccgcaaagaccatacacagctgttggtacacttcgtgaacagctaatttattctcttacagcagatcaggagattgaaccccttagctacgatg

SEQ ID NO: 20610 - DNA, 356 bp, Oryza sativa
  Clone ID: uC-osflM202011a11b1
ttggtttgatcgaaccacccggttcttggattaccgggacaaacaacaatcatcatcacctcgggattaatcatttcaaccctcccctttttgttccttctcgtggctctctctgcgtgggtgttctgcagcgccaatcctggatcatcatcgtttgcttctgcacacgtggctcgaggccgcacaaagctgcgtcctttacagctggccacggtggagttgatcggttgatggcagcgagcggcggtgggtcgctgctagagagacgaagctcggtgcgacggtctcagagtatggtgagcgatgagggcccgggcacgccggccgatgaggatctccgcggcggcggcacgctc

SEQ ID NO: 20611 - DNA, 392 bp, Oryza sativa
  Clone ID: uC-osflM202011a12b1
ttggtttaccggaatccggaattgcaggagcagcggatgcctttataaatcaagttcttgtccttggcttcaaatactccatgtgtttcttggctaatcctaatccctagctgcttgtgtgtagcgtgtgcaatctctgacccttacgggtcggtgtatctcaacagagaaatctctagctttttgagcggcgaatcgaatccatggccgagcacctcgcttccatctttggcacggagactgaccgggtgctcggacccttttactgcagactggttacgcgccgacatagcgaccgatactgctgcctgcccaacatgccggttgcctggtcgacctttgttctctgcgacatcttcctacgtaccgacatggtcacccctggaattgat

SEQ ID NO: 20612 - DNA, 278 bp, Oryza sativa
  Clone ID: uC-osflM202011b01b1
atggccatggcgtcgaaggaggaggtggccgcggagactgtggagggcggagcggtcttcctcatccccctgctctgggacccctcgtccgatgccactcgtgtactccaatgacactcggctacgtgggcgctacaaccgtcgaggtgatctatataaactaggggatcgcatgatggaggctgctacatagagcagcagtcacgcgggatacagggacagagaaccacatcggccatcggcaaccatgtcgcaccgtcgacaagctccaatcatcc

SEQ ID NO: 20613 - DNA, 317 bp, Oryza sativa
  Clone ID: uC-osflM202011b02b1
gttattttctctggaacccttctagcttgcaccatgaaagacaagcctcatttgatcaaagcaaaggatgggcacgtcaatctataatctagactggcacaaggagaagaggctagggatcctgtgcttgagatgatagaacatataagacaactaactatggttgtcccacaggcaggaacggactatctaagtcgggtcactggccaaggcaaaaacattctttaggtgaagaggagcttgtgtatcttccatatgaaaggtaagaaatgatactggatcctgaaagcaagactgagaatgttgctatcgaagga

SEQ ID NO: 20614 - DNA, 504 bp, Oryza sativa
  Clone ID: uC-osflM202011b04b1
gttcctcccagcgcccacgcgatcccgacgaatcgaatcgagtccgagacgccgatctcggattcgagaccgttgatttcaaccaacacaagccctcctccggatcgatccgctcctcttcagccatggcaggaatggcacccgaaggctcccagtttgatgctaagcactatgacagcaagatgcaggaactactgcaccaaggtgacaatgaggaattcttcacttcatatgatgaagtttttgagagttttgatgacatgggcctccaagagaaccttctcagaggcatctatgcttatggttttgagaagccatcagctattcagcaaagggggattgttcccttctgcaaagggcttgatgtgattcagcaggctcaatctggaacaggaaaaactgctaccttctgttctgggatcctgcagcaacttgactatggattggtgggagtgccaatccctgggccttgcaccacacgtgagcttgcccagcaaattgaaa

SEQ ID NO: 20615 - DNA, 495 bp, Oryza sativa
  Clone ID: uC-osflM202011b05b1
tttgttttcagcctcttcagtccatgatggcgatgttgcatgcacatacccattgttgagcagcatatttcttgggacgttctacaccgtgttaactctttatgtcatatttgttggagggcagatattatctttagtgatcaacaaggggcttcgacggaggatatatatgctaattttagccaccggaatactgcttcctcgagctatgtttcttggattctcggttcttccatggccaggtgaaatagtccatgaatctctcgtgtttgtctccttccttgtcctgatgattgctgctatgcttggtattgatattctggtgtatttcccagttgcggaaacctttgaagtaagaaaccaagagcatattgagctgcaaacaagtcattccattgccctgtgaatctttgatggctgagccttatgatttgacatatgtttcagcttttcattctaaggacaagacattgggagatgcttcagaattattat

SEQ ID NO: 20616 - DNA, 486 bp, Oryza sativa
  Clone ID: uC-osflM202011b06b1
ttgttgtatcggagggctaaaactgtatcatgggctccaggcactggacacgctctcgagtcagattcaatgtaaggggatcctgccatcgcaggggacccacggacctgccggtgcagaacacagccggctgggaagctcgaggggcaaccagcaggagttcatcgaaacacttggagttgaaaatcagtcctaggaatgttaacagagtgcttggcattccatttgagggcatggaggtgtgtccaatgccgcacaacacaaaaaaggagaaagactcttttgtgcaatattatatcagtgctcctggcttcgagtccaacgcactgaagggtgctgaggaagtaattaagaggatatttcccagcgccatgaacaattgggctcaggaccattttaggaccacatttgttgtgtggattgtcggcatgtttcttgcaccgaagatgtcgcacaaatctggatcgaacgacttctggggggcac

SEQ ID NO: 20617 - DNA, 473 bp, Oryza sativa
  Clone ID: uC-osflM202011b07b1
attgccatggcgtcgaaggaggaggtggccgtggagacggtggagggcggagcggcggcggcgaaggcgccgtactgggacccgccgccggcgccgctgctggacacgagcgagctgggtaagtggtcgctgtaccgtgccctcatcgcggagttcatggcgacgctcatcttcctctacgtgagcatcgccaccgtgatcgggtacaagaaccagagggccaccgtcgacgcgtgcaccggcgtcggctacctcggcgtggcgtggtcgttcggtgccaccatattcgtcctcgtctactgcaccggcggcgtctccggcgggcacatcaaccgggcggtgacgctgggcctcttcttcgggcggaagctgtcgctcgtccgcaccgtgctgtaccgtcggggcgcagtgcctcggcgccatcgccggcgccggcatcgtaagggggatcatgaagcgcccctacgacgcgc

SEQ ID NO: 20618 - DNA, 383 bp, Oryza sativa
  Clone ID: uC-osflM202011b08b1
tctatttcttccactactgcccagcaacaagctagagagatttgccaaaagaaaaaatggcgatggctaggcgcggcaatggcggctaccagtacggcgcctacagctactgctacggctacagcaagccgtaggtgaactaccacagccagagctccgagagcgtcaccaccgtcgtgacgaaaatggacgagatgagcgtccacgagaacgccgtgcagaagatgtcgtcttcgttccgggaggagaaggtgtacgagcagcagggcggaggcgccggccacgtgcaagtgtgccacaatggtggcgctgctgcaggcgccgagcagaagcacacctactcgtggaaggaagaggaggtgttctaggagagcaaccatggc

SEQ ID NO: 20619 - DNA, 492 bp, Oryza sativa
  Clone ID: uC-osflM202011b09b1
ttgcttgcttcctcctcctcctcttcgccgccgccgccgcgcgccgccgatcgggccagcggcaggggggccacccgcgcgcggagaaggaggctccggctgtcgacgtctgctgcggcgggcgcgcggcttcaccgctgcggtttctctcttcccccgcacacccccccgcgacgtaagtgagagtcaatatgtcactggatattactcaagttctcttgagtgcacaatctcctgatggcgcgactaggaagcttgctgaagaaagccttaagcagttccaggagcaaaacctcccaggtttcttgttctccctctcaaatgagttggccaatgaggagaaacctgaggaaagccggaggttggctggcttgattctcaagaatgcactggatgccaaggagcagcacaggaagaatgagcttttccagagatggctggcactagatgttggcgttaaggcacagattaaaggatttcttttgcaaactc

SEQ ID NO: 20620 - DNA, 344 bp, Oryza sativa
  Clone ID: uC-osflM202011b10b1
tgtttctggtcaatatgtacgggaagctcggggcctttggcagcggacgccggctgttgatccgaaagcctgaacggaacatggcgcactttcgtcactgctcgatccaggccgcacgctttagagcggtgattttgatggtaccgcgggtctgttcaggaggctgtggtggctggggcaccaggagaaccaaactacggttaccaccatgctgaagctagctattgacatggttgcaggaaggcttggcgagggtgggcactcatgtgcgtcgaaacagcgccatgatcaccacgtctttgtagggttaggggtggttgatgcctattccttatagcggggtt

SEQ ID NO: 20621 - DNA, 493 bp, Oryza sativa
  Clone ID: uC-osflM202011b11b1
ttgattgtttcccgtcctgaatttgacaagaataagctaaaattacgggtaaagtttgctttggagtgtaaatttgctattctgccatagatttatagttacagctgggagctatttctagacagtcaactctcctgaaaatcgattcatattccaaaggcaaggcatcaggtatacctaacctctctttctatctaaattgatttgctttcttcccaggatataatcaaatacaaacaattacaaataacaaaatacggagtaacacaaaggcagttactaaagactccctatatgtgttgtcactcgcattttagcatagcgatctcccacggacaaaggtgtgctgaaacacggtctacatctatcatatagagctgcagcatatgacctcataaaattttcagccctaccacccaccaacaacagaagatattcactaagtcgcttcagtgctacacgttctagcaatgcctacgaacatctatagaca

SEQ ID NO: 20622 - DNA, 456 bp, Oryza sativa
  Clone ID: uC-osflM202011b12b1
ttcatatataggcatggattctgtggaaacttatatttttttatgcctatggcttaaaacaatcagcgaaatcctctttaatctcatgtttgagcaatgctaaaggcaatgacaagaaatactaaaatattacttgtactgcgtaaataaagcaaagcaatagactttatagaatatctaaccttaaacacttgagtggactttatcaaggatatatatatataccctcaaactaatgagtgtcaaactgtaggacacatcttggggcaacaattagtggactactcttccggtatttaacctgcccaagtgtgcaggtcgacaatgctgctaagaaaggtcaaaaagcatgagctcttgataggagacaggccagtccatggaaatgcactgtcatcttcgccataagcataattgagcttgctctttatacctttgctaatggaacacaagcct

SEQ ID NO: 20623 - DNA, 353 bp, Oryza sativa
  unsure (1)..(353): unsure at all n locations
  Clone ID: uC-osflM202011c01b1
cgncgtacatttaaggccgaccaccaggaccacggggggggttgttgggtcaaggcgaagacatcctccatcataaaggaggacttcttgacaggggacatcattgaggtgatgagcagcctggaggccgagaactacgcgtgttcctcctcctacaacgccatcttcgtcaagaagctgctcacctccgcgatggaccggaagagccgcgagaaggaaatggcatccgggctgctgtcctcgctcggaatgccgccggaggaacgtcgtgtcggggttccaccttctgatcgagtccgccgaggaacgcccgctggacaacccccgccttcgccaggacctgaccatgttct

SEQ ID NO: 20624 - DNA, 467 bp, Oryza sativa
  Clone ID: uC-osflM202011c02b1
acctgtgcctgctcggaagccgtcgtctctcccgtccgcccgatccgggtccggagccgccgaaccggcggaggcggggagccggcggtcgtctcctgcgtcctggatgggtagctctcataggcgcccgacgacgtgagatccgtttagaccgtctacacgtagggtggttacagatgaatcagatctgaagttaacggattgttatgggctggattgcatcaaacagatgggggtgacgaattgtatgcaactgaatgtctaatagtgaaccacggttcttcacatgaaacaaacaagttggatgcagtaatgtgagcttcaacaatgcacagtggtcataacaatgctaatgcatgcgtagatgattaccaacatacagagatgatggcaggaattcaacctatggagggagttgggttttgctgtacgcaaccctttgagctgcaatcacaagggatagtacc

SEQ ID NO: 20625 - DNA, 498 bp, Oryza sativa
  Clone ID: uC-osflM202011c03b1
gataattatctaaagaaaagacaatccgataagggtgatggcagtgatgctgaaactagcatgtctgaggaagatgtcctgttgcaggatgagatatgtaaatcacggttaacaagtataaagcgggaggaagaacagtacttgagagaaagagatcggtatgaattggaaaagggtaggcttatacgtgaaatgaagcgtctcagagacgaagatggatcacgctttaataactttcagattcttcacaatcgctacgctctgttaaatcttcttggaaagggagggtttagtgaggtttataaggcatttgatttggtggagtacaagtatgtggcatgtaagcttcatggtttgaatgctcagtggagtgaggagaaaaagcaaagctacatacgccacgccattcgtgaatataacatccataagactttggtgcatccaaacattgtcaggctatgggacatatttgagattgatcacaacacattctgcact

SEQ ID NO: 20626 - DNA, 427 bp, Oryza sativa
  Clone ID: uC-osflM202011c04b1
gtcgttcccgggctcactgacgcacagcgatgtcgtggggacgtttgggtacctggcgccggagtacttcatgtacgggaaggtgaccgacaaggtggacgtgtacgcgttcggcgtcgtcctgctcgagcttctcacggggaggaagcccatcagcgacgggtcgcctaagggccaagagagcctagtcatgtgggcgagtccgatacttgacagcggcgacatctcagatctgctggacgccgacctggacgtgaagcacgacgacgccgaggtgaagcggatggccttggccgcgtcgctttgcctcaggaggtcggctcgcctcaggccgaagatatcgcaagtactgagcgtgctccgaggagagagcgaggtgagccttgacgacctgaaagccgagccggcggactgcgtggacgacgag

SEQ ID NO: 20627 - DNA, 456 bp, Oryza sativa
  Clone ID: uC-osflM202011c08b1
ttgttcgcttcgcccgcataagtctagccacaaacccgccgccgccgccgccgccgccgccgctagcttccgcggagcggggcgagatgttcatcgagagcttccgcgtggagagcccgcacgtgcggtacggcgcggcggagatcgagtcggactaccagtacgacacgacggagctggtgcacgagagccacgacggcgcctcccgctggatcgtccgccccaagtccgtccgctacaacttccggaccaccaccaccgtccccaagctcggggtgatgctcgtggggtggggcggcaacaacggctcaacgctgacggctggggtcatcgccaacagggagggaatctcatgggcgaccaaggacaaggtgcagcaagccaactactatggctcactcaccaaggcgtccaccatcagggtcgggagctacaacgggagggagatctacgcgc

SEQ ID NO: 20628 - DNA, 481 bp, Oryza sativa
  Clone ID: uC-osflM202011c11b1
tttgttcgtgggcgcgatcctcgtcgtcgcggtcgtcgtcggcgtggtcgccaccgtcacccgctccggcaacaaggccggggacaacttcaccgtcccgggggaggccaacctcgccacctccggcaagtccgtcgagtccctgtgcgcgcccacgctgtacaaggagtcgtgcgagaagacgctcaccacggccaccagtggcaccgagaaccccaaggaggtgttctctaccgtcgccaagtcggcgctcgagtcgatcaagtcggcggtggagaagtcgaaggcgatcggcgaagccaagacgagcgacagcatgacggagagcgcgcgcgaggactgcaaggccctcctggaggactccgtggacgacctcaggggcatggtcgagatggccggcggcgacgtcaaggtgctgttcagccgctccgacgacctcgagcactggcttcaccgccgttatgacatttatggacacctg

SEQ ID NO: 20629 - DNA, 467 bp, Oryza sativa
  Clone ID: uC-osflM202011c12b1
ttcgtttctggtgctcgcctacgtcctcctcgtcgtgcactcctacttcatattcctcaccagggagtggtacaagaaaacgacatggatgtacctgatagtcccagtgctcttctatgcatgcgagagaacgatcagaaaagttcgagagaacaactaccgcgtgagcatcgtcaaggcagcgatttacccaggaaatgtgctctctcttcacatgaagaagccgccgggtttcaagtacaagagcgggatgtacctgtttgtgaagtgccctgatgtctctcctttcgaatggcatcccttctccatcacttctgcacctggagatgactacctgagtgtgcatatccgtacactaggtgactggacgactgaactcagaaacctgtttgggaaggcttgcgaggcacaggttacttctaaagaggctaccctttcaagacttgaactacaggtgtggcggacgc

SEQ ID NO: 20630 - DNA, 498 bp, Oryza sativa
  Clone ID: uC-osflM202011d01b1
gttcctcaccgtgatggcctcctcggccacctccgtggctccattccaagggctcaagtccaccgccggcctccccgtcagccgccgctccaccaactcgggcttcggcaacgtcagcaatggcggaaggatcaagtgcatgcaggtgtggccaattgagggcatcaagaagttcgagaccctatcgtacctgccaccactcaccgtggaggatcttttgaagcagatcgagtacctgcttcgatccaagtgggtgccttgtctcgagttcagcaaggttgggttcgtctaccgtgagaaccacaggtctcccggatactacgatggcaggtattggaccatgtggaagctgcccatgttcggctgcaccgatgccacccaggtgctcaaggagctcgaggaggccaagaaggcctaccctgatgcctttgtccgtatcatcggcttcgacaacgtcaggcaggtgcagttgattagcttcatcgcctacaagccccc

SEQ ID NO: 20631 - DNA, 420 bp, Oryza sativa
  Clone ID: uC-osflM202011d02b1
tcttttatcgctatgtatgtcatgggtcacattttactggatcaatgggaaccgccacaaggtggcactcactccagaatgatggcctgggcacgcccgtgtacctcctccgcgatgtgttgcccggcagggagcaccatgcgcacgaccggcagacaggcatagccgacctcgtgccggagcagctggtcgtgcaccacctgccgtggcctgtaactcacgactctgtgacgaacgagatcgagctacctgaccggacaggcccctggcgactacggcaggcactgcggggggacgagcagctagccggagacgctcgccataaacacgtagccgtacaggatgaactccccgtgtgccatgctgtgctcgcaagctagtgctgttacggagtgcttgacgacgaagggaggttacttc

SEQ ID NO: 20632 - DNA, 509 bp, Oryza sativa
  unsure (1)..(509): unsure at all n locations
  Clone ID: uC-osflM202011d03b1
cttaatttccgacgatgagatcgatgaagaggccgggaattcacctccagatttgaggggatcgatggtggaatctccttctccctttcccaccaccactaccacttctgctgctgctcctcctcctcctcgtcggcggcaaccaccacctcccgccgctagcctgccttcccccggctaacctcgccctcactcactccactactacttttcctcttccgccccgccccctacatcctagatccatccatgctcatgctcatggacccccccgcccgcagccgcaggtgcactctcctcacgcgggccctcctcctcgccgtcgccgccctcgccctccgcctcatctacgccgccttcctcgccggcatggcgctctacccgcccctccccgccgccgccgtccttggctccaagacctacctncactccgccgtcgccacccccgacgcctggcgcacccgcgactggcggaaggccgtcgactaccacgccacccttctcgcccc

SEQ ID NO: 20633 - DNA, 483 bp, Oryza sativa
  Clone ID: uC-osflM202011d05b1
tttatcagagtttacaaaggaaaggactatgtggagactgaatttatagttggaccaataccagtggatgatggaaatggaaaagaactatccactgaagtcgttacaaacatggcaacaaacaaaacattttacactgattccagtggacgtgacttcatcaaaaggatacgggattaccggtcagagtggaagatcgaagtgcaccagcctatcgctggaaactattatcctgttaatcttggcatttatgtggaagatggaagcagagagttatctatacttgtagacaggtctgttggaggtgccagcataaaggatggacagatagagctaatgctacacaggagactacttcatgatgatggtcgcggtgttgcagaggcattaaatgaaacaacctgttttgataatcaatgggaaggactagttattcaaggaagtattatctcaaattgatccacaggtgaagagctaggtggc

SEQ ID NO: 20634 - DNA, 431 bp, Oryza sativa
  unsure (1)..(431): unsure at all n locations
  Clone ID: uC-osflM202011d06b1
attcttcttccttctcctctgtctcctcctctctagagagagaaacagaaaaaaggaggagactagggctctgctcctccccctgcgccggttggtcggagctctgcctcctcctgattctgctgtcccctcccctccccgatccacctcctcctccatctccttctcctcccgccgatccgatgcgtcatcactagcctcccctcccgcgcttccaccaaccactgcccctccaccctcacctcgtggtttggtaatttggttggccgcttgtccccttccatccaccgatccaccttcccgttgctgcggngatgagccgtcgtcgagacctccgccgaccacgccgcgcctccgccgcccgagggggacgctcgggagagggagatgcgggatctggaggacctgctctccaagctcaaccccatggc

SEQ ID NO: 20635 - DNA, 471 bp, Oryza sativa
  Clone ID: uC-osflM202011d10b1
tttttcacgccggactctccccttctctctgtctcgctccttcgttcgctcgctttatcccccccgaataaaggcgagaagccgcagcggcggacgaagaagagggcagatagaaatggcggcggagacgttcctcttcacctccgagtccgtgaacgagggtcacccggacaagctgtgcgaccaggtgtcggacgcggtgctcgacgcgtgcctcgcccaggaccccgacagcaaggtggcgtgcgagacgtgcaccaagaccaacatggtgatggtgttcggcgagatcaccaccaaggccaccgtcgactacgagaagatcgtccgcgacacctgccgcggcatcggcttcgtgtccgacgacgtcggcctcgacgcccaccgctgcaaggtgctcagcaacatcgagcagcagtcgcccgacatcgcgcaggggtgcacggtcacttcaccaagcgccccgaggag

SEQ ID NO: 20636 - DNA, 480 bp, Oryza sativa
  Clone ID: uC-osflM202011d11b1
atgatcaaggagagcgggaaggcgcggttcatcgggataaccgggctgccattgagcatctacacttatgtgctcgaccaggtgccgccaggttctgtggatgtgattctgtcttactgccactatgggatcaatgataccacgcttgtggatttgcttccctacatgaagagcaaaggtgttggcgtgatcagtgcttcacctcttgcaatggggcttcttacagataacgggccacccgaatggcaccctgcaccgaaagaactaaagttggcatgcagggcagcagcagatcactgtaagaagaaggggaaaaacattacaaagctagctatgcagtacagcttgatgaacaatgagatttccacggttcttgttggaatgaactcttcagaacaggtagaggagaatgtggctgctgcaattgaattgtctacttccggtattgataaagaacttctgacgaagttgaagcaattc

SEQ ID NO: 20637 - DNA, 410 bp, Oryza sativa
  Clone ID: uC-osflM202011d12b1
ttgttatgagcgccttggtgcagacattattcaaaaggcgttggtagctcccgcttcactgattgcccacaatgctggagtggaaggggaagtggtagttgagaagatcaaggacggggagtgggaagtcgggtacaatgcgatgaacgacaagtatgagaacttgattgaggcgggtgttattgacccagctaaggtgacgagatgcgcgctccagaatgctgcctcggtggctggaatggtccttaccacacaggccattgttgtcgagaagccgaagcccaaggctcctgttgctgagccggcagagggaacccttaccgtctaaacagtggtgaatttcttcagggtggcttttgttagatggttcataccaactgaaatggtagaatttttgtctgggagttttt

SEQ ID NO: 20638 - DNA, 501 bp, Oryza sativa
  Clone ID: uC-osflM202011e01b1
attttatctcgatcgatcgacaaagctatagctagcccagtcatggccgcctctcccgcaatggcgacactcctcctcctcctcctccatgctgtcctcgtcgcggcagccgatgccggcgccgccgataaggaggcctatgcggcaacaggatcaaccgctggcaaggagaccgctgcggcggccgacaaggagacctctgcagcggccggatcaaccgcgggcgccgtccctgaccccaacatcttcaacaaggaggccgtgtgccccaagacgacggacgagaaggcgtgccagcaactggtgaaggtcctgccgcccgagtttgcagagacgaaagacgccaagggcctcgccaagctgtgcatctccagcgtcgggttctcggcggagcagttcaccaaggacgccatcgccgccgtgcaggagtgcaagaagcccgacaagtgcctcgacagctgcgtccaggctagcaccgccgtgaccgacgccctgaagccc

SEQ ID NO: 20639 - DNA, 118 bp, Oryza sativa
  Clone ID: uC-osflM202011e04b1
gcctccgcctcgagcccaaacccacccaccaacccaacccaatcccatcgagaggaggggacgcggcggcggcggcggatcggcggcgggggaaggaaggggatgggcggcggaggcg

SEQ ID NO: 20640 - DNA, 452 bp, Oryza sativa
  Clone ID: uC-osflM202011e05b1
cttattctcgccatttggattggatcactcctctcccccctccaccgcctctcggatcccgccgccgcccgccgtcgccgcctccgccgccgcagactctatctctctgtgtatccatcccttctggacctcgcgcaaatcccatccttttcgccccttctttccctgcgaaagatcgggtttttttttctgcccgtctctttctcgcgtttggttccaatcttttgctgcctggagatttcaccgccttgttcagagtcgagatctcccgtcgctgctcgatctgatctcgcctcgtttctcgaggagagaaaaaaaacaaaacaaacaaactgcggtttttgtgttcgggagtcggtggagaagagatctctctccgagattgatattcttgcgtccatttgcttcgcctccgatagctttcggaggaatctaatctcgaatagtgaagg

SEQ ID NO: 20641 - DNA, 483 bp, Oryza sativa
  Clone ID: uC-osflM202011e06b1
atatattaattttctgagaagtgtgtggttagtactaacataataattgtaatggagacaatgcgtaaattcttcccagcaatcgccgtcctcctacttcttgttgttgccactgaggcgttggcgccagcgcaatcatcagtcaggccgtgcgagacgaagagcctccgattcgaggggttttgcatggtggaagataattgcgcaaacgtgtgtcggacggaggggttcgtcgacggcaggtgcagcaccttcgtgcgaaactgtatctgcatcaagccatgctaaggttgtccatcattatctcatgtggtcacttggcaactaattaattgaccatgcaaacaaggggtctgcatggagctattaatttctttctttttttactttctttcttttcttttttttttgcaagcagatgtacgattctgcatgcatggcaaattcagctagaataaaacaccagctcgcttaatgcatggc

SEQ ID NO: 20642 - DNA, 451 bp, Oryza sativa
  unsure (1)..(451): unsure at all n locations
  Clone ID: uC-osflM202011e07b1
cttccatttctttccttctccgcagatattccccaagaatctcctcctcctcctcggattcccctctctctctctcctacagagtagtagcttgtgcttgctttgctccgattctctctcttccctgtctctcctagctgcaatataccactagcagcagggcgcccagttgcgcgatcgatcgatcgagctccgtggtgccaagaacgccctgtacggcgcgccggtatgtgcgtggaggagtcggagggcgcggagaggctggattttggggagcccgccgccgccgccgccgacgccgggaagagcaagagcaagagccccgacgaactcccctcgcctcgggttcgtttgatttcccttcatggcgtgaaggaaggaaggacgatgatgatgagattgggaaggaaggaaggaaggaaggaaggaaagcanagcatgcccttctggg

SEQ ID NO: 20643 - DNA, 403 bp, Oryza sativa
  Clone ID: uC-osflM202011e08b1
ttgtttatctatgatgagttcgtggagaaggccaaggctcgtgctctcaagcgtgtggttggtgatccatctatgaatggtggggaacagggccctcagattgatgacgagcaattcaacaagatcttgcgctacatcaagtatggtgttgacagtggagccaaccttgtgactggtggcgacagattaggtgacaaaggttactacatccagccaacaattttctcggatgtacaggataacatgaggattgctcaagaagagatatttggccctgtgcagtccattctgaagttcaatgatctgaacgaggtcatcaagagggcaaatgcaagccagtacgggctggctgctggggtctttaccaacaacctgaacacggtcaacaccctgacccgagcgc

SEQ ID NO: 20644 - DNA, 396 bp, Oryza sativa
  Clone ID: uC-osflM202011e09b1
tttcttctcccgatcgttaccttttcctcctcggttggtttccgtggtgcgtttagggtttagtgggttgtgatggcggggccggatgtcgagtaccgctgcttcgtcggcggcctcatctgggccaccaacaaccgttccctcgaggccgccttttccaccatacaggaagatcctcgacttcaagatcatcacaccactgcagacggggaggtcacgtgggttaggctttgccaccttctcctccgagcagtcgatgcgcgacggcatagaaggcatgaacggcaaggcgctcgacagccgaaacatcaccgttaatgaggcccaatcccgtcgctcctgtggaagatgccgaggctacagtggacgcagtggccgctactgctgaagtcgttg

SEQ ID NO: 20645 - DNA, 490 bp, Oryza sativa
  Clone ID: uC-osflM202011e11b1
ttgttctggatgcgccagggggatggcaccgtgctcgtctcccagttcatggtcgagcttcaggggcttcgcgccgtcgacggtgaggacccgcccaggatactgcacctcaaccccaggttgagaggggattggagccagcgaccaatcatcgagcacaatacctgctataggatgcagtggggctcctcgcagcgctgcgatgggtcgccgcccgaggacaacgacgataaggttgatgggttcaccaaatgtgaaaaatggatacgtgatgatgttgttgacacaaaggagtccaagacaacttcatggttgaagaggttcattgggcgtgcaaagaaacctgcaatgacatggccattcccttttgtagaagacaggctatttgttcttactatgcaagctggagttgaaggtttccatatatatgttggtggaagacatgtgaccttcttcccttacagaccaagctttactcttgaagatgcac

SEQ ID NO: 20646 - DNA, 492 bp, Oryza sativa
  Clone ID: uC-osflM202011e12b1
ttgttctaaggccccttcaattgttgttgttgatggccatgagtttgaggaatatgaggagccaccaatacttgggaggaggacatattttgtgacagaccaatcaggtgagaatcatcaatgggctcaatgtgaggattgctctaagtggcgtaaactgccggtggacgcccttttgccctctaagtggacctgctctgacaataaatgggattctgaaaggtcttcctgtgattctgcccaagagataaatatggaggagcttggcgaaatgattcctatcaaacctggtgctgcaaaaaagaccaaagggaaggtagatactgacaatattgatgtttcagatgggctggacacactcgcaaatcttgcaattcttggtgaagggtgaatctctcccttcccagccaaccacaaggcatccccgccatcgccctggctgctcatgcatagtctgcatacaaccacccagcggaaagggaccaaagcaca

SEQ ID NO: 20647 - DNA, 486 bp, Oryza sativa
  Clone ID: uC-osflM202011f02b1
ttctctcctgctacagaaaaaatcccctttctcgacccctcttcctcctcgattccggcggactcgtcaccggcggcgggaggaagaggggtcgtccccctcccctagtttagtacagtagtcgggctaatctcgttaggtcgggttcttcccgttcttttctcgttggtgtgatgtgtaggctgtagacggcggctgcgacgtggatgcagcttgtgacggcgatggcgacgcggaaacgacccgagacgatggcgacagcgcggatccggtccgcggcggtggcggctgcttggaggcggtccacggaggcggtagctgctcggatgcggctcacggcggcgacttggttgcggtccacggaggcggcggctgtgcggttgcgacccgcggtcgaggcggcggctgcggctgcgcggctgctgcccgtggcggcggcggctgcacggatgctgctcgcggcggcggcgcctgcgaggttgcggc

SEQ ID NO: 20648 - DNA, 514 bp, Oryza sativa
  unsure (1)..(514): unsure at all n locations
  Clone ID: uC-osflM202011f03b1
attgattagcattttgtgcaggtggagatgttgctgcagttgtccggtctataaataatgatagctggaaatatggtgctcattttttccgaaatgaatttctgttaaactatatcattgcaacatatagcaaacctcaggtttcgcttctaactggaattgtcatgggtggaggtgctggtgtttctatacatggaaggttccgagttgtcacagatagcacggcttttgctatgccagaaacagcgatgggtctctttccagatattggggcttcatattttctatctcgacttcctgggttctatggagagtatgttggtcttactggtgtaaggttggatgctgctgaaatgcttgcttgtggcctagcaactcattctgtaccttcagataggctgtctttgctagaagaatcccttaaaaaggttgatacatctgatccatntgctatatgtggaattatcgatcaatattcgcaacaaccatctctgaaagaaaaaagcgctctgaa

SEQ ID NO: 20649 - DNA, 483 bp, Oryza sativa
  unsure (1)..(483): unsure at all n locations
  Clone ID: uC-osflM202011f04b1
ttgtatgcccgcaaccccccacaaaaccctaccaacctcccgccgccgccgccgcccatggccgccgcgtccgccggagcggccggccgccgcagggcgtggcgtgtgatcccgcgccccgtcctcgagacggtcctccacaaccacgcgctccgcccgcgcgtcccgcagccgctcatcctccacgggccccgcggcgtcggcaagtccaccctcctcctccgccgcctcctcccgcagtggtctgagcccccgcacgccgccgccttcgtcgacttcctccgccccggccccgaccgcccggtggtcgctcctcctccccgccgccgagggcgcggcgccgtcgctccccgacctccgcctccgcttcgagtccgcgctcgagggcctcgcgcgcgacgccgtgctccgggnngccgtcgggtccagggacgtgctcgccgcgctctcccgctcccacggncttcacaccgcgctgacacg

SEQ ID NO: 20650 - DNA, 468 bp, Oryza sativa
  unsure (1)..(468): unsure at all n locations
  Clone ID: uC-osflM202011f05b1
ctttttcatgccattcattgtggtcacaaggaccttgcactggaattgatattaaaagagcctgccctatcaaaagctgtgaacaaatacagtgagtcaccaatgttcatcgcggtaatgagagattttacagatgtttctgagaaactgttgggaattcctggatctagccatgttggaacatatggccacaatgccttgcatgctactgtgagaaatggaaatgcagttatggctaaaaaaattttggagggtcgtccttggctggggaaagaacgaaccagagagaggaagaccccaatcctgatgacggtaatttgggacaagatagacgtgcttcgtgtgttgttggaacatgatgtgcttttagggtatgaatgctatgagatngtggtaatctgagccctcttcttgttgctgctgcatatcgaggtcatgttgatgttgctcaagagcttcttaaccact

SEQ ID NO: 20651 - DNA, 489 bp, Oryza sativa
  Clone ID: uC-osflM202011f06b1
attcttaagtgtcagctattgctactaatacccctgtgagcaatacagaggatgctccaggtcctttagagatttcagagtcagcatcacgagcctatataattacacttcctaatcaaagtttccctgattccaaagaaattccagacagtaaggcagaagatgcacccatagattctcctgagaaattggaaccaggaccttcaagctatacacctacaattcccattaaagagtcctctattgtcagtcaaaatactaatgcagaaaatgtttccggagactgtagtgaaggcactgcttgtgctatatcctattcccagcatatcatttctgataagccaactaatgaggtatctgctactaatagctcacctgatgatacctctagcgatgaagatacagttgaaagtggtggcattggtgaaagtgtctaattcacagcccatgccactgaatgactcattggagaacggatgtgcaactcaa

SEQ ID NO: 20652 - DNA, 516 bp, Oryza sativa
  Clone ID: uC-osflM202011f09b1
tcggtcggatctaattaatttacctcctccacctcctcctcctccccccgatcggatcggcccggctcctcctcctccgccgccgccaccgccgccgcagataggagaagatggccgcacttgataccttcctctttacctcggagtctgtgaacgagggccaccctgacaagctctgcgaccaagtctcagatgctgtgcttgatgcctgcctcgccgaggaccctgacagcaaggtcgcttgtgagacctgcaccaagacaaacatggtcatggtctttggtgagatcaccaccaaggctaacgttgactatgagaagattgtcagggagacatgccgtaacatcggttttgtgtcagctgatgtcggtctcgatgctgaccactgcaaggtgcttgtgaacatcgagcagcagtcccctgacattgcacagggtgtgcacggccacttcaccaagcgccctgaggagattggtgctggtgaccagggacacatgtttggatatgcaactgatg

SEQ ID NO: 20653 - DNA, 492 bp, Oryza sativa
  Clone ID: uC-osflM202011f10b1
ttctgtcgcgtgggcaaaaaaccaacccaaccgccgccgcatcgccctcgttagaacgatggccgcgtcggcgctgcaccagaccaccagcttcctcggcaccgcccctcgccgggatgagctcgtccgccgcgtcggcgactccggtggccgcatcaccatgcgccgcaccgtcaagagcgcgccccagagcatctggtatggacctgaccgtcccaagtacctgggcccgttctcggagcagacgccatcgtacctgaccggagagttcccgggagactacgggtgggacacggcggggctatcggccgacccggagacgttcgcgaggaacagggagctggagggtgatccactcgcggtgggcgatgctgggggcgctgggctgcgtcttccggagatcctgtccaagaacgggtgaagttcggggggcgtggtggttcaaggccggccgcagatcttctccggggggggctcgactcctggggaacc

SEQ ID NO: 20654 - DNA, 489 bp, Oryza sativa
  Clone ID: uC-osflM202011f11b1
tcttcttctccaattttccaagcctgcctccaagcgcacgccacgatcttctagaagcgattcgcgcgcgccgccgcctcctcccctccccttccccggagcgaagccgccccgccgggggggatgtcgccggcggcggacagcgcggcgtcgaagcggcaggcggagctgctcaagcaggagggcaacgccttcttcaagaaggaccgcatcagcgccgccatcgacgcctacaccggggccatagctctctgcccaaaggttgcagtatattggaccaaccgagcactttgctacaagaggcggaatgagtgggttagggctgaggaagattgtagaacagctattcagcttgacagccactctgttaaggcacattacatgctcgggcttgcacttctcacaaggacgaattggccgagggaataaaagaactgagaagtcgttggagcttgaaggggtgcacatccgcaagtacatggttgagag

SEQ ID NO: 20655 - DNA, 428 bp, Oryza sativa
  Clone ID: uC-osflM202011f12b1
tcggttgaagagaacagagtcttcagctcctatctttaacatggaagatatagaagagggcattgaaggttatgaagatgaaaggtcagtgctgatgtcccagaagagattagagaaacgttttggtcaatcgccaatttttattgcgtccaccttcatgactcaaggaggcataccaccctcaacgaacccagcatctctactgaaggaagccatccatgttatcagttgtggatatgaggacaaaactgaatggggaaaagagattggctggatctatggttcagttactgaggatattctgactggatttaaaatgcacgcaagaggttggatatcaatctattgcatgccaccacggccatgcttcaaggggttctgcgccaatcaatctgtcctgatcgtcttaaccaagtgctacgttgggc

SEQ ID NO: 20656 - DNA, 510 bp, Oryza sativa
  unsure (1)..(510): unsure at all n locations
  Clone ID: uC-osflM202011g01b1
gtcgctttagcctcctcctctcgtcttctccttcgagttgttagctccctccttattcaaccatgggtaaggagaagacgcacatcaacattgtggtcattggccacgtcgactccggcaagtcgaccaccacgggccatctgatctacaagcttggaggtatcgacaagcgtgtgatcgagaggttcgagaaggaagccgctgagatgaacaagaggtccttcaagtacgcgtgggtgctcgacaagctcaaggccgagcgtgagagaggtatcaccattgatatcgccctgtggaagttcgagaccaccaagtactactgcacggtcatcgatgcccctggtcaccgtgacttcatcaagaacatgatcacgggtacctnccaggctgactgtgccgtgctcatcattgactccaccactggtggttttgaggctggtatcttcaaggatggccagacccgtgagcacgctcttcttgctttcactcttggagtgaagcaaatgatct

SEQ ID NO: 20657 - DNA, 452 bp, Oryza sativa
  Clone ID: uC-osflM202011g02b1
acgcgtttatctttttgcgatgcactgatccctccatcacagagtccatattctacatctcatgcacgaagcgaagcaccggctgaagatattgaagcacctccatctactaagagccatataattacagaaaaacaaatgaaccatgaggcaccaattaatggtaatgtatcttcaggtatcccagtaattttacatacaaagctgctcaagaagcattaccaaccagaagcctgctagaagggtaaatttgaagtgactggagagctaacacatatttgtgatggacttgaagcccatttccctttcgaaatttctgcccaagtatatgaggctttaaaacaaatgcctgaaatattaaagctagaggctagacctctttcttatctgtggccgaaaacattcaagatgaaacctcacaaggacaagatattggactgtgctttattagc

SEQ ID NO: 20658 - DNA, 296 bp, Oryza sativa
  Clone ID: uC-osflM202011g04b1
cttctatcttcctccgtctggcgtttgtaagactatcatacgggtagttgtgtaaacaaactaacagaggtcttttgtacggctctttgtaaagaaaatggaatctgtgtgctcctattaaatatggctttatgagtctaagcacattgaagatcagctcctgtatttttatataactagcttcgtggctttctttagaaaaaaaaataaggtggagtttgtaaggaaggattttttactattatttttttagaaacatagtaaaacgtatagtaaaacgtagttgttcacaacat

SEQ ID NO: 20659 - DNA, 395 bp, Oryza sativa
  Clone ID: uC-osflM202011g05b1
aatattataaaaaaaaaaaaaaaaaaaaaaaaaaaaaaaaaaaaaaggcaaataacccatatctactgactccagtgcaacggagttcgcgctcaaggacgccgatagctccgaccccatccatctccagcccttcacctggaggagcttcgaggacgggttccccagcctgttcatcaacagcgtccacagcaacccgggggaagtacggggggtccctggcgagcttcaggtcgccaccgggcatgttggagcagatctgcggtatcttcgccctgcccaagttgttcatcgcctccttcacgctggggctgcctttcttccgcgcggtctccttctagcgcgttaaggaggaggccgacggcgcccccgggttcaccctagcgcgcatcctc

SEQ ID NO: 20660 - DNA, 403 bp, Oryza sativa
  Clone ID: uC-osflM202011g07b1
tcgtttacttgccatgtccggccgtcgccgtcgtcggccgatctccctcaccggagcttcgaaagccaaacccttgcgccaccaactccgcctcgccgaggtgattccattttttcctatttcccctctcctttagccactgccacaagcactaccggcaccaccatagccggccagagctgagctcttgctgccgccgttccggccattctatttactccctatgccttccaccgacctccccggatgcatagcgagcgggaacacgcttgtccgccgccgtcgaggccattaaaccaccgaagcaccggtgccctgtgccctcttcccctctgttgttgctcgggagaagaaacagaaggaaggagagaagaacgggaggaagaagaagagacatatgaca

SEQ ID NO: 20661 - DNA, 497 bp, Oryza sativa
  Clone ID: uC-osflM202011g10b1
tttctttctcctccctccctcccccgcccctctgctcccctcgccggcgagcccaatggcggcgtccgccctcgactccgcctgggagggcctcaccggcagcttcaccgagttccagctcgccaccgttgtaaccttcctcctccacgagaccgtattcttcctctccggactcccctccctcctcttcgagcgcttcggcctcttcgccaagtacaagatccagaagaagagcaataccccttcttaccagaatagatgtgtgctgcgtctcattctgtaccatgtctgtgtgaacttgcctgtaatggttttatcctaccctgccttcaaattcatgggcctgaggagctctcttcctctgccacactggacggttattgtttctcaagttcttttttactttgtactcgaggattttatattttattggggacatagggcactgcacaccaaatggctatacaagcatgttcacagcggtcaccatgaatatg

SEQ ID NO: 20662 - DNA, 400 bp, Oryza sativa
  Clone ID: uC-osflM202011h01b1
ctcaattgtgttattgcagtttcatgtgagggtgctcctcctgtccaaatgggagaaagatatcctcacatgttcttgatcctcctactttttcatggagcccatgcggctttgaaagatccagtacagaaatggcagactcttggaggtcagcgtcctcttgtcattgctcgtggagggttctccggcttgtttcctgattcaagccagttctcgtaccagtttgcaatgtcgagtagcttgcatgatgtggttctgtactgtgatctgcaattgtccagtgatggtttgggcttctgcaaaactggattgacattagagaactcgacgcttatcgccgaagccttccctaagagggccaagacatacaaggtgaatggagaggaaatccatgggtggt

SEQ ID NO: 20663 - DNA, 313 bp, Oryza sativa
  unsure (1)..(313): unsure at all n locations
  Clone ID: uC-osflM202011h02b1
tctctttagggtaggaacaccttgctgttgttcgcgttgaaagaaaccgagggcaacgtggtctgctactctatggacgtcttgttccctgcgctggacggcatggtgaagcnggaacgtgtccggctaggggcgcataaccatgcacaggttggatgcgagtcccaactcccgcctgtaggggagcccgtggtacgagcccgaccgcatgctctacactcggaccgctgtacggtgagccggcgagctacctgaccggcgagttccccggngactacgggagggacaccgtggggctctccgccgacccgga

SEQ ID NO: 20664 - DNA, 401 bp, Oryza sativa
  Clone ID: uC-osflM202011h03b1
ttgtattaccatcacgcttgaggacgagtcctcggacacgatcgacaacgtgaaggccaagatccaggacaaggagggtatccccccggaccagcagcgcctcatcttcatcggcatgcaagtggaggatggccgcaccttgactgactacaacatccagaaggagtccacccttcacctggttctcaggctcaggggtgggatgcagatcttcgtgaagaccctgactggcaagaccattacccttgaggttgagtcgtccgacactattgacaacgtgaaggcgaagatccaggacaaggagggcattcccccggaccagcagcgtatgatctttgctggtaagcagcttgaggatggccgcacccttgctgattacatcatccagaatgagtccacac

SEQ ID NO: 20665 - DNA, 357 bp, Oryza sativa
  Clone ID: uC-osflM202011h05b1
gcctccctttttttttatttattattttttttggaggcttttttaatgggatcatcccttggatgcggcctgcgcgatagctactttttccaattccttttattctttcatagagggacctgatcaattaaactacttcttgctattccagttccatttgaccttactgaaacaaagaagcagtatgacgggtttatatataagtaaaaaatcttcttgcaaaagaaagagctaaagcctaactacctcaagagcgagagtaacgaagaatactgaaaggacatcaaaaaaagttgggggggaccctttagaggatccgaggtacagaaccctggaggggaaccaaagacttttttt

SEQ ID NO: 20666 - DNA, 477 bp, Oryza sativa
  unsure (1)..(477): unsure at all n locations
  Clone ID: uC-osflM202011h06b1
ctgcatccaatatatctgctactgaaacacaattaccagatcagcagcatttgtgatagccttcttgatgaagaccaaaggctggagactttcccagtgtttccaatgggtgaaagaaagaagaccacaagtgcaattggctgatgcggcgcagcggcaactgatcgaatatgaacagaagcttttcaattccactgttggcattccagctcaggcttttgttccaacagatgcgttcccttcacttggatttggtttcccaaaaccgtcaggagacatccaggtgcctatctttaaccagcaggctccagcatccatctttgagcgtgtaagcccacacaacatccctagcaatttcacatttggggcttgaagaactacttgagtgaagctcccagataacaatagtttggtggtgtcaactcatctggnggcgatagcatgatggacagctnctagtatgttttgcattgatac

SEQ ID NO: 20667 - DNA, 437 bp, Oryza sativa
  Clone ID: uC-osflM202011h08b1
ttgatgccaccaccgacggcgacgatgcaggcggcggcggcgtggaggcgtcacctcctcgacggcaacatctcccccaccaccgcggcggcgatctccgcctttagatccgcctcccagccggcgctcgcaccccaaggattgggtggagcggatggcgcgaggtacatgtccgcgagggcgccagccgtcaaggggacggggcatctcgtccgcaagggaaccggagggaggtcgtctgtgagtggaatcatagctacggtgtttggagctactggatttcttggccgctaccttgtccaacaacttgcaaagatggggtctcaagtgcttgtaccattcacaggttctgaggattgtcaccgacacctgaagctgatgggtgacctgggtcagattgttcctatgaaataccaatccagagatgtggattcaat

SEQ ID NO: 20668 - DNA, 445 bp, Oryza sativa
  unsure (1)..(445): unsure at all n locations
  Clone ID: uC-osflM202011h10b1
tcgctcgaattaacaaaaaaaaaaccctcctcgcctaccccccaccgacgtgtgggccccactcccccggccccacccgtcatacaccccgggtgtacggacccccgccggaatcccgcaccgccggcgatatatagtaggggagctcgaggcagctagattttttttttctccccatcgagattcgcgtggccttgtggtcaccgccgccgccgccgcctagatctctcgctgcgtctctccctccctcccctccggcgatccgcgtagatctgggcgggaggcggcggagatccgcggcgaggagggggggaggngngaaagcaagcaagcaaagcggaggggcatggagctggcggtgggagcgggcgggagccggagggtcggcgtcgcacacttcgctgtcggagtcggacgacttcgacctgtcgcggctgctgaacaa

SEQ ID NO: 20669 - DNA, 496 bp, Oryza sativa
  Clone ID: uC-osflM202011h12b1
ttgttcactccactctccgttgctcgcgcggttggcgttgcgttttttcccctcgaatcgcgggggggaatccgccggttaatgcagcagaggggcctcgcgcacaaccgccgctcccgcggcttctcccgatcccgccgcgccgtcgagggcgcctaaaccacacgcctttttttttccttaaaaacgaatagatctctctcaatttcctgaaacttataataatttcaaaaacgccctagacgaggacgaggagacgatcgagatggacgccgtcgcggcgaatgggatcggggaggtggagaggaaggcgcagcggagctactgggaggagcactccaaggacctcaccgtcgaggccatgatgctcgacttccgcgccgccgacctcgacaaggaggagcgccccgaggtcctgtctgtactcccttcttacaaagggaaatcagtactggagcttggtgctggaataggacgctttactgggaactggcaa

SEQ ID NO: 20670 - DNA, 452 bp, Oryza sativa
  Clone ID: uC-osflM202012a01b1
tttctttggtggcaactgcggatgcggctccagctgccagtgcggcaacggctgcggcggatgcaagtactctgaggtggaacccacgaccacgaccaccttccttgccgatgcaaccaacaaggggtctggtgctgcttccggaggatcagagatgggggcggagaacggcagctgcggctgcaacacctgcaagtgcggcaccagctgcggctgctcctgctgcaactgcaactagaagaaacttatctccatccaattcatcacctcatcaacgagctaccaggaccactacatatgccatgtactagctacctagcttgcatgcaagtccttaatttgctgctagctagctagctagctaccttagcgaatcatgtatgacatgttgccgcctggcccctaaataaaattccttacttaggataagaaaaaggacttcttactgaact

SEQ ID NO: 20671 - DNA, 156 bp, Oryza sativa
  Clone ID: uC-osflM202012a02b1
aacgcgatagtcgcggtgatcaccgatgggaccagtcgggtgggtcatgggccctgcgactcgattaagcacgatggcgatatggctctgtcgctcaagcaaacgactgactctgtacgggaggatggcgttgagaaagagcatgcgaaggatgcc

SEQ ID NO: 20672 - DNA, 466 bp, Oryza sativa
  Clone ID: uC-osflM202012a03b1
gttattataagaagaacccagctacacctgaactctggcttgcagcagttagggctgaattgagacatgggaacaagaaggaagctgatgctctactagccaaggcattacaggaatgcccgacaagtggtattttgtgggctgcagctatagagatggtgccacgtccccagcgtaaagcaaagagctcagatgctataaaacgatgtgaccatgatccccatgtcattgcagctgtggccaaacttttctggcatgataggaaggttgataaagctagaagttggttgaatagagctgttactcttgctccagacattggagatttttgggccttgtactacaaatttgaactgcaacatggaaatgctgatacacaaaaggatgtcctacaaagatgtgttgcagcagaaccaaagcatggagagagatggcaagcaataacaaaggctgttgagaactcaca

SEQ ID NO: 20673 - DNA, 471 bp, Oryza sativa
  Clone ID: uC-osflM202012a05b1
atcactagagaaagagagaggcgaggaataaggaaggctagggcaagatggctctcggggctctcctccgccgcgcccgcgcccttccccgcctgccccaaggcaccggcgagcgctccttctccgcccccaacgtgggccacttgtccgcctccaacaccaaacacgccattcagcgatgtcaggaagcactgcttgaagaattgatctggaatgaggtgtatgccaagcacaatgaagctagagtaaggcgccttatcaattcgcttgtgaggtcgctcggtgatgttccaaaacaaaagggtttcactaagacattttctcaagaatttgggatggttgcgaaggaactagaaaaggatatgaatatgagttttaaatcattcagagtgccactacgaaggctcatcctcaggactctggacaagtatcagcagcagggaagtgatgctttactgaagaattctctgg

SEQ ID NO: 20674 - DNA, 495 bp, Oryza sativa
  Clone ID: uC-osflM202012a06b1
cttttctttcgtttcagataaatgtctggtgcgcagaccgaaattatgcctacaagttaactgatgagatgcatgatccattggccaagaaactggttctgggatttgctcgaacttctgagttcaatggccctagagaaccaaccagccctcattctctgatagaagaattacatactgatttgccattccccgagccgatgctacaactgccatataggatatttgggtcatctccacctatgagtaactttgacccagctaaaatgcttacagattctgggaagctccaaaccttagatatactgctgcggcgcctccgagctgagaatcaccgtgtgctcttatttgctcagatgactaaaatgttagacattcttgaggactacatgaacttcagaaaattcaagtatttcagacttgatgggtcatcggcaatatctgatcgacgtgacatgggtccggactttcagaaaccgatcgatatatttgttt

SEQ ID NO: 20675 - DNA, 453 bp, Oryza sativa
  unsure (1)..(453): unsure at all n locations
  Clone ID: uC-osflM202012a07b1
tttgccgccgtcgaaacccaaaatcttctcttcccgtacgtgagaagcgccaggtcgtcgtcgccgccatgggcgtggaggtgtgcgtcaaggccgccgtcggccacccggacacgctcggcgactgtccattctcgcagagggtgctgctgactctggaggagaagaaggtgccctacgagatgaagctcatcgacgtccagaacaagcccgactggtttctgaagatcagcccagaggggaaggtgcctgtgtttaacggtggtgatggcaaatggattcctgattctgatgtgatcactcaagtcattgaggagaagtacccaaccccgtctcttgtcacccctcctgagtatgcatcagtgggatcaaaaattttctcatgcttcacaacgttcttgaagagcanggatccaaatgatggttcagagaaggcacttctacttgactgca

SEQ ID NO: 20676 - DNA, 448 bp, Oryza sativa
  Clone ID: uC-osflM202012a10b1
tgcttcaataacttgcaaggataactcaaactacttgaatcagatcagacaaaaacatcataagaatatcacgatgtgtggaggagcactgatcccgaacgactatggcgacaagccgccgccgccgccgtcggagtcgtcggagtgggacgccacaacgaagatgaagaagaagaagaagcgtggtggcggcggcgacgacgactgggaggccgccttccgggagttcatcgctggcgacgacgacgacgacgacggcggcgtttccatgttcccttctggtgcagggacgatggagacgaccacagaggtggcgccggcggcggcggtggtggagaggccgcggcggcggcgaagggtgaggcggagctacccgtaccgcggcgtccggcagcggccgtgggggcggtgggcgtcggagatccgcgaccccgtaagggcgcccgcg

SEQ ID NO: 20677 - DNA, 476 bp, Oryza sativa
  Clone ID: uC-osflM202012a11b1
ttgcttaccgttaaaagtagccgtcggttaatattcgatcgatcgatcatgtggtgtacgtgggcgttggggcgggtggtgttggcggtggtgttcctggttgcgttggctgccggcgatgcatcgccgcccaaggttcaccggaaccacggcatgttcacggcggggccatggaagcaggcgcacgcgacgttctacggcgggcgcgacgggtccggcacgctggacggcgcgtgcgggtacaaggacacgtccaaggaaggctacggcgtgcagacggtggcggtgagcacgccgctgttcggcgccggcgccggctgcggcgcctgctacgaggtcaagtgcgtggacagccccgacggttgcaaggtcggcgccgcccccttggtcgtcaccgtcaccaacctctgcccccccaaccccggacagtccaacgacaacggcggctggtgcaacccgccgcgcgagcactttga

SEQ ID NO: 20678 - DNA, 60 bp, Oryza sativa
  Clone ID: uC-osflM202012a12b1
ttctcgtttaccgataaaagaagccgccgggggggggtcgatagaacgagcacggggaga

SEQ ID NO: 20679 - DNA, 207 bp, Oryza sativa
  Clone ID: uC-osflM202012b02b1
gtggtttctagccacctccccaccgtcgccctctctgtcccacgttgccggccgcctccagccgcctgtgccgcctcgaccgtgcgccggccggtcgcgccgtcgccttctccagcgtcgccgtcaccttcttcaccccggcctgcccttcgtttcgcgcggtgaccgtcggaggcgcactcccgccgtcgccctttttattccttc

SEQ ID NO: 20680 - DNA, 504 bp, Oryza sativa
  Clone ID: uC-osflM202012b03b1
ctctcctctcatctgacatatctcctcccgtcctttcgaagcctctcgaatcgcatcgccgagccggatggcggtcaccgccgacgtgaagctcgagggcctccgcgccgccaccgacaagctcgaccagatcagcgagaacgagaagtccgggttcatcagcctcgtttcgcgctacctcagcggcgaggcggagcagatcgagtggagtaagatccagaccccgaccgacgaggtggtggttccctacgacacgctctcggctgctcccgaagatctcaacgagacgaagaagctgctcgacaaactcgtcgtgctcaagctcaatggaggcctcgggacgaccatgggctgcactggtcccaagtctgtcattgaagtccgcaatggctttacgtttctagaccttattgtgattcaaattgagtccctgaacaagaagtatggatgcaatgtccctttgcttctaatgaactcattcaacactcatgatgacacacagaa

SEQ ID NO: 20681 - DNA, 431 bp, Oryza sativa
  Clone ID: uC-osflM202012b04b1
ggttttgttctctcctcttctttagatcagttaaaataaatggctgacgcagaggacattcagccccttgtctgtgacaatggaaccggaatggtcaaggctgggtttgctggagatgatgctccccgtgctgttttcccgagtattgttggccgctcgcgacatacaggcagatatggttgggagtgggacaaaaagatgcttatgtcggtgatgaggcccaatccaagaggggtatcctaaccttgaaataccccatggagcatggtattgttagcacctggcaccacatggagaaaatttggcaccacacattctacaatgagctttgcgtagcaccagaagagcatacaattgtgcttacggaggctccacttaaccctaaggccaacagggagaagatgacacaaattatgtttgagacattcagc

SEQ ID NO: 20682 - DNA, 79 bp, Oryza sativa
  Clone ID: uC-osflM202012b05b1
ttcgttggcgatgccaagctcacggcgaaccaccgctcgcggcggcggccgaggaggaggaggtggggatggtgatggt

SEQ ID NO: 20683 - DNA, 320 bp, Oryza sativa
  Clone ID: uC-osflM202012b06b1
ggaaggaagcctcaaaggagggagggccgccgaacaatgtggttgaggacaatccaaggaaaagggtggagactaagagggagctggacaaaagataagtggtagaggggggaatcctacagctagaagaacatcaaccgtgtcaacagggaaggctgcaagaatagtagccattcaagccaaagaaaaccgtaggcactaacataaaagacctgacctaatccatcaatcaaggagcatgctaaaaggagatctagagagagggagaggcactgtcaaatcctaattgatggatcagagccaagcatgttatggccagg

SEQ ID NO: 20684 - DNA, 487 bp, Oryza sativa
  Clone ID: uC-osflM202012b11b1
atgccatcttcgatcgcagaaacccgcggtgcgtagcgatggcccggccacgcctcctcctcctccctctcctcgccgtcgccgcggcggtgctctcgtcgccgctcgggcgcgcgctcgccaagacggccaagaagagcaacgacatcgtcaatggcccactgttcacctccaagatcaacgccaagcgcacgctgatcgtcggccccgaggacgagttcaagaccgtgcagtccgccatcgacgccgtgcccgtcggcaacaccgagtgggtcatcgtccacctccgctccggcatctacagggagaaaggtatgatcccggaaaccaagccgttcatcttcgtgaggggcaacggcaagggccggacctcaatcaaccacgagtccgctttctcccacaacgccgagtctgccgccttcaccgtgcacgcggacaacgtcatcgtcttggcctcagcatcaggaacagcgcgcgcgccgggctg

SEQ ID NO: 20685 - DNA, 520 bp, Oryza sativa
  Clone ID: uC-osflM202012b12b1
tgttctcgctaaggtcttcgccgccgccaccgccgccgtgaggggaggccgccgacttcagcgatgccgacggtgagcgtcggccgggaccgcttcttcgtcgccctcggaaggacatacacgcaggaggagttcgaggtgctctgcttcgagttcggcatcgagctcgatgacgtgaccacggagaaggccatcatccggaaggagaagcacctggaggatgatgacggcgaggtggatggtgatgacgacgaggtcatctacaagatcgaggtcgccgccaataggtatgatttgttatgtcttgaaggattggcaagggccctccgcattttcactgggactgaagcgacccctatgtacaaaatttcttgcatccctcgcgattcaatgcttctgatgcatgttaaacctcagacttcacaaataaggccctatgtggtctgtgctgtccttagaggggtaactttcgatgaagcaagatataacagcttcatcgatcttcaagacaaactccatc

SEQ ID NO: 20686 - DNA, 520 bp, Oryza sativa
  Clone ID: uC-osflM202012c02b1
ttcttctcctcctctcgcatggcagccatggccaccaccgcgtgcagcctcctcaagacctccttcgccggcgtgcgcctccccgccgccgcccgcaaccccaccgtctgcgtcgcgccgcgcgaccggtgcagccatctgcaacttcatctcggtgtcggcggccactgccgcgtacgacctcaacgccatcaggttcagccccatcaaggagtccatcgggtcccgcgcgatggcccggcgggacatgaccgacatgatcacctacgccgacaccgacgttgtcgtcgtcggcgccggctccgtggggatctcctgcgcgtacgagctctccaaggacccctccgtcagcgtcgccgtcatcgagcatgccgtgtaccctggcggcggcgcgtggctcggaggccagctgatctccgtcatggtggtgcgcaggccggcgcacctgttcctcgacgagctcggcgtcacgtacgacgagcaggaggactacgtcgtcatcatgcacgccgagctctta

SEQ ID NO: 20687 - DNA, 521 bp, Oryza sativa
  Clone ID: uC-osflM202012c03b1
catgatcagccgctcgccgaaaacaaagaggaccttgatgcttatgtggtaggagaagtgaagaggcaattcaagcctcggagtctagaaaagaagatacctatagacccgagtgtgaagtacttcttcaagaaaatgtccacaacaaacaaggaggtcttaaagataacggactatgagcgaacacttaagaaagcatattacaaaatgtccaaaccagtccctcagcttggagagcaaccaaaccaagagatcgagccgttggtgaccggccaagaaattggcataaaagaattcatttctgacactgtactagctagggatcaactgcttagaggcgcaccaatcccaacggcggaaatgaaataccaatttgaactcggtacaccgcttgtcaagcctgagcagctgaagtccctatcaacacagatgtaccgattccatgaacggtacatggaaatgagcgccaacggtaaacagatgttcggagcaagaatcagaaactcagacttcttccagga

SEQ ID NO: 20688 - DNA, 511 bp, Oryza sativa
  Clone ID: uC-osflM202012c04b1
gtctactatcagacagtatccccaaagagcttagtgaaatctgttcttgaggaaggtggttggtcaaacttggtgtgttcaagggaggatcatgcaaagagtgttgatgttgcagttctttttcttggctcgaagctacaatcatcagacatttctaaagaaaagcaagctgattcaactttagtagacatgctgaagaactcctttgcaagctccgagttttccatggcattcccctatgttgccatgtcagatgatgacaaattggagaagtcattgctatctggatttgctgagaattgcaacaatggtcttggaaataatcatatcacctacacagacacctgttctgtaagtgaagatctgaagaaacatcacgacatggattccattcatggattggtggcatcacaaactaaaaagaacccaagtggacagactgatctggttgtcttctgtgatggtggtttcaaggataacacataatcagaaggggagttactttctgagc

SEQ ID NO: 20689 - DNA, 485 bp, Oryza sativa
  Clone ID: uC-osflM202012c05b1
cttacccccatctcaacgcaaaccaccctctccgccgcgcgcgcgaggcagatctcgacggggagcgcagccgccgccgccagatcccgccccgatcgcccccgcctcgtccccacggtcccgtggatacctctctctctctctctctctctctctctctctcggatcggtgcgattgcctttctttttgcgcggcggggatcgggtgtgttttggggacggtgaaggagaggagtgaagtgtggaggcgaatcgaatcgatctgattaggagacctgccatttctgtgcttgattttgtttcgatctgctccttgggctgtagatctggaagggcttcgtgggatctgctgctcgagcttcgtgagttgcacaggaaagtcttgggcttttgcgctcagctccaccaccttcacctgttcctcgggccatggctgctctcgtcatctcgaagcagcgcagtcaccagcagcaggcatccgatcg

SEQ ID NO: 20690 - DNA, 517 bp, Oryza sativa
  Clone ID: uC-osflM202012c07b1
ctgggacatgccaaatgtgccactcctctacattattggtgccttcataccagcaacgatgatagccgtcctgtactacttcgatcacagtgttgcttctcagcttgctcagcagaaggagttcaatttgaggaagcccccatctttccattatgatttgcttctcctgggtttcctgacattattgtgtggccttattggtatccctccggcgaatggtgtcattccacagtctccaatgcatacgaagagtttggctactctcaaacatcaactactccgtaaccgactagtagccacagcccgacaaagcatgagccagaatgcgagcttgagccagctgtatggcagcatgcaggaagcttaccagcagatgcagacaccactgatttaccagcaaccgtcagtcaagggattgaatgagctcaaggactcaacagtccaaatggcttcaagcatgggcaacatcgatgcgccagttgatgagacagtctttgacatcgagaaagaaatcgat

SEQ ID NO: 20691 - DNA, 518 bp, Oryza sativa
  Clone ID: uC-osflM202012c08b1
acatgattgagaggtccaccaaccttgactggtacaagggccccaccttgcttgaggctcttgaccagatcaacgagcccaagaggccatcagacaagcccctgcgtcttccccttcaggacgtgtacaagatcggtggtattggcaccgtgcctgtgggtcgtgttgagactggagtcctcaagcctggtatggtggtgacctttggtcccagcggcctgaccactgaggtcaagtcggttgagatgcaccacgaggctctccaggaggctcttcctggtgacaacgtcgggttcaacgtgaagaacgttgcggtgaaggatctgaagcgtgggtacgtggcctccaactccaaggatgaccctgccaaggaggctgccagcttcacctcccaggtgatcatcatgaaccaccctggccagatcggcaacggctacgccccagtgctggactgccacacctcccacattgccgtcaagtttgctgagctggtgaccaagatcgacagacgatctggg

SEQ ID NO: 20692 - DNA, 521 bp, Oryza sativa
  Clone ID: uC-osflM202012c09b1
atccaagggaacgcctggtttattcttccaggcctccaatcattgctaacttggggctagaggagagagcgatgaggagttttgaccatatggatgggcgaacaatacagcctgagcctatggttatggtggcaaagtgtcagagaccgtcagctggtgtaccagtttactcaaccaaaaatggcgcgctcagcgtgtttgcggaatttcagcaaccttcaatgccgccacatacatcagatcacaaactactagaaaactttgccgatcttcataagaggaatggaatcgaactcctttcggggttccagcagcctgggaggcttgggggtgctggggtcctggttagcggtgtatctgaccctgtggctgctctcaaggcacagtacggctctggttcgaagatgttgagcagcagcaacgacgtggatacatggaaagacataggaagcaggtagcgtctgtagtgttggtagcggcaatagtgcaatgctttcttgctctctgtatcatacttagtt

SEQ ID NO: 20693 - DNA, 526 bp, Oryza sativa
  unsure (1)..(526): unsure at all n locations
  Clone ID: uC-osflM202012c10b1
gtggccatggggcgatctgtgcgggtggtgctggactcctccgtcctcctcgacccatccggtgttacagcggaggaggaggaggtggtggtggcgctgcggcctggggcggaggcgctgctgcggcgcctgcgatactccaatctccgggtggcaatttgccatccggagggcttgccaactaatgaggttttcttgagaagactgcaaaattgtactcctttggatatatgccacttacatctccaagtgggagcaatttactaaatgagttgatgttagaatggagtggaacgaatttttgcttctatgtgacttcaggagttcatgaaggtctactatctgaacttcagaatcacaactgggaagttattgccatgggtaatgaagatgtcataaagaactctggagttatacatattagcatgcttcaagagttacttatcactttggcaacttcaataaaaaagggtaacttttcttggcatcaacttatgcattntagtggtataatgcatttaatttt

SEQ ID NO: 20694 - DNA, 481 bp, Oryza sativa
  Clone ID: uC-osflM202012d01b1
gtatctatgtgagggagaggatgagggagcaagggagggtgtggtgggcgctcgaggccagcaagggcgcaaactggtatctccaaccaaggatctcctccaatggtggcagtgagggggtaatcagcgtcacgtagatcaagctgtcggtgctcaccaacacgattacactaaggaggctgatcaggaagggtgtgccaccagtgctgaggccgaaggtgtagttgtcagtgtcgagggctgccaagaagcggtcaacggtgcctgagacgtactatgatgagttgatccgggctactgaggggaagaccacgccagccacgctacaaatcgaccatgatctccctcgcacattgccatgtcattcttggctgaacagtgaggaaggtcaggcatctctgtcgagtgtgcttgttggttactcatttcgagactcagaagttggatattgccagtgtctaaattatgtagctgcattgat

SEQ ID NO: 20695 - DNA, 508 bp, Oryza sativa
  Clone ID: uC-osflM202012d02b1
attgttatcttccatctcattctcctaattgtcatcactagcttctagctagcttaattaattaattagccatggcggaggagaagcaccaccaccacctgttccaccacaagaaggacgacgagccggccaccggagtagactcctacggcgagggcgtctacacgtcggagacggtgaccaccgaggtggtcgccggcggccaggacgagtacgagaggtacaagaaggaggagaagcagcacaagcacaagcagcacctcggcgaggccggcgccctcgccgccggcgccttcgccctgtatgagaagcacgaggcgaagaaggacccggagaacgcgcacaggcacaagatcacggaggagatcgcggccacggcggcggtcggcgccggcggctacgccttccacgagcaccacgagaagaagaaggaccacatgagcgccgaggagtccaccggcgagaagaagcaccacctcttcggctgatcgacctcatcacaacgtcg

SEQ ID NO: 20696 - DNA, 510 bp, Oryza sativa
  Clone ID: uC-osflM202012d03b1
ctatttgctatctagcttagctactcgatcatcagatcatcgatcatccgacgatcaaatcagtaatcttgaatatggcggctttgaacggtaaggtggtggtggcggtgatggtggtggcgatggtggtggcggcgccgggagcgtcggcggcgatcacgtgcggtcaggtgggatcggcgatcgcgccgtgcatctcgtacgtgacggggaggagcgggctgacgcagggatgctgcaacggcgtcaaggggctgaacaacgccgtccgcaccaccgccgaccgtcaggcggcctgccgctgcctcaagagcctcgccggcagcatcaagtcgctcaacctcggcaccgtcgccggcgtccccggcaaatgcggcgtcaacgttggcttccccatcagcctctccaccgactgcaacaaggtcagttaaatcaatcctgcttggatcgatcgatcgagcttaacatgctagctcaatcggagttgatcagctagtaattaagcacgta

SEQ ID NO: 20697 - DNA, 469 bp, Oryza sativa
  Clone ID: uC-osflM202012d04b1
cgcgccgccctctccctcctccaccgcctccgcctccgccttctctcgtgccgccgatctccatcgccggcgtgcggtgcaccgagatccacccgagatgtggcgcggctgcgtctcgcgtggcctcaggagcctctccaagggcaagggctcctcctcctccgcccccgtctccgccgccgctaggctcttctccaccgcctcgtcgtcgtacacggtggtggatcactcgtatgacgcggtcgtggtgggagccggcggcgcggggctccgtgcggcgatcgggctctccgagcacgggttcaacacggcttgcatcaccaagctcttccccacgcggtcgcacaccgtcgcggcgcagggtggcataaatgctgctcttggaaacatgacggaagatgactggagatggcatatgtatgacactgtcaagggtagtgattggcttggtgaccaggattctattcag

SEQ ID NO: 20698 - DNA, 500 bp, Oryza sativa
  Clone ID: uC-osflM202012d05b1
attgaataattatttttaataattttagttttttttttttggctttagatatattcccaatccccaacctcccaataatccgatctctcccagttctgttcggatcaaggctgtgtcgatcgcaaaaaagaaaaaaaaaaacaatttccttttggggtggttcatctgttgatcacttctttgtttcccgcgttttgttggggattcgattttcgggttaagattttctacacgatggccttgaacttggctcagagcgccgcggcggcagcgtgcttcgcgaccgccggtgatgcgcggcgagctgcttcggtggtcgccatgccgtcgtcgtcgtcgtcggccacgacgagcctgaggatgaagaggcaggcggtgtgcgagccggtggcgtgccgggcggtggccaggcacgtggcggcggcggcggctagcaacaggaggaacggcgtgccggtgttcgtgatgatgccgcttgacaccgtgagcaagtgcgggag

SEQ ID NO: 20699 - DNA, 519 bp, Oryza sativa
  Clone ID: uC-osflM202012d07b1
tcgttcgccctcgccgccatgtcgtccgccaccgccgccgcgttcctcgagcgccgcgagtcggagcgcgccctccacttcgtcaagtaccagggccttgggaacgacttcatcatggtggacaatagggattcggccgtgccgaaggtgacgccggaggaggcggcgaagctgtgcgacaggaacttcggcgtcggcgccgacggtgtgatcttcgtcatgccgggggtcaatggcgcggactacaccatgaggatcttcaactcggacggcagtgagccggagatgtgtggcaatggagtccgttgctttgcccggtttatagctgagcttgaaaacctacagggaacacatagcttcaaaattcacactggcgctgggctaatcattcctgaaatacaaaatgatggcaaggtaaaggttgatatgggccagcccattctctctggaccagatattccaacaaaactgccatccaccaagaatgaagctcgtgtccaagctgatttggcagttgat

SEQ ID NO: 20700 - DNA, 480 bp, Oryza sativa
  Clone ID: uC-osflM202012d09b1
tcggtaagcggcgccggagtgtacggacgccatggggagcgaggcggcggcggcggatgtggctgacactgaggaggtggcggtgttgacaggggacatcatccaggtgatgagcagcctgaaggccgagaactacgcgtgttcctcctactacaacgccatcttcgtcaagaagctgatcacctccgcgatggaccggaagagccgcgagaaggagatggcgtccgtgctgctgtcctcgctcggaatgccgcacggaggacgtcgtgtcggggttccacctcctgatcgagtccgccgaggacgccgcgctggacaaccccgccatcgtcgaggacctgaccatgttcttcgccaggtcagtggtcgacgaggtgatcgcgccatcgaacctaaagaaaatggaggaggaggccggcccgggcaagcccaggggatcctccaccggcttattggcgctccggaacgcccgtgccctgc

SEQ ID NO: 20701 - DNA, 474 bp, Oryza sativa
  Clone ID: uC-osflM202012d10b1
tcgctgcatccgggtcggcgtcctcctcctcctcctcctcctcgcagaatgcaacgggcaattcaagctatcgggtcacatggcagtctcctcaagtctgctgttctgcgacacatcagtgctccaaaaccatctattttacctgctgtatattcacgctccatgtcagtttcatctgctcaaatagaggagagtggatttgagactgccactgtggcagatattttgaagtctaaggggaagagtgctgatggatcttggctctggtgcactactgatgactctgtctatgatgctgtcaaatctatgacgcaacacaatgttggagctctggtggttgttaaacctggacaggataaatcaattgctggtattgttactgagagagattacctcaggaaaatcatagtgcagggacgatcttccagtcaactaaagttggagacatcatgactgaagagaaccagctgatca

SEQ ID NO: 20702 - DNA, 513 bp, Oryza sativa
  Clone ID: uC-osflM202012d11b1
ttggtcctcctgtgccgctgcacatatatatagctcccaccaccacgagtaatctaacagaataaatcatgggaccagcccacggccacctcgtcctcctcgtcgccgcggtggcgttgctgtcagctggcttcctcccgcacgctgtggcgaagaagggcggcgccgtgccaccggcggttgctgacatatgctctcgcactccattcccagacacgtgcaagagcaccgccgggcggcacgcgtccaagtacccggtgatcgacgtcgtggctgtgctcaacatgcaggtggacgcgttctccaagcgcacggcgcatgcgagggagcgcgtgaccaaggtgtcccgcggcgcacagcctcagcagacgcaggcgctgagcttctgcgacaccatgtacatgaacacccaggacaccatcggcgccgcggagcgggcgatcaccttcagagacaaggctacggcgaagatcatgctgcagctcgctgtgcaggactttgagtcgtgcgatc

SEQ ID NO: 20703 - DNA, 465 bp, Oryza sativa
  Clone ID: uC-osflM202012d12b1
ttggtctgtgctgctgctctcaagcaggctggtgcccgtgtcattgttactgagattgaccccatctgtgccctccaggcccttatggagggtctccaggtcctcaccttggaggatgttgtctcggaggctgacatctttgtgaccaccactggcaacaaggacatcataatggttgaccacatgaggaagatgaagaacaatgccatcgtttgcaacattggtcactttgacaatgagattgacatgctcggccttgagacctaccctggtgtcaagcgcatcaccatcaagcctcagaccgaccgctgggtcttccctgagaccaacactggcatcattgtccttgctgagggtcgtctcatgaaccttgggtgcgctactggccaccccagttttgtcatgtcctgctcattcactaaccaggtcattgctcagctagagctgtggaaggagaagagcact

SEQ ID NO: 20704 - DNA, 99 bp, Oryza sativa
  Clone ID: uC-osflM202012e01b1
ctggttgctgtcaaaattcttaagagggacgaccagcaagttacacgggaatttttagctgagcttgagatgcttagccgattgcatcacagaaacctg

SEQ ID NO: 20705 - DNA, 520 bp, Oryza sativa
  unsure (1)..(520): unsure at all n locations
  Clone ID: uC-osflM202012e04b1
ttttgtaatagttatgacttgtaccattagacttgcttcagaagcataccattaccacctgctgtgatctatgctttcacagttctttgtgaaagtattcctgttaaggataaacttctttcttgagggatttgatgtgttctgccaaagcccaaagataggttaggaacagcaagacatctagttgcatttgttgaatagtgtttcttggcttcttatatgatcttggtacctgttagctcattggcactgcatgaagattatatttgacaagcaaatgctgcagggcgtacttgttccttgtttgctttgagtttattgagatactttaagatagcatgttttagctgtttgcatataattgagttgacaaccaggaatactagaatactaaactactgggcactatttgaattgaagtgcaacaagttcaacatacgggatgcctttttctgcccttgatttctgactatattggtgttattctacttacatcctccgngtctttatgtgatctgtc

SEQ ID NO: 20706 - DNA, 494 bp, Oryza sativa
  Clone ID: uC-osflM202012e05b1
atcattgtgtagttttaggccatctgagggcctttgaatggctctcggcctccttcatttttcatagcatttgtgtagtgtgtgcaaatccatcatcgcatcttcatatctgaagaaatgaaggtgaccactcagctcaagcccatggcctcctcgtcgacgtcgccgtcgccgtcgcggctgccgcggagcgcgagcggcaaggcgcccacctcgccgccgtccagctccaacgcctcgcgccgtcaccaccagcagccgccgcgggcctcggcgtcgacgcccgccaccccggcgccgtcgcgccaccacctcaggtcgctgtccatcagctgcatgacgatcaggaccgacgacgactcgccgtcgtcggccgtcacccacaaggacatggcggcgacggccaagccgctgtcctactactcgtcgatgctgtcgccgaggaagctcatgcagcgcgcgtcccgcgcgttccgccgcagcaggtcgtctcg

SEQ ID NO: 20707 - DNA, 495 bp, Oryza sativa
  unsure (1)..(495): unsure at all n locations
  Clone ID: uC-osflM202012e06b1
tggcgccgccacttccctctcgcatcttctcgcgctcaggggccaggtaagcgaagatgtacaccgcgaggaagaagatccagaaggagaagggcctcgagccctccgagttcgaggactccgtcgcgcaggctttctttgacctcgagaatggcaaccaggagctcaagagcgagctcaaggacctgtacatcaacaatgcagtccagatggatattgccgggaacaggaaggctgtggtgatccacgtgccgtaccgtctgcgcaaggcattcaagaaaatccatgtcaggcttgtcagggagctcgagaagaagttcagcggcaaggatgtggtaattgttgcaacaaggaggattgtgaggcctcccaagaagggctcggctgttcagcgccctcgcacaagaactcttactgctgttcatgatggtatcttggaggatgtagtctacccagctgagattgttggcangcgcatcagataccgtctggatg

SEQ ID NO: 20708 - DNA, 418 bp, Oryza sativa
  Clone ID: uC-osflM202012e07b1
ttgccacaacatcgacgacctcatcaccatcctccgcgaggtcaagagcaccaagaccacaggcccggtgctcatccacgtcgtcaccgagaaaggccgcggctacccctacgccgagcgcgccgccgacaagtaccacggcgtggcgaagttcgatccggcgacggggaagcagttcaagtcgccggcgaagacgctgtcgtacacgaactacttcgcggaggcgctcatcgccgaggcggagcaggacaacagggtcgtggccatccacgcggccatggggggaggcacggggctcaactacttcctccgccgcttcccgaaccggtgcttcgacgtcgggatcgccgagcagcacgccgtcacgttcgccgccggcctcgcctgcgagggcctcaagccgttctgcgccatctac

SEQ ID NO: 20709 - DNA, 467 bp, Oryza sativa
  Clone ID: uC-osflM202012e08b1
ttaagccatccgatccccaccctgcctcccctcccacctcatcagcgctggcggcggcggcggcggcggcggcgtcccctggatccctcggcggaggcagcggcagcggcggcggcggcggtagatcaatcgcatttgtctcgctaaatccggcccgcgccgcccgtcgcgtcacggtaggtggtaggggaggactctcagctcaccaacgacatgttcttcgccatcgcggggcaccgtctcaccgtggtcggcatcgacgcccgctacaccaagccgatcaccgtcgactacatcatgatcgcgccaggccagaccatggacgtgctcctcaaggccaaccgcaccttgggatccaacagccggtattacatggccgcgaggacgtttatcacgttaccggttgataccattcgtttcaacaatagcaccgccacggccatcgtggagtacacggacagtgccgt

SEQ ID NO: 20710 - DNA, 499 bp, Oryza sativa
  Clone ID: uC-osflM202012e09b1
ctccgcttgctatatcgacgcccaccatctccaccaccatcgctccgcttctcctctcccatctctcgcttcgctccgcttgcctagggtttcgcctcccgccggcagccgcgcccccgccgccctcgcctcagatcccgccgccggcgacccccccacgatcctcctcccccgccgcccgccgatcccgtcgagctccggttcggtgtttgctcccctactccgccgccgcgacgcctcgggcttgcagagtctgggcgggcgccgcggggggagtgcagatctagggtttgggggctctggctggtgcatgagaagggcaccggagtacggacggcatggaggtggaggcggcgaggagggacgcggccacgctggacccggagctgctgcagctgccggagctctcgcctggcgcgctccgggagaaccccgcccttgctgaggcgctctactcgcagtggctcgcgctccccgagacatccaagctggtgaactc

SEQ ID NO: 20711 - DNA, 526 bp, Oryza sativa
  Clone ID: uC-osflM202012e10b1
tggtttcctcctcctcatcgtccgccatggcttctctcaccgatctcgtcaacctcaacctctccgacaccacggagaagatcatcgccgagtacatatggatcggtggatctggcatggatctcaggagcaaggctaggactctctccggccctgtgactgatcccagcaagctgcccaagtggaactacgatggctccagcaccggccaggcccccggcgaggacagtgaggtcatcctgtacccacaggctatcttcaaggacccattcaggaagggaaacaacatccttgtcatgtgcgattgctacacgccagccggagaaccgatccccaccaacaagaggcacaatgctgccaagatcttcagctcccctgaggttgcttctgaggagccctggtacggtattgagcaagagtacaccctcctccagaaggacatcaactggccccttggctggcctgttggtggcttccctggtcctcagggtccttactactgtggtatcggtgctgacaagtcttt

SEQ ID NO: 20712 - DNA, 523 bp, Oryza sativa
  Clone ID: uC-osflM202012e11b1
tgtgttgctcttgattatgaacaggagcttgatactgccaggagtagctcctctattgagaagagctatgagctgcctgacggccaggtcatcaccatcggagcagaaaggttcaggtgcccggaggtgctcttccagccatcttttattggtatggaagctcctggcatccatgaagccacatacaactccatcatgaagtgcgatgttgatattagaaaggatttgtacggtaatgtggtccttagtgggggatctacaatgttccctggtattggtgatcgtatgagcaaggaaataactgcacttgcccctggcagtatgaagatcaaggtagttgcaccgccagagaggaaatacagtgtctggattggtggttccatcctggcttctctcagtacctttcagcagatgtggatctccaaggccgaatacgatgaatctggtccaggcatcgtccacatgaagtgcttctaagtttgtgggcagatttgtaccattatcagctgattgagacgtgatc

SEQ ID NO: 20713 - DNA, 505 bp, Oryza sativa
  unsure (1)..(505): unsure at all n locations
  Clone ID: uC-osflM202012e12b1
tggttggacacaacacacacccacacccactcccccactctctctccggttcatgtcctgctgctccccatgtcgcccccactcgagctcgactacataggcctctcgccgccggtgcccgccgccgccgatgccgccgccgacaacgacctgaagggcaccgagctccgcctcggcctgcccggctcccactcgccggaccgctccccgcccgccgccacgctcgaccttctccccgctgccaagggcgccaagcgcgggttctccgacgaggcgcgtccgctgccggcgtccgacgccgccgccgccgccgtcgggaagggcaagaaggcggcggccggcgaggaggatgaggatgcggaggaggaggacaagaaggtcgccgccgcgccgcaggcgcctgctgccaaggctcaggtggttggatggccaccaattcgcagctaccgcaagaacacgatggctactaaccagctgaagagcagcanggaggatgctgaagcga

SEQ ID NO: 20714 - DNA, 524 bp, Oryza sativa
  Clone ID: uC-osflM202012f01b1
tttattctctcctcctcctcccatggcggcgacgatcgtgtccgtcaaggcgcgccagatcttcgacagcaggggcaaccccaccgtcgaggtcgatgtgtgctgctcagatggaacctttgcaagggctgcagttcccagtggtgcatcaactggtgtctatgaagctctcgaattgagggacggtggatctgattacttgggaaagggtgtttccaaggctgtcgacaatgtgaactcggttattgccccagctctgattggcaaggaccctacgtcacaggctgagcttgataacttcatggttcagcagcttgatggaaccaaaaatgagtgggggtggtgcaagcagaagcttggtgctaatgcaatcctggctgtgtcactggccatttgcatagctggagctatcatcaagaagattcctctgtaccagcacattgccaaccttgctggaaacaagcaactggatttgcctgtacctgcatttaacgtcattaaacggtggatcacatgctggaaac

SEQ ID NO: 20715 - DNA, 468 bp, Oryza sativa
  unsure (1)..(468): unsure at all n locations
  Clone ID: uC-osflM202012f03b1
cacatttccctcccctcccctcgcccccgcgtgtccctccgcccgccacccccggccccgcgctccctgcgcctcgaccgcgtcgtcgccgcggcggcggcgtcggcgcagctcgcggcgctgtccccgcgggagctgcagctggtgctcgtctacttcgcgcaggagggccgcgacgcctactgcgcgctcgaggtgttcgactggctccgccgcgccaaccgcgtcgacggggagaccatggagctcatggccgccatcgcctgcgggtggatcgagcgcctcgtgggcggcggcggggacgtcgccgacgtcgccgcgctgctcggggagatggactgcgtcgggctccgccccgggttcagcctcgtcgagaagggccgtgcgctctactgggaccgcggcgacaggggcagcgccgtcgacttcgttaggggacgtctcagagagggggcgtnggcgttggcg

SEQ ID NO: 20716 - DNA, 469 bp, Oryza sativa
  Clone ID: uC-osflM202012f04b1
cattttgattctgtgtgtgtgtcttggttgcaaaaaccaagacatacacacagaatcaaataataacaaaggtttcctagcctcaaaggatacatatatatagtttccctacaatacaatggagcctgtcaatgatttccaggaaggcatttcaacagagcatgcctttgaggcagagtctgtgccatcattgtcggaaacaataacgccacgatcaatggtggtgagcttcatccttagtgtaactctcagcatcgtcgccatgaaggtcaccttgagctctggcttcattccgtcgttcagcatcccagccggtctccttggtttttgtgtatcccgtgcgtcgatccgcattcttgactactttgcagtggcacaactaccattcacacgccaagagaacaccatcatccagacctgtgtcgacgcatgcacctcgatcacattcaccggtggctgtgggacatat

SEQ ID NO: 20717 - DNA, 519 bp, Oryza sativa
  Clone ID: uC-osflM202012f05b1
atccattgccgctgctgtataaatggttgctaggttgcagtgtgccagtgtcaattgtgtggctgtgacctagctagtcgatcggtcatgtcgtcgcagcaatggcttggtgacggcacggcgcggaggtggagggagctccatggtgagagcgactgggacggcctcctggacccgttcgacctcgacctccgccgcaccgtcatccgctacggcgagatggcgcaggcgacgtacgacgccttcaaccacgagaagctctcgccgcacgcgggcctctcgaggttcgccgcgcgccgcttcttcgagcgggcgcagctgccgggccactccgcggcgtaccgcgtcgccaggttcgtgtacgcgacgtcgtgcgtcgccgtgccggagccgctcatcctccggtccgcgtcgcgcgcgcgcaggtgcagggagagcaactggatcgggtacgtcgcggtggccaccgacgaagggaaggctgcgctcgggcgccgcgacatcgtcgtcgcgtggcgc

SEQ ID NO: 20718 - DNA, 526 bp, Oryza sativa
  Clone ID: uC-osflM202012f06b1
atcactactccgcgccgctagctacccacttgttccaccgaccacatcgcgcgcccacctacgaactccgcccgccggcatcgatgggggcttcgacgaacgcccgcgagcgcgccatcgctggccgcagtacgatccgcacgccggagaagcgttcttcagttgccagttcgtgcagatctgtctctcaggcaagctagatttatgcagcatgttgatccagattattacaggagaaacttccacattcctgaagtcatggtacaattggtatttggatggaagataaggaaatgtgatggcactcaatgctgagaagaaacttttttttcagtagctggagccactggaaagcccacaatcgatgcttataaatccttcatctacaaggggagggagtcagctgagccatttgcactccacatgttaattcgcaggttagccaatagaattataattatagtcatggaagaataatccttcccatagaacgtattggcaccaaaaatatgaaaatttatcaggt

SEQ ID NO: 20719 - DNA, 469 bp, Oryza sativa
  Clone ID: uC-osflM202012f07b1
ttctccgtcgttaagccagatcgcccgccgctccgtgccctagcgccgccgccgccgccgccgacaccggaatcgccgggcagactgcgagcgcggagccaccagcgtggggcggcgggatgggcgaggaggccaagtacctcgagacggcgcgggccgagcgctccgtgtggctgatgaagtgccccccggtcgtctcgcacgcctggcagggcgccgtgtcctcctccgacgccgccggctccaaccctaaccccgtcgtcgccaaggtcgtcctctcccttgacctcctccgctccgaggagccctccctccaggcaagcctcccccgcccactccctctcccttgcggattcgaatggtagtacattctcttcgagcaaaatgatatgaccctatggccgtgggggttggtaatgtatgaacctcaaatgtagatttcatgcattatgcttgggaaaaatgggac

SEQ ID NO: 20720 - DNA, 363 bp, Oryza sativa
  Clone ID: uC-osflM202012f08b1
ttgctcgtccccaggatgatggggataataagctgcctccagttactgggaatagagctgctgatgacaaatcgaaacatgttgataacacacctgctggcatgggaaagcggggccggccttctgcatcaaagtcgcatgagaagaagaatgttggaaaaggcaaagtatcaggtttagagtctaaaaaagctgacgcagttagtgattctggtggaagggctacaaggcgactagctaaagatgatgatatcaagtcttcattcaaaaagactggtgaaggggaatctttgaagaagaagcagaaggaaaatttgaaacagcaggaagatactccacccgatgaagacactgatgaggatc

SEQ ID NO: 20721 - DNA, 367 bp, Oryza sativa
  Clone ID: uC-osflM202012f09b1
tttgtattccgattttatgaacatggtaatcgaggttttcctggatgggctcttagaaatcatattgcatctgtgagcctgcgttgaaagattgagaaagttcatttttactgctaccgaaaaaaacgaggacttactgacatacagtagacccttgcccaccaagcataagttccggaaccatatgcaagctgtgatgaacctgattatgtccccgagcaactggacgggaaggaagaatcggacggcagggaaacgacagacatgaacccgaaagaaatggatctttcttcaattaatccagcaggctatgataaaaaaaaccagctgacgcactggaagcttatgggatggcgccctttccttg

SEQ ID NO: 20722 - DNA, 516 bp, Oryza sativa
  Clone ID: uC-osflM202012f11b1
ttttaaaggcctgtgtcaaggagagggtagtagcaccttgctctcctttgccttcagagaaaccggaagcaatggcgtctgctactctcctcaagtcatctttccttcccaagaagtctgaatggggtgccacccgccaggctgccgcccccaagccggtgactgtctccatggttgtccgcgctggtgcctacgacgatgagcttgtcaagaccgcgaaaaccattgcatcaccaggaaggggtatccttgccatggatgagtcgaacgcgacctgcggtaagaggcttgcgtcaattggccttgagaacaccgaggccaaccgccaggcttaccggacccttcttgtcaccgcaccgggcttgggacagtacatctccggtgctatcctcttcgaggagactctgtaccagtcaactgtagatggcaagaagattgtcgacatcctcactgagcagaaaatcgctccaggtatcatggtcgacatgggtcttgtgcccctagctggctccaaca

SEQ ID NO: 20723 - DNA, 525 bp, Oryza sativa
  Clone ID: uC-osflM202012f12b1
tcttgaagagcgccgcctcaaggacctgatcaagaagcactctgagtttatcagctaccctatctctctatggactgagaagaccactgagaaggaaatttctgatgatgaagatgaggaagagaagaaggatgctgaggagggcaaggttgaggatgttgatgaagagaaggaagaaaaggagaagaaaaagaagaagatcaaggaggtttctcatgagtggtccctggtcaacaaacagaagcctatctggatgaggaagcctgaggagatcactaaggaggagtatgctgctttctacaagtccctgacaaacgactgggaggagcatcttgctgtcaagcacttctctgtggagggtcagctggaattcaaagctgttctctttgttcccaagagggcaccattcgacctctttgatacgaggaagaagctcaacaacatcaagctctacgtccgccgagtcttcatcatggacaactgtgaggagctgatccctgagtggctgagctttgtcagggcatt

SEQ ID NO: 20724 - DNA, 470 bp, Oryza sativa
  Clone ID: uC-osflM202012g03b1
ttatttgcagctagaggcgaggcaagaaaagaagtgaaatctctccgttagacaggaagaggaaaagcaagggggaataggggatggcgtaaaagaggatacagaaggagctcaaggatctgcagaaggatccccctacatcatgcagtgcaggtcctgttggtgaagacatgttccactggcaggcaacgataatgggtccatctgatagcccatatgctggtggagttttcctagttaccatccacttccctcctgatcatcccttcaaaccacccaaggtggcgtttcgcaccaaggttttccatccaaacatcaacagcaacgggagcatttgccttgacatacttaaggaccaatggagcccagcactaaccatttccaaggtgttgctgacaatctgatccctgctgactgatccgaaccctgatgatcctctggtgcctgagatcgcccacatgtacaagaca

SEQ ID NO: 20725 - DNA, 516 bp, Oryza sativa
  unsure (1)..(516): unsure at all n locations
  Clone ID: uC-osflM202012g04b1
ctttgctagctaagcccagtcatggccgcctctcccgcaatgccgtcactcctcctcctcctcctcctagccgttctcgtctcggcggccgatgcctacgactccgccgccagcgccaacaccaacgccggcgccatccccgaccccaacatcttgaacatggaggccatgtgccccaagacgacggacgtgaaggcgtgccagcaactggtgaagaacatgccgtccaacatcgtcgcggggaagaaggacgccaggagcatcgcccgggggtgcatcgccaccgcctggttcgtggcgagggacggcgccaaggactgcaccgccgccgtggacgagtgcaaggacaaggtcgaccagtgcctcgacagctgccgtcacgccttcgccgccgtgaacgacgccctggagccccagggcaccggcgacgacgccgtcaaggtccccgaggacgagaagctcctcgccatccacgccagcctcacgcagctgctccgnggtcccaccggcacgcgc

SEQ ID NO: 20726 - DNA, 511 bp, Oryza sativa
  unsure (1)..(511): unsure at all n locations
  Clone ID: uC-osflM202012g05b1
gttaatgaaaattaatccaagatggctctgcaaaacattggtgcttcaaaccgtgatgatgccttctacaggtataagatgcccaggatgatcaccaaaatagaaggccgtggcaatggcatcaagactaacattgtgaacatggtggatatagcaaaagccctagccaggcctgcttcctacacaacaaagtactttggatgtgagcttggtgcacagtctaaatttgatgagaagactggtatttccttggttaatggggcacatgatactgctaagctggctggtctccttgagaacttcatcaagaagtatgtccaatgctatggatgtggcaaccctgagactgaggtcctaatctccaagacccagatgattacactgaagtgtgctgcctgtggttntgtgtcagatgttgacatgagggacaagctcacaacttttatcctgaagaatccacctgaacagaagaagggtgctgggaaagacaagaaggcaatgaggagagctg

SEQ ID NO: 20727 - DNA, 499 bp, Oryza sativa
  unsure (1)..(499): unsure at all n locations
  Clone ID: uC-osflM202012g08b1
tcgttcgatatgtggcgaaaagttacgataccaggcagctgaattcagatggccctggtttccccatatttgaaatttactttgctgaggccaatggagggtacaatctgcaggcagtgcatctgaaaccagatgacagtgattctcagcagttgtcaaatacgttgagagagaaactaggcatggatagtataaacatatctagcagttcatttggagctaaacatgaggatcacaatgaaggtgtaaacatggatgatcaaaatagtgatgatagtgatatttctgctggtccagctggtttcaaaaacttgccaagcgattcaactccagttcccagggttaaaatactaaaagtggtgcccatggaaaatgttaatcaggactatataatcaaaatttttgatcagatgtcggatgaagatgatgaaaatgataatcctgaggatgaaatngaatcatcagaggacattggtgatggagataacgttgaagaagc

SEQ ID NO: 20728 - DNA, 530 bp, Oryza sativa
  Clone ID: uC-osflM202012g09b1
ttgttgatggttgtggagtgcaaccaattgttgggcctcgatacaagtctaaaacaaaagaagattatgatttgtgtgatgcctgctttcatcgcatgggcaatgaggtcgagtacaccaggattgacaagccactcttaccccagagattactgagagaccctacattgtgtcgcaagatccattcacggactgcgatgaagtcaaagcgggagaaacttgaaagtcgcttcattttggatgtaactgtcctggatggaacattgatggcaccttcaactccgtttactaagatttggcgtatgcataacaatgggtctatcatgtggcccttgggcacacagcttatatgggttggtggcgaccagtttgcactgcagacctatgttccattagagattccagtggacgggtttcctgttgatcaggagattgatgttgctgttgattttgtggcacctgcaaggcctgtgaggtatatatcttactggaggttagcatcaccttctggccagaaaattggtcagcgt

SEQ ID NO: 20729 - DNA, 524 bp, Oryza sativa
  Clone ID: uC-osflM202012g11b1
ttttgtacgcgtgggctcggagccagacaaaggagagaagcgcgaaggcggcggcggcggcggcgcaaggcgaagatgtcggagaagaagcgcggcgccggcacccgcaaggacgaggtggtgacccgcgagtacaccatcaacctccacaagcgtctccacggatgcaccttcaagaagaaggcgccgaatgccatcaaggagatcaggaagtttgcacagaaggccatgggcacaacggatatacgcatcgacgtgaagcttaacaaggccatctggaccaatggtatccggagtgtcccaaggcgagtccgtgttagaatctctcgcaagagaaacgatgaggaggacgccaaggaggagctctactctctggtcacagttgctgagatccctgcagagggtctcaagggtttgggaaccaaggttgttgaggatgaggagtaaacttttcattgttatctgtcagttagcgcttagtgcatatttccatgattccagtcactatgctgagagcaaatttg

SEQ ID NO: 20730 - DNA, 522 bp, Oryza sativa
  unsure (1)..(522): unsure at all n locations
  Clone ID: uC-osflM202012h04b1
ttttctatcatctgggaaggcgatctttcatgtcaaaaccagtgtacccgcttgtcttccgtaatccagtgtcggaagcagaagcctctgggatgcctgaagctagtaatattgggcgaacaacacctagtgatgattctcctgtgtggcggcgcagcttggcaagtcctgagctcaagttccacaatgcattgagtgagtttcggaaggtagaggcttcaccagagccaaacacaagctcaaggagggaaggattcagatggagcaatgctagtagctatgattttggatatgatggtgatgccattgacatttcagatcatattagtgtggagtcccaaagatccccgacaagttcagtgaggtttcttaagtgtggcttatgcgagagattcctgcggcagaaatcaccatggacctcannaccgattgttcaaaattctgatatgccagtagcggcggtccttccatgtcgccatgtctttcacgcagatngtctcgaggaaagtactccaaagagtc

SEQ ID NO: 20731 - DNA, 518 bp, Oryza sativa
  Clone ID: uC-osflM202012h06b1
gttgtgtcctcttgtcaaactggttgggataagataaaggagcggagcccggcaaagccgagcggcagcagagagcacagctcggcaacaccatggcgccggcagcgctagccgctcccatcgcgtgcatttcccccagctccgccgggagggtcaccgtcgccgccgccggcctccgctctgccaggatggccagctcacctgtagcccagcccattggcgaggcagttgtgttacggcccaaccagatgttcagatcagtgctgcgacagcggaggcgtctggtggtccgaagcagcagctcagatgaaaccaattccaccaccgaagagaagacgccattcggatacacgaggaaggacgtgctgctcatcggcgtcggcgtgacactcttaggctacggcctcaaatacgggctggagctggtcggagtcgatcccttgcaagcaggaaacgcccgtcagctgatcatcgtgctcgggatgacggtggggggaatctcgacgtacatgttcagg

SEQ ID NO: 20732 - DNA, 284 bp, Oryza sativa
  Clone ID: uC-osflM202012h07b1
tcgttttttctttaaaattccatcactaatcctcgccacctccccccctcaccgacgctgccgccgcgcacacgcatccccggcccggcctctctctctctctctctctcccgctcttcctctgctccgtcgcgggggaggcgcatttgccagggcgcggaatccccgggagattcggagggagagagagagatggagatctggttgtagggcgaggagcggtcggcgggcggcgtaggaggaagagggcgagggtgagggtgtgcgtggttgattagcggggg

SEQ ID NO: 20733 - DNA, 396 bp, Oryza sativa
  Clone ID: uC-osflM202012h08b1
tcgttggtcacaggttcaagatacattcaagcagatggacacttcagcaacagagcttgaatgctttcaagagctgcagaagcaggaacagatggctgcatcttatcgtataagaaatttgactgaagaagtaaacaaacaaaaagcattagaacggactctccaaagccgctatggtgatctgttaactagttacaagaggatccaagagcagcttgaggagcataagaggcaactgatgatacaggaggaaatggaagcacagaagcgtgctcaggaggaggaaatggaagcacagaagcgtgcgcaggcagaggaagaagcgtgctcaggaagaggaaatggaagcacataaacgtgcgcaagcagaggaagaaaaagaagcggcgaaagctg

SEQ ID NO: 20734 - DNA, 503 bp, Oryza sativa
  Clone ID: uC-osflM202012h09b1
tcgttgaaagagcctatcggtgtagttgggttgatcacaccttggaactatcctctcctgatggcaacatggaaggtagctcctgccctggctgctggctgtacagctgtactaaaaccatctgaattggcttccgtgacttgtttggagcttgctgatgtgtgtaaagaggttggtcttccttcaggtgtgctaaacatagtgactggattaggttctgaagccggtgctcctttgtcatcacaccctggtgtagacaaggttgcatttactgggagttatgaaactggtaaaaagattatggcttcagctgctcctatggttaagcctgtttcactggaacttggtggaaaaagtcctatagtggtgtttgatgatgttgatgttgaaaaagctgttgagtggactctctttggttgcttttggaccaatggccagatttgcagtgcaacatcgcgtcttattcttcataaaaaaatcgctaaagaatttcaagaaaggat

SEQ ID NO: 20735 - DNA, 509 bp, Oryza sativa
  unsure (1)..(509): unsure at all n locations
  Clone ID: uC-osflM202012h10b1
ttctgagacgttcgccaagaaccgggagctggaggagatccactccaggtgggcgatgctcggcgcgctgggctgcgtgttcccggagctcctcgcccgcaacggcgtcaagttcggcgaggcggtgtggttcaaggcggngtctcagatcttcagcgagggcgggctcgactacctgggcaacccgagcctgatccacgcgcagagcatcctcgccatctgggcggtccaggtggtgctcatgggcgccgtcgaggggtaccgcatcgcctgcgggccgctcggcgaggtcgtcgacccgctctaccccggcggcagcttctacccgctcggcctcgccgactacccgtaggccttcgcggagctcatggtgaaggagatcaagaaccgcacgctcgtcatgttcttcatgttcggcttcttcgtgcaggccatcgacaccggctagggcccccttgagaacctcggcgaccacctcgacggctccgtcaacaacaacgcctgggcct

SEQ ID NO: 20736 - DNA, 520 bp, Oryza sativa
  Clone ID: uC-osflM202012h11b1
ttatattaacgcggttgctaaagtcatcattgagtggtcaaggacgtgtttctttaatttgcacagttactccagcatcaagcaattctgaagagacacataatacattaaaatttgcccaccgtgcaaagcacattgagatccaagcaacacaaaataagattatggatgcaagatctctaatcaagaaataccaaaatgaaattcgtcaactaaaggaagaacttgaacagctgagaaggagtattcgtactggaacccctatagaagacaccatgcaaaagaaacatcatttgttggaaacaaaagaagattgtaatgtcaagcttcaatctagactggaacaaggagaagaagctaaagctgctttgcttgagaggatagaacatctaacagaactaattctggtttccgcaaaggcaagtcggactactaaatcgtctcactgcccaaggcgaagacattcttttggtgaagaggagcttgcatatctcccatatgaaaggcacgacatcatact

SEQ ID NO: 20737 - DNA, 494 bp, Oryza sativa
  Clone ID: uC-osflM202012h12b1
ttattgaagtctcatcctacctgaagaaggtcggctacaaccctgacaagattccctttgttcccatctctgggtttgagggtgacaacatgattgagaggtccaccaaccttgactggtacaagggccccaccttgcttgaggctcttgaccagatcaacgagcccaagaggccatcagacaagcccctacgtcttccccttcaggacgtgtacaagatcggcggtattggtaccgtgcctgtgggtcgtgttgagactggtgtcctcaagcctggtatggtggtgacctttggtcccagcggtctgaccactgaggtcaagtcggttgagatgcaccacgaggctctccaggaggctcttcctggtgacaacgttgggttcaacgtgaagaaccgtgccgtgaaggatctgaagcgtgggtacgtggcctctaactacaaggatgacccttgcaggaggctgccagcttcacctcccaggtgatcatcatga

SEQ ID NO: 20738 - DNA, 83 bp, Oryza sativa
  Clone ID: uC-osflM202014a01b1
tttttaaggacagagagagagctaaagagggggagcttaaggactcagcagggcgggaggctgttttataccaccaacttctt

SEQ ID NO: 20739 - DNA, 276 bp, Oryza sativa
  Clone ID: uC-osflM202014a04b1
tctggtgatcaccacctacgccgggctgagccggtaccgtgtcggcgacgtcctccgcgtgacggggttccacaacgcggcgccgcagttcaggttcgtgcgccgcaagaacgtgctcctctccatcgagtccgacaagaccgacgaggccgagctgcagcgcgccgtggagcgcgcgtcggcgctgctccgcccgcacggcgcgtccgtggtggagtacaccagccaagcgtgcaccaagcgcatcccgggccactacgtgatctactgggagct

SEQ ID NO: 20740 - DNA, 246 bp, Oryza sativa
  Clone ID: uC-osflM202014a06b1
tatgaaatcaagcaagcaagaagagacgagacgagggagagaaggagaagagggggccggccgcgggcgtcgtcgtgttcctccccccctctctctcctctcctctcctctcgatctgcatccttccttccatccattcctccccgcacccttcgcattgctctcgtcgtctcgattcggtcgaggatctccaggaaaagaggaggaagcgatatgggttgcttttcatgctgcggagcggctgat

SEQ ID NO: 20741 - DNA, 490 bp, Oryza sativa
  Clone ID: uC-osflM202014a07b1
ttcttcaacctccccttccccttctccttcaccttcccgccgtcttcgccgccctcgttcctctcttctaccaccacctcctcctccgccgtcaacgccgctgagatgggtcgcagtatgcttcccgagcagcaggaggacgtatcgaggaagagcaagaaggcgaagaagagcaagaaagacaagaagcggaagctggaggcggaggccgaggtggtggtggtggaggcggctgcggccacgtccacggatgaagcgacgaagagcagcaagaagaagagggccaagggcgatctgggccaaggagaggaggcggagaacggcggtgggaaggtcgtggccgtgaccgggaagggctccgcggacgccaagtacgccccgctgtcatctttcgccgccaccgcgcttcctccccaggtgctcgactgctgcaaggggttcgagcgtccgtcgcccatccaagcgtacgcctggccttaccttctcgacg

SEQ ID NO: 20742 - DNA, 476 bp, Oryza sativa
  Clone ID: uC-osflM202014a08b1
ttgatgaattctaggccatcagtcggttgggatgatatgtgggccaagacaattcttgaaacatatgaagcagaggatgatgatggaagatcatctgggggatcctctcctgagtcaactggttctgtagaaacatccatatcgtcccattttagtggcatgaactatccgtcgttgttcagttcaaaaccatcaggatatggggcttcacaacaaacgatacgtgaagaaccaccatcatattcaacatcagttctacagaaacgtgagtcattcgaaaacccccttgctgggcgtggtggtcggagttttggatcccatgaggacgaagacaggagttcagggaaccctcaatctgggaaagcactgtatgacttcacagcaggtggcgatgatgagttgagtttaactgctggagaagatgtggaaatcgaatatgaggtcgatggttggtactatgtaaagaagaagagacc

SEQ ID NO: 20743 - DNA, 313 bp, Oryza sativa
  Clone ID: uC-osflM202014a10b1
ttcttcgcttcgccgctgctgctgctgggggctctcttgggatgagagccccctcctctccatggcctcctccctgctcctgactggcgctaccttcggcgccaccaccaagcacatcgccgtcctccacccgcccgtcgcatccgcctgcaggccccacccgcccaggctgatcaggtgcggcgccgccgccgtcccggacgacaagctcttccgttggttctacctggggcaggccgccgccgggtcgccgggggggcccgcggacacggccaatgatggatgggcccctttccttgacgagatcaggggc

SEQ ID NO: 20744 - DNA, 285 bp, Oryza sativa
  Clone ID: uC-osflM202014a11b1
ttgggaaactaataaagacactgtctggggccttcgctggaaatagtgacatgtctctccaatctgtgtttgaaggatgcactaggttgcaaaagcttgaggtcagagatagtccttttagtgataagggattgctctctggcctgagctatttttacaacatgaggttcttatggatgaattcatgcaggctaaccatgaggggttgtagagatgtagctcaacaaatgcctgacttggtggttgaagtgatgaaagatcatcttgatgatgaaagggagatgg

SEQ ID NO: 20745 - DNA, 301 bp, Oryza sativa
  Clone ID: uC-osflM202014a12b1
tatcggtattctctacctacccacctgtgtggggttcgtgtacaggtacccgttggttgaaggccgttcgagcttttcctgggagtatggcatggtttacatacttcagcgccgtagcgcctggtatgagcctcgcggagaagcaatggctagtccacggggctcatacttcagcgctgcagcgcttggttctcggacctcggctcgaggcattttctctaccccttcttacccttgaaaagcagggtcaccttgtgctcttaaacccataaccatctttcggctaacctagccttcttcc

SEQ ID NO: 20746 - DNA, 492 bp, Oryza sativa
  Clone ID: uC-osflM202014b01b1
ttttcatctctctcagctctcacagctcactgcatcaatggccgcggccaccatggcgctctcctccccggtgatggcccgcgcggcgccgtcgacctcctccgcgctcttcggcgaggcgcggatcaccatgcgcaagaccgccgcgaagcccaagccggcggcgtcgtcggggagcccgtggtacggcgccgaccgcgtcctctacctcggcccgctctccggcgagccgccgagctacctcaccggcgagttcccgggcgactacgggtgggacaccgcggggctctccgccgacccggagacgttcgccaagaaccgggagctggaggtgatccactcccggtgggcgatgctgggcgcgctcggctgcgtcttcccggagctcctcgcccggaacggcgtcaagttcggcgaggccgtgtggttcaaggcgggctcgcagatcttcagcgagggcgggctcgactacctcggcaacccgagcctgat

SEQ ID NO: 20747 - DNA, 487 bp, Oryza sativa
  Clone ID: uC-osflM202014b02b1
ttttaggaggaggagcggtgggattggaggagaggagcgacgcggcggaggactcgctggtgtcggtgctcgccgtgtacgacggcttctgcaatctcaagcagattaatttggagctcaaggtctgtggaggatcatctatccggaaaactctggtgaaagaagcggcttcctacggcgctgcgcatctcatccttggtgttgcgaagaattctctatcttttagtagatcctcctccatttctgttgccaagtactgtgcaaagagggttcctactggatgctcggttcttgcagtgaacaatggcaagattctttttcataaagatgcagtacagcaagaaccataccatagtgctagcacaatgacagagacaccaaggaggagttaccggaagctcctgacttctgtgattggggagaaacttcgggatgagtgtgaacaagataacaggtccattttccgggctgtcaccatgccaccaag

SEQ ID NO: 20748 - DNA, 486 bp, Oryza sativa
  Clone ID: uC-osflM202014b05b1
ttttacgcgtggggccgttttggtcggggttttagcgagcgcgtgggaggccggaggcgacgacgacgaccgcgccgccgtcggagaagaaggccgcggaagcaccagtaccagcacccgtatatgtcttctagccccttctccgatctggtggtagtcgtgctcctcgtctgcgccgtcgtcgccgcagccgtcctcctccccctcgtctgcgcccgccgatctatgcaccagaggctccacggctggaacaagtccacgtcgatgctcagggacgggttcggggtcaagtattccgggttcctccacataggccgtgtggtttctgtcgaggagattgacggattcgatcgattcgtgttcgtcttcgtcaaatttttgcacaagagaaaaaaaaagtttccccctttagagttttttcccttagttttgtcagttttggtgaggaattttagagtttcttttccgcaagagttagatgaagag

SEQ ID NO: 20749 - DNA, 257 bp, Oryza sativa
  Clone ID: uC-osflM202014b06b1
ttgtcggggttttagcgagcgcgtgggaggccggaggcgacgacgacgaccgcgccgccgtcggagaagaaggccgcggaagcaccagtaccagcacccgtatatgtcttctagccccttctccgatctggtggtagtcgtgctcctcgtctgcgccgtcgtcgccgcagccgtcctcctccccctcgtctgcgcccgccgatctatgcaccagaggctccacggttggaacaagtccacgtcgattctcagggacg

SEQ ID NO: 20750 - DNA, 492 bp, Oryza sativa
  Clone ID: uC-osflM202014b07b1
ttgcttctctccacgactccacctgaagcgcctctcgccgccgccggagaagacgcgcagcggcagcagcggcggaagcggcggggagccatggcgccggagccggaagacgacatcatgaacgagaagaacccccgcccgctcgacgaggacgacatcgctctcctcaagacctacgggcttgggccatactccacaagcattaagaaggtggagaaagaaataaaagaaatggctaagaagatcaatgacctttgtgggattaaggagtctgacactgggctggcaccacccagccaatgggatctagtatcggataagcagatgatgcaagaagagcaaccgctgcaagtggctaggtgtaccaagattataagtcctaatactgatgatgctaaatatgtgattaatgtaaaacaaattgcaaagtttgtggttggcctaggggataaagtttctccaactgacattgaggaagggatgagagtgggt

SEQ ID NO: 20751 - DNA, 488 bp, Oryza sativa
  Clone ID: uC-osflM202014b08b1
tttcggacgcgtgggtgagtgtctacttcccgtacaccgaggctgacaagaggctcactgctttccaccctgaaattgaggagcttctctacagtgaagtcgagaacgatgaacacaagtttgtattgaaggacaagaacaagccaatcatcttctccatggctcgtcttgaccgagtgaagaacatgacaggtctggttgagatgtatggtaagaatgcacatctcagggatttggcaaaccttgtgattgtttgtggtgaccacggcaatcagtccaaggacagggaggagcaggctgagttcaagaagatgtacggtctcattgaccagtacaagttgaaggggcatatccgctggatctcagctcagatgaaccgtgttcgtaacggggagttgtaccgatacatttgtgacaccaagggagtctttgtccagcctgcattctatgaagcgtttggtctgactgtcatcgaagccatgacatgt

SEQ ID NO: 20752 - DNA, 227 bp, Oryza sativa
  Clone ID: uC-osflM202014b12b1
tttcaagcgtaagcaaggcagaggtgagggaaagaacctctctgcagtgctgctgctgctagcttgcagaaaaaaaaaactctcatcttttgcaggaagagacatcactgtttctgcattcgcgtgcatttggattaagctttgcttatccctttttagtggagattgttgagtatatcaggtctatatattggcagctctggttggagatagacactcacactgag

SEQ ID NO: 20753 - DNA, 441 bp, Oryza sativa
  Clone ID: uC-osflM202014c01b1
tcttgtgcagtagtgtgcgtgtgtgcatttgctggtgcagtgccgagacaaattctccatcgtgtgtgtgtgatcttgtgttctagctaacagtggtatcagagtgtgtgatcttgtgatcttttaagtttggggggagtggcaccaacttaaaaggggaggggtccctcacctcatgagctagcttttggggtgtagaaagactttctcccggttaggccaacgtttcccggttttgggccatcaagtggtatcagagctgggcccacaatctctctaagtgccgtgcacactcgtgtggtgtaagcccgaagcccagtggaccgcgggtgtgaggcccgtatgtgcctatgtgttgggccggtcagtggaccgcgggtgtgaggcctgtatgtgctcgtgtgtggagccccgtcagggctaaggggcaccaatgtgtga

SEQ ID NO: 20754 - DNA, 491 bp, Oryza sativa
  Clone ID: uC-osflM202014c02b1
tgtggagatcggtgaccttttctgtgaacctttcccaggaacctcgtggttaatgccttcggatttccctctaaactatggtgaatttactcagagtagcccagagagctatggaaacatgctgcagaataaggttgtcggtgacaatacagatcagtctctggctggttctaggcctccctacgtgttcctctaccttgatggtaactatgaattccatgacaagcttttcttctgcgaagacgaccaacagttcctgcaagatgtgccgtggttgatcatgagaaccgacatgtactttataccatcactatttcttattccaagttaccaagatgagctcagcaggctatttcctgagaaagatgctgtttttcatcacttggcacgctatcttttccatccgacgaatagcatatggtattcagttaaagggtactacaggtcctaccttgccaaagctaataaaactgtgggaattcagatcagga

SEQ ID NO: 20755 - DNA, 458 bp, Oryza sativa
  Clone ID: uC-osflM202014c03b1
ttttggcctcgtctcctcctcctccgcctgcggctccgccttgtagggtttcgccgccgccgctgccgccggcgatggagccaccggcgggaggctcctccgatcatcgccggggtgccgggaccggcgcgggcgccggtggggccgccgcgccgtcgggcctccgccgctacggcttcagattctccgcctccagcctcctgcaggccccgctcgccgcgctgctcgagtactccggcgtcgtcccctccggccccggcgccccgcaggcggggccgccctcggcgctgtcgtcctcgccgtcttcttcgtcgtagtcgtcggaggccgatgggctgctctccgcgcccgcggctggggacggggaggtctcgatccggatccagggcggtcccggggaggccgacgcggcgggcgtcctggaggcggacttgccgggggaggactcgatcgaggcg

SEQ ID NO: 20756 - DNA, 503 bp, Oryza sativa
  Clone ID: uC-osflM202014c04b1
tctgcagcagcagcagctgagcttgaagcagcagagcgaggtagacatggccgccgccaccatggccctctcgtccccggcgctggccggcaaggccgccgcgaaggtgttcggcgaggggcgcatcaccatgcgcaagtcggcggcgaagcccaagcccgccgcgtcggggagcccgtggtacggcgccgaccgcgtgctctacctcggcccgctctccggcgagccgccgagctacctgaccggcgagttccccggcgactacgggtgggacaccgcggggctctccgccgacccggagacgttcgccaagaaccgggagctggagggtgatccactccaggtgggcgatgctcggcgcgctgggctgcgtgttcccggagctcctcgcccgcaacggcgtcaagttcggcgaggcggttgtggttcaaggcggggtcgcagatcttcagcgagggcgggctcgactacctcggcaacccgagcctgatccacgcgcagag

SEQ ID NO: 20757 - DNA, 496 bp, Oryza sativa
  Clone ID: uC-osflM202014c08b1
ttttccccctcccgtttcaccctcaccacaacagcggcagcaaaagcgagcggcagcgagaggccggccacgcacgcacgcacgtcgaagcgcgccgcccgccgccgatggggcccctcctccggtcgtcgccgccaccgcgccacctgcgcctcctcctccgccgcctcctctccaccgccgccggtcggccctcccgcctcctcccgctccccgcctcctcctccgcccgcctcctcgtcaggcccagggttgcggttgcggctgctgcggcgggtgctcctctgcggcggaatggggtcgcggtgagggctttcatggcatccacggcggcttccgaggcgatgcaggagaagcgggtggccggggagtacaccgctgcgaacgtccaggtcttagaagcattggatggagttcgcacaaggcctggtatgtacattggaagcacaggatcacgagggttgcatcatctggtttatgaaatattggataatgc

SEQ ID NO: 20758 - DNA, 379 bp, Oryza sativa
  Clone ID: uC-osflM202014c11b1
ttgcgaagttcaatccatccccaaatgtcccggccaacccaacaccaccccaccgccgccgccaccgccgtcatcctcctcttacttgcagtatccccggcgccgtccggcgcggatccggacgacgagcggtgcctgtcgagcctccagcaatctttgtccggcctccgcaactggagcaaggcctccttctccgccccctgcgagggcttcatctcccacctccagggcgtcacctgcaacaacggccgtgtctacaagctctccctcccgggcctctccctcgccggcaccatcccgccggacctctccaactgcaccaacctccagtcgctcgacctctcctccaacgcgctctccggtgccatccccccggagc

SEQ ID NO: 20759 - DNA, 464 bp, Oryza sativa
  Clone ID: uC-osflM202014d02b1
ccatgtgattttgctaaaattatgcttctttacttggatattttaatctttgcagttttggtgtgttttatgaagcaaggtcgaatacaagaatcaataggatgaaaattatcaatgcagtatccaaatctgttcctcaacctcacaaggttgaccttaacagtccaaacaggattattattgtgcagattgagaagaacctattggaacaggtgtttattcaaatgaatacaacatgtttggaatttagagtttgatttctggcaaacaatttatatagctccaaggcctgatccatgactcaagcacatgggcggttaaagctttgtaacttcagaatttaatgctattatatgtatggttggagtgatcgagaggtacacagtgctcgcaaagttcaatctaaagcagctgacctcaccaccgcagaagcagctaatgggccaacttgaattagattcggc

SEQ ID NO: 20760 - DNA, 499 bp, Oryza sativa
  Clone ID: uC-osflM202014d03b1
ttatcgcgttgaagatttcccagcttccattggcctctggaaaacaaaagaggattgccgtgattactcaaggtgctgatccagtagttgtcgctgaggatggacaggtgaaaacattccctgtgatcctactgccaaaggagaagcttgttgacaccaatggcgctggtgatgcctttgttggaggcttcctctcacaattggttcaacaaaagagcattgaggactctgtgaaggctggttgctatgccgcaaatgttatcatccagcgttctggctgcacttaccctgagaagcctgatttcaactagggctaacccaaccacatattgaggaacaattattcgcacatccaacctactagtggtttggtgtgttctacctgtaccatctcgaggctttccatatgatccggccaatatttttttgccgtgatttttgtttcactgctgcaaaccttactttattctcggtataaggcacaattgccaatcggtgt

SEQ ID NO: 20761 - DNA, 499 bp, Oryza sativa
  Clone ID: uC-osflM202014d04b1
tttctaatctcaagtctctgtctcgtcgtcctcgcatctccactcgccatgggcaagattaagatcggaatcaacggtttcggaaggatcgggaggctcgtggccagggtggccctccagagcgaggatgtcgagctcgtcgccgtcaacgaccccttcatcaccaccgactacatgacctacatgttcaagtacgataccgtgcacggccaatggaagcacagcgacatcaagatcaaggactccaagactctgctcttgggcgagaagccggtcaccgttttcggcatcaggaaccctgacgagattccgtgggctgaggctggtgctgagtatgtcgtggagtccaccggtgtcttcactgacaaggagaaggctgctgctcacttgaagggtggtgccaagaaggttgtcatctcagccccgagcaaagatgctccgatgtttgtctgcggtgtcaacgaggacaagtacacttcagatattgatattgtctcaa

SEQ ID NO: 20762 - DNA, 306 bp, Oryza sativa
  Clone ID: uC-osflM202014d05b1
ttattgtgcactcaggtggcacggcaaaggtggactgggcgcaaggttttgtcggtggaaataacggcgcagaatgtttctatggaagcttaactttgtgcttaggtcagctttgtcgatttgtagtcgtctgtatgactgtaattcaattggaatggcgaaatgcaatgaaatgtatcggttagatcgtgtccttttgcttttgtgttcggtttttctattttttctattttctttcttttttttattgctgtggcagagttgtaaactattcgcgatgattttgttgcagatatattttttccc

SEQ ID NO: 20763 - DNA, 500 bp, Oryza sativa
  Clone ID: uC-osflM202014d08b1
tctatctgtctcatcagatcagcgtgaagcagcggctagaacacaaaaatggcggacgagaagctcgccaagctgcgtgaagccgtcgccggcctctcgcagatcagtgacaacgagaagtccgggttcatcagcctcgtcgcccgctacctcagtggcgaggaggagcatgtggaatgggcaaagatccacacgccgacggacgaggtggtggtgccgtacgacaccctggcggcgccgccggaggacttggaggagaccaagaagctgctcaacaagctcgccgtgctcaagctcaacggcggcctcggcaccaccatgggatgcaccggaccaaaatcggtcatcgaagtgcgcaacggattcacattcctcgacttgattgtgatccagatcgagtccctcaacaagaagtatggcagcaatgtcccactgcttctgatgaactcattcaacacccatgaagacaccttgaagattgttgagaaatacaccaattc

SEQ ID NO: 20764 - DNA, 498 bp, Oryza sativa
  Clone ID: uC-osflM202014d09b1
ttggtgcttcagctcaagagggcatataagcgaaatgacaagccacaattgcttgcagcaaccaaattcatagcacacttggttaaccaggttgttgctcatgagctcgtggcgctggagcttcttaccgtgctgcttgagaacccaactgatgatagtgttgaggtagcagtggggtttgttaaagagtgtggggcaatgctacaggacttgtctccacaagggcttcatgctattttcgaaagatttcgaggtattcttcatgaaggtgaaatagacaagcgtgtgcaatttttaattgaaggactgtttgcaattagaaaggctaaatttcagggattccctgctatccgtccagagttggatcttgtggagcaggaagaccaatttactcatgagatatcccttgaagatgagctagacccagagactaatctaaatgttttcagggcaaatcctaattttgctgaagatgagaaggcgtatgagaacctaaaa

SEQ ID NO: 20765 - DNA, 215 bp, Oryza sativa
  Clone ID: uC-osflM202014d11b1
ttcttcgacgatgtatttgtccttagtcattccgctggatctctgataacttggtactaaagtgcgaagacttctttagggcactggattgatttatgcggaaatgtagaatccgaactctgtactcccgccaacctctagaggaaaacttgatttcggcatattgcttgttcacattactccttgctgagtagattgcatatgaattatcgtgt

SEQ ID NO: 20766 - DNA, 432 bp, Oryza sativa
  Clone ID: uC-osflM202014d12b1
gcctagggtgggctcaagcacgcggccatggcgatctcgcgccgcctcctcctctccctcttcctcctccgcgcattctcctcgcttcccgctcaggccgcagcgagaggcgcctcccatccctcaggtaccagcggaaattatgggtcatttttgcgcaacctgcttcaggataatcccatgataacggaggaattggtccgtggatatatgagcaactcggaacttgagattgctgcgcatgccattggaagccgctatcctaatatctccaggatatacagcattggaaagagtgtgaatggcgtcacattgtgggtgattgaaatatcagacaagcctgggcaaaaggaagctgaaccagcattcaagtatgttggtaatgtccatggtgatgaacctgctggaagggaggctcttataaagcttgca

SEQ ID NO: 20767 - DNA, 70 bp, Oryza sativa
  Clone ID: uC-osflM202014e02b1
tctttttgtaccagtatctaattgtttaattaaaagccttaccaaatgttcatttggtagtgtttttgag

SEQ ID NO: 20768 - DNA, 481 bp, Oryza sativa
  Clone ID: uC-osflM202014e03b1
tctaatcccctcctctcccccaattccgccgccgccccctgctcggatcctcccccgccgccgccggcgagaagggcccgtaggcgcggcctcgtctccttgctgatcccgactccgcgcgcacggccggtgactcgactgcctcgtctcggttcgaatcgagctgggagatattgagcacttggactgaagaactcaattttggagcacttggattagcatcagttttctacctctgagcattggtcaccctgctggactcactggctgttaaaaacggctctggtttaaggagttgtttctcttgtggtcattctttggattatgggagctctctgttcatggctgcaagctgattattccgaccaccatgggcatcatgcttcaccggcattagggggatgcatgtgcctcagatgttttactcagcagctcatcaatgcgtacactgttttattccgagctgggacagtgcacgcag

SEQ ID NO: 20769 - DNA, 485 bp, Oryza sativa
  Clone ID: uC-osflM202014e04b1
tggccgccctttttttttttttttttttttttttttacaagagtaaaaaaaatatagtgcccaatcaattagcgcgtgcccaattgccatatgctaatctcttatcttacatctgaacatacggcttatcattgtcgccgtcgaacaccaagaggccgctaaacaaagaagtgtatacgaacagttctaacacgatcgagtttgggtcaacaccaaaaaggaaaattaagcatcatacccattgtgttcacaacgttgacacatagcaaggctccctgctcaccatcccttcaaattaatttcaccattttaggtgcatgtaataccatgccatgaaacagcagcaagcaattcctctggagtgtgtgtgtgtgttgtgtgtgcaacctgtcgtgacaaatgtttttcgatgccaaaactgatcgatgatgaagatcatgtttttgttttgttgtcaagcttctctcctatatcacaacgtcccg

SEQ ID NO: 20770 - DNA, 449 bp, Oryza sativa
  Clone ID: uC-osflM202014e05b1
tttctgcttcggcagctgctgctggtgtggtgatacactcgcctagctttggccaccgctcatctctgctctgctttttctcctctgctccactgatcatccaattcttctcctcctgattggccattctgattggctggtgacatgtcgaagaaaattgtggtgaagctggacctgcatgacaacaaggacaagcagaaggccatgaaggccgtctcctcggttgtcggaatcgacgccatttcgatggacatggcgtcgcggaagatgacggtgatcggcacggcggatccggtggacgtggtgagcaagctccgcaaggcgtcgtgggcggcctacatcgagtcggtcggaccggccaaggagccggagaagaaggaggagaagaaggaggaggccaagaagacctcccgcggcggcggcggcgacggcaagaaggaaggaggtga

SEQ ID NO: 20771 - DNA, 502 bp, Oryza sativa
  Clone ID: uC-osflM202014e07b1
tggccgcttctcctcgtctcgctcctgctcatcggcttcgtcagcgccagagccatcacaccctcagctgaagcggcggcggtgttcccgaaggaagccctgccgaccaactccggctacctccccatcacgacaaccaacgcctcgctcttcttcgcctactacgaggccacgcacccgctcacgccgccggcctccacgccgctcctcctctggctccagggcggccccggctgctccggcctcgccggcaatttcttcgagctcggcccctacttcgtcaaccgcgacgcgctctccctctcgcccaaccccttctcgtggaatcgccggtttggtctcctcttcatcgacaacccgctcggcacgggcttcagcgccgcgccgtcccccgccgccatccccaccaaccagtccgtcgtcgccgcgcacctcttcgccgcgctgcagtcgttcttcgcgctccagccgggctcccgctcccgccccttcttcctcaccg

SEQ ID NO: 20772 - DNA, 499 bp, Oryza sativa
  Clone ID: uC-osflM202014e08b1
tctgcgacgacgaccggtcgcggcggcgatgggctcaggagcgtccggtcgcggcggtgatgggctcaggagcgtccggtcagggagacggcggtgggttcgggagaagtggcagcggcaggcgcggcggcgagcagctcggcgaacggtgacggccttctggcgcgtgtgggctggcatggctgccggtgagtgggctcggacggcgacggggacgagagtgggcggacccgacgacggcgacaacgacgaccacgaggagggcggcggtggcggcttctcgggttagggtttcggattttttggattttatttttttctcagttttttatttttgcgtgcgggcgacataagcactcacacgcgataaatgtatcttcctgtgcaggctagttaagtggcccgcatgggataatagatcttcccatgtgggctagttaagtggcccacatgcgaaatgcaaagacttattttcgcgtgcagttgggtcgcccgcatg

SEQ ID NO: 20773 - DNA, 496 bp, Oryza sativa
  Clone ID: uC-osflM202014e10b1
gttgcccgtcctccggccgccgctccccacccgccgccgccgccgccgcccgcagaagccgcagatggcgtcgtcggcgtccaccctcgagatcgaggcccgcgacgtggtgaagatagtgctgcagttctgcaaggagaactcgctgcagcagacgttccagacgctgcagaacgagtgccaggtctcgctcaacaccgtcgacagcatcgacaccttcatcgccgacatcaatgccgggcgctgggacgctgtgctgccccaggttgcgcagctcaagctgccgcgcaagaagctcgaggacctgtacgagcagattgtgctcgagatggctgagctccgtgagctggacacggtgcgcgccatcctccgccagacccaggtcatgggcgtcatgaagcaggagcagcccgagcggtacctcaggcttgagcatctccttgtccggacatactttgaccccatgaggcctaccaagaatccaccaaggagaaac

SEQ ID NO: 20774 - DNA, 471 bp, Oryza sativa
  Clone ID: uC-osflM202014e11b1
tagaagaagaagaagagcaacaggaagaagcatgtccgaagaggaagaagaagaaagcaaggagaagaagatgcaggactggggtccggtgctgatatcttgggtgctgttcatcctgctgtcgccggggcttctgttccagataccaggcaagtgcaggttgatcgagttcggcaagttccagaccagcgtcgtctccatcctcgtccacaccatcctcttcttcgccctcgacgccatcttcctcgtcgccatcggcgtccagatcaaccttggctcctctccctgattctctctctttgtttcttctaggtaatctcaattgcatatgtatagcagtatatatgcacctccatccatcatctctactcaccttagctcgttaatttgtactactatttgtgtgttccttccaattcttggcataatattgtgactcaaaggaattgatttcagagttactcattactt

SEQ ID NO: 20775 - DNA, 498 bp, Oryza sativa
  Clone ID: uC-osflM202014e12b1
ttcttgcgaatccagcagcagaagcagcagcagcagctcagccgccgccgatggcgtccacgatcatggccccaacctcccgcgtcctcgccgccaagacccccttcctcggccatccccgcccctccaatgcccccgtccgcgacatcgccgccgccgccaccggccgcatcaccatgagcaaggagctgtggtacgggccggatagggtgaagtacctggggccattctcggcgcagacgccgtcgtacctgaggggcgagttcccgggcgactacgggtgggacacggcggggctctccgcggacccggaggcgttcgcgaggaacagggcgctggaggtgatccacggccggtgggcgatgctcggcgcgctgggctgcatcacgccggaggtgctcgagaagtgggtgcgcgtcgacttcaaggagcccgtgtggttcatggccggcgcccaaaacttttccgacggcggccttgactacctgggaaccccca

SEQ ID NO: 20776 - DNA, 478 bp, Oryza sativa
  Clone ID: uC-osflM202014f01b1
tttttccgatccagctgctggggatgagtacttagttagttcggtgcatagctactactgcatgatgtacttatgctaggtagctaaatacatccaataagctagatgctggttgcatatatcatatctccatcggttcatgaagggagagatggctagagtatcaacaagttaatgagcatggtggggcagcaggagcaggagggggggttcgacgcggcggtgctgagcgggcagacggagatcccgtcgcagttcatatggccggcggaggagagccccgggtcggtggcggtggaggagctggaggtggcgctgatcgacgtgggggcgggggcggagaggtcgtcggtggtccggcaggtgggggaggcgtgcgagaggcacggcttcttcctggtggttaaccacggcatcgaggcggcgctgctggaggaggcgcaccggtgcatggacgcctttttacgctgccgctggg

SEQ ID NO: 20777 - DNA, 501 bp, Oryza sativa
  unsure (1)..(501): unsure at all n locations
  Clone ID: uC-osflM202014f02b1
tttgaacggtgcaacgcgtgcttaccaacacgtaaggtgcatgccatggcaccattcagggcgtgcgcctcgccaccggtactcacgctggccctgctcgtgttgggcggtgccctttttgacacctccatgctcccggcgcgtgcgacggcggtcagttgctagcacgtaaggaacatggtgatgatggacaggctccaggcttggcagggagctcacaaccggtcgtacccgagcgcagaagaggcgctgcatcgatggacgtgtaccgacagaccgcggagttcatcgacgccgtcaacctgcgcggcgacctcacttaccagctcgccgagaacgagttcgcagacctcaccgaggaggagttcctggccacgtacaccgggtactaccccggagatggtcccngggacgactccgttatcacgacgggtgccggagacgtcgacgccagcttttcctaccgcgtggacgttccggccagtgtcgactggagggccc

SEQ ID NO: 20778 - DNA, 499 bp, Oryza sativa
  Clone ID: uC-osflM202014f03b1
tgtttggaatggcagcaaacatccctctcggggtgtggcgtgagcacaccaagaaattctccccgcagtggtttgcagctgtccatgccgctgttccattcatcggaatgctgaggaaatctgtgaacatgcccaagactgccatggcattcaccatagcagcctccattattggccagacaatcgggtcgagggccgagcgcattcgtctgaaggcattggctgcaaagggcgacgccgattccaccaccgtggctgacatgtatccaaacaagtctggcaattgcagtgacactgagggcaaggcatgggatccgctcgcgatgaagatggctggacgggcttctggtggcgttgctgcaccaacaccaagcatgtgtttctgattgttcattgcttttgaaaatttgtgtctataccagtatctctgtatgtttgagaagtgatattgagtctatttttatctcgcgatgtaattgcctttccttgcccctcagaa

SEQ ID NO: 20779 - DNA, 476 bp, Oryza sativa
  unsure (1)..(476): unsure at all n locations
  Clone ID: uC-osflM202014f04b1
tttcagcaactagtaactaataaagtgatgacgatggatcgtcccaacgtcgccgtggccgcggtggggctgctagtggcggcggtggcggcgacgctgccggcgccgtcgtgggggcagcagcagccagccaacaagctcatcaccagcacctccggctccggcaaagggttgtccaagtggctggcgatgaaccaggaggagtacgtggagaagaaggcgctgcacaccatggccaccgcggaggagctcggcgggaagaagctggacgcgaacctgacggcggcggaggaggccaaggtgacgtggngtgatcgaccccaaggggacgccgggcgacaccaccttcaccaccatcacggcggcgctggagaaggtccccgaggggaacaagaagcgcgtcatcctcgacctcaagcccggcgccgagttccgggagaagatcttcctcaacctcagcaagcccttcatcacct

SEQ ID NO: 20780 - DNA, 395 bp, Oryza sativa
  Clone ID: uC-osflM202014f05b1
ttttcttcaccgtcaaggatgcaagcggaaaagacgtgaacctgagcacctacaaggggaaggttctcctcatcgttaacgtcgcatcccaatgtggcttaactaactccaactacactgagctgagccagctgtatgagaagtacaaggtccaaggctttgagatattggctttcccgtgcaatcagtttggagggcaggaacccggctccaatgaggagattgtccagtttgcttgcactcgcttcaaggctgagtatcccatttttgacaaggttgatgtcaacggtaacaatgctgcacccctgtacaagtatctgaagtctaacaaaggtgggcttttcggtgatagcatcaagtggaacttctccaaattcttggttgcaaggaggcgc

SEQ ID NO: 20781 - DNA, 480 bp, Oryza sativa
  Clone ID: uC-osflM202014f07b1
tttcgatccagctgctggggatgagtacttagttagctcggagctagctactaatggatgatatacttatgctagttagttaaatacagttattagttagttgtaggttgcatctatcatatctccatcggttaattaattgattgatagctagattatcaacaattaatgagcatggtggtgcagcaggagcaggaggtggtgttcgacgcggcggtgctgagcgggcagacggagatcccgtcgcagttcatatggccggcggaggagagccccgggtcggtggcggtggaggagctggaggtggcgctgatcgacgtgggggcgggggcggagaggtcgtcggtggtccggcaggtgggggaggcgtgcgagaggcacggcttcttcctggtggttaaccacggcatctaggcggcgctgctggaggaggcgcaccggtgcatggacgcctttttacgctgccgctgggggagaagc

SEQ ID NO: 20782 - DNA, 464 bp, Oryza sativa
  Clone ID: uC-osflM202014f08b1
tttgaacggtggaacgcgtacttacccacaagttaggtgcatgccatggcaccattcatggcgtgcgcctcgccaccggtactcacgctggccctgctcgcgtcgtgcggtgcccttctcgccacctccatgctcccggcgcgtgcgacggcgggcagttgcttggacgtcggcgacatggtgatgatggacaggttccgcgcttggcagggagctcacaaccggtcgtacccgagcgcagaagaggcgctgcagcggttcgatgtgtaccgccgcaacgcggagttcatcgacgccgtcaacctgcgcggcgacctcacttaccagctcgccgagaacgagttcgcagacctcaccgaggaggagttcctggccacgtacaccgggtgctacgccggcgatggccccgtggacgactccgttatcacgacgggtgccggagacgtcgacgccagcttcttcta

SEQ ID NO: 20783 - DNA, 482 bp, Oryza sativa
  unsure (1)..(482): unsure at all n locations
  Clone ID: uC-osflM202014f09b1
ttgagctcacggccggtcactactcaccatcgagaggagagcaaaaataattgagtgatagctgttagctaagctacctagcatcatgcagggaggcgccaataataagggcttggtatgcttgatcgccgccgccgccgtggtgttggtattcgccggcagcagcggcattgcggcggcgcaggcggccgggctgaagaaggggttctacaagaagagctgccccaaggcggaggagatcgcgcagcgggtggtgtggaaccgcgtcgccggcaacccggagctcgccgccaagttcctccgcatgttcttccacgactgcttcgtcagggggtgtgacgcgtcggtgcttctggactcggctagcaacacggcggagaagaacgcggcgccgaacctgtcgctggcggngttcgaggtgatcgaggaggtgaaggcggcggtggagcggcagtgcgccggggtggtgtcgtgcgcggaca

SEQ ID NO: 20784 - DNA, 485 bp, Oryza sativa
  Clone ID: uC-osflM202014f10b1
tgttttccgctcgctcgtcgactcctcgtctccgcgagagagagaaagagagtgaggggagggagcggaggtaaacccaaaaccctagcccgcgtcgtcgtcgtcgtcgtcgccggcggcgagatgtcggcggcggtgaacgaggagacctcggtctacgtcggcggcctgccgtacgaggccaacgaggacatgctccgcgacgccttcggccgattcggcaccatcgtctccgtcaaggtgataaatgatcagagagtcagaggcaagtgttacggttttgttactttcactcatgctgatgctgcacagcatgctatctcaggcatggacggcaagagaataaatagacgtgttgttagagtgaatgaagtgcgtactagaggtgcccgagaattcgggcgtgaaggttttcggcgagaacctggaagcgcaagggatgcttattgcgacagaagggatagagaaaggagctatgaccgtga

SEQ ID NO: 20785 - DNA, 302 bp, Oryza sativa
  Clone ID: uC-osflM202014f11b1
tttcgacctcgacgagcccgtcaggctccccggctgcgtgcccatcccggggaaggacatcctcatgccgctccaggacaagtccagggcgtgctacgggtggatggtgcaccacggcacgcgctaccgcgacgccgacgccatcctcgtcaactcgttcgacgccgtcgagcccgacgccgccagggtgctccgccacccgaagcccggcgtcccgccggtgttccccatcggcccgctgatacagacgcactgcgccggcgacgacgacgccgcggcgccttcctcgtcgcgcgccgtgt

SEQ ID NO: 20786 - DNA, 322 bp, Oryza sativa
  Clone ID: uC-osflM202014f12b1
atcgaaatttcccctccctcccccacgagctggcgagcgggcgggctgctcgccgtcgcaccacccacctccgtcgtttcaaatttcaaatcctccccgacgcgcccccacacccccccgtgcccccgatctatgtaatccaatccatcgccgtcccgatcccccatgtctcttcttctgtgactgtgagtaggcgcgagcggtgaggcgtcttcctcgagcacatggagggcggcggccgaggcggtacggacatgaacgccgtgccggagggcgctcgtgcagcacgtcctgtcgatgcttatcaacgtcccgtgacatg

SEQ ID NO: 20787 - DNA, 515 bp, Oryza sativa
  Clone ID: uC-osflM202014g03b1
tttttgcatctattcagttgcagattgagagccaaagacattatattgattctatcaggagggttgtgctagcgaattcttgttagcaacaaattgacatattgctcggcacatccccaccgagaataccaagatgacgttctctggtacacaggacaagtgcaatgcttgtgacaagaccgtgcatttcattgatctccttaccgcggacagtattccctaccacaagtcttgcttcagatgcagccactgcaaaggcacactttcgatgtgcagctattcgtccatggatggggttctttactgcaagacccattttgagcagctattcaaggaaacaggcacctttaagaagaacttcccctcaggtacaaaggcaaacagtgaacaggctaagattcccagcaagctgtcctctgtgtttctgggaacccaggacaagtgtactgcctgcaagaagactgtgtatccattggagaagatgaccatggagggtgagtgttaccacaggacct

SEQ ID NO: 20788 - DNA, 480 bp, Oryza sativa
  Clone ID: uC-osflM202014g04b1
ttttataggcgctaggcgccataagcatcgccgcgatgctgtcgttcgtggcgtcgttcgcctcggggctgggccccgtcgcgtgggtgtacacgtcggagatctacccggtgcggctgcgtgcgcaggcggcggccatcgggacggggctgaaccggctgatgagcggtgccaccaccatgtccttcctctcgctctccaacgccatcaccatcgccgggagcttctacctgtacgcgtccatcgccgccgcagggtgggtgttcatgtacttcttcctgccggagaccaagggcaagagcctggaggacaccgtgaagctcttcggcaaggacacagacgacgacgatgacgtcgacactagccgccatgagcgcaagaggtccactgagctgagcgctcagcactgaacagaacacgtccgttccgagtccgagtgtggtcgaagcctattcgttctccgatagaaaaaagcttcga

SEQ ID NO: 20789 - DNA, 487 bp, Oryza sativa
  Clone ID: uC-osflM202014g05b1
tgttaaagcgagagagatctctcccgagctcgatccggtccaccgcgacacgaagacgaccatggcgatggctcgctcccagcttgccgccgtgttcctcgccgtcctcgtctcggtggcgccgctcgccggcgcggcggacaacctccaggacgcgtgcaaccggacgctgttccccaaggtgtgcatccaggcgctgacgacgaacccggagagccggacggcgaacgcgcggcggctggcggagctgtcggtgtacgtggcggcggaggtgggcacggcggtggcggcgttcgcgcaccacgagctgaacggcgtgaaggaggacgccctgttcaagtgcgtggacagctgctccgacgacatcgagagggcggtggcgcacctcagcgcgctcacccgcgagctcaccgacgccaagttcctcgaggtcaaggcctggctctccgccacgctcggcggctcctcacctgcgaggacacctgca

SEQ ID NO: 20790 - DNA, 280 bp, Oryza sativa
  Clone ID: uC-osflM202014g07b1
tttaaatagtaattgcggcacccagcgggtaaattcaactccaagatgcaattttagtcccaataatatgcatattgtttccatcccaggtttcttctctgcaagtgtatttttatactagctttcagtgatttgtgagtatatggtaaacgggagaagatcaaagttggaggacagtgttgtagctaaaggagcatatagtgaggtaatttggtggtgtattaaataatttaactcggccattttctcatgtataaaaattattggtgtgattagagtg

SEQ ID NO: 20791 - DNA, 460 bp, Oryza sativa
  Clone ID: uC-osflM202014g08b1
tttcaaataaacaaaccacttcaaattggtcggagaagaagagggcgttcgcgcatggggaaggcggcgagcatgagggtggcgctggtgtccgtggtgctcgtgggcctgatcctggtttccacggcccacgccgcgcggcccgagaagctgcccgccgtcgtctccccctccatcgcccccgccgtcgccgaggtcgtcgatgccgccatcaacgccgtcgacctcctggcagggtttcaaaaaccggcgggggcccggttaccgccacccggcggtacggcggttaccggcggtaaccgcgcaaaaccgcgacaaatttacaaatcgaaatttggatttcaaaattcgggcaaaccgggcggtttgacgcgggtaccacgcgggttggcgcgattaccggcgatgtgtaatgggtggacagtaccggcccggccatttttttttttttttcattttt

SEQ ID NO: 20792 - DNA, 461 bp, Oryza sativa
  Clone ID: uC-osflM202014g10b1
ttttggattctgaaaatagcttcttaagagtaaagattataaactttgggtctgatccagtgagcctcacgatctctgcaactgggcttcaggcccgtgttaacgcactgggatcaactgccactgttatcacatccagcaatgtgatggatgagaactcttttagtaacccgaataaggttgttcctgtcaaaagccagctttccaatgcagcagagcagatgcaagtcacgcttgctcctcactctttctcctcattcgatcttgcgcttgcccagtccaaactcgtggcagagatgtgaagcaggaacacaaggttagcgacagaaacacaagatatacacgagatgtgatatgcgaataccagaatgcagtccatatatgtgcatgtatcttgaagcactactgtatagtgtaatacacaggaaatgatgaataaattaactccagcttactttctt

SEQ ID NO: 20793 - DNA, 487 bp, Oryza sativa
  Clone ID: uC-osflM202014g11b1
ttcgaccaccgcgctcgtcccatcccatgcctgcggccgtgaccgcgaggttgtgaggagaagagagtcccaagagaggaggatcgatgcggcagcggcaggccggcgagcaggaggcggagctgttcgtccagtggaggccctgcgacaagaagcggtcctagtcgcccgccgccgctcgcccactcgccggcgtcgtcgatctgagagggacaggggaagaggaagaagcacaggaggaggaggatgagcgtgtcgggcgggaggacgcgggtgtggaggtacgagctcgggaggacgctcggcgagggcaccttcgccaaggtcaagttcgcccgcaacgcggactccggcgagaatgtcgccatcaagatcctcgacaaggacaaggtcctcaagcacaagatgatcgcccagataaagcgcgagatctccaccatgaagctcatcaggcaccccaacgtcattccgatgcatgaggtgatgg

SEQ ID NO: 20794 - DNA, 216 bp, Oryza sativa
  Clone ID: uC-osflM202014h02b1
ttgtaggtggacatatgccagaaacccaaacaaaaggtttatgggtctggggtactcccattgagttagatgtgaatggctccaaagcttctggcctttacctggacactgagggatttgagagcatcggaaaattcaaatgatatgatgataggatatttgctctggccactggtttaagttctatccttatctacaaggttccagagacgattt

SEQ ID NO: 20795 - DNA, 450 bp, Oryza sativa
  Clone ID: uC-osflM202014h03b1
tttttccaaaccctagtcccccattgatgacctccgccgccaccgccgtagatgcacaggctctccttcctccaggccaccatcattgacgcgccgctgctcctctcctccgcctccatggccaccgtgccggcgcggagggggatggcgtgctccgtggaggccttggcgaggcgcggtgggggcggcgagtcggagtcggagaatgaggaggaggaggagaagcgtaagggcagggcggcggagaggaggctcataggcggcgggagcgccgcggcggcggcggcggcggcggggagcggggagctcctcttcatccccggcgtgggggctcgcaaccagaggaagctcgtggacaacggattcgagggcgtcgcgcatcttaagcagctctattgggataagttctttggaaaatatagcgagaagatggttgagtttttacagagc

SEQ ID NO: 20796 - DNA, 494 bp, Oryza sativa
  Clone ID: uC-osflM202014h06b1
ttattatatgggttcatgacatcagaccaccagtacatatctcgaaagcatgaagaggataagatgattatatttgagaagggagatctggtatttgtgttcaacttccattggagtaacagctattttgactaccgtgttggttgtttaaagccagggaaatataaggtggtcttggactcagatgctggactctttggtggatttggcaggatccatcacactgcagagcacttcactgccgattgttcacatgacaacaggccctactcgttctcagtttattctcctagcagaacctgcgttgtctatgctccagcggaatgagaacaccaagaggcagcatgcaagtgtgtgcggctgctagtgcgaaggagcaagaaaaactacttgccagcaatctgtgaacggctttcctaggttctgcttcgatgaatgccggatagactagacagcttgcttttgtgctttgcgctcccaatttgtagttttag

SEQ ID NO: 20797 - DNA, 193 bp, Oryza sativa
  Clone ID: uC-osflM202014h09b1
tttctccgaatccgattccctttccattggcggcggcacctagccgtcgcacccagcggtggcgtcctcgtgccggaggagctgatatgtggtgccagtcgtgcaaggaggagtacgaggaggaggacgccgggacgtgcaaggagtgctactagcaggctagccatacggaggaggagtttaagcgcgagat

SEQ ID NO: 20798 - DNA, 497 bp, Oryza sativa
  Clone ID: uC-osflM202014h10b1
tctctccggtctaatccgattcaaacccgcgggttccaagcttgctctcctctcccccccaatccttccctcccgagtggcagggtgctcgacgggatggcgcacaaggaggccaatggcagcagcaacggggagcacaccacccgcccgccgccgacgccctcgccgctccggttctccaagttcttccaggcgaacctgaggatcctcgtcaccggcggagctggcttcatcggctcgcacctcgtcgacaagctcatggagaacgagaagcacgaggtcattgtcgcagacaactttttcactggttcaaaagacaacctgaagaagtggatcggacacccaagatttgagctaatccgtcatgatgtcacccagcccctgcttgtggaggttgaccaaatctatcaccttgcttgccctgcttcaccaatcttctacaagcacaaccctgtcaagaccatcaagacaaacgttatcggaaccctgaacatgct

SEQ ID NO: 20799 - DNA, 460 bp, Oryza sativa
  Clone ID: uC-osflM202014h11b1
actgctgagatggatgaagtgccgggtaatcaagaagatcccagacttggggcctatgccgacaagatcactgatgcgatgtttgcggaccatgtggagttggggtctcattatgcaggtgattcttcttcagaggcaggatgggctccaatgatcgcgagaatgcagtcgcagtcgcagctggggagtaaccagcttggtgtctcctttgagaatggcagtttgccagatgacccggcgtcgttggcatcggcattcaagaacatgagcttgggattcagggattttactgttggcactcctgctaatcctgtcagtgttgcacccctaggtggacattatcctgcaagtcatgtgatttcatctggtgagaccacaatgaactcatttcatcagcaggagtttgcttaagatggtttcaggcctttatctctgaatcccaatgttgctgaatacatga

SEQ ID NO: 20800 - DNA, 440 bp, Oryza sativa
  Clone ID: uC-osflM202014h12b1
tcgagcatattgagcttcgatcgcagccaggggaactctcgcgcgcgcagccggcaatggcgtcgctgtctgacccgaactcgccgccgcacgcacgtagacgaggactgccgcggtgcgctgcagctgctcagcgacggcacgggtgttcgagccgccgagccgccgccgccgatctacgtacgctcggacattgacgacggccgtgaccagtggaaggacgttgtgtacgacgccgcccacggcctcggcggtcggatgtacaggccggcggcgacggggggagcggaggacaagctgccggtggaggtgcacttccatggcggcgggtactgcatcggatactgcacctggcccaacttccacgccggatggcttcgggtcgacggcgagctacccgccgtggtgatctccttagactaccgcctagcgccggagca

SEQ ID NO: 20801 - DNA, 454 bp, Oryza sativa
  unsure (1)..(454): unsure at all n locations
  Clone ID: uC-osflM202015a01b1
gatttccttagctccaccacctcctcctccgccgccgccgccatgaagcgcaatccgcgcgtgacgactcccggcgcaagtgccggaaggcgcacttcacggcgccgtcgtccgtccgccgcgtcctcatgtccgccgcgctctccaccgagctccgccacaagtacaacgtccgctccatccccgtccgcaaggacgacgaggtgcaggtggtgagggggagctacaagggccgcgagggcaaggtggtgcaggtctaccgccgccggtgggtgatccatgtccagcgcatcaccagggagaaggtgaacgggtccaccgtcaacgtcgggatccacccatccaaggtcgtcgtcaccaaactcaagctcgacaaggaccgcaaggccatcctcgaccgcaaggccagcggtcgcgccgccgacaaggccaagggcangttcaccgncgagga

SEQ ID NO: 20802 - DNA, 145 bp, Oryza sativa
  Clone ID: uC-osflM202015a03b1
gggtggttcgccgcccacggcgtccgccgggttcgccggtgcattgttctccggcgccgactccgggtgatcggcgggatcatgcagcggatggggatccccgccgggatcgagctccagggcgggggagcgggggggttggggg

SEQ ID NO: 20803 - DNA, 229 bp, Oryza sativa
  Clone ID: uC-osflM202015a04b1
cgttcgtcattaacaagaattctttttttccttcccccaaatccttctcgagcaacagctagggggagtggttcgcttcgtaagaagccggctacctctgctcgatcccgcctttgcctgcggattcccaccctgattttcgccgcacgtttgtttagtttcttggggcaaattcgagacgaggggaggagagtttttttgggggggagctgatgaggccttgcaggcg

SEQ ID NO: 20804 - DNA, 510 bp, Oryza sativa
  Clone ID: uC-osflM202015a05b1
cccgacccggaactacagtcccgacccacgcgaccggtttttattttttatgctcgccacctgcacagccaaaagagagtgtcagagggccagagatacgaggaccagcatctagcaagccggcgggcgccatggtgctctcgcacgcgagctccggccggcacgacgccttgcgctgcaccttctggacgcgctacgcctgcgagacgctgccgcggttcaagatgccggagcagtcgatcccgagggaggcggcgtaccagatcatcaacgacgagctgatgctggacagtaacccgtggctgaacctggcgtccttcgtcaccacataaatagatccctactgcgacaagctcatcatggactccgataacaagaactacgtcgacatggacgagtaccctgtcaccacggagctccagaaccgttgtgtgaatatgatagctcacctgttcaatgcaccaatcaaggaggatgaaacagctattggagttgggacggtgggatcct

SEQ ID NO: 20805 - DNA, 508 bp, Oryza sativa
  Clone ID: uC-osflM202015a07b1
ttgtttccgtcgaaacccaaaatcttctcttcccgtacgtgagaagcgccaggtcgtcgtcgccccatgggcgtggaggtgtgcgtcaaggccgccgtcggccacccggacacgctcggcgactgtccattctcgcagagggtgctgctgactctggaggagaagaaggtgccctacgagatgaagctcatcgacgtccagaacaagcccgactggtttctgaagatcagcccagaggggaaggtgcctgtgtttaacggtggtgatggcaaatggattcctgattctgatgtgatcactcaagtcattgaggagaagtacccaaccccgtctcttgtcacccctcctgagtatgcatcagtgggatcaaaaattttctcatgcttcacaacgttcttgaagagcaaggatccaaatgatggttcagagaaggcacttcttacttgactgcaggcactcgaggagcatctgaaagctcatggcccctttatcaacgggcagaacattt

SEQ ID NO: 20806 - DNA, 503 bp, Oryza sativa
  unsure (1)..(503): unsure at all n locations
  Clone ID: uC-osflM202015a08b1
cgcctccgctcatccctatccccactcgccggagatggccgccggcgacctcctcctccgcaccagagcggcctccccgtgctcgcaagggccttccccagctgcctctgcctccgcgtccctgcccgccgccgccggggcgctcctcccctgaccgccgccaaggtcgacgtcgccgacgccgtcggccgccgtgtcaggtcgggcggcgcggccgtaccgaagcggcgtcgtagccgtagggacgcggaggaggaggaggaggagggcctcgcgttctccaaggtggtcacgggcaggggaagaggcctccnccaggagggcgtggcggaaggggaggctccggaattcgatgcggcgaagagcggtgacgagtccggaggcgtggatggctcgtacctcagcgacacaagggttgatcaatgcactatttctccgttgtcactgaaagccgcaaagatgctgggtatgaaaggatgacccaggtgcaagaggcaactctg

SEQ ID NO: 20807 - DNA, 500 bp, Oryza sativa
  unsure (1)..(500): unsure at all n locations
  Clone ID: uC-osflM202015a11b1
ttcgctcctaccgagtttcccttgctaggcagtagagagagtctgtgatcgagagagaagaggacgagcagctagcaagccggcgggcgccatggtgctctcgcacgcgagctccggccgggacgacgccgtgcgctgcaccttcgcgacgcgctacgcctgcgagacgctgccgcggttcaggatgccggagcagtcgatcccgagggaggcggcgtaccagatcatcaacgacgagctgatgctggacgggaacccgcggctgaacctggcgtccttcgtcaccacntggatggagcccgagtgcgacaagctcatcatggactccgttaacaagaactacgtcgacatggacgagtaccctgtcaccacggagctccagaaccgntgtgtgaatatgatagctcacctgttcaatgcaccaatcaaggaggatgaaacagctattggagctgggacggtgggatcctcagaagcaatatgcttgaggactggcattc

SEQ ID NO: 20808 - DNA, 443 bp, Oryza sativa
  Clone ID: uC-osflM202015a12b1
gcgcgtttgttaggattcagcccgccgcccgttgggaagggagcttcgaggcggccggacacggcgattgggcgtcacctctcgcgcctccggactgcgtcaccgtgtccccacgcgcgtcagtcatggcgggaatggcaccagagggatcccagtttgatgctaagcactatgattctaaaatgcaggagcttctgaaccaaggtgaaaccgaggagttcttcacatcttatgatgaagttcatgagagttttgatgacatgggtctccaagagaaccttctcagaggcatctatgcctatggtttcgagaagccttcagccattcagcaaaggggtattgtccctttctgcaagggtcttgatgtgattcagcaagctcagtcaggaacaggaaagactgccaccttctgttctggaattttgcaagaacttgactatgct

SEQ ID NO: 20809 - DNA, 506 bp, Oryza sativa
  unsure (1)..(506): unsure at all n locations
  Clone ID: uC-osflM202015b01b1
tcttttctctgtctcgtcgtcctcgcatctccactcgccatgggcaagattaagatcggaatcacggtttcggaaggatcgggaggctcgtggccagggtggccctccagagcgaggatgtcgagctcgtcgccgtcaacgaccccttcatcaccaccgactacatgacctacatgttcaagtacgataccgtgcacggccaatggaagcacagcgacatcaagatcaaggactccaagactctgctcttgggcgagaagccggtcaccgttttcggcatcaggaaccctgacgagattccgtgggctgaggctggtgctgagtatgtcgtggagtccaccggtgtcttcactgacaaggagaaggctgctgctcacttgaagggtggtgccaagaaggttgtcatctcagccccgagcaaagatgctccgatgtttgtctgcggtgtcaacgaggacangtacacttcagatattgatattgtctcaaatgctagctgcaccaca

SEQ ID NO: 20810 - DNA, 505 bp, Oryza sativa
  Clone ID: uC-osflM202015b02b1
gctgtccgacgccctctgtcctacgctgacgcgcctccccagattccccgacaaccgccagcgttggccggcgacattggcatcttgaaccacgccgccgccgcgggtgatggtttcagcttcgccgttgcatctttgcagacgttcatggagtggcaatctggtgaaggatccgcggccatcctgcacctccaggagatggccaagctctccgtgctccaatgttcagttggcagtgatctagatgaggacaacaccaagaacaacgacagcagatgggttgtcaagaacctggccatgccttttgactcgcaaggggattttgggccgcgccaatggaagagcaacatcgccttcgcctatgccggcaaattatattgggctgactacgacgttggccttatctactgtgatgtcctggaatcttcacccaagctccagttgatcaagttccctgttccggtgagaaaatttgagctgggtgtcagtggtccagatgacaact

SEQ ID NO: 20811 - DNA, 498 bp, Oryza sativa
  Clone ID: uC-osflM202015b03b1
tagatgagagagatgagaagcggggtgtaagtttacagtcggcttaggcgcaggagccaagaaatctgtgatacagacaggtgggccatatatttatagtgaagagttaaccactatataagtgagttaagagatagactataaagatctatacagtaagcagctagctgtattattatccttgctcttagagaggataaaaccctacagttgcttctcccggctgcttctctctctctccaagcaaaactcccatttccaaaaaaaaaaaaaaaggtgggcttcacttcacaagttcttctccaattccgattccgaagtcctttcaacccaaaaggctgatgtgctggttgccttgtctagggtgctcctgaaatgttctttggctatgggtaccaactgaagctttgttttcgcggcgtcctcttttcatgtagttcaaattgcatttaccatttgatcaaaagcaggtgcattttgatccataatttttatgac

SEQ ID NO: 20812 - DNA, 443 bp, Oryza sativa
  unsure (1)..(443): unsure at all n locations
  Clone ID: uC-osflM202015b05b1
ttctttaggctgcgggcgcggcggcggcggcgggcgacggcgagggcagcatatggggcccgaacctggcgcaaggcctacggcgcgctcaaggactccaccaaggtcggcctcgccaacttcaacagcgagtacaaggatttggatatcgccattgtgaaggcaaccaaccacgtatagtgcccgcccaaggagcgatacctcaggaagatactctttgcgacctcggcgaatcgaccgcgatccgatgttggttactcaatatgtacattggctaggatattatccaagaccaagaactggattgtcgcattaaaaacattgatagtgatacatagattgctcagagaaggtgatgggacatttaaagaagacttcttgaactattcttatngaggaactattntgcagattccaacattcaaggatgattcgagcccttt

SEQ ID NO: 20813 - DNA, 382 bp, Oryza sativa
  Clone ID: uC-osflM202015b06b1
ccgtaggttaagggtcggagccactcgctacttgccgccgccgccgccgccgccgtcgtcgagggcaggcagcggcgctccgcctcggctcgggcggcgcaccggcgcctctgagcggccacgccccggtctccgccatccgcccgtccgcccctccgttcgacctcgtcccgtggtccctccctacgccgccgtcgaccgccgtttctggtaatctcaggaacttgaaatggcagacgaggagcatgctccaacgtctaggaagagggttgcaggtacccaaatcaacaaggataatcctgagcctgatgatgactcaactgagcaagagatggggacatttaagagagctagtgaggaagtgatggcaacacggagaatt

SEQ ID NO: 20814 - DNA, 489 bp, Oryza sativa
  Clone ID: uC-osflM202015b07b1
acgctgtttgtgaccatcgttacccatgtcaccacccggaacggcgccgtcgggtggatcccggacacctcaaccgcggccacctcgactacttcttctggctgctcgccgtgctcagcctcatcaacttcggcgtctacctcgtcatcgccagctggtacacctacaagaagacggcggattcaccggacgacaaggccgagcacgccggagcaaactgagccacgaggtgaagctgattatgacatacaagggggaattgaactgaattgcggcgtgtgaatgtcacaatgtgtggggttctaaacaagttcttgggagataaaatggaaaggaaattagtgtcgtttgtgaccttcaaatatgttatagtgctcattgcattatgtctggtaggaaaaaatgaagaagaataggaggatatagtagtttaaaaatataaatgtgatgcttagttctctagacatgcattggccaaagttgttcaag

SEQ ID NO: 20815 - DNA, 490 bp, Oryza sativa
  unsure (1)..(490): unsure at all n locations
  Clone ID: uC-osflM202015b08b1
ggctgcgtatcaaaggcttgcggcggcgagggcaccgaggcggaggcggaggccagcggcaaccacaccaggggagagagggatggcgaggcggttgtggagttcgtacgcggaccgggagattcaacaggtggtagaagacngtgctctgggacatggtggagccgtaccgcccgccgcgctcgttcgcgccactcatcggcacctacgtcgccgccttctacaccggcgtcgtcgcctccgncatcaccgatcagctttacaaggagaagtactgggaagatcatcctggcgatggccttcctctcatgccgcccaaattctactgggggccatggagggtgatgaacggagaagttccacgctttatgcagacaccagaagaggcgaaaccggcataaaatcttcaatgatcactgaatctttaaatgttgcgtgtctgtacggacacgatatgcagtgtttgttgcgtgaataaacagtttgcccc

SEQ ID NO: 20816 - DNA, 495 bp, Oryza sativa
  Clone ID: uC-osflM202015b09b1
tcattgatcacctgataaggcatctcttcaagattcacaacaatcattagatcgccctgaagaagaagcattttgtccacaggagaaattttgaataatataattcgggaggatggatttatgagtgagactctaaacagtctatctcatgtccatattatttctgataatgatggttcatcgaaagcaagttatggtgcttcatcttttcaaagcggttctgataaagcaatcacttacttctattttgatttctctgcgtcatggccacgcacgccaagttggatttctttagtgggtggtgacacattttattccagctttgctaggatatttaaaaggctaatacagcaatgtggaatgcctgtaatatcatcgcttcaaaatgcattggaagagtttcttagttcaaaagaaagatcaaggcaatgtgtggcagctgaagcgatggctgggatgcttcactctgatgtgactgggaatttggagtctggg

SEQ ID NO: 20817 - DNA, 415 bp, Oryza sativa
  Clone ID: uC-osflM202015b11b1
taatttatcctcagcacagagcagcaggatggtgtggggaggagggaaggatcagcacagcacagcagatgcaggtggtggttgcggcggcggcgggggagaggaggatgcaggggctagggccgaagcggagctcgaacaaggaccgccacaccaaggtggacgggcggtggcggcggatccggatgccggcgctgtgcgccgcccggatcttccagctcacgcgggagctcggccacaagtccgacggcgagaccgtccagtggctgctccaacaagcggagccggccatcgtcgccgccacggggaccgggaccatcccggcgttcgcgctcgcttcgtcgccccctcccttccttcccccaacttccgcctcttcaggtcgcaccaccaccaccaccacatgtgggcggga

SEQ ID NO: 20818 - DNA, 473 bp, Oryza sativa
  Clone ID: uC-osflM202015b12b1
ttatttttcctcctcccttcccttcccttcctctcgccgaaccaacgcggaagaaggagctcgccgccggctagggtttgccgcacacccgccgccgagcagctagcaccggagtgttgggaggggaggctcgcccgccgccgccgccatgccgcagtcggtgctcgtcgaccgcgcgacgagcgagtcgctcatcgggcccgactggtccctcaacctcgagatctgcgacatcctcaaccacgacccctcccaagccaaagatgtagtgaagtctatcaagaaacgcattgggcacaagaactcaaagatccagcttctcgcactaacattgctggagacactgattaaaaattgtggagactttgttcatatgcacgttgctgagagggatatactccatgaaatggtgaagatagctaagaaaaagcctgattatcatgtaaaagagaagatactaattctgatagaca

SEQ ID NO: 20819 - DNA, 448 bp, Oryza sativa
  unsure (1)..(448): unsure at all n locations
  Clone ID: uC-osflM202015c01b1
tctatttatcacatttttgccataattggggaaccttcattcttctaacatngatgcctacatacacaaccaggttcttaagttcaatcttactgaatctgggcttttgtgtgtcttgccgcggctgacaatggctatatttgcgaatattggtggctggattgctgacactcttgttgggaggggggtttccataacgaatgttcgtaagatcatgcaatcgattggtttccttggaccagccctcttcttgacactgctgagcaaagtccgaactccagccatggctgtattgtgtatggcatgcactcaggggagtgatgccttttcacagtctgggctatattcgaatcaccaggacataggcccacgttatgcaagtgtactttttggactgtcaaacactgctggcgtgcttgcaggagtttttggtactgctgcccactgc

SEQ ID NO: 20820 - DNA, 502 bp, Oryza sativa
  unsure (1)..(502): unsure at all n locations
  Clone ID: uC-osflM202015c02b1
tatgttagagaagagaagagacgagaaaccctcggctccacacgcgccctctccctccaatggcgcggcggcggctgagatcgcggggtccgcggcggcgcgcatggcggcgccggcagtgaggccggctccgcccgcggcggcggcggcggcggcgcccccgcagccgaggagggccgtggcggcgcgctccctcaggacctccacctccgacagggtggcggcggatctcgcgctcgggagcaacggctccctctccgctcagaacattgctgaaaataccgctgacgctacttcncaagtggtctctgcgaattcccgtaggaagacaaagattgtttgcaccataggcccctcaaccaacacacgcgagatgatatggaaacttgctgagactggaatgaacgtcgcacgcatgaatatgtcccatggtgaccaccagtcgcaccagaaggtgattgatttggtgaaggagtacaatgcgaagaatactgatggcaat

SEQ ID NO: 20821 - DNA, 479 bp, Oryza sativa
  unsure (1)..(479): unsure at all n locations
  Clone ID: uC-osflM202015c03b1
tatttccacctcctctcatcctcctaacgccatgcaatctctcttctccccgtctctttctcctgtccccgtgggcctcccatttcttccccttttcttctcgtagctatagggtgatacacttctctgattattgttgctgttcttcccgtgctgatttggatttaattacaagtatttgtgttggatcggttggacgcgctcactcggtttggtttggtttggattgtattgggttggatcggatcggattagccgcgctatagcgtcaggggatcagctcggctcactgtggtttttgaggtgttagggtttgagtgctaggctgctcgcttgatggatggtcattcctgtggtgatctcgggagagtgtcngaagtgatatccgacggcacctcatcgggtagcgcagacggcggccagagcctgcctgagaagcattctgcgctggctgatgctacttctggagtggcggcgga

SEQ ID NO: 20822 - DNA, 360 bp, Oryza sativa
  unsure (1)..(360): unsure at all n locations
  Clone ID: uC-osflM202015c05b1
tttacttcggcgctgcgagagatggaggcggcgggggctcaggccggcatcctccccctcctctccgtcaccccgcgtccctccggggctccctctccctctcctgcggcggcgcccgccggagctgggcngcnacngccgccacggcggaaggaggaggaggagaggagggtcgcggctactagagggtgcccatggacacccccggcgcctaccgcctcgtcaaccgggccaccggccgcagcgtcatcgtgtggggcggcaccgacaacctcaacatgccctcccccccggtgctctccacgaccacgcgcgtacccgaccgcccaaaagaaaatgggagaagtacaagcattggaa

SEQ ID NO: 20823 - DNA, 499 bp, Oryza sativa
  Clone ID: uC-osflM202015c08b1
gaaggttttagaaattgaacaaaggtataaaggcaagatgctcatgttaggtctacatgacatggactcttcaaaggaatcaggctaaaactgcttgggttggagctacttctagataggaacccgaaactcagagggaaggttgtccttgtacagattgtcaatccagcaagaagcacagggaaagacgtggaggaagcaataacagaatctgtctctgtagctgaaagaatcaaccttaagtatggctctgtagattacaagcctgttgtccttattgatcatagcataccattttatgaaaagattgcattctatgctgcatctgattgctgtattggaaatgctgcgagggatggtatgaacttggtaccatatgagtacactgtttgccggcagggaaatgaggagatagataatgccagaggcagtgacacaaattgccatcacacaagcacactaattgtgtctgagtttggtggctgctcaccatctctta

SEQ ID NO: 20824 - DNA, 90 bp, Oryza sativa
  Clone ID: uC-osflM202015c09b1
attctgtttattctgttttgtcccaagcaagtaaacttggaatgccccaactaccaatcgaaatatcaatcttctttgagctggcctgtt

SEQ ID NO: 20825 - DNA, 428 bp, Oryza sativa
  Clone ID: uC-osflM202015c10b1
ctcttctctccgcatcctcctcatcgcctccgcttctgcttttttttttcttttttctcgttgacggtttgttcgatcagatcggttctttgtcgagatggagcagtccttcatcatgatcaagcctgacggcgtccacagaggcctgattggagacatcatcagcaggttcgagaagaaaggattctacctgcgggggatgaagctcatgaatgtggagaggtcctttgcacagcagcactatgccgacctttccgacaagcccttcttccctgggttgctccactacatcatctctggccccgtcgttgcgatggttcgggaagggacggatgctgttgccactggccgcaggatcattggggccaccaggccctgggaggcaggccccggcaccaatcgggctgactatgcccgggaagttggca

SEQ ID NO: 20826 - DNA, 424 bp, Oryza sativa
  unsure (1)..(424): unsure at all n locations
  Clone ID: uC-osflM202015c11b1
cattatacttaggttagctacttcttgctgcattgaatcatccatcatcaaatcattgggatatatttccacgatggccaaggtaatcacactaatccttgtcgttattacagtgtcaaccatgctagcctcacctgtggaatgcaccaagattcctggtgcctttcctattggaatgtctccatacaactttacgacaatgatagatatcttcaaagtggccatgttagtgccaactgaggattgcacctccaatgttgagatgtgcataagcgagacatgctcctacatcanaaaagccctcgatggtgttgttgatgctgccccaccagcaaaacaggcggaaactaaggaggccacggccaagatggctgggattgctgctactatgctcgacacagacatggcttcatgaagaaagaga

SEQ ID NO: 20827 - DNA, 462 bp, Oryza sativa
  unsure (1)..(462): unsure at all n locations
  Clone ID: uC-osflM202015d02b1
taccttccactgctctcgccgcgccgtcctcttcatctgcacttgcactgcgccatggcggcctgaccaccctcgccttatcccaccccaaaaccctagccgccggctccgccgcggcccccaaggccccgacggcgccggccgccgtctccttcccggtctcacatgccgcctgcgcgccgctcgccgcccgacgccgcgcggtcaccgccatggtcgcggcgccgccggccgtcggggccgccatgccgtcgctcgacttcgacacatccntcttcaacaaggagaaggtctccctcgccggccacnaggagtatatcgtgaggggtgggaggaacctgttcccgctgcttcccgaggcgttcaagggcatcaagcagatcggagtgattggatggggctctcaggggcctgcacaagcccagaacctgagggattcactagctgaagcgaagtctgaca

SEQ ID NO: 20828 - DNA, 441 bp, Oryza sativa
  unsure (1)..(441): unsure at all n locations
  Clone ID: uC-osflM202015d03b1
ttcagttattganagaggttagcnagagaggttgggcagtagccatcatcatcatcaattcatctctccaaaaaaaatcagagtagaatctcatcactcaggggaacgccggggatcctctcccatggggtcgttcaaggggcacgtgctgccggggacgctgttcctggcggtgggggcgtggcacgtgtgggcggcggctgctaggttcgccgccgacccgcgcgggttcaggctgcacgcctggaaccccgtggacgtcggcttcngcngaacaccagcttggctcccctcccacctctagctctacatcatcnccggcggcaccttcctcgacatgtgcattgaggtgctctactccacccacctacacatcttcggcgacagcggcatcaaccccggccacctcaacgaccttcagcacggtggcatgcttctcat

SEQ ID NO: 20829 - DNA, 433 bp, Oryza sativa
  unsure (1)..(433): unsure at all n locations
  Clone ID: uC-osflM202015d04b1
ttctatgccctaatccccgccacgccaccgtgcgtcggcaacgcccccgccgccggccggcggcggcgccgtgcccatccatggcgtccagtacagcatggcgttagcgggacccgtgtgaggattatgaggtacgagtgtacagggattctcgtgggtatttcgccttcngggggcgcgatgtttatgtcgggccgttcccaacctccgattaactttacgcctcacttaaccaccactatcacctccggtcgaagccctttgatccaaccccncttccaacacattttgagggcctttttagaggtgcatctgaacctgaatctgcacaggcactgtaggaaccagatgttttgtccgtgggggagcttcttggggctatagcattgaaagaaccaatttttttcagtccctttttcttcccacaggcagt

SEQ ID NO: 20830 - DNA, 381 bp, Oryza sativa
  Clone ID: uC-osflM202015d05b1
tttctctttctccctcgccaactcgactaccctccccacccccgcgtcggcggcggcggcagggcagcggcagcgacggaacctcgccggcggcaagcgtactcacccgacaaaacaatgaggaggtatagtccaccttatcgcagtccaccaaggaggggatatggtggcagaggaagaactccccctatgcggggatatggaggacggaaggaacagggttctggcagtctcctggtgcgcaacatccctttaagctgcaggtactggaactgtataaccttaacacctttttccaatgactatattcttaatgaaataaataaatattccctctgtttctaaatatttgacaccgttgactttttagcacatgggttg

SEQ ID NO: 20831 - DNA, 418 bp, Oryza sativa
  unsure (1)..(418): unsure at all n locations
  Clone ID: uC-osflM202015d06b1
ttctttagggttctggatccgggagaccggccaggccctcgaccgcctcggctgccgcctcaggggaactactacttccacgagcagctctcaaggcatcgcacacttatgaacatctttgacaaaacccctcatgttcacagagatgcatttgttgccccaagtgcatctctcattggtgatattcaagtcggacaaggagcttcaatttggtatggatgcgtcttaagaggggatgcaaacaacgttcaaattggatctgggaccaatatacaanacaattctcttgtccatgtggcaaaatctaatcttagtggaaaagtctttccaaccatcattggggataacgtcacagtaggtcatagtgctgtattacaaggatgtactgctgaggacgaagcatttgttggtatggggg

SEQ ID NO: 20832 - DNA, 404 bp, Oryza sativa
  Clone ID: uC-osflM202015d08b1
ctcttcttgtacaaaacaccgttgttattacgtttgccccccctcgatcgatctccatcgatcgatccttgcgggaagcgagcgatctcgtgcggaaatcttggggggagttcgtgcgcgatcatccgctgatcggtgggcggccaccagatcagcccgcgcatccaactccggagagaggaggaggaggaagaagaagatgtctctctgcagaggcaccgaggaggacagctacggcccgccagtgaaccaggccgcttccggcgccaacgccaatactcccggcaatagacgccgaccgagagggccgggggcggcgcggccgaccggaccgccgaagccggtgaacatcgacttgccggcgataccgttcgaggagcttaagaagatcaccagcaacttca

SEQ ID NO: 20833 - DNA, 502 bp, Oryza sativa
  Clone ID: uC-osflM202015d09b1
catctagtctcctgagtatctcaagatgaatcctattgggaaggtccctattctagagactcctgatgtcctgtttttgaaagcaatgcgattgcacgatatgttactcgctcgaagtctgacaacccactctatgggtcttcactgattgaatatgcccacattgagcagtggattgacttttcagccacagaggttgatgctaatactggaaaatggctcttcccacgtcttgcatttgctccttatgttgctgtcagtgaggaagcagctattgctgctttgaagagatcattgggtgccctcaacacacaccttgcatcaaacacataccttgttggccattcagtgactcttgctgatattgtgatgacatgcaacctctacatgggctttgctcggatcatgaccaagaattttacttctgagttccctcatgttgagaggtacttctggaccatggttaaccagccaaacttttagaaagtcatgggtgatgtga

SEQ ID NO: 20834 - DNA, 434 bp, Oryza sativa
  Clone ID: uC-osflM202015d11b1
cttttctctatttctctcatcaacaattaccgcatcacaaggagcaaaagcagtttcagtttcggtccattgcttattaatttacctctacagaagaatgggcacagagatggccaccgtggaggtggagggcatcccatttcctcaggagatcaccgtcagtaagccgttatcactgctagcccatggcattacagacattgagattcatttccttcagatcaaatacaacgccatcggggtgtatcttgaaaaggacaatgtactagggcatttggagagttggaagggcaagaaggcagaggagcttgtgcaggatgatggcttctttcaggccctagtttctgctcctgtggagaaactattcaggatcgtggtgatcaaggagatcaaaggatcacagtacggcgtgcagctggagagctcagtgcgcg

SEQ ID NO: 20835 - DNA, 362 bp, Oryza sativa
  unsure (1)..(362): unsure at all n locations
  Clone ID: uC-osflM202015e01b1
attttaaatatacaaannnnnaactanctaaaannggagtgtatggtacgagacaagttgatatacatcttggggaccggatgaagggcggggcattccatcgagaagcatcaggggtgggggcaactgtatgtgatctaatcagatctagggctgtttcggaacagacctaaccatacgggaggaggtggtgatggtttgcaccttcttgcatactgataaccctgcatacgccatatganaaaaaatntcttatagaatgaaatcataaagncnctactgctttgtaatggatacgcacatcctctcttcatatttcaaaaacaaattctgatacaaaaagcacataaatggctatgacc

SEQ ID NO: 20836 - DNA, 203 bp, Oryza sativa
  unsure (1)..(203): unsure at all n locations
  Clone ID: uC-osflM202015e04b1
tgcctcctccaacaacaatctccattccgggagaagctcgtggccggcttcccgctgcatcctcctctgcggcggtgagcgcccgaacncattgcgattacttgttgcaatgtcaactctgaggcaggcctccagaagcttgattagtaccttcttactcgcagctacattagtgggtaccaggcttcaaaggatgacatgac

SEQ ID NO: 20837 - DNA, 416 bp, Oryza sativa
  unsure (1)..(416): unsure at all n locations
  Clone ID: uC-osflM202015e05b1
taactgcctcacgttcctctccctctccacccaccgcctctcgccgccgccctcgacgtcgtgccgtcgctcctctgcgcctccaccgcnctcctccacctctacgactggtggtccgcctacaagtacgtcaacttctcccgcaccatgtccgacgccatggcctacctcgacgacaccatcgccgtcaacagtaactacatctccatgctcgccgcgctgcancgctacggcgaccacaccttccggtgggccccgccgcagaccgagcgcgacggctactggccgcccgcggcggcagggtccgccgcccacgaggacgcgctcggcgtgcccaaggggcctccccccaacgtgactgtgtgcggcgcggggtgccactaccagactgtgggggaggcggtggcggcggcgcc

SEQ ID NO: 20838 - DNA, 397 bp, Oryza sativa
  unsure (1)..(397): unsure at all n locations
  Clone ID: uC-osflM202015e06b1
tctcttctcctcctctcgctccgctctctctcctgcccaagcaatggccgcccccctcattccttcttgctgcaggtgacgacctcctcctcacactctctgctgccgtgctagccgccgcccggcacgcgggccactgccgtcgccatactctcgctccctccgcctcatacgccaactaggaggccgggaccgccggatccggtgactccggcctcctcgccggcagatccggcccctctgaggcgaggggaaaccggnaaacgaccctctttacctctccctctccctctccctctccatcctcttcatttccggatcggtggacgccggcgattaggcggcttaaggctcatggtaacaaaagggaaaacatgtaatgcacttggaacagtcg

SEQ ID NO: 20839 - DNA, 427 bp, Oryza sativa
  unsure (1)..(427): unsure at all n locations
  Clone ID: uC-osflM202015e08b1
aactcactcttccaattatactnnnaaactcgccgcccaagaaaaacactgaaccttcgccttcctcctcgcccgatcgacctttggatggcatcactagctagctccaaggggcgggtgatcgctacaagcttcgtgggccgcgtcctgaccggcaaggccgcctcccctcggagatttgtgagcgcttcaacctacgacaagaacgttgaagagcacgttctcccggcggtggtgccggaccatntgatctgcaacgactnaagccctnacaagtacttttgccctcacccgaccaccggcatgatcttaccaanggcggtggacgccaaggcggcggccgccgttggcgcgacgaaggccgacgcgaatggtggcgccttcgtgctcgaccagaaagtcttggttcccccccctcaggacgttg

SEQ ID NO: 20840 - DNA, 340 bp, Oryza sativa
  unsure (1)..(340): unsure at all n locations
  Clone ID: uC-osflM202015e10b1
tatctctttatcaaaagcaaagcaaanccaagccaagcttgaagctccccgcactgagccaagaagctccacctcaatccgaaagagatctcnttcgcgcacggcgatgcggtgaatcgggcatggcgccgccacaggagcgggactacatcgggctgtcgccggcggcttcggcggctctggcaacagagctgcgccttgggctgccggggactgcggaggaggctgagtcggaaggcctcctatgaagagggaccgatgcggctccgctgacgctcgaacttcttcccaaaggcggggccaagcgcgggttcgcggacgccatcgctgggggtcccgc

SEQ ID NO: 20841 - DNA, 396 bp, Oryza sativa
  unsure (1)..(396): unsure at all n locations
  Clone ID: uC-osflM202015e12b1
gtgtanattactgcagtacagatcanatggtgtattgcagtattgggtagttggatatccaggggaggtggatcagccgatgcanatggtacttcagctaaagcacccgtcgtcgctgggcggcntcaccttccgcggggaggaggaggccgtctaggcttcttcgagttcggcgctgtccgtgttcaaggccaaggaggagcagatcgagaggaagaagatgnctgttacgaacaaagtgttcactcacctctaaccccttaaagaggaaaccaaacgccttcccttcatccgaccctaacttgaagggatggcggatcccaccaggaaggaggtggaggtgaaccagaagaggatcgacgtggtgaaccgtcagctcaagtctctcggcaaaac

SEQ ID NO: 20842 - DNA, 366 bp, Oryza sativa
  unsure (1)..(366): unsure at all n locations
  Clone ID: uC-osflM202015f04b1
ttcgtacactggatgaccttcaaaaagacgatgcacttacaattgctcagaggattgggctgagttctgggacgatatcaaacaaagaataccccgacatgaggttagtgagatggagaagcttttgcaagaagttgggactgatatcttgcctggggtgataattgtatgtgggggatcatacaaacgtggaaaatcttcttggggtgacatggatattattatcactcatcctgatggtgaaagtcatttaagctttttaccaaaatttgttcagcnctttaagggcattaatttttttagggaagatcttattttcagcatacacatcattgatggaactgattgtggagttgacacatattt

SEQ ID NO: 20843 - DNA, 388 bp, Oryza sativa
  Clone ID: uC-osflM202015f05b1
ttgcgtgggggcggacgtgcgtgcgtcgtggagggtggacagtcgtctcttgccaccatgtcttcaccggggcgcaggacaagtgcacggcgtgcgacaagaccgtccacttcatcgacctcctcaccgccgacggcgtcccgtaccacaagacctgcttcaagtgcagccactgcaaagggattctctcgatgtgcagctactcgtccatggacggcgtcctctactgcaagacccactttgagcagctcttcaaggagacggggagctctttcaagaagttctccccaagtttcaaatctacaaacaaagaactggcaagggccccaagcaagatatgttcagcgttttctggaactcaagataagtgtgcagcctgccagaaaac

SEQ ID NO: 20844 - DNA, 483 bp, Oryza sativa
  unsure (1)..(483): unsure at all n locations
  Clone ID: uC-osflM202015f07b1
atctaccacgcatccatataatttattnagaaccctnnntnnaccataaccaagggcgtttgactcctgcttctgggcagcgcatggctgctggattcgcagaccctcttgttgatgctggccacaacttctccaacgcgtcgcacataccatccttgttcatttcgttcatcgcgctgccggtggcgaccaacgtccatcgaggctgtctctgccatcatcttcgctagcangaacaagctacggaccagatcccttactttctctgaggcatatggtggagtgaccattaacaacacactcagcttgggcgtgtctcttggcgctcatctacatcaggaacctgacatgggacttctcatcggaggagctcatcatactgctcgtctgtgtcataatgggactctttacaagctttagaaccacatctccggtctggacctgcctggtggcgtacatgctttacccgcttatacttgtttt

SEQ ID NO: 20845 - DNA, 359 bp, Oryza sativa
  unsure (1)..(359): unsure at all n locations
  Clone ID: uC-osflM202015f08b1
nctcttttttttcaaatactancaaaaaaagcncccccagaccacgagccagtcagtgacctatctggcgcccgatgcgcgcgtgaggcatcctcagccagagccagctagtgtgtttgtgtgtgtcactgtggtggtctgtggcctgtcacctcacctgagccagcacaagcgcgaggaggctaacgcgatgctgcagctcttgggcatcagtgaccacaccactaaagaaacctatccggagcgcttggcctttgccaacaccatcccctcatngacctaacntaatgtgtttgctaccgctaggatcttcttgagggagctggagctcatggacggtaccgcgttcgagaagatct

SEQ ID NO: 20846 - DNA, 403 bp, Oryza sativa
  Clone ID: uC-osflM202015f10b1
ctttacctacccaccctctcgccgtcgcagatccgatccaggaagagctcgccgccgccgctgccaggcgctgtgcgtggagaagacctcgtcggggagggagtacaaggtgaaggacctctcccaggcggacttcggccgcctcgagatcgagctcgccgaggtcgagatgccggggctcatggcgtgccgcgccgagttcggcccctcccagccgttcaagggcgcccggatctccgggtcccttcacatgaccattcagaccgccgtcctcatcgagaccctcaccgcccttggcgcccaggtccgctggtgctcctgcaacatcttttccacgcaggaccacgcccgcgtcggcattgacagggactccgccgccgtgttcgcctggaagggggagacc

SEQ ID NO: 20847 - DNA, 377 bp, Oryza sativa
  Clone ID: uC-osflM202015f11b1
gctctggtcaaggggagcacatagtcagaacaccgcagagcaagtgtgtgtcctgcctcgcgtgaagataagcggcgctctgctctgctcgccgaggagagagagaagagagagagagagagctagagatggcggcggcctcagcggcggcgcaggcggagggaacggtgatcgcgatccacagcctggacgagtggaccatgcagatcgaggaggccaacagcgccaagaagctggttgtgattgacttcactgcatcatggtgcggaccatgccggatcattgctacactttttgccaatctagccaagaaccacacaaatgctgtttttctgaaagttgacgtcgatgaactgaagcctattgctgagcaattc

SEQ ID NO: 20848 - DNA, 380 bp, Oryza sativa
  Clone ID: uC-osflM202015f12b1
ctttgtcttatttgctgcatgcacctcttgggtgagcaggtcataacgctgcacaaccatgggcccttttggaccttcattctgctatatcctgagatcttcctagctatcatctgcttcttctggttttcactcttccgtctcatcaggcagcgccagaagagcaacctcccagtgaactggcctgtttttggtatgcttccattcctcgtgcagaatctgcactatattcatgacaaaatcgcacatgtgctccgcgaggcggggtgcaccttcatggtcaactccccctggttcctcaacatgaaccttcttgaatacctgtgacccacccacggtcaaccattgctttaatgccaacttcaaaaactaccccaaag

SEQ ID NO: 20849 - DNA, 362 bp, Oryza sativa
  unsure (1)..(362): unsure at all n locations
  Clone ID: uC-osflM202015g01b1
tcaccccctcggcccggcgccgcgccgctcggccgcgacgaaccctcgcctcccctcctccaccccccgcccgccgcggcggcgctcgcggtacgcgggattgggaggctgcggcggcggacacggcggctggagcgagtggtggagcgggcggcggcggctgggagaggggcgcgggtggggagaggggcggcggcggcngaatctagggctgaaggggacgggagggttgggtgccacggcgggggcgccatcatccatcggtatggaccatgatnncnnnnaaaggaccttcaaggccaacttcaccccctaatgggcgaggctgctgcgggcgcccgtcaaggagaagctcagggagc

SEQ ID NO: 20850 - DNA, 489 bp, Oryza sativa
  unsure (1)..(489): unsure at all n locations
  Clone ID: uC-osflM202015g02b1
ttnctacttcnccaacnccnnanagagacacgagacgatcgatggcnatcgcgtccatggccgccgcgcgggcgccgcgatcgtcggcgcggtgcgggagcacgtgcgggcgagcgacctggcgggggccggcgcggtgctgttcactttcagcgccgccgtgagcgcggttcgggcgcggcgccactttgcgccggtgctgtggccgctagatttcatcgtgcccacgctgttcgtccaccgcgactacatctactagtggggctccnccgcgctgcttcncnccnncnncttgttcccttaccgcggcacatggggcgggggctcctccggcgtcataacctccgcgccggccaacgtcgagcacgtgctcagggccaacttcggcaactaccccaaggggccctactaccgggagcgcttcgtcgagctgctcggcggcggtatcttcaacgccgaccgcgaggcgtggcgcgcccagcgcccggc

SEQ ID NO: 20851 - DNA, 303 bp, Oryza sativa
  unsure (1)..(303): unsure at all n locations
  Clone ID: uC-osflM202015g03b1
ttcctatactgctactnttccattccactggggacgtacgagctccgcgcatcccttccattccttactgaccttggctgctgcggctgcagtgcatagggggtttggtggtgcggttgatttgagcaataaattctctagggggcagggaggtatcggacatggctgccnctgctgcacngaggggctcatcgatgctctctcactgccttctgtccagaccgggcgacgccgcctcgcctgctgtcccctctgcnctccgcaaggcatattnaacacaaagattgctgccggtaatccttc

SEQ ID NO: 20852 - DNA, 327 bp, Oryza sativa
  Clone ID: uC-osflM202015g04b1
tgcctccgcagccgcagccgcagccgcgcgtcgtctgctccgcccgggagctcctcttcccgccgcgagagagcaggagcacgcaaggcgcgcggccatggcgtcggagaccgagacgttcgccttccaggccgagatcaaccagctgctgtccctcatcatcaacaccttctactccaacaaggagatcttcctccgcgagctcatctacaactcctccgatgcattggataagattaggttcgagagcctcacggaccagagcaagctccatgcccaacctgagctgatcatccacattgtcccccacaaggctagcaacaccct

SEQ ID NO: 20853 - DNA, 484 bp, Oryza sativa
  Clone ID: uC-osflM202015g05b1
ttaatgtgatggggtcaatgtggttcccgaagtttggggtgtaaaagataaaatcaagcagtttcagaaacttttaggagtggatcatgggttggggcaactggtaaagcattgacaaatgttgtgtcagttggaataggtggtagctttcttggtcctctgttcgtgcatgctgccctccagacagatccagaagctgcagaatctgccaaagggcgacagttaagattccttgcaaatgttgaccctgttgatgttgcacgaagcatcaaagatttacatcctgaaacaacacttgttgtggttgtctcaaagaccttcacaacagctgaaacaatgttaaatgctcgaactctcaaggagtggattgtctcttctcttggacctgatgctgttgcgaaacatatgattgctgtcagtaccaatcttgagcttgtggagaagcttggaattgaccctaaaaatgcttttgcattttgggact

SEQ ID NO: 20854 - DNA, 328 bp, Oryza sativa
  Clone ID: uC-osflM202015g06b1
tcactcatccggcggcggcggcgagtaagcttcttgcgtctccgattggtgggagagggattcgcgatggcggaagaggaggtggcggcggttgtgggggagctgagggggagcttcaagtccgggaggacgagggcggcggactggcgggcggctcacctgcgggggatcgtgaggatggtggaggagagggagggggacatatacgacccgcttcactccgacctcgccaagccttgcatggagtcctacctccacgagatatcattggcaaaggcaacctgcacatttgccttcaaagggtttaagaattggatgaaacctgaaa

SEQ ID NO: 20855 - DNA, 140 bp, Oryza sativa
  Clone ID: uC-osflM202015g07b1
ctcctaatatctcctctcctctcctctcctccgctctcgcgaagctcccaagtttgactccctcgagaccaccaccaccaccacgccgcgagcacgcgagcgaacgcgcggcggcgggggggatgggaggggtgacaacc

SEQ ID NO: 20856 - DNA, 225 bp, Oryza sativa
  unsure (1)..(225): unsure at all n locations
  Clone ID: uC-osflM202015g08b1
attaagnatatnaaaaacncctnnagatcactttctccganactcctgtctttgctgacccaatggcccggggttgcgtgcactgacactttctcagattgactctgatcttgatctggcgaggagcaccattgcatctaaactctccaataaaagccttcgactcaaatggactttctgaatcgagccgtttttcttacccatacaacattgagatcaagacct

SEQ ID NO: 20857 - DNA, 431 bp, Oryza sativa
  unsure (1)..(431): unsure at all n locations
  Clone ID: uC-osflM202015g09b1
atcttcttttttcttganagggacagcgtaatgaaaaagtttcagggagtaattttgcagctggaacagctctgtgcgacattccgtacaatgaattggatatatcagatgaagttagagagcaggttgagttagtgcacgcacagctcaaaagagcaaaagaacggattgatatgcctgacgatgaattctacaatgatctactatctgtatatgacaagaactatgacccaagtgcagaactggctattcttggaagattgtcagaaaagctacacttgatgacaatcaccgatctcacgcaagaatcactcgccttacatgagatggtcgcatccggcggtggtcaggacccaggagaacacattgagagaatgtcaatgctactgaagaagattaaggattttgtgcaaacacagaaccctgacatg

SEQ ID NO: 20858 - DNA, 406 bp, Oryza sativa
  unsure (1)..(406): unsure at all n locations
  Clone ID: uC-osflM202015g10b1
cactttcttgccgtcgcagatccgatccaggaagagctcgccgccgccgctgccatggcgctctcctggagaagacctcgtcggggagggagtacaaggtgaaggacctctcccaggcggacttcggccgcctcgagatcgagctcgccgaggtcgagatgccggggctcatggcgtgccgcgccgagttcggcccctcccagccgttcaagggcgcccggatctccgggtccctccacatgaccatccagaccgccgtcctcatcgagaccctcaccgcccttggcgccgaggtccgctggtgctcctgcaacatcttctccacgcaggaccacgccgccgncgncatcgccagggactccgccgccgtgttcgcctggaagggggagaccctcgaggagtactg

SEQ ID NO: 20859 - DNA, 456 bp, Oryza sativa
  Clone ID: uC-osflM202015g11b1
gctgtccttcactggttgcaatcacaacctgacagtacatgaggcagatgaactgacggacatgcactcaaagtgagacactggaaggagaaggagatcaacagtgaggagaagcgactccaaggcggttgtcccatgactcctcgtgaagctgctgtcttcctcaaagctatggggtatccttccaccacaaagatatacattgtggctggtgaaatatacggcgcacatagcatggatgcattaaaacttgaatacccgaacatctacacacactacagtctagccacagcagatgaattagaacctcttgagttgtatcagaacaggctagctgctgtggattatatagtagctcttcagagtgatgtttttgtatatacatatgacggaaatatggccagagcggtgcagggtcacagaagatttgaaggattccgggaaactataaaccct

SEQ ID NO: 20860 - DNA, 437 bp, Oryza sativa
  unsure (1)..(437): unsure at all n locations
  Clone ID: uC-osflM202015g12b1
gatgtatgtcttcttcgtactcgcctctctccgcgccctcctccgccgccgctcgccgccgttcgtctcgccgccaccgccgccgccatgagggagtgcatctcgatccacatcgggcaggccggtatccaggtcgggaacgcgtgctgggagctctattgcctcgagcatggcatccagcctgatggacagatgcccggtgacaagaccgttgggggaggtgatgatgcttttaacaccttcttcagtgagactggtgctgggaagcatgtcccccgtgctgtcttcntcgatcttgagcctaccgtgattgatgaggtgaggactggtgactaccgccagctcttccaccctgagcagctcatcagtggcaaggaggatgcagccaacaactttgcccgtggtcactacaccattgggcaggagattgttgatct

SEQ ID NO: 20861 - DNA, 372 bp, Oryza sativa
  unsure (1)..(372): unsure at all n locations
  Clone ID: uC-osflM202015h04b1
ttgctttgcagaggaggacgaaccatcacgcggcggcttcatatcacggctacctatcccgacccncaaccatggcaaggggtttgaagaagcatctgaagaggctcaatgcgcccaagcattggatgctcgacaagcttggtggagcttttgcccccaagccatcttctggtcctcacaagtccagggagtgcctgcctttgatcctcattatcaggaacaggctcaagtatgctctgacataccgtgaggttatttctatgctcatgcagcgccatgtcttggttgatggcaaggtcaggactgacaagacctacccagctggtttcatggatgtcatttccatccccaagactggtgagaactacaggc

SEQ ID NO: 20862 - DNA, 421 bp, Oryza sativa
  Clone ID: uC-osflM202015h06b1
tcgtgaggagacgagacgaagccatccgatccccacccttccccccctccccctcccccctctcagcgctggaggcggcggcggcggcgtcccctggatccctcggcggcggcggtggcgcacggttatgccgagaggcacccaggttccaacaccgtgcactgccagggctctagcattctcattaaggatatggagtacaccctctacaccacaagttcctctgtattgcacatttcgctgctcgaggaagttcttggctggaggttttctctttacggaaacttcctcgttatctcttttgtcaactgcacctgaagatcacacctcattcagcagccgtcttgcctggtcccatgctattgcacattagagtcgactattgattacagtgcagctgtagcacatttcttcgagcatg

SEQ ID NO: 20863 - DNA, 295 bp, Oryza sativa
  unsure (1)..(295): unsure at all n locations
  Clone ID: uC-osflM202015h08b1
ccttgctttctcctctcctcctcccccnanttcccttcgcgcgcgccacccccacacacgcgaccatggcgcagtggcacgaggctcagcgcggggtcggtcgcaggcggagcacgaggttcagatgatgctcgccggcgacgtccacctcggcaccaagaactgcgacttccagatggagcgctacgtctacaagcgccgctccgatggtatctacatcatcaacctcggcaagacatgggagaaactncaactcgcggccagggtgattgttgccattgaaaaccccccagac

SEQ ID NO: 20864 - DNA, 503 bp, Oryza sativa
  Clone ID: uC-osflM202015h10b1
cgctttctctctcagctctcacagctcactgcatcaatggccgcggccaccatggcgctctcctcccggtgatggcccgcgcggcgccgtcgacctcctccgcgctcttcggcgaggcgcggatcaccatgcgcaagaccgccgcgaagcccaagccggcggcgtcgtcggggagcccgtggtacggcgccgaccgcgtcctctacctcggcccgctctccggcgagccgccgagctacctcaccggcgagttcccgggcgactacgggtgggacaccgcggggctctccgccgacccggagacgttcgccaagaaccgggagctggaggtgatccactcccggtgggcgatgctgggcgcgctcggctgcgtcttcccggagctcctcgcccggaacggcgtcaagttcggcgaggccgtgtggttcaaggcgggctcgcagatcttcagcgagggcgggctcgactacctcggcacccgagcctgatccacgcgcagagca

SEQ ID NO: 20865 - DNA, 464 bp, Oryza sativa
  Clone ID: uC-osflM202015h11b1
atttatgttcgtgtggggtttccgtattattgcattataatattgctcaaattgcaccttctgatccactacaatattgcaatcgattctcactttctcatcacctgcgattgtgattgttgttgtaagcagcaagatgggtgccggcggcaggatgacggagaaggagcgggaggagcagcagaagctgctcggccgcgccggcaatggcgcggccgtgcagcggtcgccgacggacaagccgccgttcacgctggggcagatcaagaaggccatcccgcctcactgcttccagcgctcggtgatcaagtccttctcctacgtggtccatgacctcgtgatcgtcgccgcgctgctctacttcgcgctggtcatgatccccgtgctgccgagcgggatggagttcgcggcatggccgctctactggatcgcgcagggctgcgtgctcaccgcgtgtgggtcat

SEQ ID NO: 20866 - DNA, 388 bp, Oryza sativa
  Clone ID: uC-osflM202015h12b1
gcgggttacgtcgcatcgaattggacaaaactggagcagaagttttttgctcaaggaacaaatagaactcaaggcttgaaataacaactaacaagaggggagttgtatggtttgatcaagtatcgctcatgcctgcagacacttacaagggacatggttttcgcacagaacttatatctatgatgttggacttaaaaccacgattcttgagattccctggaggttgctttgtggagggggaatggttaaggaacgcattcaagtggagggaatctattggtccattttaagagaagcctggacacttttgggatgtttggcattactggactgatgatggccttggatattatgaatttctccagctttctgaggatctgggtgctgc

SEQ ID NO: 20867 - DNA, 514 bp, Oryza sativa
  Clone ID: uC-osflM202016a01b1
gcgtttgcggggtttttagttcggctttgagagctggaggcgcaggctgggatcggcggagccatgtcgtcgcttagcagggagctggttttcctcatcctgcagttcctcgatgaggagaagttcaaggagacggtgcacaagttggagcaggagtcggccttctacttcaacatgaagcactttgaagacctggtgcagggaggggagtgggacgaggtggagaagtacctcagcgggttcaccaaggtggaggacaaccgctactccatgaaaatattcttcgagatccggaagcagaagtacctcgaagcccttgacaggcatgatcgagccaaggcggtggagatactcgtgaaggatctcaaggtgtttgcctcattcaacgaggagctgttcaaggagataacacagctgctgacgttggagaattttaggcaaaatgagcagctgtccaagtatggggacacatagtcagctcggaatatcatgctcatggagctcaagaagctta

SEQ ID NO: 20868 - DNA, 515 bp, Oryza sativa
  unsure (1)..(515): unsure at all n locations
  Clone ID: uC-osflM202016a02b1
gcttttctgtctcgaacgtacacacacgcatcccaaatggcccacgtcatggccgcctccgagctcgtcaccgccaccatcaagcgccccttccagaacgacgacgacaacagcagcaacggcaacggcaacgccgacgggaagcccaaggcgcggcgccgggaggccgacccggcggcggcgctggccgcggcgcgccacgagttcggcgagcacggcggggtgaacatgtccatcgaggcgtcggcgacgttcacggtgatggagccggacaccatgcgccgcctcttcgccggggagctcggcccggagcgcggcgacctgtacatctacagccgccacttcaacccgacggtgctggcgctggggcggcagatggcggcgctggagggcaccgaggccgcgtactgcacggcgtccgggatgtccgccatctcctccgtgctgatgcagctcgtcggcgcggnggggcacgtggtggcgtcgcggtgcctgtacggcggcacgcacgcgct

SEQ ID NO: 20869 - DNA, 458 bp, Oryza sativa
  unsure (1)..(458): unsure at all n locations
  Clone ID: uC-osflM202016a04b1
agtttttgtcgcgtcgcaccgaagcagagtagagaaggagaggagcggagcgccatcagccgcgccatcgagtgatccgatggctctcgctctctccacctctgctgctgctgccgctgccgccgcggcgcgggcgctcgcggcgagggtgacgacgacgaggggttacgccgcgtcggcagcgtcgtccgcgatgaggcgggcggcggcggcggtggttgggaagggcgctgcggggatgacgcacgccaaggacgggtcgtcgacgccggctgcgagggaggggtcgtgggtgcccgaccccgtgacggtccactacacgccctncaacttcgccggcggagagaacgctgtcgacggttacaccggccacctngnccgtagttacgcccgcgcgtgatgcgcgcgacctccccatcggaacgaccgacgacgacgccatccatccatatatatct

SEQ ID NO: 20870 - DNA, 495 bp, Oryza sativa
  Clone ID: uC-osflM202016a06b1
tccttttcccttccgactccccaacggcggcggcggcggcggcgtggtgcggcggcgagggttttaagtaggctgcgcggcggagaacgccggggacgcgagcggagtgatctagccttatcctccttcgtcgcctccggattggtttcgcggcggccggccgtgtctcctgactgcgtctgtggccgggatgagggtgaaggtgatatcgcgctccaccgacgagttcacgcgggagcgcagccaggacctgcagaaagtattccgcaattatgatccagcacttcgttctcaggagaaagcggttgaatacaccagggctcttaatgctgcgaagttagagaagatatttgctaggccatttattggagcaatggatggccatgttgatgctgtatcatgcatggcgaaaaaccccaattatttgaaagcaatattttctggctcaatggatggcgatattcgtctgtgggacattgctgcaaggaagacagt

SEQ ID NO: 20871 - DNA, 522 bp, Oryza sativa
  Clone ID: uC-osflM202016a07b1
gttttccctctacagggcagcatttgatcaacacctaggtgtatcccctcgtgtttctacccaggtggatcaagaaatacaccatcagaaaagcagaaagaaagctgatgaaggtgccctccgattgagaaatatcaaggagtcagcatcctacaacttgccaacagtatcaacagtttcagattctaaacatgggctgtcgagatcatcttcaggacattctagccttgcaaatttcttgagtgcttcaatcgctgaatatgtgccaaagatctcttgcaaactttcggaggacatcgtaagatgcatttctgcagtatactgcaaacttgcaagccagccatcacaaaatttggcggattttgagactttatcaactccttcattctcctcttcatcaagtacattttctttaaagcaccgtgttgatagttggagtccccgatgccattacaatgtcaacacaagctctgacaaatatgattcattgaatgagaaaagtgaacaatacaatgggatgat

SEQ ID NO: 20872 - DNA, 525 bp, Oryza sativa
  Clone ID: uC-osflM202016a08b1
ggccgcccgccgctcgcccgcttcccctccggcgacttcctcctctcgcagagccccatctccttcgacgacctccgccacgccacctcccaggttggggatttcggagcggacaatcgagctggaattagccggacgctgcaccggatcagcgcgattcgcaaccggaagggcgccatcataggcctcacttgccgggttgggcgtgccgtgcctggaagtgctaatttgctgcaggatttggtgaaggatggtgggtcattgctgctcatcggtccaccgggtgtggggaagacgactgtcataagagaaatcgctcgaatgctagctgatgattataggaagagggtgatgattgttgacacatccaatgagataggtggagatggagatattcctcacccaggaataggcaatgcccgcaggttacaagtgcctaaccaagatatgcagcataaggtattgatagaagctgtggaaaaccacatgccccaggcaatagtcatcgatgaaattggaacgaag

SEQ ID NO: 20873 - DNA, 450 bp, Oryza sativa
  Clone ID: uC-osflM202016a10b1
tctctctccactccactcgctctccgttcaccactccaaacgcgtagcgctagcgccgcccgccgcacgatgagcgcggtgcccgtcgtgtcctccgcgctggccggaccagcggtcgcggtcgcggtcgccaggcccgcttccgggtccgtcactcgcctccgtgcgccggcgccccacggcgtgccggccggctccgtgcccctcgcgtccggacttgccaactgctaccgccggtccgccgccgccgcccggaggcttccgatcccgtctgcagcggggggcggcacagttggggatgcttttgttatagaagacacaacaaatgtgaaatttcctcgagagatagctgttccgggctacaccgagcctttggttattcttggaacaggtacattttcttgtccgtttccctacgggattaaatcggcttgactatgctacttcgca

SEQ ID NO: 20874 - DNA, 520 bp, Oryza sativa
  Clone ID: uC-osflM202016b01b1
ctttcgtcggcctctcgactcctggaacctggaggtgttctcgtgttagtcccccctacgcctccgccgccgccgccgccgccgcaatgaactccggagacgccgaggcagcagcggcctccaagaaggcccggtgcaagaaggagaagaaaaagaagcgaaaggacgactgcggagccgcagaggcttcagcggctgacgaagaaatcgtccacgacaagaagaggaagaagcagctgcaacagaagaagaacggagatgacgtggcggttccgaatcggaagaccacggtgagcatcgccgtcgccggatccatcatcgacaacgcccagtccctcgagctcgccaccctcctggcaggacaaatcgcccgcgcggcgaccgtcttccgcatcgacgaggttgtggtcttcgacagcaattcctcagtggagaacagcggcgatgacgtagagagtggcgcgcgcttccttgttcgcatcctacagtatctggagactccacaatacctgcgccgacg

SEQ ID NO: 20875 - DNA, 467 bp, Oryza sativa
  Clone ID: uC-osflM202016b02b1
gagttttctacggcgcgtccgaggaggcagcggcggtatccggcaacagtgctgaaggtgtggacaggtttggggacacggacaacaacgataatgcggttccggaggagccgaataacacggtcccttctgaagaagagaagttcagtgagaacacagtggagaagccagtggagagcagtgaagagaaggcgccaccgaaagaaaaggaggagagtaaggatacatttgatgatgcaaatgggaaaacagaacactcgagcgccaaggaggatggggattctgaatcaggatctgggcagtcggatggttcaaagaatggcgacgaggaggagaagagtgaggagaagaaagatgatgagcaatctgatggtgagaggaaagatgatcaagaagagaaggctgaaggcagtggctcaaaggacacgactgaccagccacatattgaggagacagtggatgaaagt

SEQ ID NO: 20876 - DNA, 489 bp, Oryza sativa
  Clone ID: uC-osflM202016b03b1
cccattttcaacaatggcatcctcttgtctccttctggcctgtgtcgtggcagcggccatggtgtctgcagtgtcatgtgggccgcccaaggtgccgcctggccccaacatcactgcggcctacggcaaacagtggctggaagctaggggtacctggtacggcaagccaaagggtgccggccccgacgacaacggcggcgcttgtgggtacaaggacattgacaaggctcccttcctcggcatgaactcatgtggcaatgaccctatcttcaaggatggcaagggctgcggctcctgctttgaggtcaagtgttccaagccagaggcctgctccgacaagcccgtcatcatgcacatcaccgacatgaacactgagcctatcgccggctaccacttcgacctctgcggacatgcttttggtgccatggctaatgaaggcaaggatgaggaactccgcaaggcgggaattatcgatatgcagtttcgtcg

SEQ ID NO: 20877 - DNA, 506 bp, Oryza sativa
  Clone ID: uC-osflM202016b06b1
cactttctctccttcctcttcctctgctcactcagctctcccccgcgcgcgccaccgtcgtcgccatgtcgggcaacatcgccttcggccgcttcgatgactccttcagcgcggcctccctcaaggcctacgtcgccgagttcatctccaccctcgtcttcgtcttcgccggcgtcggctccgccatcgcctacaccaagttgaccggcggcgcgccgcttgacccggccgggctggtcgccgtggcggtgtgccacgggttcgggctgttcgtggcggtggccatcggcgccaacatctccggcggccacgtcaacccggccgtcaccttcggcctcgccctcggcggccagatcaccatcctcaccggcgtcttctactggatcgcccagctcctcggcgccatcgtcggcgccgtcctcgtacagttctgcaccggcgtggcgacaccgacgcacgggctgtccggcgtgggcgcgttcgagggcgtggtgatggagatcatc

SEQ ID NO: 20878 - DNA, 507 bp, Oryza sativa
  Clone ID: uC-osflM202016b07b1
ggttaggctgccaagaaccaggcagctgtgaacccagagaggaccatcttcgatgtcaaacgtctcattggaagaaagtttgaagacaaggaagttcagagggacatgaaacttgtcccctacaagattgtgaacaaggacggtaagccctacattcaggtcaagatcaaggatggagagaacaaggtcttcagccctgaggaggtcagtgctatgatccttggaaagatgaaggagactgctgaggcataccttggcaagaagatcaacgatgctgtcgtgactgttcctgcgtacttcaatgacgcgcagaggcaggcaaccaaggatgccggtgtcattgctggcctgaatgttgctaggatcatcaatgagccaactgctgctgctattgcgtacggtttggacaagaagggtggtgagaagaacatccttgtctttgaccttggtggtgggacattcgatgtcagtatcttgaccattgacaacggtgtgtttgaggtgttg

SEQ ID NO: 20879 - DNA, 522 bp, Oryza sativa
  Clone ID: uC-osflM202016b09b1
gcgtaaaatcatcctccctccctttctcgcgtgtcgcgtcgtccccaaatccgctactcgctatcctccttcctccatgattcccttctcgaatcttctcactttcttctgaagtgctccgctccgctccgctccgatccaatccactccgcccgagtcccccacccatcggcacccaccagcgcgagggtgggtggccatcgatcgatcggcccatcgccgattcccgcgggatctgcggcggcgcggggggatttgatcggagggtgaatatgtcgacgccagcaaggaagaggttgatgagggatttcaaacgactgatgcaggatcctccagctggcataagtggggccccacaggacaacaatataatgctttggaatgctgtaatttttggccctgatgatactccttgggatggaggtacgttcaagctgacacttcagtttactgaagattatcctaacaagccacctacagtgcgatttgtttctcggatgtttcatcctaacatttatgctg

SEQ ID NO: 20880 - DNA, 515 bp, Oryza sativa
  Clone ID: uC-osflM202016c01b1
cggtctcgtgggcgcaaagttccaatttcttcaagccgaattaatccctataggatgattataattatccggttggtggttttggggttcttcttccactaccgagtgatgcatcctgtgaatgatgcatttgctttgtggctcatctctgtaatatgtgaaatctggtttgctatgtcttggattcttgatcaatttccaaagtggcttcccatagagagggagacgtacctggaccgcttgtcactgaggtttgacaaggaaggtcagccatctcaacttgctccagtcgacttctttgtcagtacagttgatccatcgaaggaacctcccttagtcacagcaaacaccgtcctttccatcctttctgtggattacccagttgaaaaggtttcctgctatgtttctgatgatggtgctgcaatgctcacatttgaagcactgtcagaaacatctgaatttgcaaagaaatgggtccctttctgcaaaaagttcaatatcgagcctcgtgctcc

SEQ ID NO: 20881 - DNA, 521 bp, Oryza sativa
  Clone ID: uC-osflM202016c04b1
atttttccctagctagctagctagctaagctagcacgcacccatggcgtcgtcttccacctcgagctcgctcgccgcggcagcgatggtggccgtcgtcctcctcctcctgggtgccaccgccacgtccacccaggcggcgcgcctcctcgacgaagaactccccaccgccgccatcccggcgatccccggcgtccccggagtgccggcggtcggccccgggatcccggtgatccccggcgtgcccggagtgccggtggttggccccgggatcccgttcgtgccggtgatccccggcgtgccggtgatcgtgccgatcatccccggcgtgccgatgatcgccggcatgacaaccctgccagtgccgccatttgtgccgccgattgatcccggcgccggcgccggattccccggcgtgccgccggcgtcgtcgaccaccgtgcaggaagacccacagccgccgatgccgtccgtcgttccacccgtgccataggtgttaatcaactccggcgagccaccatg

SEQ ID NO: 20882 - DNA, 504 bp, Oryza sativa
  Clone ID: uC-osflM202016c05b1
ggatattattacctgatcaggtaggcatatttttttcatttcattttttgggacaaaactgaatgtcttttgtacttgtaagataataaagattacaatttagattagcgcaatgcttttactctgttttataggaattcgaatcaatagcaatgtgtagggataaatacatataggaaaaatcacataacactaaataggcataaatacatatgaagtcagaaaaggatctttccataacacatttctgtcctctttctacattttttctctaaagaaagctgatccatgcccattggaaaggtgcaagaacaatagtccattaactttgcctagtaaccggtacatccattggtccatagtattttcttggttcttttaacttgcatgcatggtgcgctctgcatttgtcagtatgttgctagcaatacgcagtattaatagtatgtaactaatttcttttctgaatgtgatgggacaaatagctttcaagaatacaaatta

SEQ ID NO: 20883 - DNA, 509 bp, Oryza sativa
  Clone ID: uC-osflM202016c07b1
ttttgtcttcctcgcgtgcagaataaccacttcaccgccggatctcacggcgccccaagtttaggcgtttacctaaccaccccacgaatcccagccgccgccgccgacgagcaggaggagcgatctgactagtaagccggagcacatggagagctcgtcgccgtcggtgccgttcccgctgctgcaggcgccggtggagagcacgtacagggcctgcaccatcccctaccgcttcgcctccgacaacccgcgaaaggccacccccgtcgagatccagtggatcgacctcttcctcaactccgtcccctccttcaggcagcgcgcggagaacgaccccacggtgcccgatgcgcccgccaaggccgagaagtttgcccagaggtacactgcaatgctcgaggagttgaagaagaacccagagagtaatggagggccaccagattgcattcttctttgcaggcttcgtgagctagtccttagagaactgggatttagggatatattcaaga

SEQ ID NO: 20884 - DNA, 506 bp, Oryza sativa
  unsure (1)..(506): unsure at all n locations
  Clone ID: uC-osflM202016c08b1
tttttgcagcagcagcagcagctgagcttgaagcagcagagcgaggtagacatggccgccgccaccatggccctctcgtccccggcgctggccggcaaggccgccgcgaaggtgttcggcgaggggcgcatcaccatgcgcaagtcggcggcgaagcccaagcccgccgcgtcggggagcccgtggtacggcgccgaccgcgtgctctacctcggcccgctctccggcgagccgccgagctacctgaccggcgagttccccggcgactacgggtgggacaccgcggggctctccgccgacccggagacgttcgccaagaaccgggagctggaggtgatccactccaggtgggcgatgctcggcgcgctgggctgcgtgttcccggagctcctcgcccgcaacggcgtcaagttcggcgaggcggtgtggttcaaggcggngtcgcagatcttcagcgagggcgggctcgactacctcggcaacccgagcctgatccacgcgcagag

SEQ ID NO: 20885 - DNA, 524 bp, Oryza sativa
  unsure (1)..(524): unsure at all n locations
  Clone ID: uC-osflM202016c09b1
ctttctcgagcctcatttcccccccaatcttcttcccaaaagcagctccatccaaacccaatcaagccccactccccaccaacccccttccctcaattataagcctacaactactgctgattgcttcagactgatccaagaaagggaagtttggttgtggtgcagagaggtgcagaagggggagggagggctctgaattttcaagaaagggaccatctttctgctgctgctgctgtccgggttggtgcttgttgaatttgaggctaaagaagtcggaattggaggttttgtaagagggaaacaatggctggcaaggaaatctaccacaagatgaaggacaaggtgaaagatgcttttagttcgtcaggaccagaaacagggaaaggaaaaacaaaattgtcaggcaagcgtgtcaagcatggttaccatcttgtgaagggaaaatcaaatcatccgatggaggactatctagtggcagagtacaggcaagaaggagagcatgatcttgggctgnttgcaatatt

SEQ ID NO: 20886 - DNA, 511 bp, Oryza sativa
  Clone ID: uC-osflM202016c10b1
tttggtccggccatatgatgcatgcgttgcatggtatgtacctggtacctgccgaagatcggcccctggggatgatagccccccacaagctgctacagtggggagcaactttgccaacgaccactctgtcatacttcaccaggctgtatgttccagaattgtgtatagtttatgattttttctgtgtgacgtttgctatcttatttacactttttgcagtatgatggtttccgggcaatagctgcggagacaggctcattgtatgagcatctaaggcaaaaagaccatcagacaagtgatgatatcatgattaccttggacaaacttcagcagattgctttgcatcatatgaaggatattgcctgccatcaagccaacaatgtagttcaaccatctgatcagagtaattctagggctccagtgccagacacagatgctgctccaccatagttaacggtgctaccaagcaattgatggagcgcgaggatgtaatcaagaatcctgtacaaat

SEQ ID NO: 20887 - DNA, 506 bp, Oryza sativa
  Clone ID: uC-osflM202016c12b1
ttttatctttgcttctaattttgtacctttgtggttaaatgctcaacattcaggcttggagcaatttgtcgatgaggcaaaatcagtgagagtcatgagaagcctccagaaatcaggattactgcaacctgcaggaatcgcaacttccttatcaaacacagggcaacaatgggattttccaaacggatgggccccgttgcagcatctgatagtcgagggattgttgaggtctggttcaggagaggcaagggaacttgctgaggacattgccacgaggtgggtgagaacaaactatgatgcctataaggctaccggcgcgatgcatgagaagtacgatgtggtgacctgtggaaaatctggaggtgggggtgaatacaaaccccagactggttttggttggtccaacggtgtgatattatcattcttggatgaatttggatggcctcaagacaagaagatagactgctagtcatcatgatgaattgtaaaccccatcttcgcagatg

SEQ ID NO: 20888 - DNA, 520 bp, Oryza sativa
  unsure (1)..(520): unsure at all n locations
  Clone ID: uC-osflM202016d01b1
gtgtttttcaccacctgagtgccggtctccccgtgcacaagctccaccaagatttggaacaagaatgccggtaaatttgccgagttcgttataccagcaacggcctccttggttagctgcctcagttacaatcagaacaactatccctgtatgctcagcgaggccaaatgtggtgaactctagtgctggagcagctcaacctgctgttcagatcctctcggcctcgcctagaaaagaagaacctgaagctcgcacgaacaccagtgacacaagcaatgctgcaacggcgagttctgagctcaataagctccatatttgaaagtcacagttttggttcatctgagctttagtcagggctgagaacttaactctcagctgcatctcagttttgattgtttcttttcctttcattctttttatctccttgggtatttagctagatagacataactatatgaagagttggagagcgggcatctctcgcgatatctgaacctgttggattntttatgtaccacat

SEQ ID NO: 20889 - DNA, 492 bp, Oryza sativa
  Clone ID: uC-osflM202016d02b1
cgccgtccccgcctccgctcccacacgcccttctcgcccctcgcgcaccgatctccgctgtagttctccgcgccgcccccgctctccaccgcccgaacacagtcgctcgcctcgccggtctccactccgcctcgtcatccacttccactcgcccaccgccgaaaggtcagcgtcactggaatttaggctttcaataaagatctcctaaggcatatcaaggctcacgggcaagggatctccctcacagattcttcaaggaggagggactgcatactcagtattgccgtagcgtggtgccgccgcccatccttgagtatccaccgtcaccgactacccttctctgagcgggtgcaaatcctgccaattgaccccatctcaggagaacgtagagccatgcggttccgtgtagtattcctgtagtccactcctgcaatccacccgccctctgttttgtcaaacttctcatctccccttcccttccgccgccatgct

SEQ ID NO: 20890 - DNA, 515 bp, Oryza sativa
  Clone ID: uC-osflM202016d03b1
gggagtctgttcggcaagaaggaggaggagaagaaggcgagcccgagcggcggcaagtcggagatgttggagagcttcgacacgccgagcactccgatcccaaccttcgagtacaagtgaagaagaagaatcgcaggatggctgagtgcactgaagctcaggcagagattttgggtagtctggaaaaaaaagctacatcagagcgagatggaatgcttatttgacgaactcatgcgtgcgcacgacttgtttctagggctataaacctcccacagaggaaggtcttggcccctggctcttatatgtattaataatgtcataatgtatgtgaggctgtgatccgttttaatttaccatggtatgttttgcaactttgcaaatgatgtagcagtagcagtaataacctatagcattcttgtcattcagtgtactgggctcttaaaaagcctcaacttatgcttcaagctggcttataaaagtttgacacttttgagttaggatgtggaagttatgca

SEQ ID NO: 20891 - DNA, 522 bp, Oryza sativa
  Clone ID: uC-osflM202016d04b1
gcgtattaactaactagctaggccggccatggagacggtggccgcggccagctacacccgcggggcggcgacgcgctcgccagcgtgctgcgccgccatgtccttctcgcagtcctacaggcccaaggccgctagaccgccgagcacgttctacggcgagtcgctgcgggttaacacggcgaggtcgctgccgtctgggaggcagtccaaggcggcgagccgggcggcgctcagcacccggtgcgagatcggggacagcctggaggagttcctgaccaaggcgacgccggataagaacctcatcaggctgctcatctgcatgggggaggcgatgaggacgatctcgttcaaggtcaggacggcgtcgtgcggcggcaccgcctgcgtcaactccttcggtgacgagcagctcgccgtcgatatgctcgccgacaagctcctcttcgaggctctggaatactctcatgtctgcaagtatgcgtgctccgaggaagtccccgagctgcaagacatgggtggacc

SEQ ID NO: 20892 - DNA, 510 bp, Oryza sativa
  Clone ID: uC-osflM202016d05b1
gtccatggcgttcgcgaagcgggagaagcagtccatcaagaagctccagtcgtcgctcaagaagtacgcgccggactccgcgccggcgctcgccatcaacgccaccatcgagaagacgaagcgccgcttcgagaactacggcaagttcggcctgctctgcggcgccgacggcctcccgcacctcatcgtcagcggcgaccagcggcactggggcgagttcatcaccccgggcttgctcttcctctacatcgccggctggatcggctgggtcggcaggagctacctcatcgccatcagcggcgagaagaagccggccatgagggagatcatcatcgacgtcgagctcgccgtcaagctcctcccgagggggttcatctggcccgtcgccgcctaccgtgagctcatcaccggcaacctcgtcgtcgacgacgctgacatcggctactgatcaccacatggatgcttggctactcaagccccagttgatttggcagtggaggaagagggctc

SEQ ID NO: 20893 - DNA, 501 bp, Oryza sativa
  Clone ID: uC-osflM202016d06b1
tgcacttgcactgcgccatggcggcctcgaccaccctcgccttatcccaccccaaaaccctagccgccgccgccgccgcggcccccaaggccccgacggcgccggccgccgtctccttcccggtctcacatgccgcctgcgcgccgctcgccgcccgacgccgcgcggtcaccgccatggtcgcggcgccgccggccgtcggggccgccatgccgtcgctcgacttcgacacatccgtcttcaacaaggagaaggtctccctcgccggccacgaggagtatatcgtgaggggtgggaggaacctgttcccgctgcttcccgaggcgttcaagggcatcaagcagatcggagtgattggatggggctctcaggggcctgcacaagcccagaacctgagggattcactagctgaagcgaagtctgacattgttgttaagattggtctccggaaaggctctaagtcatttgatgaagcacgtgctgctggctttactgaagaga

SEQ ID NO: 20894 - DNA, 252 bp, Oryza sativa
  Clone ID: uC-osflM202016d08b1
tcttcctctctcctcctcgtcttcctcacttccacttagatagatgaatttatattttatttttttacgcgctaaatccacccgcgaaatctacccgcggatgcgagcgagcgggcgccgctgaggtggtggtggtggtggaggtggctccaatggcggaatcgtgagggggttgaggaaggaggagggaggaggagggagagagaagggatcatccttataaaatggttttcttgaaccagaccttttttt

SEQ ID NO: 20895 - DNA, 502 bp, Oryza sativa
  Clone ID: uC-osflM202016d10b1
accttaacctgctgcttttgctttggttaattagctgagagagaaattaagagagagatgagttgcagcagcagcaacagcagcgtccatggcttcttgtggctgatgctcgtttatgcgttctgtgcagctgttcaagctcagcaagcagcgagaactgatccagcagaagtggctgcactgaacacgatcctggggagatggggcctgcgggcgtcgccggcgtggaacatcagcggcgagccctgcagcggcgtcgccatcgacgagaccggcgtcgacaacaaccccaacatcaacccggccatcaagtgcgactgctccttcaacgccggcaccgtctgccacatcatcagactgagagtgttctcgttgaacgttgttggtcaaatacctgaggagctgcagaatctctcttatctgaataacttggatcttcggcgaaattacttgacgggtcccctgccatcctttattggaaacttttctgccatgcagtact

SEQ ID NO: 20896 - DNA, 521 bp, Oryza sativa
  Clone ID: uC-osflM202016d11b1
gttttgttgttagcttcgttttcttcttgtttcatcaatccaaggagtgtggaaggccacacgccaagattatatctatgctaatttgattagcagtaggattaattcagtggctagcgtagcttgattagttggtttaattagttggagagtaaagaagatgttgggagtgttcagcggcgacgtggtggaggtgccggcggagctggtggccgccggcagccggacgccgtcgccgaagacgcgggcgtcggagctggtcagccgcttcctcggcggcgccgagccggccgtgtccgtgcagctcggcgacctcggccacctcgcctactcccatgccaaccaagccctcctccgcccaaggtcatttgcagcaaaagatgacatcttctgcctgttcgagggagtcctggacaatcttggcaacctgaaccagcagtatggtctgtccaagggtgccaatgaggtgctccttgtgatcgaggcgtacaagacgctgagagacagagcaccttaccctg

SEQ ID NO: 20897 - DNA, 526 bp, Oryza sativa
  Clone ID: uC-osflM202016e01b1
ggatagtcccaagcgagaggagaggagaggggaggcgatggggagcgggagcaagaagaagagcggaggaggggatgaccagaggccgctcctctggaggctcccggaggtcacctccaccgagctcggcaagatcggccccgccttcggcctcggcgtcggctgcggcgtcggcgccggcgtcggcttcttcggcggtgcaggattaggttatggatttcccggactcacattaggctttggagttggagctggatgtggtgtaggatttggctttggttatggattggggaaaggaattgcttatgatcaaaacaaaagatactctaatgttggcacgatgttccaagaagctccaagtcttccgatggacaccgttgctggtttggttgatgagctggttgtgaacaccaaaaagcttgtgagagcaacttcaaaagagattgaaaaatggcgttgagcttataattgcctccatcagctgtgtcagcctatgaaaactgggttatcattgaaggttataagc

SEQ ID NO: 20898 - DNA, 502 bp, Oryza sativa
  unsure (1)..(502): unsure at all n locations
  Clone ID: uC-osflM202016e02b1
aacttttacaagaggtacgtgatacacatcaaggccggggcgtacatggagaacgtggaggtggggaagagcaagaagaacctgatgttcatcggcgacggcatcggcaagaccgtcatcaaggccagccgcaacgtcgtcgacggctccaccaccttccgctccgccacagtcgctgtggtgggcaacaacttcctggcccgcgacctgacgatcgagaactcggccggcccgtcgaagcaccaggcggtggcgctgcgcgtgggcgccgacctgtcggcgttctaccggtgcagcttcgtcggctaccaggacaccctctacgtccactccctccgccagttcttccgcgagtgcgacatctacggcaccatcgacttcatcttcggcaactccgccgtcgtcttccagagctgcaacctctacgcgcngccgccgctccccaaccagagcaacgtctacaccgcgcaggggcgggaggaccccaaccagaacaccggca

SEQ ID NO: 20899 - DNA, 527 bp, Oryza sativa
  unsure (1)..(527): unsure at all n locations
  Clone ID: uC-osflM202016e03b1
gtctttgtactcgcctctctccgcgccctcctccgccgccgctcgccgccgttcgtctccgccgccaccgccgccgccatgagggagtgcatctcgatccacatcgggcaggccggtatccaggtcgggaacgcgtgctgggagctctattgcctcgagcatggcatccagcctgatggacagatgcccggtgacaagaccgttgggggaggtgatgatgcttttaacaccttcttcagtgagactggtgctgggaagcatgtcccccgtgctgtcttcgtcgatcttgagcctaccgtgattgatgaggtgaggactggtgactaccgccagctcttccaccctgagcagctcatcagtggcaaggaggatgcagccaacaactttgcccgtggtcactacaccattggcaaggagattgttgatctgtgccttgaccgcatcaagaagcttgccgacaactgcactggtctccagggcttccttgtgttcaacgctngtggaggaggaacgggctccggtctcgg

SEQ ID NO: 20900 - DNA, 502 bp, Oryza sativa
  Clone ID: uC-osflM202016e05b1
gggtagtccggagttggaagcgatcgatggcggctactacgacgggacgagttgttgcactcggcgcggtggccgtggtggtggcgctgacattcctcgccggcggcgcggacgccgactgctacgacttctgcttcaaggactgcatggccagggagaacaacatggtcgactactgcagctacgcctgcgacaagacgtgccagccggacaagcccacgctgtactcgtcgtcgtcgtcgtcccgcctcgccggcgacatggagtgccaactctcctgcgccttgggctcctgccaccgcctccttccggacggcaagggcgccgtggaggcctgcttcgggcagtgctacgacggctgcaagaccacggcggcggccagactgccgaggcctctccgcgccggccactacgtgctctctagtccccctgatgacgtagaccatgatccggaccaccgctacgtgttctctagcccccatgatgacgtagaccatgatcc

SEQ ID NO: 20901 - DNA, 521 bp, Oryza sativa
  Clone ID: uC-osflM202016e06b1
gagtactcgaactctcgcctaccatttcgcccccctccgcaagcaatccaccactgcatcggcggcgagggctcaccggcggcgagccatgtgcggcggcgccatcatccaccacctgaaggggcacccggaggggtcgcgccgggcgacggaggggctcctgtggcccgagaagaagaagcccaggtggggcggcggcgggaggcgccacttcggggggttcgtggaggaggacgacgaggacttcgaggccgacttcgaggagttcgaggtggactccggggactcggatttggagctcggggaggaggacgacgatgacgtcgtcgagatcaagccggccgccttcaagagggccctctccagagataacttgagcaccattaccactgccggatttgatggtcctgctgcaaagtctgccaaaagaaagagaaagaaccaattcaggggcatccgccagcgcccttggggtaagtgggctgctgaaatcagagatcctcgcaagggtgttcgtgtct

SEQ ID NO: 20902 - DNA, 517 bp, Oryza sativa
  Clone ID: uC-osflM202016e09b1
cttctcacttcacacacaagctcaagctcaagctcaagctaagcttaagcttaagctaagcttcacgtaccacgatctcgcgaacgccatgagcgccaccatggacgcggtcatgccgggcgccgccggcgcgcacaacgcgacggcggcggcggcggcggggcggcgcggcggcggcatcgtcgccgggatgatggcgttaccggaggtgcagacggtggagctgctggtggcggtgtcgatcttcgtggcgatccactcgctgcggcagcggcggtcgcaggggctcccgtcgtggccgctcgtcggcatgctgccgtcgctgctcctcggcctccgcggcgacatgtacgagtggctcaccggcgtcctcgcgtcgcgcggcggcacgttcacgttccatgggccatggctcaccaacctccactgcgtcgtcacctccgacccgaggaacctggagcacatgctcaagaccaagttcgggagcttccccaagggcccctacttccgcgacaca

SEQ ID NO: 20903 - DNA, 429 bp, Oryza sativa
  Clone ID: uC-osflM202016e10b1
ttgtgttctaagctgttgcagcgagcttaattaagcttaaatgaattgaagaaaggcgaaccatcgagcagccatcaacattaagcattgcttgttaattgtgctcgatctatgtagtagtagtagcagcttgttaaccagtctagattgtctttttttttttctcctacgaagcatggagtttgtcatctcagtttgggtaagaaaaactagtagcacctaatcagccatatatcgatgttcaagatccagtaactgagaattaattgacactaaaccaagtgtcaaagattgacctgatctggttactgcatcataagttttaagattgttgcaagttgttgattgaaacactctttgttttggagatgtaagccgtttctatttccatttccattatttgatcggtgttattatacacactgatac

SEQ ID NO: 20904 - DNA, 487 bp, Oryza sativa
  Clone ID: uC-osflM202016e12b1
tgttgagcaaatcttgggttatattggacgatccactgagcttatggatagatctccttctatattatcaggtgttcttgatctactgaaggcattatgggaaagtggtgctcaatttatatacattttagagaaactgagaagttctagaacattctgggagaacttatcatgctgtattcgtgctgcttttgctagttaccctatcgacagcgttgagactgttgatgaaaaaaaaatctttgaggagcaaaaagaaccttctgttgcaccttgtccaagtgacatagtgctcaaatggtttgatagcacgactatggaggatttggtaaatcatctatcaagtaatgggtaccaaaatgatcttcttcatcgtgctaaggtagcatcctgcctttgcattatccgtctattaacaaagctgtccagtggtgatactggaagcttgtcattctcgctagtgaagaagattcagctcatatctagt

SEQ ID NO: 20905 - DNA, 465 bp, Oryza sativa
  Clone ID: uC-osflM202016f01b1
aactgtggtcgcggcgcgtcgccaccatgctgccatggctggtgctcccgctcattctcctctgggcgcccgccgctccgcccgccttcgcgaggagcgccgcgcccacgccctccagctccacaagctccgcaagaccgccacccgtcgctgccgcaactgcaacaacccctaccgcgaccagaaccccggcggcggcaagttcatgtgctcctactgcggccatgactccaagcgccccgtcctagacctcggccctgccgggaccctccccaccggctggccctgctccctggattggcccaatgctgccggtgaccctgcctactggctcgaccttcgctgctcctccgataacctggtctcggggttctcggggagcttgttctacttcttctgcgtcagcatgaggcggttctggagggaagcgctcagatttggctccttgggggacggcgatggctt

SEQ ID NO: 20906 - DNA, 357 bp, Oryza sativa
  unsure (1)..(357): unsure at all n locations
  Clone ID: uC-osflM202016f02b1
gtcatttttctgatgacttaaatgtttaatatatgggtatagaataacagttttcagtataagtggatgtaaaaggagtatgtcaaccatcattttcattcatgtagattgtatgatgtgtttgtacagaagaaaaaaaaagccaaaaaagaaaagcagactactgaatttttgcctcanaaaaaaaaaaaaaaaaaaaaaaaaaaaaaaaaaaaaaaaaaaagaaaaaaaatataaagggcggccgatttaaatggaaccagagttcacatacacatgtatgcaatataataactttgggggggcgccttttaagttccattctttggcccccgttttacaaaaccttaaattttt

SEQ ID NO: 20907 - DNA, 532 bp, Oryza sativa
  Clone ID: uC-osflM202016f03b1
gagatttagaagaagaagaagaagaagaagaagaagacatcaagaacacgtggagcagaagcttctctgccggcttctatcgtagctctcaaggataaagaaaatctgctgcagaggtacaagatctagtggcagaacatgatgagcaatcttaagcttggggtggaggttaccagtgctcatgacctcctaccaaaagagcagggcacatgcaacccctatgtcgagatcgaattcgatgaccagaagttccgcacagccatcaaagagagggatatcaaccctgtctggaacgagcagttctacttcaacatatctgatccatcccgcctcactgagaaagacctcgaggcgtatgtgtaccacgcaaaccgcgccagcaattccaagacttgccttggcaaggttcggatctccggtacatcctttgtcagccactcagatgccacacctcttcactaccccctggagaagcgcacgatcttatcccgtgctcgtggtgagctcggtctcagggtgttccttacagatg

SEQ ID NO: 20908 - DNA, 508 bp, Oryza sativa
  unsure (1)..(508): unsure at all n locations
  Clone ID: uC-osflM202016f04b1
atttattcatctccatcgacaaagctagctaagcccagtcatggccgcctctcccgcaatgccgtcactcctcctcctcctcctcctagccgttctcgtctcggcggccgatgcctacgactccgccgccagcgccaacaccaacgccggcgccatccccgaccccaacatcttgaacatggaggccatgtgccccaagacgacggacgtgaaggcgtgccagcaactggtgaagaacatgccgtccaacatcgtcgcggggaagaaggacgccaggagcatcgcccgggggtgcatcgccaccgcctggttcgtggcgagggacggcgccaaggactgcaccgccgccgtggacgagtgcaaggacaaggtcgaccagtgcctcgacagctgccgccacgccttcgccgccgtgaacgacgccctggagccccagggcaccggcgacgacgccgtcaaggtccccgaggacgagaagctnctcgccatccacgccagcctcacgcag

SEQ ID NO: 20909 - DNA, 483 bp, Oryza sativa
  Clone ID: uC-osflM202016f07b1
cagttatatagtgaagagtgtagctgggcaccaatttatgtgaggcagtcaaattttaagttgcctgcagatccgaccactccaattatcatgattggtcctggtacagggttagcaccatttagaggcttcttgcaggaaagattagctctaaaacaatctggagttgaactgggcaattcagttctcttctttggatgcaggaaccgtaatatggactacatatatgaagacgagttgcaaaacttcattcaggagggtgcactttctgagctgattgttgccttctctcgtgaaggaccagccaaagaatacgtgcagcataagatgacagagaaggccacagaaatttggaacatcgtctcacaaggtggttacatatatgtgtgcggtgatgccaagggtatggcaagagacgtacacagagctcttcatacaattgttcaagagcagggatctttggatagctccaaaaccgagagc

SEQ ID NO: 20910 - DNA, 514 bp, Oryza sativa
  Clone ID: uC-osflM202016f10b1
gtttgaggacttcgccaatcacaacgcatttgatttgcttgcaaaatacagcaagagtcatcttgttttcaatgatgatatccagggaacagcatctgtggtccttgcaggtcttttatcatcactaaaggtggttggtggaaccctggctgaacacacttatttgttccttggtgctggtgaggctggaactggtattgcagaactcattgctcttgagatttcaaaacagacaaaggctccaattgaggagtgccgcaagaaggtttggctgctggattcaaaggggttgatcgttaactcacgaaaagaatccctccaggcatttaaaaagccttgggcacatgagcatgaacctgtaacgacactgttagatgctgtccagtccatcaaacctactgtgctgattggaacatccggagttggcaaaacttttactaaagaagttattgaggccatggcttcctttaacgagcgacccgtcattttctctctgtcaaaccccacatcacac

SEQ ID NO: 20911 - DNA, 519 bp, Oryza sativa
  Clone ID: uC-osflM202016f11b1
gtttggcacgcccatcgccaactggaccaggggcacggagctgtacgagcggatggtggggcgcggcagggcggccatggccaccgccggtgcaggtgcaggggccaggatgggggcgctgctgtggtaccagggggaggcggacaccatccggcgggaggacgcggaggtgtacgcccggaagatggagggcatggtgcgcgacgtccggcgagacctggcgttgccggagctgctggtgatccaggtggggatcgcgacggggcagggcaagttcgtcgagcccgtcagggaggcccagaaggcggtcaggcttccttttctcaagtacgtcgacgccaagggcctccccatcgccaacgactacacgcacctcaccaccccggcgcaggtcaagctcggcaaattgctagccaaggcctacctatccacgctctaattatatcatttgcgttcactgctggctactaagtactgattcattcctccccttcccctctatgcaaaatctgtcatatg

SEQ ID NO: 20912 - DNA, 296 bp, Oryza sativa
  unsure (1)..(296): unsure at all n locations
  Clone ID: uC-osflM202016g01b1
tgtnatagtgacagagcttatgtttgctgattcaactggatcatggggtactcctttggttccagttgagcgttctccaggtatcaatgatattggcattgtcgcttggatcatgaagctctccacaccagaatttccaagtggccgggagattattgttgtttcaaatgatgtgacatttaaagctggatcatttggtcctagggaagatgctttctttgatgcggtcaccaaatcttgcttgtgagaggaaacttcctcttatctacttgtcagcaactgctggtgctaggctc

SEQ ID NO: 20913 - DNA, 482 bp, Oryza sativa
  Clone ID: uC-osflM202016g02b1
ctttgtatttgcatccaacagcagctgccatagttgcaagtgagctagagctcagagaagaggaggaagaagaaggcgtcaatggcgaccaccatagctgcgatggccatgcttaagccgtccaagatcgtggcgcggacatcgccggcgccgtcggggagcggcagggtgcctagcatctcgctcaagagcctggccaagaagggcatgtcggtgtcgtcgtcgtcggcggcggcgcccgtggcggcggcggcgatggcgggcgcgttcttctcggcgctggcgtcgacggacgcggcgctcgcggcgcagcagatcgcggacgtcgccgcggcggcggcgggcgccgacgacaaccgcgggctggcgttgctgctgccgatcgcgccggccatcgcgtgggtgctctacaacatcctccagccggcgctgaaccagctgaaccgtatgcggtcggagcaggtgctcgtcgccgggctcgg

SEQ ID NO: 20914 - DNA, 527 bp, Oryza sativa
  unsure (1)..(527): unsure at all n locations
  Clone ID: uC-osflM202016g04b1
cactctagccgccgccgcctcctcctcctctcgccttctcccgtcttctccttcgagttagctacctccttattcaaccatgggtaaggagaagacgcacatcaacatcgtggtcattggccacgtcgactccggcaagtcgaccaccacgggccatctgatttacaagcttggaggtatcgacaagcgtgtgatcgagaggttcgagaaggaagccgctgagatgaacaagaggtccttcaagtacgcgtgggtgcttgacaagctcaaggccgagcgtgagagaggtatcaccatcgatattgccctgtggaagttcgagaccaccaagtactactgcacggtcatcgatgcccctggtcaccgtgacttcatcaagaacatgatcacgggtacctcccaggctgactgtgccgtgctcatcattgactccaccactggtggttntgaggctggtatctccaaggatggccagacccgtgagcacgctcttcttgctttcactcttggagtgaagcagatgatct

SEQ ID NO: 20915 - DNA, 508 bp, Oryza sativa
  Clone ID: uC-osflM202016g08b1
aattactctggccttctgttgtggttatcctctgtaatctcatctcatgtcgaagggctggacagtgtaaaaaactcctattcttctacagtaattgggtcagcgttggaggtagtgaatgatttgacatcatcaagattaattgcagaatggctccaagaaaccgcccttgagcaactctcaagaatatctaaatacctttatgtccttgttgaagatatgaaattgttgaaaggaaatgttccattgctaacttcagtgctaaatgtgattgcatcaacgatgaggttgtctatgaaaaggaagatttaccaaccacatttctctttatccctccatggcatacataaattgtgccgaactattggtggcatctcaagaagcatagaagttaagcttgcaatgcaacttggcattgatgtcattcttatgaatggtcctctgccagttttgtctgaaatggataagtcgatgacagcaactgttgtttcatgggcaacttctaaca

SEQ ID NO: 20916 - DNA, 457 bp, Oryza sativa
  Clone ID: uC-osflM202016g09b1
ctttattgtgacatggtatcagagcaagagcaagggatcaaaccctaacgtcgatccggagtccacgccggcacgccggtggcagctcgccaccggcgagcccatccaatccgtgcacatcctcgtcagcttcgtcgtccaccaccgtcgagccgtcaatcgtggcagccaatcgtttcgtcgttcgtccacaagcagcaagcagatccagtcagcacaagcaacaagcagcatcaagcaatcaaatccacaagcaagcagcggatgcacgaacaagcattcagatccagttcttcgtcaccacgtcagtcgtagccaggccgtactcgtcgcggatcttgtcgtcgcgtctcgccgtggctcgtcgttgtcgccgcattcccattggccggtcgcggcgctctcttcatcgccgccagcgccgtcctcctcccatgtcagtcgtccagctttccgt

SEQ ID NO: 20917 - DNA, 518 bp, Oryza sativa
  unsure (1)..(518): unsure at all n locations
  Clone ID: uC-osflM202016g11b1
ttttcttacgtagagttagagctgtcaaacggtacagattcttcaattttagagcggagttagcggagctgctccataaatttatactatagaggtgtagctgggtttttgtcgctccacaactccactccatcttaatagacccattaaaataggcacactttgatgccaaatttgctgacttgtcaaatgggaaaaatttgcaggattacacggcgaagctgtcggactttgggctggcgaaggaggggccgcagggggacgcgacgcacgtgacgacgcgggtgatgggcacgcacgggtacgcggcgccggagtacatcctgacgggccacctgacggcgaggagcgacgtgtacagcttcggcgtcgttctgctggagctgctcaccggccgccgctccgtcgacaagcggcggcgcggccgggagcagaacctcgtggactgggcgcgcccctacctccgccgcgccgaccggntgcaccgcatcatggaccccagcctcgagctgcagtac

SEQ ID NO: 20918 - DNA, 525 bp, Oryza sativa
  Clone ID: uC-osflM202016g12b1
ttctccgtcgccgtcgccgtcgactcctcgtcgccggcgtccccaaaccaagcaaaatgccatctccgtctctcctcctccaccaccaccaccaccgcctctcccctcgcttcgccccctcccgctccccctccccccgaaccctatcgctgcatcctgctcctcgcctccgcctccgcctccggcttcgcgccagcgcccgcggcggcgggggcagcacacgggaccacgatgacggcgcgcggtccatcccgatagcgcggtgctacgaggcagccctcgcgcgcctcgacctctcgggaaccgcgcggcgggagcaggcggtcgcggcggcggcggcggccgatggaggcgcggctgccgaggctcacctcgccgctgtcgccgacgccatggtcatggaggccttcctccctggacccgacggcgcccggcgcagcgccatgtccacacggctgattttgcaagcaaatgaagttacagagaaggccagtaagctaaagaaagaccttggcactgaatttt

SEQ ID NO: 20919 - DNA, 503 bp, Oryza sativa
  Clone ID: uC-osflM202016h02b1
gtcttttccgagggctgcgagatgggacccgccgccgctgacgacgccgccgccggcgaggaccaggctttgtccgaccttcgtgaaaagcatcgaattgacctggagagattaacgctaacatcgcagccactcagaacattggcgttatttgcattagccattggacagagtataaaaagcacatgtttatgtgttctgaaagatagtgctcggttgaagttcttggttcttttggttgcttctgcctgtactccgctcttgttaactaacggtccacatgaaaagcatgttcaggagctgctttggtatatcagatttggattatggtgggtcatactaggggtggcttcatccattgggttaggctctggtttgcacacatttgtattgtatttagggcctcatattgccctttttacaatcaaggcagttcattgcggacggactgatttaaagagtgctccttatgatactattctccttaaaatgagaccttcatg

SEQ ID NO: 20920 - DNA, 505 bp, Oryza sativa
  Clone ID: uC-osflM202016h04b1
gttcttgttcttgttcttgttcttgttgcaaagattcgagagagagggagagagagttttgtttgttgttgttgttgtacatggggctggacgtgggggagatcgggatggggctggatttgagcctggacctgaagatgttcgcggcgaggagcgccgtgaggatggcggcggcggcggccaaggaggcgacgggggtggaggcgtgcatcaggagcctcgaggaggagcgccgcaagatcgagatgttcaggcgcgagctcccgctctgcgcccgcctcctcgccgacgtgatcgagctgatgaaggaggaggccgggaagaggaggaaggacggcgacgacgcggaggcgaaggcggaggacggcgacaagacgaaatggatgagcaccgcgcagctctgggtggacagccgcggcagcgacgccgattccgagaatgaccgacggagcgggagcacctcgccggcgtcgaggttgctcggcggcgcggaggagtcgtcgtc

SEQ ID NO: 20921 - DNA, 359 bp, Oryza sativa
  Clone ID: uC-osflM202016h07b1
tcttagtcctcaaggcgaacggcctccatcttctccttccagctcctcccatggcgtccctcgtcgccatcgccatcgccatggctctcatggtggttcaacctggccggcagatgactgcctttgctgctcggacgtcgccggcggcggcggcggaggcgttctggcgtgccgccatgcccggcgctcccatgccggacgccatcgtcgagctcctccaccatgagcacggcgttgctagcgccggcggcaaggccaacggcggcggcgacggtccaccgccgccgatgaacttcaactacgacgactacagggccctgcctcggagcgacgccccttccccggatgcattgaaccgc

SEQ ID NO: 20922 - DNA, 530 bp, Oryza sativa
  Clone ID: uC-osflM202016h08b1
ttgtcgcgtgggttttttttttttttttttttgacacattggacaaccatgtatgtggatatgaacagcagtcttgagtcacttcaagtacatatatgacgctaatcacacattttggatacaaaatttacactggtcaggtcctgtggttgcattagcagagacaggtgtgaagttgaaatggatcggtgttctcgaccggaggatattcacacaatcatacttcttcacttccactgctactgccacttttccggatattgaacttgcacagggggcatgttgcgttgatatgcagccatttatcaatgcaggcacagtggaaatggtgcccacaaggaagttcacgcaggtctgcaccatcatcatatgccgaaaggcaaatgcaacactccgcatcttcaggtgcgagtactttctcaataggttgattggtgccacactctgtcattattccaccaaaaggtcctgtctcatcagcagtttgtttttcaggttcaattgttctccgaaatttgtatcttggaatt

SEQ ID NO: 20923 - DNA, 427 bp, Oryza sativa
  Clone ID: uC-osflM202016h09b1
tgatccgtgtgccgggcggggggggggcgcccggcccaagaaccgagtgcccccgccgccgccgccgcgatggacatggactcgtgggagcgcctcgccgcggacgccaggctgcagggttcgtgcttcgatgcgttgattgggatggaggaggcggaggggagcgaaggcgaggaggaggcggcggaggtggcctgcccgttctgcgacgaggagttcgacggattcgggctttgctgccacatcgaggacgaacaccaggcggagaacagggccggggtgtgtccaatttgctacgatgcggttgggatggacttggttagacacatcacttcggaacattccagtttctttaagggcaaatggagaaatcggcgagtttcacatggatcacattcttcaacgcgtgccacatttaaaaaggacg

SEQ ID NO: 20924 - DNA, 515 bp, Oryza sativa
  Clone ID: uC-osflM202016h10b1
acccctcatccccaaaagccccaaacccgaggaggcgagaggaggaggaggaggagctcgtcggcggcgagcgatggcggcggcggtggcggagctgtgggagacgctgaagcaggcgatcgtggcgtacacggggctgtcgccggcggcgttcttcaccgccgtggcggcggcggcggcgctgtaccacgtcgtgtcggggatcttcgcggggccgcccccgccgccgccgcggccgagggacgagcccgaggcggagccgctcccgccgcccgtgcagctcggggaggtctccgaggaggagctccgccagtacgacgggtccgatcccaagaagcccctcctcatggccatcaagggccagatctatgacgtcacgcagagcaggatgttctatggacctggcggaccttatgcgctattcgctggcaaagatgccagcagagcactcgctaagatgtccttcgagccccaggatttgaccggtgacatctctggttttgcccatttgaact

SEQ ID NO: 20925 - DNA, 409 bp, Oryza sativa
  Clone ID: uC-osflM202016h11b1
gtttatggtcaaaaaaccaaagtctaccgagtccgaagcagctggaagcagcggtggcaaggaggacgagaaggaagaggaagagaaggatggagctgctgccccacgccggaggtcccgaagggagacatgagacacaacataagcctttgattttgacgtcttatcgcggccattttggcggctgcttttttcctttttcgagaacttgggcttttatgttttttgagtgtataataggagattcatgtcgcctatgctccctgcagatgatgatttggtacccctgcttaaatggttagaacttcacggacagtagaagttagtcatgttgggtttatttgtgtgctgtgcctgacatataatcactttcttgatcacctagtgattattttctcgtagatagttg

SEQ ID NO: 20926 - DNA, 520 bp, Oryza sativa
  Clone ID: uC-osflM202016h12b1
ttctagcgagctctcctttcctttctcctacgcctaggcttctagaagcttcctttccaaataggggctaatctcctgagctcgaagctctcctcgtcagcttcaggtggtcgggtgctgcctcctcctcctcctcctcctcctcctcgtgctcaaatctccccgagagttcgtgctttgccgcgagcagcgagctgcgatctcgcctgaatccttcgtcggcgggggggatgaattgatcacgcggtgtgcgctttctgattctgtcgggttcctttcagatgcacgagcacgtcggtgtccgcctcctctttgcttgatttgcttccgctgctgctgttaggtgcgcgagagctcgtgatggggtgaagcgtgtgttcacaggattagattgcgctcgcctgattcgctgcatcttgttcttcttgctgccgcctacgcgacttgatttcgtcacgccaaagccgtgacaggctgattgctaccttgcttgccgatctgtgctttaaattccaccatt

SEQ ID NO: 20927 - DNA, 409 bp, Oryza sativa
  Clone ID: uC-osflM202018a01b1
agccggtccggaacccccagtgttcgacccacagcgaccgctctctgctaatacaaaaaaaaaaggaaaaaaaaccaccgcttttcgcagagcgcttgttctatctccctctctgctctggtcttcctgagctccgaggcaaggaagcttatggaaggatctgcaggatgacaacgagcaaccatggtggcgagtgcatggagccatcagaataagcatctagcttggagaccgatcgatcgaccgaccatatgtcgattcgaatcgatccgatggagagcagaagcagcagcaccagcagaagcgtggtgatgatgtgctgcgcgctgatgtagatgattgcggcggcggcacatgcgggcgaacaggaagcacaggaacgcactcgcccgatgagcatttaagaagc

SEQ ID NO: 20928 - DNA, 424 bp, Oryza sativa
  Clone ID: uC-osflM202018a03b1
gctgttcccttcaactccgctattatgcctaccgtcccgcgcgctctaccctgccagcacaaaatccccaatccacccgcgagctagggtttttccgcgccgccgcaccccactcgacccagatcccccaacctcctcttcctaaccctaccacccttcctccccggcggcggcgagaagcagtagcccgacagcgaagatgaggccgatcctgatgaaggggcacgagcgcccgctcacgttcctccggtacaaccgcgacggggacctcctcttctcctgcgccaaggaccacacccccaacgtctggttcgccgacaacggcgaccgcctcggcacctaccgcggccacaacggcgccgtctggtcctgcgacgtctcccgcgactccacccgcctcatcaccggcagcgccgaccagacc

SEQ ID NO: 20929 - DNA, 339 bp, Oryza sativa
  Clone ID: uC-osflM202018a04b1
gtttcttttttggattccaagccgtcccctcgtctccaccgcagccgctccaccgccgccacctccaagcccccgccgtccacgaccccagataggcgtagcgactgctcgatgcggcagaaggtgtccgacatggaggaggagctgctgacggtgaatgacgcctctgggaaggtgcaactcttgcagcgggaggtggagaaggccaaggagtccgagcgcacgatgctcgagccgctaatatacactacgaagcagctggagcagacgaagactctcgtggaggaggccaaactggagatcaccactctgcatcaaggcaacacgagcctcgaggcc

SEQ ID NO: 20930 - DNA, 419 bp, Oryza sativa
  Clone ID: uC-osflM202018a07b1
cattatccatccatttgcatcatcgtcgtcgtcttcttcgatcgatcggctgatccagtaattcctcgatcggtggacgtacgccacgctactatcatcatatcaatccccgatcgacaggttaacatcgatcgatcatccaagccagccatcgatccatcagaataagcagctagcttggagaccgatcgatcgatcgatcatatgtcgattcgattcgatccgatggagagcagaagcagcagcagcagcagaagcgtggtgatgatgtgctgcgtgctgatgttgatgattgcggcggcggcgcatgcgggcgagcaggaggcggaggagtgcgctagcccgatgagcatcgaggaggcgtgccggggggcatcggagacgcaccacgcggtggcctacgaccactgcgtggcgtc

SEQ ID NO: 20931 - DNA, 354 bp, Oryza sativa
  Clone ID: uC-osflM202018a08b1
tttgcttctcggccatcatcagtgatcctctacaatcattgactttcagcaaattaagatggctgctgccttctcctccaccgttggagctccggcgtccactccgaccaacttactggggaagaagctgaagaagcaggtgacatcccaggcttactaccatggcaagagctgcaacatcaacaggttcaaggtgatggcccaggagctggacgagggcaagcagaccgaccaggacaggtggaagggtctcgcctacgacatcttcgatgaccagcaggacatgaccagggggaagggcttctgggtctcccttttccaggctcccactggggattgcacccacgaggacgg

SEQ ID NO: 20932 - DNA, 424 bp, Oryza sativa
  Clone ID: uC-osflM202018a09b1
tttcgttcatcatccgtaccatctccatggccgtcgagaagctgattggcgacggggcgaccacggtggtggttccgggcatgatcccgtcgggatgctcgccgccggtgctcgtcaccttcgccgacgccggcgcggtggagttcgacgcgtgcaccggctgcctgagggagcccaacgaggtagcgacgctgcacaactcgctgcttctggacgccgtccaggagctccgggagaagcacccggatgtcgccatcatgcacaccgatttgttcagacacgtctcggagatggtccagaatcctgacaagtttgggcttcaaaaggatgttctcagcgcttgctgtggaggtcccggaaaataccactacaacaccaggataatctgcggggatgaaggtgggaccacctgtgtggatccatc

SEQ ID NO: 20933 - DNA, 444 bp, Oryza sativa
  Clone ID: uC-osflM202018a11b1
ttggctttagggctggggaactagatgacgggcactctggttttcaaaagatcgcaatgcttggccatccttccaaaaggaataagttatctgctgatgatgatgttggagatgctgcacgaagacaaggaaggatcggacgaggttttactccaaccaggcccagcacccctgcatcaattgacaagcttgaaaatgctccaactacaaaacaaagaagtgttaggacagtcactgagagaaatgaaagtaaatctggaagaccactgataaagaagatgtcggagcgcaaaggcaatgcacgtcctagacatataagtagcaatgcgcagttagactctcctgtgcaatcggaagatgatcatgaggagctccttgctgcagcaaattctgctctaagatctgctaattcaagtccattctggcggcaggttgaaccattct

SEQ ID NO: 20934 - DNA, 443 bp, Oryza sativa
  Clone ID: uC-osflM202018a12b1
cgttcgattcctcgccaccacacccacccacccaccaatggcgtcctcccgcctcctcctcctcgccgcgctgctcgccacggcggcggtgctggcggcgtcgcagaagccgaaggccgccacgccgacgaaggccacgccggcgtcgcccggccccgcggcggcggcggccgacggccccgcgccgacgaacgtgacggcagtgctggagaagtccggcaagtacaccaccttcctccggctcctccacgagagccgggtggacacccagatcaacagccagctgatggacagctacaacgggctgaccatgttcgcgcccacggacgccgcgttcgcggcgctcaagccgggcacgctcaactcgctgtcgtcgcaggaccagatccagctgatgctctactgcgtgctcccgcggttctacagcctcgccatgctcacca

SEQ ID NO: 20935 - DNA, 424 bp, Oryza sativa
  Clone ID: uC-osflM202018b02b1
gctttacctttcttgaggctcttgaccagatcaacgagcccatgaggccatcagacaagcccctacgtcttccccttcaggtcgtgtacaagatcggcggtattggtaccgtgcctgcgggtcgtgttgagactggtgtcctcaagcctggtatggtggcgacctttggtcccagcggtctgaccactgaggtcaagtcggttgagatgcaccacgaggctctccaggaggctcttcctggtgacaacgttgggttcaacgtgaagaacgctgccgtgaaggatctgaagcgtggttacgtggcctctaactccaaggatgaccctgccaaggaggctgccagcttcacctcccaggtgatcatcatgaaccaccctgggcagatcggcagtggctacaccccactgctggactgccacacctc

SEQ ID NO: 20936 - DNA, 425 bp, Oryza sativa
  Clone ID: uC-osflM202018b03b1
cgcttctcctccccctcgcgagctcggcggcgggcggcggcggcggcgcgatgaaggtctccatcaaaacgctcaagggctccagcttcgagatcgacgtcgagcccaccagcaaggtcagtgatgctaaaaagctcatcgaggttacgcaaggagataatgtctaccccgctgatcagcaaatgctgatccatcaagggaatgtccttaaaaacgacacaacacttgaagagaacaaaggtgttgagaacaacttcattgtgataatgctatctaagaagggatcatcaagtgctgcttcaagtacagctaaggagcccacaaaacagccctcagctgaccgggcgatacccactgcgcctgcaacccaaccacctgctccaccagcacctgttagcgagcctgtgactgcaccagttccaact

SEQ ID NO: 20937 - DNA, 435 bp, Oryza sativa
  Clone ID: uC-osflM202018b04b1
gcttaaacttacccctctcactcccagatacctgctgctgccactagcccactaccatggatccttgcaagttccggccgtcgagctcgttcgacacgaagacgacgacgacgaacgcgggagctccggtgtggaacgacaacgaggcgctgacagtggggcccagggggccgatcctcctcgaggactaccacctgatcgagaaggtggcgcacttcgcccgggagcgcatcccggagcgcgtggtccacgcccgcggcgcctccgccaagggcttcttcgagtgcacccacgacgtcaccgacatcacctgcgccgacttcctccggtccccgggcgcccagacccccgtcatcgtccgcttctccaccgtcatccacgagcgcggcagcccggagacgatccgcgacccgcgcgggttcgccgtcaagttct

SEQ ID NO: 20938 - DNA, 437 bp, Oryza sativa
  Clone ID: uC-osflM202018b05b1
gtctttgtttcccctccttcctcctctcctttcccctcctctcttcccccctctcacaagagagagagagcgccagactctccccaggattcagccatgaagggggccaaatccaagggcgccgccaagcccgacgccaagttggctgcgaagagcaagggcgcggagaagcccgccgccaagggcaggaaggggaaggccggcaaggaccccaacaagcccaagagggctccctccgctttcttcgtttttatggaggagttccgcaaggagttcaaggagaagaaccccaagaataaatctgtcgctgctgtaggaaaagcagccggtgataggtggaaatccctgaccgaagcggacaaggctccctatgtagccaaggccaacaagctcaaggccgagtacaacaaggccattgctgcctacaacaagggcga

SEQ ID NO: 20939 - DNA, 400 bp, Oryza sativa
  Clone ID: uC-osflM202018b07b1
ttgttctttttggctttagatatattcccaatccccaacctcccaataatccgatctctcccagttctgttcggatcaaggctgtgtcgatcgcaaaaaagaaaaaaaaaaaacaatttccttttggggtggttcatctgctgatcacttctttgtttcccgcgttttgttggggattcgattctcgggttaagattttctacacgatggccttgaacttggctcagagcgccgcggcggcagcgtgcttcgcgaccgccggtgatgcgcggcgagctgcttcggaggtcgccatgccgtcgtcgtcgtcgtcggccacgacgagcctgaggatgaagaggcaggcggcgtgcgagccggtggcgtgccgggcggtggccaggcacgtggcggctgcggc

SEQ ID NO: 20940 - DNA, 425 bp, Oryza sativa
  Clone ID: uC-osflM202018b08b1
tcggtttcccagctataccgcctctgactctgaggaaggggcgcagcaccaccgcccgatggggaagcccaagcccgcctccgccacagccgctcctcgagggcacaagaggcgcccgaagaggacaaggccctcggggaagggaggaggacccgagccgcgcgaggagaagcgcaagaggcgagagctcgatggtgtcggcctggcggaggagtcgccgccgccgggttccagcctaggcaaaatcttaagtaccgaatctggagcaataggcctagagcagagtgatgaagatgacatggaagatgaacacactgttcctggtgacgatgagacaaatgatatgataaacaataaagatgatgctttcgatgaaatggaggcttcatggtcatttcatcggcatgttagtcgcatcataacga

SEQ ID NO: 20941 - DNA, 422 bp, Oryza sativa
  Clone ID: uC-osflM202018b09b1
tctgcttcaccgtctctcggccaccgccgctccccgccgccgccgccgacgacgcgcgagggagtgtggtgaggactgatgaacttctaaacattgggtatggatggatgtgactgcatcgagccactatggccaactgatgagctcctcatcaagtatcagtacatctcggacttcttcatagccctcgcatatttctcgatcccgttggaactaatttatttcgtgaagaagtcatccttcttcccatacagatgggttttgatccagtttggtgcatttatagtcctatgtggagcgactcatctcataaacctgtggactttcaccacacacacaaagactgttgctatggtcatgacagtcgcaaaggtttcaacggctgttgtgtcctgtgcgacagctttgatgcttgtacatat

SEQ ID NO: 20942 - DNA, 417 bp, Oryza sativa
  Clone ID: uC-osflM202018b10b1
tttacttgctcgcctgctcctcctgctcctcggcgccgccgccgccgccgtcgccgtcgtgcaccacccgagcagccatggcgaatccggcagcagcagcagggccgtcggggggagcgaggccgttcctgcaggccgtgtcgaccgtcaccgaggaggcgccgtggccgctccgcgtcgtgcagatggagggcctggctgtcctgaagatcattaagcactgtgaggagtttgcacctgctctagttacaggccaactgcttggtttggatgttggcagagttctggaagtaacgaactgttttcctttcccaatgagagaagatgatgaagaggcagatgcagatggtgcaaattatcagcttgagatgatgaggtgcttgagggaggctaatgctgacaataacactgccggat

SEQ ID NO: 20943 - DNA, 438 bp, Oryza sativa
  Clone ID: uC-osflM202018b11b1
tcggctttccgctccaccgccatggcgtccatcaccctcctctccctcgctcccgcggccacattgctccacctcccggcctccacttcgctctccacctccttcgtcgccgctccaggccccatctccggccgccggtccgtcgtcctccgcgcccgcccgcgccgctgcgtcacggtcgtgtgcagcgccgcggcggccgaggccgcggaggcggagcccgcggagaagttccggctcgacaacctgggcccgcagaaggggtcgcggcggcggccgaagcggaaggggcgcggtatcgcggcggggcagggcgcgagctgcgggttcggcatgcgtggacagaagtcgcgctcggggccaggcgtccggcgcgggttcgagggagggcagatgccgttctaccgccggatccccaagctgcgcggcattgctgga

SEQ ID NO: 20944 - DNA, 433 bp, Oryza sativa
  Clone ID: uC-osflM202018b12b1
tttagtttatcccagagtggctcagctctgtcaagggcattgttgattctgaagaccttcccctcaacatctcacgtgagatgctccagcagaacaagatcctgaaggtgatccgcaagaaccttgtgaagaagtgcgtggagctcttctttgagatcgctgagaacaaggaagactacaacaagttctacgaggctttctccaagaatctcaagcttggcatccatgaggattccaccaacaggaccaagattgctgagctcctgaggtatcactccaccaagagtggtgatgagttgaccagcctcatggactacgtaacccggatgaaggagggccagagtgagatctattacatcactggtgagagcaagaaggctgttgagaactcccccttcctcgagaagctgaagaagaagggttatgaggtcct

SEQ ID NO: 20945 - DNA, 425 bp, Oryza sativa
  Clone ID: uC-osflM202018c02b1
ggtttcagttggagatcgatcgggatggggaggggtcgggtggagctgaagaggatcgagaacaagatcaaccggcaggtgacgttcgccaagcgcaggaatggcctgctcaagaaggcgtacgagctctccgtcctctgcgacgccgaggtcgccctcatcatcttctccaaccgcggcaagctctacgagttctgcagcacccagagcatgactaaaacgcttgagaagtatcagaaatgcagttacgcaggacccgaaacagctgtccaaaatagagaaagtgagcaattgaaagctagccgcaatgaatacctcaaactgaaggcaagggttgaaaatttacaacggactcaaagaaatttgctgggtgaagatcttgattcattaggcataaaagagctcgagagcctagagaagcagct

SEQ ID NO: 20946 - DNA, 325 bp, Oryza sativa
  Clone ID: uC-osflM202018c03b1
gctttgttttcataggcgtctccaggctggaccatggaagaatggtttgcacccgatgatgggataacagatgctttatgcctctccactgcaaagatggagactgctcacgaggcgaaaacagctgctgcatgctacgagaatacaaaccaagccaaagatgcaggcgccgacacatatgatgcttccacgaactgaaaaggtaccaggtccaacaagaagactgcctggcgaaaaaccgcataagtacgtgcacgacacagatggaccggactgtcagaaacccagggcagatgaacggacaattatgagcatggccggaacc

SEQ ID NO: 20947 - DNA, 427 bp, Oryza sativa
  Clone ID: uC-osflM202018c04b1
cttttctctatgccagatctcgctcgctcgccgctcgccgccgccgccgcgttccaccgagcggagagtagagggaatggcgtccgagggcgtgctcctggggatgggcaaccccctcctcgacatctccgccgtcgtcgacgacgccttcctcaccaagtatgacgtcaagctgaacaatgcaattctcgctgaggaaaagcacttgcctatgtatgatgagttggccagcaagggcaatgttgaatatattgccggaggagccacccagaactctatcagggttgctcaatggatgcttcaaactcctggtgcaacaagttacatgggttgcattggaaaggataagtttggtgaggagatgaagaagaatgcccaagctgctggtgttactgctcattactacgaggatgaggctgctcccacg

SEQ ID NO: 20948 - DNA, 420 bp, Oryza sativa
  Clone ID: uC-osflM202018c06b1
actttccttatcaccgcccatgccgtccccggaaggcggcgaccccgccgccgcgcgccgcgtggccgcggagctggagctggagctcccgctaggcggcgcgccgccctaccccggcgccgccccgttcgacctggaggcggcggtgtgcagccacgggctgatcatgatggcgcccaaccgctgggaccccgcgtcgcgcgcgctggtgcgcccgatcctgctcgactccatccgcgccgcctccgtcgccgtccgcgtctcccgacaccccgcgcgcccctccgacgccctcctcgtgtccgacctcggcgcgcccgacgacgacgccctctccccggtggaccagacctccatcctcgagcaagtgcggcggatgctgcggctggatgaggaggacgggagggccgcggcggattt

SEQ ID NO: 20949 - DNA, 334 bp, Oryza sativa
  Clone ID: uC-osflM202018c07b1
tttctttttctcactcgctcgccgctcgccgtcgccgccgcttcccaccaagcggagagtccagggaatggcgtccgagggcgtgctcctggggatgggcaacccccttctcaacattctcgccgtcgtcgacgactccttcctcaccaagtatgacgtcaagctgaacaacgcatgtctggcttaggaaaaccccttgcctctgtgtggtgcccagcccagccagggcgatgacctatctattgcctgtggagccagccagaactttcttaatcatgcccattgggagcgtcatgctcctggtgcaacaagtgacattccccagcttggcaag

SEQ ID NO: 20950 - DNA, 428 bp, Oryza sativa
  Clone ID: uC-osflM202018c12b1
ggggcatgtatgtgcaaagcccaacatatcagcaacccccctacaactatccacaggcatttgtatatccttcttatggaccatcaacttatgggccagaatacatgtatcctcagaatgcatatggttcatatgttgggcaacagtatgttccagtatatggcggtcccaggacagtaggcccagcagtttacccatatgggcagtttggccaacctgtgccaggtgatcaaccgtattcacctggctatgtaccaggtcacattctgccgctatctaatcagaatgctgcaaatgttgtacgcatgtcaacagttcagcaacaatatcctccaggagctccacgccctcagcaacagctcttgatccctgctcgtgcacaattcacaccaaacaacatttcggaacaaacgtcgggctgacataag

SEQ ID NO: 20951 - DNA, 426 bp, Oryza sativa
  Clone ID: uC-osflM202018d01b1
catctcatttaaaggcgtcttcgtactcgcctctctccgcgcctccgcgcttttcctcctcctctcccctctctcccttctccgccgccgtcgcagcatcaacccaatccgccgccatgagggagtgcatctcgatccacatcggccaggccggtatccaggtcgggaacgcgtgctgggagctctactgcctcgagcatggcatccaggctgatggtcagatgcccagcgacaggactgtcggcggaggtgatgatgctttcaacaccttcttcagtgagactggtgctgggaagcatgttccccgtgctgtatttgttgatcttgagcctactgtgattgatgaggcgaggactggttgctaccgccagctcttccaccctgagcagctcatcaatggcaaggaggatgcagctaacaactttg

SEQ ID NO: 20952 - DNA, 196 bp, Oryza sativa
  Clone ID: uC-osflM202018d03b1
gcctctgttggaggagctctattcatgccctcgggggggggcctgctctccccgcacccccccgcctcgccggtcggcaccgcgccccagaggctgggaacttcgaggaggagcaagatccatggagggtggaggcgcaagaaatggctcgacgaccggagcggctcggacaggggggagtgggggcgatgctgct

SEQ ID NO: 20953 - DNA, 424 bp, Oryza sativa
  Clone ID: uC-osflM202018d04b1
actttctttactctgatgtttatctggtacatcattgagtaattacattgctgagcaaatgccataaaacaactcagataatacagcaaatggatgataccctactagctgatcaagattattcgttcaggtagatggttatccttgctctagagtttcttggcagattctgcacatctgaaactatcctccaaaaccatgtttttgcattaggtgcattattatactgagatgtgctgattctactagggaactctgatgcatgcatgtactcacttgattagaaaggtttgttcttcttggagccatgcttggccttgaccatctggttcagtgccttcacgcaacggcgaatcactcccatcgacttcttccccccgtctgggcgctttatcaccatggccaacgtcgcgccaccagcagt

SEQ ID NO: 20954 - DNA, 414 bp, Oryza sativa
  Clone ID: uC-osflM202018d05b1
gtctctctgtcaccgacactgaagcccatatgtgaaaggaaacctcccattcaccgatttatcatagcactatgtattagatagaaaatgtactactgcgatagtgcacctgcgctccttcaattttgttgtacataggtagaatcgtgaagtttaccatagaggcgtgcggccatctgttgtagtcagtagtaatgacaaatgcagatgtagtaaagaatcggatggccttcccttaaatttgcctgagaaacggtgtacatcacttggtgtgtttgcatcagctgagcctcaactgacaagtgacttaattacattggcatgctcattggcttagatggtgcaacaatgcaatcatcatcatatctgccatgagttgtgacctgtaaaaaactatgagctctcttttgtttc

SEQ ID NO: 20955 - DNA, 418 bp, Oryza sativa
  Clone ID: uC-osflM202018d06b1
ctctatgttgcaggtcttgcctcttaccccattgataccgtccgcagaaggatgatgatgacctctggagaggctgtcaagtacaagagctccatggatgctttctcccagatcctgaagaacgagggtgccaagtcactgttcaagggtgctggtgccaacatcctacgtgccattgctggtgctggtgtgctctcaggctatgaccagctgcagatcctcttctttggaaagaagcacggctcgggcggtgcctaaactggcagaaaatgatgacgaacaagtgtttattcctggtcctgcactaacgggatctggtgaattttgcctttttaacattgaaaacaataataattcttgtaggggagaacactccccgacattcgttttttggtggaagcgtttatctccaaacatt

SEQ ID NO: 20956 - DNA, 254 bp, Oryza sativa
  Clone ID: uC-osflM202018d07b1
tgatataaaagaaaaaaaaaaggaaaatcgtgtctcgtctcgtctcgtcttcgtctcccccgattcccgagcagcttctcgaaaccctcgcggcctcgattccggcgatggcggagcccaacccgcaagtggagagggaggtggaggtggaggaattcccctgtcgcgcccacaggtggctgtactgttccaccgacaccgtcgttctccaccgatgccatccccgggatccatttcttccctttacgccgtcg

SEQ ID NO: 20957 - DNA, 249 bp, Oryza sativa
  unsure (1)..(249): unsure at all n locations
  Clone ID: uC-osflM202018d10b1
tgcttgtccttctctgcccgccgatctgcctcgccacgcggttcgtcgtgctgctgcggggcggcgtccggcggagagggggcgcgcggcggggtgcaggtagctatgaagaacggggcgaggaaagacgcgggcggctgctggntctaaattgcctcttgccgggcgctgaccacatgtaactagcgctctaaatcgtgttcctgacggaggtggtttaattgagggagatgcagccaatcggctagg

SEQ ID NO: 20958 - DNA, 424 bp, Oryza sativa
  Clone ID: uC-osflM202018d12b1
ttatctagtcaaaaggcaattgcagacaagtttactttcaatattttcatggaggcctgtgctgaagcaaagaggtggaatgattttgagtatgcatttcgcaaaatgttatctagtggctaccactttgacgaacgaaggcaccttcgtatggtgcttgatgcatataggaacgggaaggagcagttattggaagatgtatgggactacatgtgccaatatggccgagttccgcctgcccccatgataatggaaagattttgcctgaaactgagacaaggggacacagtggcggcgatgtcctgcatcaatacctttcaggagagcaagatacgcaatgtttcatccatgtcctggttcaatctgctgaaccgtaatggggatcgcttgaaggaggatattattatcaagctacttcatgaac

SEQ ID NO: 20959 - DNA, 427 bp, Oryza sativa
  Clone ID: uC-osflM202018e02b1
gtgttagtgcatctagctagggagagaaaggaagagacgagaggagagagatggccactgcttatgctcccatggcgagccagctgatgaagagcagcttggtgtgctccaagccgagggggctgtctggtgcttcgctgacaaggaggccccgcttcacagtcaaggccatccagtctgagaagccaacgtaccaggtggtgcagcccatcaatggcgaccccttcatcggcagcctggagacgccggtgacctccagcccgctggtcgcctggtacctctccaacctcccggcgtaccgcaccgccgtcagcccgctgctccgcggcatcgaggtcggcctcgcccacggctacctcctcgtcgggcccttcgcgctcaccggcccgctccgcaacacgccggtgcacggccaggccggcgccct

SEQ ID NO: 20960 - DNA, 426 bp, Oryza sativa
  Clone ID: uC-osflM202018e03b1
cctttgtcttaggaaatatacgcaatgctggagttaattggaatggaaatgataaaagctggttatgttccaaagcattcatggaaacatgctattgttgatcatattgatagtgatttgttcaatgaagagatgctagctgaatatggttgagtgggagataaagaaaacagtaattgctgactctggggtattcgcatgtcttccttgttgtaagaaatacttgttaatcaccaagataattattaaagctttgtcagaattacaatgcaacatacagaagttgcataagcttggcatcatgcaccatttgagaacttaccagtatgttatagattatattttgcctaaataatttgaaagaagaagtgggttcgacaaatcatgcatagtcagcctgctgaaggagctaagctattcatgtaa

SEQ ID NO: 20961 - DNA, 420 bp, Oryza sativa
  Clone ID: uC-osflM202018e05b1
attttgttcaagtgtttttgctgctggagaaaagaggatgcggggtttcggcgcatcgcccctgggacggactacctcgccatccccgccggcgcggacgaccggccccggtggtccgtggtcgtcgggctcactgccgtcgacgtgccgcgccacaatctgcgcctgcacaggttccgcgtggccgcgtccggccgcatcctaagcggcagcgacgacgtcctcgagaccttccgccacgtcgcgccggacgatgttgctgccgaggccttcagcaccgcctccgcctatctgagcaacgacggcggccaccagatgcacctcatctgccgagccgtccccctcaacgccgacggccgctggacctgcaacaagacaaacttgaacaagtgttacagatcgttctccatggatctgggc

SEQ ID NO: 20962 - DNA, 284 bp, Oryza sativa
  Clone ID: uC-osflM202018e06b1
gcatgaagtaaggagccgaggtggaggaggaggggtggaggccggtgggtctgcgacaagatcattttcaggcaaccttcccacaatactgcagcaacctagagagcgccctacgactgacgcgcgtacttacacaggaggaaattattatgaggagaatgctgagggaagtggtgacgccagcaccggcggagatccataatcagcggttgctttggaagctggcacgaggcatacttcttctcggggcagcaatgtcggcgttctgaacctcaacctcaacc

SEQ ID NO: 20963 - DNA, 423 bp, Oryza sativa
  Clone ID: uC-osflM202018e07b1
tctgctttgtcctcaaggcgaacggcctccatcttctccttccagctcctcccatggcgtccctcgtcgccatcgccatcgccatggctctcatggtggttcaacctggccggcagatgactgcctttgctgctcggacgtcgccggcggcggcggcggaggcgttctggcgtgccgccatgcccggcgctcccatgccggacgccatcgtcgagctcctccaccatgagcacggcgttgctagcgccggcggcaaggccaacggcggcggcgacggtccaccgccgccgatgaacttcaactacgacgactacagggccctgcctcggagcgacgccccttccccggatgcattgaaccgcgttgccgccgtacagaacgccgtcgagaacggcgtggccttgtcgccgcccgcgccggcga

SEQ ID NO: 20964 - DNA, 423 bp, Oryza sativa
  Clone ID: uC-osflM202018e09b1
tttaatttcccagcgcgatccgaggtagaagaagaagaagaagaagaagaagaagaggcgatcgagagatggagagcgccatgttcgggctggagacgccgctgatgacggcgctgcagcacctgctcgacatccccgacggcgagggcggcgccgccgggaagcagggcgcgaccggtggcccgacgcgtgcgtacgtgcgcgacgcccgcgccatggcggcgacccccgccgacgtgaaggatctgcccggggcgtacgcgttcgtggtggacatgcctgggctcaagtcctccgacatcaaggtgcaagtggaggaggagaggctgctggtgatcagcggggagcggcggcgcggcggccgggaggagaaggaggagtcgtgcaagtacctgcggatggagcggcggatgggcaagttca

SEQ ID NO: 20965 - DNA, 418 bp, Oryza sativa
  Clone ID: uC-osflM202018e10b1
tgcctttttcgcagagaaaaaaaaaatctcccctcgaagcgaagcgtcgaatcgccttctcaagatgcagatctttgtgaagaccctcaccggcaagaccatcaccctcgaggttgagtcctcggacaccattgacaatgtcaaggccaagatccaggacaaggagggcatccccccggaccagcagcgtctcatctttgctggcaagcagcttgaggatggccgcaccctggccgactacaacatccagaaggagtccaccctccaccttgtgctcaggctcaggggaggcatgcagatcttcgccaagaccttgactggcaagaccatcacccttgaggtcgagtcgtctgacaccattgacaatgtcaaggccaagatccaggacaaggagggcattcccccggaccagcagcgt

SEQ ID NO: 20966 - DNA, 341 bp, Oryza sativa
  Clone ID: uC-osflM202018e11b1
ttttacttgacgaggcgaggcgaacgcgaaagctccccatctccctccctccctccctcattattgattgattgattcgcagattcgccgctgccaccgcatcccgcccacccaccgtgcgccaccgcctccgccgtcgacgagcccccgcggtcaccgccaccgccacctcatcttctctcccaccaccgctccacagccgccctcccttacatggaagtcgacgtctccatcgccacgcccgcaccgcaggaatcttagctgactggcgctttggactgcaggtccggacacgttgtccgtttcctgcttgtgccgacgcaaggttggagcccttctga

SEQ ID NO: 20967 - DNA, 392 bp, Oryza sativa
  Clone ID: uC-osflM202018f01b1
catttgatgttcagacaactatcaagactgcttctctggttattcggtctccagaaaagaaatcagccacatgggatcagcttcctgtggcaacagatctatctaattttgttaccactttgcagtcaacggttggtctaaaggattccactgttccagtcaattttaccacatcgaagcaggacccaaacactacaattggaactatattgacagggagtaatttggctgttgattctgtccagctgacacaagcaacccgaccactcaggagattgcacattgaaaatctaccaagtttagccacagaagacatgctgattggctgcttgaatgagctcttgctgtcatctagtgcgagccatatccagaggtccatacaaccatgccta

SEQ ID NO: 20968 - DNA, 427 bp, Oryza sativa
  Clone ID: uC-osflM202018f02b1
gttttgccttggcggcggcgcacagccaggagaagccgtcgagcggcggcgcaccgcgcaccgcgcacggagcacccctcccccccctgttaccgtcccctcccgctacagaaggcgccggcgcacggcgtcgtcccatccctaattccggccccccctctggttcactccccacgtttgaagtcagcttggttctgactccagggatctcaactatcctgtccaggatcaagaccaaacccgtcagccatcatgcaggctagcgacaggttcaacataaattctcaacttgagcatcttcaagcgaaatatgtgggcacagggcatgctgacttgaatcgatttgaatgggcagtaaacatccaaagggatagctatgcatcctatattgggcactatccaatgctggcatatttttccattgctg

SEQ ID NO: 20969 - DNA, 410 bp, Oryza sativa
  Clone ID: uC-osflM202018f05b1
atcttggtttctattgatgtattcaagggaatcacagatgatgatgcagctaaagttgctggtggcctgccaccaactacagctgacagacaacctcccatacaacagattaagatgctctatgaaccgacctgcaagccctatcgcacactgctcgagattaatcctcttgctgagacagccgacaacaagctgatggctgctgatgcaacgttgaactttgatgacaatgctgcctttaggcagaaagagatatttgccatgcgtgacacaacacaggaagatcccagagaggtggctgctgccaaagctgacttgaactacattgggctcgatggagaaattggctgcatggtgaacggtgcaggattggcaatggctacaatggacatcattaagtcgcatggggg

SEQ ID NO: 20970 - DNA, 416 bp, Oryza sativa
  Clone ID: uC-osflM202018f06b1
gccttccttttttttttttttctgaaaaaagtctagtgccgaatatggcaccattgtacatggaactttagctgttccatctcttcccttatgtttataatatttggctagacaaatcatgtacaagcttcagcacaattaagataagctagatacaaattatacgcgttgacaatatgaggggcttacagcataaaaatgatcctgtctgtataagttcaacaccagtcttgcctggcgaaaaaaatggaagttcttgctccacacttccacaataaatggcgaacattaccacatcaattatagggtactccttcttggttttgctttcatctgcttcttcctctatcttcttgggtttagttaataaggtcacgacccatactcctagcaaggttgcttggaggggtgcaagc

SEQ ID NO: 20971 - DNA, 357 bp, Oryza sativa
  Clone ID: uC-osflM202018f07b1
tctaaatcgatacggaacccggcgcgcatccggtcctctcgtcgaggcgagaggaacctatacattcgccacactcccctgcttcgcttgcttgccctcctcttgcgtagggaaaaggaagaacacaagagcaagcgagagcccagaaatcctatcctcgactggaggcttttgcgtattgcatagcggcagatttttttactgacttgggagttgtgtgatagtgtgggttgcgttctttttttagtgtgtaaacgatgtcgtctttagtgtcgacgccgttcacgacggcaaccggggtgcagaagaagctgggggcgcccgtgccgctccactcgttcttgctgagccggcggc

SEQ ID NO: 20972 - DNA, 422 bp, Oryza sativa
  Clone ID: uC-osflM202018f08b1
tttacttgaacgcgaggaggggaagaatcatccccgagatctcgctgccgctgctcatggcgttcgcggcgtcccacaccgcatcgccgtcctcctgcggcggcgtggcgcagaggaggagcaatgggatgtcgccggtggtggccatggcctccaccatcaacagggtcaagactgctaagaagccctacactcctccacgtgaagttcatctccaagtcaagcattcactgccaccccaaaagcgggagattttcgattcgcttcaaccttgggccaaagagaaccttttgaacctcctgaagccagttgagaagtcatggcagccacaggacttcctgccagacccttcttccgatgggttttatgatgaagtaaaagagctgcgggagagggctaaggagatccctgatgactacttt

SEQ ID NO: 20973 - DNA, 425 bp, Oryza sativa
  Clone ID: uC-osflM202018f09b1
cttgatctgtagcttattagcggccatgtgcggcggagcaatcatctccgggttcatcccgccgtcggccgctgcggcggcggcggctgcggcggccaagaagcagcagggcaggagggtcacggccgacgtgctgtggccggggatgctgcggaaggggaaggcggcggcggcggaggaggactttgaggccgacttccgcgagttcgagcgtggcatgagcgacgacgaggcggaggggggcggcggcgaggaggaggaggacgacgacgacgtggtcgtggtggtccccccgccggcggcggcgaggttcgtcgtccgtgccgcggccaaggcggcgcccccaactgcagatgggatgttgactacaaagcttgtccaacatgatggacctactgctagatcagcaaagcacaagaggaaga

SEQ ID NO: 20974 - DNA, 420 bp, Oryza sativa
  Clone ID: uC-osflM202018f10b1
tcgggcttcagcagcagcagcagcaacaacatttggccgctctgaagattggtgacggagaatgcccggcggctccctcctcaatagcggcggcatggcggactacggcggcggtggcggcagcggcggcggcctcacgttcccggtcgtggttacctgcctcatggcggcctccggtggcctcatcttcggctacgacattggcatctcaggtggtgtgtcggagatggagtcattcctggagaagttcttcccgggcttgctgaaggggacggcgcacgcgagcaaggacgtgtactgcatctacaacagccaggcgctcacggcgttcacctcgtcgctgtacgcgttcggcatggtcgggacgctggtggcgagccgcgtcacccggcggaccggacggcaggccgtcatgctgat

SEQ ID NO: 20975 - DNA, 340 bp, Oryza sativa
  Clone ID: uC-osflM202018f11b1
tctctttcactcccagatacctgctgctgccactagcccactaccatggatccttgcaagttccggccgtcgagctcgttcgacacgaagacgacgactacgaacgcgggagctccggtgtggaacgacaacgaggcgctgacagtggggcccagggggccgatcctcctcgaggactaccacctgatcgagaaggtggcgcacttcgcccgggagcgcattccggagcgcgtggtccacgcccgcggcgcctccggcaagggcttctttgagtgcacccacgacgttaccgacattacctgcgccgactttcttcggttcccgggcgcccagacccccg

SEQ ID NO: 20976 - DNA, 432 bp, Oryza sativa
  Clone ID: uC-osflM202018g01b1
catttatgttctgacgctaaacaattctcttctcactgtcgcaaacatggatggtgagacaccactgctcactgccgtgacaaatggacacatgtctttggcctctattctacttgaatgctgctgcacactagggttcagtgaggcaatcttgcaacaagacagaaatggttgtaatgcactgcaccatgccattcattgtggtcacaaggaccttgcactggaattgatattaaaagagcctgccctatcaaaagctgtgaacaaatacagtgagtcaccaatgttcatcgcggtaatgagagattttacagatgtttctgagaaactgttgggaattcctggatctagccatgttggaacatatggccacaatgccttgcatgctactgtgagaaatggaaatgcagctatggctaaaaaaattttgga

SEQ ID NO: 20977 - DNA, 430 bp, Oryza sativa
  Clone ID: uC-osflM202018g02b1
agttaagtgtgtcttcgtactcgcctctctccgcgccctcctccgccgccgctcgccgccgttcgtctccgccgccaccgccgccgccatgagggagtgcatctcgatccacatcgggcaggccggtatccaggtcgggaacgcgtgctgggagctctattgcctcgagcatggcatccagcctgatggacagatgcccggtgacaagaccgttgggggaggtgatgatgcttttaacaccttcttcagtgagactggtgctgggaagcatgtcccccgtgctgtcttcgtcgatcttgagcctaccgtgattgatgaggtgaggactggtgactaccggcagcttttccaccctgagcagctcatcagtggcaaggaggatgcagccaacaactttgcccgtggtcactacaccattggcaaggagatt

SEQ ID NO: 20978 - DNA, 409 bp, Oryza sativa
  Clone ID: uC-osflM202018g03b1
cactgtcttttaaaaggctgggacctgatgatggttcatcacaaaactggaatgttgcatctaccaaaggtgacaacagtggaatgtctgaagcaccttcattggaagaagcaacttctgtaccgatgaatgtggttgaggctgacaagcatccgatttcagtcgctgaggtggaaataatagacaagtccgtggttgaagaagagctggcggtgaaaaatgagaccaagagtataccttctgactctgagaaggctaatctgcatatcacctcggacgatgatgataaagaggtggaggactggctgaaggatgtggctcctgtgcccagcaaaacaggcaacgtcaattcaacatggcaggaggaagacatatccttcaatgatctggaagatgaagaggatgattg

SEQ ID NO: 20979 - DNA, 407 bp, Oryza sativa
  Clone ID: uC-osflM202018g04b1
accttctcttccggctcttcttcagtatcgaatcctctcttctcctcgtgcccaccaccaccaccgtagcaatggcgggcaacgggccgatcaacaaggaggacccgctcaactggggcgcggcggcggccgagatggccggcagccacctcgacgaggtgaagcgcatggtggcgcagttccgcgagccgctggtcaagatccagggcgccaccctccgcgtcggccaggtggccgccgtcgcccaggccaaggacgccgccggcgtcgccgtcgagctcgacgaggaggcccgcccccgcgtcaaggccagcagcgagtggatcctcaactgcatcgcccacggcggcgacatctacggcgtcaccaccggcttcggtggcacctcccaccgtcgtaccaaggac

SEQ ID NO: 20980 - DNA, 348 bp, Oryza sativa
  Clone ID: uC-osflM202018g06b1
gccggaccggaattgcagtttcgtcccagagcgaccggtgtgctttcccttcagcttccacgagctcaggcggtaggctcttgtctacctcaccgacaagatccgctccgcgcggctcgcgctcaccgatgctaccctgactcagatgatgacggatgaggcgaccagcggggacccatcgacgccgaacgtgaagacgatgagcctgatcgcgcggcaggcgctcgagatcgacgaggacggtaggatcttcgacattctccacaagaggacagcgaggttctacaggcggcagtgcagcgaggcgtacaaggccctcctcatcctagatgcacctcgtgactcacg

SEQ ID NO: 20981 - DNA, 392 bp, Oryza sativa
  Clone ID: uC-osflM202018g07b1
tctcactgcttcgaggctgagaatatggcgaaccctgctcctgttaaggaaggtaaactgggcaatcttctcccctggggagaggatgcgttggaggagaatgatggagtgtttgatgagtaagatgggacttctggtgacgattcgctgctttgttttcattccgtggcatttttatctgttgaggttgtcgcttggttattctgtgaagcagtcagccaggctattagtattttcgcttgtaagcatgtgttctgatcttgggacgtatgcttggtctaaataataatggtgaactaaaagctctaggtggtcagctgcgtatgccacaatgagcatgcgtctggagaaatgttgtcaaaacattatgaataagtatttggcggaaattt

SEQ ID NO: 20982 - DNA, 432 bp, Oryza sativa
  Clone ID: uC-osflM202018g08b1
tttgcctcaagctgaagccagattgctagaaggtagttcttgaggactgaagcaaggtagaagaacttgagcttctggttcgtgtggagctactgggataagttggctgctgattgctgaagatgggagaagctagcagtagttcaggacatccaaggcagaatcctcatgttcttggctatggcttccatggagctatgcccaactccttgccttctgcaaacttgttcgagcagcaaggaggtgctaactattttggagaactagaagaggctctgatgcaacaggtggccacactcaggaggactcaacaaactgcaaccaccacctccacccttcatcatggagacaccacccccttctccaccactgctactgctgcggctacagctaggcctcctcctacactggacatcttcccatcctggccta

SEQ ID NO: 20983 - DNA, 373 bp, Oryza sativa
  Clone ID: uC-osflM202018g09b1
tctcgtctagctcctcctccctctcactctcacctgcgtttgtcgccggcggcgaggaagaagaagaagagagagagagaagatggtggggatgttgccggagacgaatgcgcaggcggcggcggaggaggtgctgggcgacgcgtgggactaccgggggcggccggcggcgaggtcgcggacggggaggtggggcgcggcggcgatgatactggtggcggagctgaacgagcggctgacgacgctggggatcgccgtgaacctggtcacctacctgacggcgacgatgcacgccggctacgccgaggccgccaacgtcgtcaccaacttcatgggcacctccttcatgctctgcctcctcggcggcttcgtc

SEQ ID NO: 20984 - DNA, 412 bp, Oryza sativa
  Clone ID: uC-osflM202018g10b1
tttgtgtagcaagcttccacctcagatcaaggagctgcgcatcctgagggcattggacataagccgcaccaacataagtgagatcccatcagaagtgtgggagctaaagcatttgaagatgctggacctaagaggcacatggataagacatcttccagagaaagtcaaggaattgactagcctagagagattggatataagccacaccaagataagtgatctcccctctggagtgtgccggctacctagtctggagacgttggacctaagaggcacactgataagccagttgccagatcaatttgtgcagataaagcggttgggacatcttatcgttggtagtgctggagctggatctggaatgatttactccgaccaaacagtgcttacaaagatacccgagacgatccac

SEQ ID NO: 20985 - DNA, 412 bp, Oryza sativa
  Clone ID: uC-osflM202018g11b1
tttattttggaccgctctatccgtttcagcagtagcagatattctgacatctcagtaggtggccccatggtcggaggccaggcattgggtgacagtgatgagtccaaggagaggccattgattctccgtaacaaggccccaagatggcacgagcagttgcagtgctggtgcctcaacttcaagggcagggtaaccgtcgcgtctgtgaagaacttccagcttgtcgctgcaacacagcctgctgctggagccccgacgccatcgcaacctgccccgccgtctccacctgatcatgacaaggtcatactacaatttggtaaggctgcgaaagatatgttcacaatggactatcgttaccccctttcggcctttcaggcctttgcaatctgcttgagtagtttcgacaccaagc

SEQ ID NO: 20986 - DNA, 395 bp, Oryza sativa
  Clone ID: uC-osflM202018g12b1
tttctcttacctcgtcgtcttccgcgccgccctctccctcctccaccgcctccgcctccgccttctctcgtgccgccgatctccatcgccggcgtgcggtgcaccgagatccacccgagatgtggcgcggctgcgtctcgcgtggcctcaggagcctctccaagggcaagggctcctcctcctccgcccccgtctccgccgccgctaggctcttctccaccgcctcgtcgtcgtacacggtggtggatcactcgtatgacgcggtcgtggtgggagccggcggcgcggggctccgtgcggcgatcgggctctccgagcacgggttcaacacggcttgcatcaccaagctcttccccacgcggtcgcacaccgtcgcggcgcaggggggcataaat

SEQ ID NO: 20987 - DNA, 437 bp, Oryza sativa
  Clone ID: uC-osflM202018h01b1
gcgttcgagtcggcgccgcggcgcttcttcttcctcttcctcgataacaaacgcagccaacctccgctggagcccgcccgacctccgcctctcctaccttctccggcacaggaaccgaccgccagccgtcgaccggtcggagggctccgcctcgtccagatctggccgctgcttccctcggcggctcgtcggatcctgctgaatctcgcgtcggcgtcggcgtcagcggagggaactcaggaggggatcggtgcttcgcgtattgggggggcctcgatggtctccctccccaacgccgctccgaccgtctcctccccgcgtggcccgacgaggctcgcgggcatggccgacgaagggacgagtgctctcgccggggcatgaccgacgccggcgttggacgggaaaccctcgagcttgcgaaatcgatgcacaggctc

SEQ ID NO: 20988 - DNA, 277 bp, Oryza sativa
  Clone ID: uC-osflM202018h02b1
ctctctcactctggctgcagagcgaccgtgcgaagtgcgtactcacacgcaattttattcgatcgatcggggccggcacggcggcgcacacgtctacttcgccgcagacaccgacatgatgtctgcgtccaacggcacctggccgtagcagtccacgttgggcccgcagccgtcgccgagcacgtcggagcagcgctagtagaacgcgacccggtcggcgccgccgctgactgcggcgcactggaacccgccggtgaggatgttcgtggtgagcccg

SEQ ID NO: 20989 - DNA, 429 bp, Oryza sativa
  Clone ID: uC-osflM202018h03b1
cccttggctttatcccgcgccgcccgccgccctttgctctccgcccttcgccaaacgccgccttgacttcgatccccctaaaccctggccaccgttgcccgcgttcaggtcgccgttcggaccccatcgcaccgcgtcgccacccggaccgcggccaggagatagagcagcggtagacgtgcggcgtcttcctccttaatccgtcacctcggtttcttagttgctcccaccatacccctcccttccaaccctatctcctttaagcgccaagtcgccgcagcagcaacgaggttctcaacggggcatgctaaggctctgcatgagatgagaggtcgactcaacgatggaggctgaaaataaagcttgatgttaagaacatgccatttatgtatgggcttcgcttgagttggagccaagctgccagatcgt

SEQ ID NO: 20990 - DNA, 427 bp, Oryza sativa
  Clone ID: uC-osflM202018h04b1
gtttttctgtttaggaatcgctcgctcgctcgctcgctcgcctgcggtgcggacgaggagggggcgagatgttcttccacatcgtgctggagcggaacatgcagctgcacccgcggcacttcggcaccgcacctccgcgacaagctcgtctccaagctcatcaaggacgtcgagggcacctgcagcgggcggcatgggttcgtggtggcgatcacgggggtggaggatgtcggcaaggggctcatcagggatggcacgggctacgtcaccttcccggtcaagtaccagagcgtcgtctttcgccccttcaagggcgagatcctggtgggcggcgccaccatggtcatcaagatggggttcttcgcggtggctgggcctgtgcagatcttggtgtgcaaccatttgattcctgacgatatggagttcc

SEQ ID NO: 20991 - DNA, 425 bp, Oryza sativa
  Clone ID: uC-osflM202018h05b1
acgcaatctccgtttgtatcatactgcattgcgggcaggagctattccacagtagcacgatcaaaaccgtggactacattgtcggacaaggcaatctgacggtggatagtctgaggaacttctcaggtagcttggctgcagccaagaacatcggggtggatcaggtcttcctaccagttcaagtgcagcagaagatcgacgtcatcgaggataagctgaattcttctgcaaatgagttctccacgcgcgcgctcgaaaactccaagaagatcaagcatgtgatggacaagatgcagtacaatttgatggttattgcagctgtaatgcttggccttgcgatattcggattcctcttctccatcctggggctgcggtttcttgtttccctgctggtgatcgctggctggttcgttctcgtcatcaca

SEQ ID NO: 20992 - DNA, 435 bp, Oryza sativa
  Clone ID: uC-osflM202018h08b1
tcgatgttattggcccatttaggattaagacaaacgggacagggctctatctgaacaagtactcatggaacagagaggcaaacctcctgttcctggaatcacctgccggagttggcttttcatactccaacaccacctctgatctcaagacatctggtgatgagaggacagctcaagatgcgttgcagttcttgatcagttggatgtcccgcttcccacagtatcggcaccgggatttctacattgctggagaaagctatgctggacattacgttccccagttggcaaggaagatcgttgagttcaacaaggcctcaccatatcctttcatcaacctcaaggggatccttgtgggcaatggggtgactgacaactactacgacaacatcggcacggtgacctactggtggacgcacgccatgatctcggacacca

SEQ ID NO: 20993 - DNA, 434 bp, Oryza sativa
  Clone ID: uC-osflM202018h09b1
tcggtgtttttcggcaacgaagagcatcgtggaacaagagtggagctcacatttggagtctctccaagctttgccagcagatcatgctcagcacgttgttccggtacttcgagctggtcacggtgctccagcgccgcaggcttcttcgtctgcagctagcagttctggtctcccagaatgcaagggtgagaagatcgacaagctgacaagggttggcttgttgcaacttatcagcaatgtggagggcctgaacatgcagtcaacccctgagaccttccaaattaatctgctgaggttgagggctgtgcaagatcagtttcagaaggtgatagtgatcgcgacgagcatgcttgtcctgcatcaagttctgatgctgaagatcgctcctccggagctacagaataccatctcagagctctacgacgctctcgtga

SEQ ID NO: 20994 - DNA, 423 bp, Oryza sativa
  Clone ID: uC-osflM202018h12b1
tctctttttgccagcaatatttgtagattaccgaaaatgtgttcaacaggctatatctagtccagccgcatttagaccgcgtgtccatgcaacctcagtgtatagtccattagtcgaaaatgggcgtcctgtactacaagggcttttggctgtcgatataatagccaaagaggtacttggatgggttcaattgatgccgaactatgccactgagcttgttgagtatgttcgcacatttttagaacgtacacatgaaagatgccgtgcatcctatatggaggctgtccttgaaaaacaaagttatattctcctctcaaggaatgatgctgaaagtttaatgcgcttggatccagcaaatctatctttacaaaattcttttggtcaacttgaccacagtattccagatgcagaagctgtagaagt

SEQ ID NO: 20995 - DNA, 519 bp, Oryza sativa
  Clone ID: uC-osflM202019a03b1
ttctatagctagctaactgttactgtacctcctcccatatatcatcttcatatttttgcagatcgataagcgagaaaaatgggagcacgctgcctcgcattgcttctcctctatggcacgttgctgctgctgttgctgctgccacagctgccgctcgccggcgcggcgacgagatactacaccttcaatgtgaagcttcagaatgtgacacggctgtgcaacacccgggcaatcccgacggtgaacggcaagttccccgggccgaaaatagtcaccagggagggagaccgcgtcgtcgtcaaggtggtcaacaatatcaaggacaacattaccatccactggcacggggtgaggcagatgcggacggggtggtcggacgggccggcgtacgtgacgcagtgcccgatccagacggggcagagctacgtgtacaactttaccatcaacgggcagaggggcaccctgttctcgcacgcgcacgtcttcctgctgcgatccacgctggacggccccatcatc

SEQ ID NO: 20996 - DNA, 246 bp, Oryza sativa
  Clone ID: uC-osflM202019a05b1
ttcgacggtcgcctaaattatccatacctcccctccgccgtggccaccagccacctccacgaatccaattccaacatctcctcctcctcctccgccgccgccggggggatccgcgctgcgccgtggtaagcccatctctctcccggccttcccggctcgacgttcgttgtggggggcgtgttttgcgcccgaggattggtgggttggcggggggatggggattggggccgctgacgtgctgctggg

SEQ ID NO: 20997 - DNA, 341 bp, Oryza sativa
  Clone ID: uC-osflM202019a06b1
acatgaatcatgccattgcttagcacgcaaagcaaggcaaactctgaaggaatttcacagaaatctcaccgataatacacagctagtatacaatatacaaatgcagagcaattagatactacatctctacagaatcgagcatggttgcatatctgcacatccaacaccatgctgggaacaacacagagctcaggagattaagttacctatactggcttattggaatcttacagtgtctaatggagtaaacagcttaaataccatgggataattcggctatgcgggcatctggatatgtaactattgcgtgtagagtccttttatactcttcatttgggcat

SEQ ID NO: 20998 - DNA, 445 bp, Oryza sativa
  Clone ID: uC-osflM202019a07b1
ttctctcgttcgcgcaaagcacgctgcttttctccgctttgcgagcaccatagcctagcccaccatgtgcggcggcgccatcctctccgacctcatcccgccgccgcggcgggtcaccgccggcgacctctggctggagaagaccaagaagcagcagcagcagaagaagaagaacaagggcgcgaggaggctgccactgcgccaagaggaggaggatgatttcgaggccgacttcgaggagttcgaggtggattccggcgagtgggaggtggagtccgacgccgacgaggccaagccgctcgccgcgccccggagcggcttcgctaaaggtggattgaaaaacactactgttgctggtgctgatgggcctgcagcaaggtctgctaaaaggaagagaaagaaccaattcaggggtatccgccagcggccatggtgcaaatgggct

SEQ ID NO: 20999 - DNA, 392 bp, Oryza sativa
  Clone ID: uC-osflM202019a11b1
ttttccgttgaaacaaacccctctcactcccagatacctgctgctgccactagcccactaccatggatccttgcaagttccggccgtcgagctcgttcgacacgaagacgacgacgacgaacgcgggagctccggtgtggaacgacaacgaggcgctgacagtggggcccagggggccgatcctcctcgaggactaccacctgatcgagaaggtggcgcacttcgcccgggagcgcatcccggagcgcgtggtccacgcccgcggcgcctccgccaagggcttcttcgagtgcacccacgacgtcaccgacatcacctgggccgactttctccggtccccgggcgcccagacccccgtcatcgtccgctttttcaccgttatccacgagcgc

SEQ ID NO: 21000 - DNA, 529 bp, Oryza sativa
  Clone ID: uC-osflM202019b02b1
ttcaaccagggtggcaaaggcaatccaggagaagtcatgcaatgctcttctgctgaaggttaaccaaattggatctgtcactgagagtattgaggccgtgaagatgtcaaagcgtgctggctggggtgtgatgaccagccacaggagtggtgagactgaggataccttcattgctgatttggctgttggtttggccacgggtcagatcaagactggagcaccctgccgatcagagcgccttgccaaatacaaccagcttcttaggattgaggaggagcttggtgcggctgctgtctacgctggtgccaagttccgcgcacccgtggagccctactaaacttgatggtgaatatcatgcggttcatgcccactgttgtgtgcatgggttttgtgaagacaggatgctcatttctatccgtaattgactttccggtcgaactctagttaaaaagctcgtagaatcgagaaataaatcctccactgtatgagcggatatgtacccccaaacttgctccaattttggtgatgt

SEQ ID NO: 21001 - DNA, 524 bp, Oryza sativa
  Clone ID: uC-osflM202019b03b1
tgtagcagcagcagcagcagctgagcttgaagcagcagagcgaggtagacatggccgccgccaccatggccctctcgtccccggcgctggccggcaaggccgccgcgaaggtgttcggcgaggggcgcatcaccatgcgcaagtcggcggcgaagcccaagcccgccgcgtcggggagcccgtggtacggcgccgaccgcgtgctctacctcggcccgctctccggcgagccgccgagctacctgaccggcgagttccccggcgactacgggtgggacaccgcggggctctccgccgacccggagacgttcgccaagaaccgggagctggaggtgatccactccaggtgggcgatgctcggcgcgctgggctgcgtgttcccggagctcctcgcccgcaacggcgtcaagttcggcgaggcggtgtggttcaaggcggggtcgcagatcttcagcgagggcgggctcgactacctcggcaacccgagcctgatccacgcgcagagcatcctcgccatctgggcg

SEQ ID NO: 21002 - DNA, 407 bp, Oryza sativa
  Clone ID: uC-osflM202019b04b1
ttgacctcctccccacgcccactcctcctcctcccacgccgcgtccttcgccctcctccctgggcgaagctcgccccgccgccgcatcgcctcctcaccagccacgcccgccggcctcctccgcgatcgccgccgccctctccaacgcgcctccacctcgcatcggatcgatcatccaccttcgccctcctccctgcgtcgcctcctcgcctcgccgccgcatcgcctcctcagcagccccgtgccccgcgccccgcgtcccgcgttccgcgccgccctcgaccgccgacgctgcgacccgcgccgtcttctcgctggcggcgccgcgccccgagtgccgtgtcccgcgccggcctagaccggcaacgcgggagcaggaggtcacgccgtgacaacaccgcccagga

SEQ ID NO: 21003 - DNA, 584 bp, Oryza sativa
  Clone ID: uC-osflM202019b06b1
tagcgtgaagcgtgctgcagcgctgccggtccgcggtctcccggttccgacccacggcgtacgtggagcttctgacggcggcggtgaagctgtcgatgaggaaggcgaaggcggcgagggcgaggttcgaggcggcggcgagggcggcggagaaggggacgccgatggagtccatcctggacacctgcaaggaagggtacgacagcacggtgtcggcgctgcaggaggtgcagcgctgcatcgacgccaacgacagcaaggcgagcctcatcaccaagatgtcggcggcgaccaccttcaccggcgactgcggcaacgcctacgaggagcgggagctggagcccagcctcgcgctcaaggccaccaagaacaacgtcaaccgcgtcgtcaccggcgccctcgccatcgccgccaagctcaagctataattagccaactgatcatcaatcgatatgaatgattgatcaactataaaattacacctagctcatgcatgcgtccgcgcgttatgtgtgtacgcacgcatgcatatgtgtaagatcgatcaacagatcacagaagtggtggcgtatctcgcacttgtg

SEQ ID NO: 21004 - DNA, 532 bp, Oryza sativa
  Clone ID: uC-osflM202019b09b1
gtgaaggacaaccagccgctgacgtggtaccggcggcggttcgacccgccgtcggggaccgacccggtggtgatcgacctcacccccatggggaagggcttcctcttcgtcaacggcgagggcctcggccgctactgggtctcctaccaccacgccctcggcaagccgtcgcagtacctctaccacgtcccgaggtcgctgctccgccccaagggcaacacgctcatgttcttcgaggaggaagggggcaagcccgacgccatcatgatcctgacggtgaagcgggacaacatctgcaccttcatgacggagaagaacccggcgcacgtccggtggtcgtgggagagcaaggacagccaacccaaggcggtggccggcgccggcgccggcgccggcggcctcaagccgacggcggtgctgtcgtgcccgaccaagaagaccatccagtccgtggtgttcgccagctacggcaacccgctcggcatctgcggcaactacaccgttcgcagctgccacgcgccgcgcaccaaga

SEQ ID NO: 21005 - DNA, 363 bp, Oryza sativa
  Clone ID: uC-osflM202019b10b1
ttccgtggcctcctcatcgcccctattaaacgggaacccagcccggcgtccccttctcggcttcctcctccaccatccatccatccgcgcgcggtgcgtagtagcgagaagagaagggggggagggcaaagcgatggctccgatgaagctgtacgggtcgacgctgtcgtggaacgtgacgaggtgcgtggcggtgctggaggaggccggcgccgagtacgagatcgtgccgctcgatttctccaaaggcgagcacaaggcccccgaccacctcgccaggaacccctttggtcaggtgccggctttgcgaggagggggatttgttcctctgggaatcacgtgcaatttgcaagtatgtatgcc

SEQ ID NO: 21006 - DNA, 356 bp, Oryza sativa
  Clone ID: uC-osflM202019b11b1
tttcgcctcctccaccgagtcagatctcgagcgccgcagaggagagcagcaatgaggccgtcgctgatgagatccgcctcgcaggtcctccgccgccgccgcggctactcctccgcctccggccagccggagcggaaggtcgccatcctcggcgcggccggcggcatcgggcagccgctctccctcctcatgaagctgaacccgctcgtctcctccctctccctctacgatatcgccggcacccccggcgtcgccgccgacgtctcccacatcaacgccccggcccaggtgaaggggttcatgggggatgaccagctcggggaggcgttggaggggtcggacatcgtgaacatccc

SEQ ID NO: 21007 - DNA, 526 bp, Oryza sativa
  Clone ID: uC-osflM202019c01b1
ttcgttgactccacctcccgtaccctcgtcctcgcccgccaccgctcgccgccggcgtctagggtcgcggcgacaagccgcgggcgtccgttctcctccggcccccatcccctcgccgtctctcccgccacccgcgcccccgccatggccaccgacggcgccgccgccgccgccgcggcagggtcgaagaagaagaaggaggtgctcatcttcgacgccgaggaggacctcgcggtgtccctggcgaagtacacggcggagctgtccgcgaagctcgccgccgagaggggcgccttcaccgtcgtgctctccggcggatccctcatcaagaacatcaggaagctcgcgagccaccgtacctggattcggtggattggagcaagtggcatgtgttctgggtggacgagagggtggtgcccaaggaccatgaggatagcaactacaagctcgtctttgatggggttctctccaaggtcccaattcctactggccaagtttatgctataaatgatgccttgtcagctga

SEQ ID NO: 21008 - DNA, 468 bp, Oryza sativa
  Clone ID: uC-osflM202019c03b1
gttggagaggagcagccatggcgtcgtcggtggcagcggcggcgagcacgttcctggggacgaggctggcggacccggcgccgcagagcgggaggatcgtggcgaggttcgggttcggcggcgggaagaaggcggcggcgaagaaggcggcgaggccgtcggcgccgacgacggacaggccgctgtggttccccggcgcggtggcgccggactacctggacgggtcgctcgtcggcgactacggcttcgacccgttcggcctcgggaagccggcggagtacctgcagttcgagctggactcgctggaccagaacctggccaagaacaacgccggcgagatcatcggcacccggttcgagaccggcgaggtgaagtccaccccgttccagccctacaccgaggtgttcggccttcagcgctttcgcgagtgcgagctcatccacggccgctgggccatgctcgccaccc

SEQ ID NO: 21009 - DNA, 504 bp, Oryza sativa
  unsure (1)..(504): unsure at all n locations
  Clone ID: uC-osflM202019c05b1
ttctcctctcctctcttcaggcgacggagaggcagcggcacgcggcggcagtgcggccggacaacggtgcctatgcggaggagctcggccgagcgacggctcggcgcgagcgtggccgtgtggcggcgccggccccggcacgggtcgcggcctcggcggtgcggacgggcagcggtgccgatgcggaggagctcggccgagggacggcggcaccatttctggcttccctgcctcctccctccccgcccacctngccggacgccgcgcgccgcccgtctcccgtctccgccgggcgctggtttggtggtggtgaggtgagaggaaaaagaaaccgtgggaggggaggaccggttggttcgcgcttcccgcaacttttctcctacctccggtcgtccaactcctcttccctctcacaggctcacacacttggcgcgccccttgatcaattcgttccccttctttttcttcccccttgcttgcagatgggggcaactagaggaagcg

SEQ ID NO: 21010 - DNA, 468 bp, Oryza sativa
  Clone ID: uC-osflM202019c06b1
tcctttctcaggcagcaagcgtaagcaaggcagaggagagggaaagaacctctctgcagtgctgctgctgctagcttgcagaaaaaaaaaaactctcatcttttgcaggaagagacatcactgtttctgcattcgtgtgcatttggattaagctttgcttatccctttttagtggagattgttgagtatatcaggtctatatattggcagctctggttggagatagacactcacactgagccaagatggggagtttgcacaagttcagtgttattctcctcatgttatgttttgctacgttggggagcgctcagtatgtcaagtataaggatccgaagcagcccgtctctgttcgtgtcaaggatctgctcggccggatgactctcgctgagaagattggccagatgacccaaatcgagagggagaatgccacggcggagcagattgccaagtacttcataggtagtg

SEQ ID NO: 21011 - DNA, 533 bp, Oryza sativa
  Clone ID: uC-osflM202019c09b1
ttggaaatagaagtcttatattggatttccagaacaattctctaaccaatctatcaaatcctctttcaccacctgccaatgttaccatcctgttatctggaaaccccatctgcacatctccaaatcaactgaacattactcagtactgtcaatcagtgccagttattgtgcctgacggttctgcaagtaatgccacagtttgtccgccatgctctactgaccttccgtttgaaaacatactgatgtcaccaatacgatgtatatgtgctattccactttatgttgattaccggctaaagagtcctggattttgggattttgttccatatgaaggacagtttcaacagtacttgtcatctggactttcattgtcttcttaccaattagaagtttctcaatttatgtgggaagaaggcccacgggtgaagatgaatctgaaactgtttccaaataacactgcttattttaataagagcgaggtgttaagactgagaggaatgttcacaggctggctgattccagactctgatata

SEQ ID NO: 21012 - DNA, 498 bp, Oryza sativa
  Clone ID: uC-osflM202019c10b1
tttccttacagatcatgggagcccattaattatctcgcacaatggtgctagtggagactacccagactgtacggatttggcttatcagaaagcggttgatgatggcgccgatgtcattgattgttccattcagatgaccagtgatggagttcctgtatgcatgagttcaattaatctgtttgagaccacgaatgttcagagaacccctttcagcaatcgtgcttctatctttaaagatattcagcctactccaggaatcttcacattcaatctcacttgggctgatattagcagtagcgatttgagacccaagatattttccccagagagtatatattatcttgtaaggaacccagtgcacaaaaatgcgggaaatttctttaagttatctgactttctaacatttgctaaagataaagatttgtctggcatcatgatcatcataaagaatgctgtatttatggcaaattcattaggatttgatgttgttgattctgt

SEQ ID NO: 21013 - DNA, 469 bp, Oryza sativa
  Clone ID: uC-osflM202019c11b1
tttcctttgattttgaaacggggaggcggaatgctcgaccgatccctcaggccgccgcagccgcagcaggcggcggcggaggcggaggcgggccccggcggtggcgagggaggggggaacgtggatcgggtgctgttcaagaacctcgtcgagatggtgccgctcgtggagtcgctcatggaccggaggtcgaacccgtcctactcgaggcgcgcgtcgatggtgtacacgccggcgccggcgaagaagggttctgatttgaagagtgtgaagtcgccgcaaagtgtgtcggtgaaaaaacggagggatcctggagagacgggcaagaagagcaccgccgacttcaatggtgagaatgtcgcggttgcgccagtcggtctgttggggggagaaaataaacccaaggataaggatgagaacgttttgctgggtgagcagatcgaagaggttgcaaagactctttttgaga

SEQ ID NO: 21014 - DNA, 517 bp, Oryza sativa
  Clone ID: uC-osflM202019d02b1
ggcagtaaagggagactacgtaatagtataccgttgcaacagaatagctgacatcaacacgataccttgtatatactagactaatatctaggtatcatgttgacgtcattatgacatcaactattctgttggaacggcttatcgctctacaggatttaagtattcatgtgtatacaagagtaaaaaaaatatagtgcccaatcaattagcgcgtgcccaattgccatatgctaatctcttatcttacatctgaacatacggcttatcattgtcgccgacgaacaccaagaggccgctaaacaaagaagtgtatacgaacagttctaacacgatcgagtttgggtcaacaccaaaaaggaaaatgaagcatcatacccattgtgttcacaacgttgacacataggaaggctccctgctcaccattcctttaaattaatttcaccattttaggtgcatgtaataccatgccatgaaacagcagcaagcaattccttttgagtgagtgtgtgtgtgtgta

SEQ ID NO: 21015 - DNA, 469 bp, Oryza sativa
  Clone ID: uC-osflM202019d03b1
aaaaaaaaggaaaaaaaaacaaaacacaccaagccaaataaaagcgacaatgggatcgctcaccaccaacatcgtcctcgccgtcgccgtggtggcagcgctggtcggcggcgggtcgtgcggcccgcccaaggtgccacccggcccgaacatcacgaccaactacaacgccccgtggctccccgccagggccacctggtacggccagccctacggctccggctccaccgacaatggtggcgcgtgcgggatcaagaacgtcaacctgcctccctacaacggcatgatctcctgcggcaacgtcccaatcttcaaggacggcaggggatgcggctcatgctacgaggtgaagtgtgagcagccggcggcgtgctcgaagcagccggtgacggtgttcatcacggacatgaactacgagcccatctcggcgtaccacttcgacttctccggcaaggcgttcggcgccatg

SEQ ID NO: 21016 - DNA, 318 bp, Oryza sativa
  Clone ID: uC-osflM202019d04b1
tgcacgcacgcgccaatgtcgtggctcgcgcgctccatcgcggcgacgctctcctcgccgcgcggcgagccggaccccgacgccgacgagcccgaccacgccggcgacagggcgtcctccccggagggttcctccccgcgtgaccccgactccgacgaggccgagcagcccgacaccccgagccgccgcggcgtcaaggacgacatctccgagctcaccgagaccctcacccgccggctctggggcgtcgcctccttcctcgcgcccccgcccccgccggagtcctccaccccgcgcggggaggaggaggaggaggga

SEQ ID NO: 21017 - DNA, 515 bp, Oryza sativa
  Clone ID: uC-osflM202019d06b1
ttgctttgggaaatggttcatactaacccacaaatattgcagcctatgctccaggaactgagcaagaagaatcctcaacttctgaggttgattcaggagaaccatgatgagttccttcagttaataaatgagccctttgatggtgctgatggggacttcttagaccaacctgaccaggatgagatgccccattctatcaatgtcacacctgaagagcaagaggcgattggacggcttgaaggcatgggatttgacagagcacgtgtcatcgaagcattcttcgcctgtgacaggaacgagcaactcgcagcaaattaccttcttgaacatgctgctgatgaagattagatggaattatttaaacccgcttattctgtacacctgccctgcaatttatcagacttttgaagtttgcgggtgctttggatccaaattgaacaagctgagatggagctaacaccgcgttgcatcgatttatcttttgacaatacttgctttatttaattgctggctta

SEQ ID NO: 21018 - DNA, 470 bp, Oryza sativa
  Clone ID: uC-osflM202019d07b1
tttccgagcacatcagggggcgctcctagcactgacagcaagcttaacgatatcagaagcatccaagatgcagaccgagctgattcagacgaaaaatgtgtaacaccagaagatcttagaggcaacaagaacatttctggtgctgaactgaaaagacaagattcctcaaaaagtgtacatcagcatcacaggggtgagagtaagcagccaaaaataattgagaagataatgacaactcttagagaggagagtaggcttagagaaaacaattctcctgtaagttctagtggtgtaaagttgacttctgcagttagcaataagaatcaagcagagcaatcatcagagagctcaaggcctcacagtggtgtttcatacagttcaaagtttggtgacatttcatctaatggatggaccaatacaagcgatgaatgtgtagatccagtccaggtgccattgcaattgaaacaact

SEQ ID NO: 21019 - DNA, 531 bp, Oryza sativa
  Clone ID: uC-osflM202019d10b1
gcttgctgtgttctatggtcacctggcccttgcgatcagcagctcggcgcttggctgctgccgccgccgccgcacgcgcagctccagcttcggtcgctcactcgccaccacctgcgccgatgcctcctcagccatgtccacctgaagacgcagcgctccagcacttgcggcgcgccaccggacacgacgacggcgtccctgccgccggcgagcagccgccgtctcgtcgtccaatccatcggagggactttccgtgtaccacaatggcctcaagagatcattctggtttgactcgacagcttttagattttcaacatggtacagtagatgagatagatggggaacatgatccattcatggagttgaaagcaaggttcatggacttcaagcacaggaattgtgtggataatatttctaactatcaaaatcttgctcagcagcaaacaccaaagttcatggtggttgcttgtgctgattctagggtatgtccttcaagtgttttggggtttcagcccggcgaagcatttactg

SEQ ID NO: 21020 - DNA, 501 bp, Oryza sativa
  Clone ID: uC-osflM202019d12b1
tgatgctgtgaattttgcgtacgaggctggtcttcaggagaagttccccccagttcctctcttgaagtcctacctggcggactcgaagaagacttcatgcaccgtttcagataattcaagcaccagcagtggtcaatctgggagcaatgcaaacaagaaagagcaatccgtgctgagggctgttataaagtgcattgaggatcgcaaactggaagctgagtttccactggaggaccttcagaggcagcttgaagaactggagaaggccaagactgagaagaaaaaggcaacttcaagtgcgtccagcggcggtagcagtggccctgccactaagcgcatccgggcaagcaatggaggcccgatgcctcctgcgaaggcaggtcgtctcactaacaatgcttgtgtgtcttctaccccagctgccaccacctttggccgctccccttccacacatcgtacgccatgggcctcccctacccttacgataggccggttggtcat

SEQ ID NO: 21021 - DNA, 103 bp, Oryza sativa
  Clone ID: uC-osflM202019e01b1
aacttttagtttagaggaggaggagctcgcccaaggagagagacaacaatggtagctcacgctatccaaatgggaggcagacgatgcggaggccaatgcaata

SEQ ID NO: 21022 - DNA, 521 bp, Oryza sativa
  Clone ID: uC-osflM202019e02b1
ttcacgcgtccggctaagctaagcctgatcggtgtagtgttggcaatggctcacacgagctcgcaaaagcacggcaacgacgacgtcgacaccggcgcggaggcggcaatggaccagctcgccgggaggtcgtcgttgtcaccggcgcgggagaagacgaggaggcggccggagaagagcggcacggtgtggacggcgacggcgcacatcgtcgcgctcctgatcgggtccagcgtcctggcggtggcgtggaccttcgcccagctcgggtgggtcgccggccccgccgtcgtcgtcgccctctccgtcgtcacctactactcctcggccctcctcgccgactgctaccgcgacgacgaccctcttcacctcggcggcggcgccgtccatggcgagtacatcgccgccgtccgctcctaccttggtccgaaaagcgtgacattttgcggcatcatccagtacggcgttctctgggcggcgatggttggctacaccatcacatcaagttcaagcatgagtgc

SEQ ID NO: 21023 - DNA, 456 bp, Oryza sativa
  unsure (1)..(456): unsure at all n locations
  Clone ID: uC-osflM202019e06b1
ctgcggtcaccgccgccgccgccgccgccttggtcaccaaatccgcctacggcggcgccggcggtggggggcatcgtcatggcgtcgccgagcagccgcgcggtggccgtcggcggcgcgctcctcctgctcctcgtcttcgccgtcccaaccaccttcctctacctcacctccgcccccgccgcctcctccccgagcctcctcctcaacctcaagccgttcggcgcccggtgcgcgcccgccgccgccgccgccccgccgctcagggtcttcatgtacgacctgccacggcggttccacgtcggcatgatggacgcctccgcctcggggttccccgcgtggccgccgtcggcgggcgggatcaggcggcagcacagcgtggagtactggatgatggcgtcgctgcagggcgngggaggtgggnggaacgggttcgttgtctgaggaggggaggga

SEQ ID NO: 21024 - DNA, 471 bp, Oryza sativa
  Clone ID: uC-osflM202019e07b1
tttcgccgctgccgcggcttctaggttttccattccccatccgctcccgcgacttccttcgcgtctccaccgtcgccgctccaccgtgggttcttcaccgctcgcctttcccctcaccagatcgatatatccctttcacccgcgcagtctccatcgccgccgcttctttgtctctctaccccgtcgagccgaaatcgctgccatcgctgatttccacacaatcttctgctacggtcgtcctcagccatcggcccgctattctatcaaggcctgctggcgtacatcttcattggctggacacaccgtccccaacgggatcgacgggtgcccacggctgcaggtctgcccgccccttcaccgctagtttgaacataggccaagctatgtttcgtcctcagccataggccatctgctcgggggtaatggcgggtgcccagttgatccttacggctcactgtttgacagagcgaa

SEQ ID NO: 21025 - DNA, 196 bp, Oryza sativa
  Clone ID: uC-osflM202019e08b1
gtcaaatctgctgccgtttcatcaatctgatatgtgattcttttctgtgtttaaatttctccagaaagcatttttaaattgtagagtacgtcacagtttatgttgacctgtagtattttgcatagttacaaaaggtcaaaaatgtcaataacaatccagtatatatcaacaaattcacaggtctgcctttttgctg

SEQ ID NO: 21026 - DNA, 455 bp, Oryza sativa
  Clone ID: uC-osflM202019e09b1
tgcgcggcggagagaaattaatcgatcgatcgatcgatccgattccggccggccatggcagctgctgctccggcgacggcggcggtgcggcgcatgaagctgggctcgcagggtctggaggtctcggcgcaggggctgggctgcatgggcatgtccgccttctacgggccacccaagccggaggccgacatggttgcgctcatccaccacgccgtcgccgccggcgtcacccacctcgacacctccgacatgtacggcccccacaccaacgagctcctcctcggcaaggctctgcagggcggcgtgagggagaaggtggaggtggccacgaagctcgccgtctcgttcgccgacgggaaggtggagatccgcggcgacccgccgtacgtgcgggcggcgtgcgagggcagccttcggcccctcggcgtcgattgcgtaaacctttactaccagca

SEQ ID NO: 21027 - DNA, 463 bp, Oryza sativa
  Clone ID: uC-osflM202019e10b1
ttgtgatactgccagcttcttctcaactcgacataagagctccctggcttctctgtaggggggtcactttggtcgatggagggggggacgaagaaagttttcacagttcaggtggaggatggaaagcccaggaaggacggccggccggcggtagggccagtgttcaggagtgcactgtcaaaggatggattcccgccacttgagcctgacatgaaaacatcatgggacgtgttcagggtcgcagcaggcaagtacccagataatcggatgctcggatggcgtcctgtaaaagatggagtgatagggccatacatatggaaatcatacagggaagtggttggaagaagtcctgcaagttggatctgctttgcagcagctgggggtgaagccaggttcccggattggaatatatggatcaaactgccttcagggataagagcaatgcaggcttgcaatggttaca

SEQ ID NO: 21028 - DNA, 536 bp, Oryza sativa
  Clone ID: uC-osflM202019e12b1
acgtgcgggtcgggtctcgtgtatcgcgccgcctcgcttccttccggccgccggctcgtcacgcttctcggcctcctccgggaggaagacagtgagataagcagagagattgaggcgcagaagcatcggcattgagccgaatggtgtacagagctccagggatggatcgccggagctggctatggcggcggagatcgaccgagaagagcccggtcgagaccgagagctcggtttcttctccatccgagaggctgtctgatgaacaggatactccaaagagttctccaagctcagttcaatcaccggagatctcgtcgaaggaagcgcaggatgacaatgtgaaggtgaaggtgttgagcgagagactgtcatctgcagttttggacatacgtgcaaaagatgatcttgtgaagcagcattcaaaagttgcggaggatgctgttctaggatgggagaaggccgagaaagagatagcatcactgaagacccactgaacgctgcaactgccaagaactcaacactggaagacagaatcg

SEQ ID NO: 21029 - DNA, 386 bp, Oryza sativa
  Clone ID: uC-osflM202019f01b1
tgtttgatgtatgccaaggtgatccattatcccgcagcacgggtagtgcacttagggacaaatttttgaagcatggtggagctaaggatccttctgccctgttaaaggatttcgtaggtgattccattattataaactctggaggaggaataatccctgacattagctccttgtgtaaagaagtcggtttgtgaaataccattgggagtggagattgggatcattatttttgacattgagatgggttaaagggtcaaagactcatgatatcatgagtcaggagcttgatctgccacagggctgcaggatctagttgaaggtcaagctgaaaaaaataatagtagatttttgacaaagaactgatgaattgggtctcaatacaggat

SEQ ID NO: 21030 - DNA, 453 bp, Oryza sativa
  Clone ID: uC-osflM202019f03b1
gtgatttttgagagagagagacagacatggagaggaggaggtctcggaggcagcaagcctttcaccccgtctccgagataacgatgtactcctcatcttaggtagctgcggaggaggaagaagaagaggggttggttgttgttggccggaggagcaccgccgacgatggtgacagtggcgccgccggcatgggaatagcggcgccaccgtgtcagccagggcagaccaccacgttcgtcataagccaacccaccagcagcaagagctccccggtggcgatcgtcgttcggccgccggtcacggcgagttcttcttctatgtcccactcccagggtttccaccagcccagcagcggcgccgtcttcggcttctcttccgatggctttgacggccgccccggctccggccaagaccaccagaagtacgagcagtagtagcagcagcacgtggcgc

SEQ ID NO: 21031 - DNA, 456 bp, Oryza sativa
  Clone ID: uC-osflM202019f05b1
ttcattcgccggccatggcctccgacggatactacgccgggctcgtcgccggcacgccaccttcgccgtgtcgccctggccggctccggcggtgtcagccgccggccaataacctcgtttcatcaggtggaagaagccatcaagcaattagggtcaccaatggagtgaacatggatggccgggcacagcttgcagccccagttgcagtggtcactggagcatctagagggattggaagagccatcgctgtggctcttggcaaagcagggtgcaaggcgattgtgaactatgccaagtcaggtatggaagctgaagaagtgcgcagagagattgaggagtcgagggggaccgctatcaccttctctgctgacgtctccatcgaagtcgaggtctaatccatgatgagagccgcacttgacacttggggaacactagacgtgctggtgaacaatgcag

SEQ ID NO: 21032 - DNA, 372 bp, Oryza sativa
  Clone ID: uC-osflM202019f08b1
tttgtgaacgtaagtaacacaggattgagcagtagctagtgacgattattaagccatgcacggcggcggcgcccgtgcgctcgcggcggcgttcgtgctggccctcctcgcggcggcgccggcggcgtccgaggtggtctgcagcggccggcgctacgcggcgaacagcagcttcgatgccagcctccagcaggtcgcccgcacccttcccggcaacgcctactcctccccgctcctattcgcgacgctcgccgtcgccggcgaggcgtacgcgctcgcgctctgccagggcggcacgagcgcgggctcctgcaactactgcgtcgcgcagaccatgcgcgacggggagcacgcctgcgccggcgacgccga

SEQ ID NO: 21033 - DNA, 468 bp, Oryza sativa
  Clone ID: uC-osflM202019f09b1
tttccttcctctcctcggggtttttgtccacaaacgagcggctcgcctgcgccgcgtggattccccttcccgccgatccggcgatggattcggcggcgagagcctcgcagtcggcggcgccgccgccgcccggcgccggggtccgcgtccgcgccccgctggtagagtctgtctcatgctactgcagattagatactggtctgaaaactgttgttgatgctagaaagtttgttcctggagcaaagatgtgtatgcaacctgatgtcaaaccccacaagtgcaaatcaaggggctctcgtaaggagaggagccgaactcaagcaccacttttgcctggtcttcctgatgaccttgctattgcttgtctcatacgggttcctcgagtggaacatcccaatcttcggatagtttgcacaagatggaaccgtctcttatctgggaatactattattccttgcgcaagagaaa

SEQ ID NO: 21034 - DNA, 531 bp, Oryza sativa
  unsure (1)..(531): unsure at all n locations
  Clone ID: uC-osflM202019f12b1
atccctcttccagtcaagaaaaaaggacgattacaccaacaaacaaactagctagccaatggcctccttgtcatcttttccggctcgccgtggcggtggcggcactattggttgttggctcatgtgccactgagctcaccttcaaggtcgctaagggctctagcgccaaaagtctagagcttgtcactaatgttgccatctctaaggtggaggtcaaggagaagggcggcaaggactgggtggcgctcaaggaatcgtcgtctaacacctggacgctcaaaagtgagtcgccgctcaagggccccttctctgtccgcttccttgtcaagaatagcggctaccgtgtcgtcgacgatatcatccctgaaagctntacagctggctctgagtacaagagtggaatccaactctaagtaacagacatgtgtactcttgttgggtcacatgcgaaatatgaacatctaaataatcctctcttaaaagagatcgtgtcattgttgagtgagcaaataattattatntttggttatt

SEQ ID NO: 21035 - DNA, 457 bp, Oryza sativa
  Clone ID: uC-osflM202019g01b1
ttagttttgaacaaaataggtaatatattttactaagtttttgagcaggctttccacttggtacactatgtgaattaaacttgtcgtgctagtgtaaaatggacacaggggcctcttcaggtggctgcctgttattatcggagacaaaatacctagccatattgtactgatggtttttgactgatgacttattctaattttgcatgcagctggttcaattcctcctcaaacaggctggtgttgataagagaacaggtgacttatatgggaaccgtgatctattaaatattgctcgcaacatggctcgtggactcaagggcgttgagaatgtatacacccaacatcagcctcttctctttcagaccatggaaggaattgtaaaggcacgattacgagatgctgattatccgcttgttggcaatcatttccagcagaacaggcctcaagatgttgtgct

SEQ ID NO: 21036 - DNA, 324 bp, Oryza sativa
  Clone ID: uC-osflM202019g02b1
tttgattgtgagcgcgcgccttatgtattttgttacgagaagaacaggactactttatggatgccatgaccatgcatacatgtgggcttttacagaaccatgaagaattcctagtgcgaagccgtaaaatacataagggaaactcactcattttgggtgcagagcgaccgtgcgaagtgcgtactcacacgcaattttatttgatcgagcggggccggaacgggggtgcacacgcttacttggcacgaaacgccgacatgaagcagccgacgaacggtgcctggccgaagcagatcatgttgggcccgaaaccgacgcggagta

SEQ ID NO: 21037 - DNA, 528 bp, Oryza sativa
  Clone ID: uC-osflM202019g05b1
ttcgctttcgccgcgtgctctccgcctacggcctcttgtatcccgcaaccaaaaactactcccaaaaaaaaaaaatttctagtatcacaccaaaagaaaaaagagaaaaaaaatttcccccaaaactccgcgagatctgcccgtgccgagctatataccaatccatcagctagggtttagagcagatttttttttttgtttcgcggaaaaaattgaaaaagagagaagggtgagggagcgaggtcgagggatcggtgggcgatggcggcgcaaatggcggcggtggcggtgaacgggggctcttcgggggctgtcaccgcggcggcggcggcgggaggggtcggcgtcgccgtgggcctcgggggcggcggggcgcagtcgctgtacgtgggcgacctggaggcgtcggtcacggactcgcagctgaccgagcttttcagccaggccgggcaggtgatgtcggtgcgcgtctgaagggacataagctcgcgccgttcggtcggctacgcctacgtaactttaacaccc

SEQ ID NO: 21038 - DNA, 446 bp, Oryza sativa
  Clone ID: uC-osflM202019g06b1
ttcccttggccgagcctccgcttctcctcttcctcctgctgctctcctcgttctcctcctgtgccgccgccgcttccggggctcccgtgggcgaggactacgtccggccgcccgcggcggcgcggcgctgcggcctccaccaccggaaggccctcctcagcctcttcccgtggagcaagaagaaggactcctcttccgcctccgatccgcagcaggtgcacatttcactagctggagaaaagcacatgagagttacatttgtcactgatgataactccgtcccttcagttgtagactatggaactgaagcaggcacatacacatcaacgtctcaaggagaaagcacatcatacagctacttaatgtatagttcaggaaagatccatcatgttgttattgggccccttaatgacaacacagtttactactaccgttgtggaggacat

SEQ ID NO: 21039 - DNA, 479 bp, Oryza sativa
  Clone ID: uC-osflM202019g07b1
ttttgaccaagccaagaacaccaatccccgcatcaccaatccacacaagcttcgcagctcgcgcgccgcgggaggggagggagaaaagctcgcccccgagatttttctcctctcctctctgctcgtgtttcttggattggtccatatatccacggttcttgggggcgcggcgcgccgccattgatctggttttggttttgtgaggaggagaagttgcggtggtgctggtgctggtgctttcttgatctgatgatggcgagcacgacgtcagcgactgtcgccgggggcgcgttcgccgccgcgaagacccgggcggggtcgtcggcagcgggctggtggaccgtgccccagggtccgccgccgcggaccgaggcggtccggcgtggtggtgcggtgcgactccggcgtggaggcccaagcccaagcccaggccgttgcccaggcccgcagcgtcgccgcgctcgagccgttcaagatct

SEQ ID NO: 21040 - DNA, 462 bp, Oryza sativa
  Clone ID: uC-osflM202019g08b1
ttttcatctccttttctcatcttttctcatgctttgacgccaccattaagctttggcttttctctgcctcccatctcctcctctgccactagttaaagcagagagagggggagaagaaaggggaggagaaagaagcacgggagagaggaggaggagaaggagaaggacaagggaacgaagatgttcgacagcctgctcaactccaagttctacaacaaatgcaagcacgcaatcaagtgcacccggaccaggctggatctggtgcggcggaagaagcaagcgatggtcaagttcatgaagaaggacgtcgccgacctcatcggcaatcgccttgaatcgcacgcctttggacggatggaggcactgattggtgagatgaaccaagcatcctgctatgatatgatcgagcagtactgcgagtacatagtgaagcagcttaacaacctgcagaaacagaatgaa

SEQ ID NO: 21041 - DNA, 511 bp, Oryza sativa
  Clone ID: uC-osflM202019g09b1
ttcagagctcccatgcctgtgggatgtggaggtgaggaaacaccacatgtgtctgtgtgtgtgtgctcatacgactcctgcttcttcttcttctcctttttgtgggggaggaggggtgtcatgttgtgctgcttcttgtgagcttgcagctgtgctgtgctgttccaggttgcatgctgcaatgtatagtaggagtaggaggaggagcaccagtgtgtgtgctgagctgtgctgtgctgcggctgccttctcctttagccgaggagaggggattatcttaaagattccagcttttgttattaatctcctcttcttctggcccactgctccccccctccccttcctaccaccccctatttctgggggaaatgccgggggcctcgtgatttcatctttttctttctcctagcaagcactctctcgttcttgttcttcttccactttttggagagtggcgatgtggccgggcttgatctctcgaatccgtacgtgtttctttgatcccgaatcg

SEQ ID NO: 21042 - DNA, 531 bp, Oryza sativa
  Clone ID: uC-osflM202019g11b1
ttcacaactgcggcaaaaaccgaaaacaaaattctcccccgggttatcgactgcctcatctagagtttcttctttcttcgcgtgttcttggaggaggagcgaggactaggttagctgtattcggagcttcagattatccaaaaaaaaaaaaagaatggacggtgagcagctgatgagtggtgaattggacaattcgttcaacgcactcatggtttctggagagggtgagagtggacaggcacatcatgagggcacagggactaccttgttaggttggaaggaccttcccatggagctgctcctgcggatattatcgatggctggagacgacaggatggtaatcgtgggctctggtgtttgcaccggttggcgtgatacattagaatggggagtcacgaatctttttctttcgtggtgccaggctcacatgaatgacttagtgatgtcacttgctcagaaatttacgaagctgcaagttctttttttacggcaaatcaaacctcaactcgaggccagtgcagtggaggctgt

SEQ ID NO: 21043 - DNA, 389 bp, Oryza sativa
  Clone ID: uC-osflM202019h01b1
ttagcgtcgcctctcctcctcctccctaacccctacgcttccagaaccttctcgaagctcccgctcccccccccttccgctccaatggcgaaggaaccgatgcgcgtgctcgtcaccggcgccgcaggacaaattggatatgctcttgtccccatgattgctaggggtgtgatgttgggtgctgaccagcctgttattctacacatgcttgacattccaccagctactgaatctcttaatggccttaagatggagctggttgatgctgcatttcctcttttgaagggaattgtcgcaacaactgatgttgtggaggcctgcactggtgtgaatgttgcggttatggttggtgggttccccaggaaggagggaatgggaaggaaggatgt

SEQ ID NO: 21044 - DNA, 462 bp, Oryza sativa
  Clone ID: uC-osflM202019h03b1
acgttacgattaccaccgccatcgccgccgcgcgggtagcacatgttgcatgagcagcacgcgccgccgccgcagccggagccggaggtttcgctacagctgtcggcgcccgccaccgccgacgacgatgtcgctgcaggcgacgacgaggaggtcaccgtcgtcaccacgtaccgcgacatccaccctctgacgccgccgtcgccgacgacgacgacgacgccacccacgcggatcgggtccgccgcgtactcgtgggacacggccagcagccaccggtccgtgtcgtccgaggagcagctcatgacgatgagccgggagttcacggccatggtcgccgccgggacgaccatgcagactggccccaacgacggcaacaacggcggtgaccagctcaccagcatcggcgaggacgagctggaggagaccaacccgctggcaattgtgccggacagccacccg

SEQ ID NO: 21045 - DNA, 433 bp, Oryza sativa
  Clone ID: uC-osflM202019h05b1
ttttcgtttgagcgcagggtgccggagatcacgctgggcgccaacagcagtggaatcccggacaccccggccacgcaggacctctgtcagaactgcttcttggagggcacggcgaccacctcggcgccgtcgtctgtgtcgacaccggtgctcgacaagcaggcgtcgaggccggcggagccgctggttgagcctcaggctcctctcccaccgcctgtggaggagatggcctacgcgctcgcgacggcgccggcgccggtcgccaagacgacggaggtgaaccggagctccaggtgccggaagagggtcggccttaccgggttccggggccgggggggccaccagttctgcggcgagcaccgggactccgaccgccacggctgcagtaccactacaagtcggcggcgagggacgccatccccagggacaaccc

SEQ ID NO: 21046 - DNA, 291 bp, Oryza sativa
  Clone ID: uC-osflM202019h06b1
ttgagtaagtggttgcgccgacgacgaggtgagcgggttgacggaggaggaggcagcgcgcgccggcttcgggtgtcgttgtccctgctcgccaggtgctcggttgtcgctgacatactgctgagcagaaaaccagcacccatcggcttagtacctgtctgctctgctgtctcagcctctcaggttgcaaaccccatatcccagagctcgacgccacccatgtggttttttaacttcaaccgaaatggcccctctggcttctccggcgcctccaccgccgaggaggtcacc

SEQ ID NO: 21047 - DNA, 383 bp, Oryza sativa
  Clone ID: uC-osflM202019h08b1
tttccgttcgccgccgccgccttcgattcgataccgatcgagttggagaaggtcgccgctgcccaatggctacgctaccctcgccaccgctgttggccgaatcgctcgcgacgctgcgcacagccttgtcgaagccggccatcccctgctctcctcgccgcacccggacgttggtttcagctaggttcgtaagaacggccggccgccggagccggagcacggggggaaggagagaccttaggagctgtgctatgcggacgaagctgagtactgcagtgcggaggatgaggtcgccgacgacttctactccagtcttggcgtcatgccagatgcaaccccctgaggaaatcaagaaagcatacttcaggtgcatgaaagcgtgc

SEQ ID NO: 21048 - DNA, 521 bp, Oryza sativa
  Clone ID: uC-osflM202019h10b1
gaaatggtggatttggggctactggatatccccgatgatgtacgcccagaatgccatctcagttaatgaactcatggggcacagctggaacaaaattgtgaatagctctgcctccaatgagacccttggtgtgcaagtcctcaagtcccgtggagtattccctgaagccaggtggtattggattgggtttggtgcaatgatcggcttcaccatccttttcaatgctctcttcacccttgcccttacatacctcaggccatatggaaattcccgtcagtcagtatcagaagaggaactgaaagagaagcgtgccaatctgaatggtgagattgtgggtgacgttcacttgtcatctggaagtacgcgtaggccaatgggaaacggcactgaaaatgattcaacaattgttgatgatgatactgaggttactcaaagggggatggttctcccatttactccgctttcactcagctttgacaatgttagatattctgttgcattgccacaggaaatgaaagcac

SEQ ID NO: 21049 - DNA, 506 bp, Oryza sativa
  Clone ID: uC-osflM202019h11b1
tcacgctgttcgacaacatcgggaggcactacctctacaactgcgacatccagggctccatcgatttcatctttggcaacgcaaggtccttgtaccagggttgcacgctgcacgccgtggcgacgagctacggcgcgatcgcggcgtcgcagcggagctcgccgtcggaggagtccgggttcagcttcgtcggctgccggctcaccggctccggcatgctctacctgggaagagcatggggcaagtactccagagtggtgtactcctactgtgacctcagtggcatcatcgtcccccaaggatggagcgactggggtgatcaatcaagaacaaagacggtgctgttcggtgagtacaactgcaaagggccaggggcgagcacgaagcagagggtgccgtggtcgccgacgcttcacctacgacgaggcgcggccgtcatcggccggagcttcatcaacggcgagcagtggttccggtgtagatcatcgccgatttttcacaagttc

SEQ ID NO: 21050 - DNA, 54 bp, Oryza sativa
  Clone ID: uC-osflM202020a03b1
gggtcttgtgggctgaagctgaacctgcgttcttggaagcaacagaaaaggagg

SEQ ID NO: 21051 - DNA, 346 bp, Oryza sativa
  Clone ID: uC-osflM202020a04b1
gcggtctgcttcgcgctctaacccacactgttggtgcatggcgtgcgacacactggtgggagtgggaggcctatcggctgccctcttctcccgctcccgacccctgtggtgctgcaggtgcacctcctgctcgggcccgttgatactccgagccggtggcagatgcaacagcccggcgggatggacttcgacgcctctgtaccccactgagagggagcacctgcaggggagagagtacgaactcacgtgtacttcagtgtgccgatgacgctaatgcggtgaccgatgatgacatcgtgaacgatggtatccatcatcaaacccctttcgatgctgaaatggatga

SEQ ID NO: 21052 - DNA, 269 bp, Oryza sativa
  Clone ID: uC-osflM202020a06b1
gtcttcttcacctgcgatccatccgcgcccgcgaggaggagggagccggacgccgccgcggggagagcaggggagagaaggagaggaggagatcgccgtcgccgaagacgtcgacggcgccgatctccagcgggagctgagatggggctcacgtctacaaagctgatcagtcgcctgttcgccaacaaggagatgaggatcctcatggtcggtatccatgcggccgggaaagccaccatcgtttacaagttcaggctcggcgagatcgt

SEQ ID NO: 21053 - DNA, 441 bp, Oryza sativa
  Clone ID: uC-osflM202020a07b1
tctaaccttgactggtacaagggccccaccttgcttgaggctcttgaccagatcaacgagcccaagaggccatcagacaagcccctgcgtcttccccttcaggacgtgtacaagatcggtggtattggcaccgtgcctgtgggtcgtgttgagactggagtcctcaagcctggtatggtggtgacctttggtcccagcggcctgaccactgaggtcaagtcggttgagatgcaccacgaggctctccaggaggctcttcctggtgacaacgtcgggttcaacgtgaagaacgttgcggtgaaggatctgaagcgtgggtacgtggcctccaacttcaaggatgaccctgccaaggaggctgccagcttcacctcccaggtgatcatcatgaaccaccctggccagatctgcaacggctacgccccagtgctggactgccac

SEQ ID NO: 21054 - DNA, 424 bp, Oryza sativa
  Clone ID: uC-osflM202020a08b1
gcggtctgcttcacgcctccctcctcctcgccgcctcgccgcctcgcctcgcctcgcctcgcctccaccgcctctactaaaccctccgccgtcgccgccgccgcggtgatcaccggcggccgagggatggagcagaatggagagaaccatctcaaagatccacttcttcaggcagatggaggcggctccggtgcttctcccgccggggcgtcgccgcggaaggagaggaagacgaggaaggtcatgttcaatgtccgggggatctcgtgtgcttcgtgcgccgtgtcgatagagacggtggtggctggcctcaagggagtcgagagcgtcttggtttcgccgcttcagggccaagctggtgtccagtacagaccagaggaagccgttgcaagaaccataaaagaagctatcgaaggcctcaatt

SEQ ID NO: 21055 - DNA, 297 bp, Oryza sativa
  Clone ID: uC-osflM202020b02b1
gaccggccggatctcgggcgcccacgcgtcggtcgttcggcccggtggtccgcatgaaccggcagaagaagatggacgtgagcgcgctgaccctcgccggcccgaccagaaccggaaagacggacctcgcacacggcaacttgccaccatgctaggtaggaaggacccactttgatctatggagggaacagaagagcattccacagaggccacgaaaacaagaggagctgatggaaaatataccatacaagctatccgtcttgcgaataaaacgaaaataaacgtcggcaccatgaa

SEQ ID NO: 21056 - DNA, 517 bp, Oryza sativa
  Clone ID: uC-osflM202020b04b1
gacacgacgcaccaatggcgctcgtctccgcctcctcctccaccaccgccgtcgcggcgctccccggcgccgccagggcctcctccttcctcggcggcgccggcaggagcggcaggctgctgctgaggcaggccgagtcgtcgtccgcgcgggcgtcgttcgccgtgcgcgccgcggcgcccgacaggccaatctggttccccggcagcaccccgccgccgtggctcgacggcagcctccccggcgacttcggcttcgaccccctgggtctcggatcggacccggagagcttgcggtggaacgtgcaggcggagctggtgcactgccggtgggcgatgctgggcgcggcgggcatcttcatcccggagttcctgaccaagatcggcatcctcaacacgccgtcgtggtacaccgccggcgagcagcaatacttcaccgacaccaccaccctcttcatcatcgagctcatcctcatcggctgggccgagggccgccggtgggctgacatcatcaagcc

SEQ ID NO: 21057 - DNA, 512 bp, Oryza sativa
  Clone ID: uC-osflM202020b05b1
tcgtgttgtcagaaacagaccgcgtctcactcgcagatacgtgttgggggcactaggatacggccagcggtacggacgccggcgagaagaaggactccgtcgacgccgacgtctacgccgcgtgaggtccggattggttgaaaggctgatcgagtttcttgataccaaggcaagtagcttataagaagatttggactttggtggcataaatggatgaactaactggcggcttcaacgtggtgttgattacaggctcttgagctaccaagtatgtcagcttcaaatgagaagtggattgatgggctccagttctcatcactgttctggcccccaccacaggattcacaacaaaaacaggcacaaattctggcctatgttgagtactttggccagtttacagctgacagtgagcaattccctgaagatatagctcagctaattcaaagttgctatccatcaaaagaaaagcgccttgtagatgaagtatagcaactttgttcttatcatctgag

SEQ ID NO: 21058 - DNA, 493 bp, Oryza sativa
  Clone ID: uC-osflM202020b06b1
gcgttctgcgaggaacacacacgacaaacacaaacagaaaaacacagcacattaagctagctagaagaagagagaaattaaagaagctaggagctaacgatcaggatggctgctggcatggtggcgacaatggtgctactgacgtgccttgctgcaggagggctggtcgtcggagctgaggaagacggtggcggcggcggtcttggccggctggggtcgccggactacggcgacgcgctggcgaaggccatcctgttcttcgagggacagcggtcggggcggctgccggcgaaccagcgagcgacgtggcgcggggactcggcgctcaccgatggccgtgaagaaaacgtgaacctgaccggcggctactacgacgccggcgacaacgtcaagttcgggtacccgatggcgttcacggtgaccctgctgggctggagcgccgtcgagtacggcgccgccgtcgcggcggcgggggagctcggcacctccgggc

SEQ ID NO: 21059 - DNA, 451 bp, Oryza sativa
  Clone ID: uC-osflM202020b07b1
gtttaggtgcgcattgctcgcattttcaatacatatggccctcgaatgtgtctagatgatggccgtgtggttagcaattttgttgcccaggcattgcgtagacagcctatgacagtttatggtgatggaaaacaaactagaagttttcagtatgtttctgatctggttgctggactgatggctctgatggagggtgatcacattggccctttcaacctgggaaacccaggagaattcaccatgttggaacttgcacaggttgtgaaggaaacaattgacccaatggcaacaattgaattcaaacccaacacagctgatgatcctcacatgagaaagccagatattaccaaggccaagcacctgctacgttgggagccaaaggtctctctaaggaaggtcttcccttaatggtgaaggactttcgtaaaagaaatttgatgagtaatcaaaa

SEQ ID NO: 21060 - DNA, 490 bp, Oryza sativa
  Clone ID: uC-osflM202020b09b1
tatttgccggcatgtacatgttaaagagaaaaggataattggtctgaaaagtcatgacaaccatatcctcttacaacacttgcttccactagcagtacgaaagacattgccagaatatgttagtgcagtattggttcgtgtgagtaacttctttaagaaaatatacttacctgttatttccataagtgatatggaaaagttagatgctgaaattgctgaaacattaagccttctagagactatatttctaccagccttttttgatattatggttcacttaatggctcatcttcctacccaagtaaggatttctggcccagttcagtacagcaacatgtatccaatagaaaggtttctaatgaggttaaagggatatgtacgcaccaagagtcatcctgagggatcaattgctgaaggctatttgtttgatgagagtcttacattttgctctcgttatttagaaggatgggaaactaggttctctcgaaaa

SEQ ID NO: 21061 - DNA, 522 bp, Oryza sativa
  unsure (1)..(522): unsure at all n locations
  Clone ID: uC-osflM202020b10b1
tctttttcagaaacaaacccctctcactcccagatacctgctgctgccactagcccactaccatggatccttgcaagttccggccgtcgagctcgttcgacacgaagacgacgacgacgaacgcgggagctccggtgtggaacgacaacgaggcgctgacagtggggcccagggggccgatcctcctcgaggactaccacctgatcgagaaggtggcgcacttcgcccgggagcgcatcccggagcgcgtggtccacgcccgcggcgcctccgccaagggcttcttcgagtgcacccacgacgtcaccgacatcacctgcgccgacttcctccggtccccgggcgcccagacccccgtcatcgtccgcttctccaccgtcatccacgagcgcggcagcccggagacgatccgcgacccgcgcgggttcgccgtcaagttctacacccgcgagggcaactgggacctcctcggcaacaacttncccgtcttcttcatccgcgacggcatcaagttccccgacg

SEQ ID NO: 21062 - DNA, 517 bp, Oryza sativa
  Clone ID: uC-osflM202020c01b1
ccgtttgagtacctcggcaactgcctccgcccttgcttcgtggaggtcgacacggccggcctgctcggcagcggcgccgacggcgtggtgacggcggcggtggccatcggcgcggccatcagggggctcgacgacggcgtgctggacggcgccgacgggtggttccagaagatcgcgtcgctgatgccgcaccggccgatgtccatcggcggctcgccgcggtacggcgtgtacgacaccgacttcgggctgggccggccggcgaaggtggagctcctgtccatcgacaagacgcccggcacggtgtccatggcggaggcgcgcgacggccacggcggcatcgagattggcgtggcgctgccggaggccgacatggcgcggttcagctcatgcttcgccgacggactgaagcagctgtgagtgacgaacagcttggtgcatttcttgctttcttgctgctacgaattgttgagagctcagaactcgctcagtttggatgtgattttgaatgctagct

SEQ ID NO: 21063 - DNA, 525 bp, Oryza sativa
  Clone ID: uC-osflM202020c05b1
ctttcactttgctccaggcaaaggattttatgagtcaaatataaatgtgcctgagctgtcggcacttgagcatggtttcaacatcacacacaaaataaataaactgtcttttgggacagaattccctggtgttgttaatccacttgatggtgctcagtggacacaaccagcatcagatgggacataccaatacttcataaaagttgttcctacaatttacactgatctaagagggcgcaagattcattccaaccaattctcagtaacagagcattttagagatgggaatattcgccccaaaccccagcctggagtatttttcttctatgatttctcacccataaaggtaatatttacagaagaaaatagttccctgctccactatctgacgaacctatgtgctatagtgggaggggttttcaccgtctccggcatcattgactcgttcatatatcacgggcagaaggcactcaagaaaaaaatggagctaggcaagtacagatgatttacctgaaacatggactg

SEQ ID NO: 21064 - DNA, 420 bp, Oryza sativa
  Clone ID: uC-osflM202020c08b1
ctgtcgccgtgggtagcgcacgggtggtatgaggtggcgaccaaggggtggcgggaggtggatctcgggtacatcgccatcctcccgtcgttgctgctgcggatgctgcacaaccaagcctggatcaccatctcccgcctccaaaacgcccgtggccgccgccagattgttcgccgcggcatcgagttcgaccaggttgaccgcgagaggaactgggacgaccagatcatcctgagcggtatcctactatacctcggcgcactgtacgtaccgggcgggcaacacttaccgctgtggaggacggatggcgcggggctgatcgccttgctgcatgcggggccagtggagttcctctactactggttccatcgtgcgttgcaccaccactttctttacacccactaccacttgcaccaccac

SEQ ID NO: 21065 - DNA, 513 bp, Oryza sativa
  Clone ID: uC-osflM202020c09b1
cccatctctctctctctctcgctctcgctctcgccgcggagcttggaggtttgggtgagatcggagcagcgaagcggaggcagccgcagccatggcgttggccgctcgcctcgtctcccgctcccggcagctatactctgctcaagctgccttggcaaatggaggtgccactcaagtccgcttgtatgccaaggaggcagatcgtactcccgtcaatggtgatgacctattgaagggcatattttttgaggtaaagaagaaatttgagactgcccttggtgtacttaagaaggaaaagatcactattgatccagatgatcctgcagcagtttctcgttatgcccaagtcatgaagactgtaagacaaaaggcagatcttctatccgactctgagaggattaaatataccatcgacacctttacaaagggcatccctgatgcacggacttacttgaatactcttcaggagatcaggataaagagtggccttatagatgaaatgggtgctgaggc

SEQ ID NO: 21066 - DNA, 499 bp, Oryza sativa
  Clone ID: uC-osflM202020c10b1
tgcttcagcagcatcaggggaagggtctagaagcttctagaagcttcttccgagatgaaggtgatcgagaagatccaggaggcggcggcggatgggcggacggtgttctcgttcgagtacttcccgcccaagacggaggaggggctcgacaacctgttcgagcggatggatcgcatggtggcgcacggccccaacttctgcgacatcacctggggcgccgggggatccaccgccgacctcaccctcgagatcgccaaccggatgcagaacatggtgtgtgtggaaacaatgatgcacctgacatgcaccaatatgccagttgagaagattgatgatgccttaacaacaataaagtctaatgggattcaaaatgttctggctcttaggggtgatcctccacatggtcaggacaaatttgttcaagttgctggtggattcgcttgtgctcttgatttggtacaacacattagagccaagatggtgattattttgggattac

SEQ ID NO: 21067 - DNA, 304 bp, Oryza sativa
  Clone ID: uC-osflM202020c12b1
actggagggcaagaggagaggcaaccaccgctagtaatgaacggtcaaagcactccacagctccctatgcgtcagatgcttaagaaagtttttacaagagaacgagagcatgatcaagaagaagacactgactttatggcgccaggttgtcatgttaagagcgcggcagctgacaaagcaagacaagatcatacaaagcataagcttagtgagcaggaaccagaggatgaagtggaagaggaagatgaggatgaatatgaagatgatgttgaggatgaagatgaataagtagaaaaggatgacg

SEQ ID NO: 21068 - DNA, 498 bp, Oryza sativa
  unsure (1)..(498): unsure at all n locations
  Clone ID: uC-osflM202020d01b1
agttagcagtacttgtctcagtgtccgtgagacgtttgtgtaagattaggttaaactagaagttgtaatgctgtattaagtgtttgtatttctaatatgaaccgtaacaaggccagagcagaactcgttatacatacaaaaaaaaatgaagatggtgctcccagtgagaaagccgaaccaaacaaagaactccgggtatcgccggatccctcctgacttacagctcctacagaaggaaacatgaagtagcggctcgaaacctagaacagtggcttctgtccaccggcattcactcttgagggtggattcttgctccagaattgtgctgccatctttcaaatgatcttcatcgtgcaaagtaattatatgtacattcctctgaatgatctatgcaccaattgttgatcctggcagggtaataatctggatgtattgagtccatcacagtgcgaatgtcacgggtagatctgctgttntcaggcaatttattcttggctt

SEQ ID NO: 21069 - DNA, 518 bp, Oryza sativa
  Clone ID: uC-osflM202020d02b1
gttgtttatagcgtagtttctccatttctcattttttttctataatttttttcgctattctaaaaaaaagaagtttcttcgtttctcgttattcttaaaaacattttcttcatttctcatctcattattatagagaaagtttcttcatttctaatccaacaaccaccatctccgataataaaagccaatccttgtgtctctctgtctgcaccactctcctctctcttggttccatgcctcgccgtttatctatctaatttactagcagtatttatttttctttcctgcccttgatattatttattatctctgtttctattgacgttgttcccttcttctactggtaacaaggaatccaatcaatcccagtactgggagggagggagtctgcctcaacctgcatttgctctgttccaaaattctcttctgtctttgttctttcctccgctggtccatagcatctgttgatcccatcatactccaagatctgaagagaaggagggattgcgaagaatcgc

SEQ ID NO: 21070 - DNA, 515 bp, Oryza sativa
  unsure (1)..(515): unsure at all n locations
  Clone ID: uC-osflM202020d04b1
ccgtttcccttccccgaggagccacgccgccgccgccgccgccgccatgccgaagcactaccggcctgcgggcaagaagaaggaggggaacgcggcgaagtacatcaccaggaccaaggcggtgaagtacctgcagattagcctcgcaaccttcaggaagctatgcattctcaagggcgtctttccccgggatccaaagaagaaggtggaagggaaccacaagacctactaccacatgaaggatattgccttcctggcccatgatcccttgattgagaagtttagagaaatcaaggtccacaggaagaaggtcaaaaaggcgtttgctaagaaaaataaagatcttgcagacagattattgaaccgaccaccaacttacaaacttgacaggcttattcttgaaagatatccaacttttgttgatgctcttcgtgactgggatgattgcctaacaatggtgcatctttttgctgcgtngcctgctgttgaaggtgaacgtgtgcaagttcagcgga

SEQ ID NO: 21071 - DNA, 529 bp, Oryza sativa
  Clone ID: uC-osflM202020d05b1
gttcaatcgctctctctctctctccctccccgattcgattcaattcgcgacgcctccgtgaaattctccaaagccagcttgccctgtagccgcgtgctccggccatggcgttcttcaggggcctgaccgcggtgtcgaggcttcgatcccgcgtggcacaggaggccaccacgcttggtggtgtgcgatggctgcagatgcagagcgcatctgatcttgatctcaagtcccagctgcaggaattgattcctgaacaacaggaccgcttaaagaaacttaaatcggagcatggaaaggtccaacttggaaatataacagtcgatatggtccttggtgggatgagagggatgactggaatgctttgggaaacatcattgcttgacccggatgagggtattcgttttaggggtctctcgattccagagtgtcagaaagtgctgccgacagcaattaaagatggggagcctttgctgagggtctacttgggctcatttgaccggaatggtgccaccaaagagcaagttgatgc

SEQ ID NO: 21072 - DNA, 451 bp, Oryza sativa
  Clone ID: uC-osflM202020d07b1
ttttccttcctccccacccacccccaaatccacctcgccgtcgccgccgcgaaaccctaggcagccatagccatggctgcggacatcctcctccgccgcgtcccccccgctgcgggcccaggccacggcgctcatcgcggcgcgctcgatctcggactccacggcgccgctcaccatcgagacctcggtccccttcacctcccacatcgtcgacccgccctcgcgcgacgtcaccaccaccccggccgagctcctcacctttttccgcgacatgtccgcgatgcgccggatggagatcgccgcggattccctctataaggccaagctcatccgcgggttctgccacctctacgacggccaggaggccgtcgccgtcgggatggaggccgccatcacccgctccgattccatcatcaccgggtaccgcgaacactgcacctaccttgcacgc

SEQ ID NO: 21073 - DNA, 523 bp, Oryza sativa
  Clone ID: uC-osflM202020d09b1
tttatgttctcacttctcacacaactcgcaaccctaataaagcgcaaaaaaggaaaaagaaaaatcgccacggaaaaatcctcgctgccccccatcgggcaggagcaaccgccgcatcggcccccgatccggtcgccgccgcctctcgcccggttcatccgccgcttgccaacccctccgctcccagcaaccctagtcccccaccccaacgccgccgccagctcagctcgcctcgcgcggggcgcagccgactctctacttgtggcctcggcggctcgggccctctccggattccacgatgtctgaagatgcgtctgtcggggccagcagttcaacagtaaaagctggcgatgatccagaggctaccattgagatcaacatcaaaaccctggattcacaagttcataagctccgtgttaagaagaatgtacctgttctggtccttaaagagaagatagtagaggcaaccggggttcctgtggaccaacagcggttgatttttagaggaagagtcttaaaggac

SEQ ID NO: 21074 - DNA, 288 bp, Oryza sativa
  Clone ID: uC-osflM202020d10b1
cttctttccacttctgacttctccaagcccaaactccaaagttctcatcgttgcgcgtggcactgcggactctccactctccacgcccctactccgaggatacaccgagagtaggcgtggtggcgcttgatctcaaatatcaaatatgcgtcctcccgttttcgtgcagtcgatctaacaccgatgattcttgctaatctcgtttcgttcccccggatcaaagaaactttattttacaacaacaacaacaacaggaggaggacatcgaccttttcttatcgatcatga

SEQ ID NO: 21075 - DNA, 402 bp, Oryza sativa
  Clone ID: uC-osflM202020d12b1
ttcatcctctcgcgcatcctcctccgactacctcggttgggttttgggggcggctggagatgtcggactccgaggagcaccacttcgagtcgaaggccgacgccggcgcgtccaagacctacccgcagcaggctggtactattcgcaagaacggtcatattgtcatcaagaaccgcccatgcaaggttgttgaggtctccacctccaagactgggaagcatggacatgcaaaatgccactttgtggccattgacatcttcaatgggaagaagcttgaagatattgtgccctcctcccacaactgtgacgtcccccacgtgaaccgtactgattatcagctgattgacatttctgaagatggatttgtcaaccctctgactgaaagtggaggcactaaggatg

SEQ ID NO: 21076 - DNA, 525 bp, Oryza sativa
  Clone ID: uC-osflM202020e01b1
ccttctcgtccggtctggtgacaaatttgaatttaaagctccaaggggtggaatgtacaagttctgcttccataatccatatggagcacctgaaaccgtttctttctacattcatgttgggcacatacccaacgagcacaatctggcaaaagatgagcacttggaccctatcaatgtgaaaatagcggagctgaaggaagcattagaatctgtcactgctgagcagaaataccttaaagcccgtgaagctcgtcaccgacacacaaatgagagcacaagaaggcgtgtcatgttctacacaatagcggagtacctagctttcatgggtgcaagcgctttgcaagttgtttacatccgtcgcctattcagcaaaaacgtggcatacaacagggtgtagaacagagtctacttcaaggcagcagaaaatggttggagcaggaaaaaaatatttccaacatattgtgttagcttatgcagccatttttttttgggtttagtctaaaacgtggccctttttaaatttat

SEQ ID NO: 21077 - DNA, 483 bp, Oryza sativa
  Clone ID: uC-osflM202020e02b1
cactatttctctttctcccacctccaccggcgacgccaccgacgccgtcttctcctcctgcgactctctacggcagcctggccgccgagccgcgcagcgcagcgcatagcaacatggaagcgacgggcgccgccgtatccgccttctccaccgcgtcctcgtcgagaaccgcggcgcctagacacggccgtctactggcgagccccgcggcgtggcgcagcgcacggacgctgccaccacgggccgtcgcctcctcccgcgcgacggttctcgtatcgaaccctactccgtcgacgttgacgacgacacccgatcctgctgcggacgcgccctccaaggtcgaccggtccgggcggttctgtagcccccgcgccgctcgcgagctcgcgctgatgattacctacgcggcttgccttgagggcgccgacgtggtgcggctcttcgaccgcggaatcagcgcgagaagagaacctggctatgttt

SEQ ID NO: 21078 - DNA, 512 bp, Oryza sativa
  Clone ID: uC-osflM202020e03b1
gtgctggcgcggaggcggaggaggagggacctggagctggtggagggagccgcggcggagaggaagaggaaggtggcggctgggatcgaggacgtggagcacgcgctgtcgaccccgacggcgctgctgcggggcatctcggacgccatggtcaccgagatggagcgaggcctgcgcggggacagccacgccatggttaagatgctcatcacctacgtggacaacctacccaccggaaatgaacaggggttgttttatgcattggatcttggaggaaccaacttccgtgtactgcgagttcaactaggtggcaaggagaaacgtgtcgtccaacaacagtgcgaggaagtctcaattacaccacatctgatggctggaacttccatggaactgattgattttattgcttctgcattgtcaaaatttggtgatactgaaggtgatgattttcacctcccagatgggagacagagagagctgggcttgaccttttccttcccattgagccagac

SEQ ID NO: 21079 - DNA, 502 bp, Oryza sativa
  Clone ID: uC-osflM202020e04b1
ctgtatggggagttggtggtatagaggcagaagctacaatgcttggccagccaatgagcatggtattgccaggagttgtgggcttcaagttaacagggaagctgaggaacggtgttactgctacagatttggttctaacagtaactcaaatgcttaggaaacatggcgttgtcggaaaatttgttgaattttacgggggaggcatgagtgaattatcactggctgatagggctacaattgcaaacatgtcaccagaatatggtgcaactatgggtttcttcccagctgatggaaagacattggactacttgaagctaactggcagaagtgatgacactgtggccatgatagagtcttacctgcgtgccaataagatgttcgtcgactacaaccagcctgaagctgaaagagtgtactcatcttattctgaacttaacttggaggaggtagagccatgcttgtctggaaaaaaacggcctaatgaccgagtgactttgaagac

SEQ ID NO: 21080 - DNA, 447 bp, Oryza sativa
  Clone ID: uC-osflM202020e06b1
cttaagcaggctatcactgccatggttcagaaagcaatggagtacattgacttaacgccagacatggacacacgtattgagctaatcaagacgttgagcagtgtatctgctggaaaaatatatgtggagatagagagagcaagattgatcaaaagacttgcaaaaatcaaagaggagcagggacagattgatgaggctgctgatttaatgcaagaagttgctgttgaaacatttggctccatggcaaagacagaaaagattgcattcattctagagcaggttcggctgtgcttggatcgtcaagattatgtacgcgcacagattttatccaggaaaatcagtcctagggtatatgatgcagacccgtcaaggaaaaaaagaaaccgaaagaaggtgataatattgttcaggaaggcccagcagagatacctttccttcttggaactg

SEQ ID NO: 21081 - DNA, 91 bp, Oryza sativa
  Clone ID: uC-osflM202020e07b1
gtccgcacccgcacacacatcgctcggtcgaaggaggaggttctagaaacttctggaagcggcggaggtgtggggagagagagagagagag

SEQ ID NO: 21082 - DNA, 504 bp, Oryza sativa
  Clone ID: uC-osflM202020e08b1
gtttatcaagaatattcaaatgcaattgttgttgctcaagccacttctaatcaaatgtcaaagcgtgaccttttgaggccttatatggatattattgacaaaatgttggctcagatgctgcgggaggatccatcttttaagccttctggtggaagattaggtgaaaatgatatggactatgatacagatgataaaacaatggccacacttcgacgtcaacttaggagggctcacgaggagtactacaggtgtaaaagtgaatatatgacttatgtcatggaagcccttgaactagaagacaccattaaaaattatgaacgacgtgacgcaaatggatggaaatttgtgtcaagttttagggaaagtcgaccgggcacactgggttcccttttggacacaatggagttcatttggcgctgtgttctgaggaagcagcttcagaaaggatttgctattgttcttggctgtatgtcaactgctatactgctggctgaagccactctg

SEQ ID NO: 21083 - DNA, 528 bp, Oryza sativa
  Clone ID: uC-osflM202020e10b1
ttctagcaaagaaggagagagcttggtgagctgcagagatggccccctccgtgatggcgtcgtcggccaccaccgtcgctcccttccaggggctcaagtccaccgccggcatgcccgtcgcccgccgctccggcaactccagcttcggcaacgtcagcaatggcggcaggatcaggtgcatgcaggtgtggccgattgagggcatcaagaagttcgagaccctctcctacctgccaccgctcaccgtggaggacctcctgaagcagatcgagtacctgctccgttccaagtgggtgccctgcctcgagttcagcaaggtcggatttgtctaccgtgagaaccacaggtcccctggatactacgacggcaggtactggaccatgtggaagctgcccatgttcgggtgcaccgacgccacccaggtgctcaaggagctcgaggaggccaagaaggcgtaccctgatgcattcgtccgtatcatcggcttcgacaacgttaggcaggtgcagcttatcagcttcatcgcct

SEQ ID NO: 21084 - DNA, 474 bp, Oryza sativa
  Clone ID: uC-osflM202020f01b1
ggctgttacggctgtgaccctgccgtcctcgccggcccccttccccgtcaccaccaccgcctgctgctgccgtaacgtccgcctcctcctccgctccccgcctcctcgccgagccctccgcgtcgccgcctccgccgcggccgacgcgccacccaagccggcgccgccgccgacctcgccttcgggcatcgtcctcgtcgaccccaccgaggcacagaaggtgcaccgcctcaaggctgtatacgaccagaaggtggtccccctcatcaccgaggagttcggctacaccaatgtccaccaggtgcccaaggttgagaagattgtagtgaattgcgggttgggggctgaagccggtaactccaaggggctcgaatccgccatgaaggacctcgccatgatcaccggccagtggcccgtcaagacgaaggccaagaagtccgtcgccagtttcaagatccgcgaggggaacaccat

SEQ ID NO: 21085 - DNA, 380 bp, Oryza sativa
  Clone ID: uC-osflM202020f02b1
gaggtcttttgaaagcatcatcctctctctctcctcccccatcgacttccccccacacccaacggaagccgtaggagagagaggggaaaagcttgctcttttataccctcatctagggttccgagcccaccggctctctccccccttgctggcttcgcgccatctctcccgccaccgcctccccccctccccccctccgcctccgatagattcgcgctcgccctcctgacccacggattcggttcccacgaaaccgctcgatctgggggatctgctagattcgtaaggcggcgtttcgatcgatctgttcgggggtttctgccgtggggaattttgatctataaagataggtttttgattttgttcttttttgctttttg

SEQ ID NO: 21086 - DNA, 499 bp, Oryza sativa
  Clone ID: uC-osflM202020f03b1
atcgtcatgtcgggcgatctgccggagcaggcggcccccgcggcgcatgaggcgaccgtgcatatcgtctacctggaccgccccgcggacgccgaccccgaggagttccacatccgcaccctcgcccccgtcctcggcagcgaggagaaggcaaaggaggcggtgctctaccactacaagcacgccgcaagcggtttctctgcaaaacttactccccagcaggtcgaggagctcaagaagcaaccaggtgttcttcaggttgtaccaagccagacataccagctccatggacccggggctggcactggcacaatgaacacctttagtcttgtgtagtgtaccggcctagctgataaggtagtgtaatgcaagtgtttctggcgtgtgcatctcatggcatggctggaatactatatggtagtaacaataagagatgcaacacctgtacatccccagtggatacaatgatcttttagcttgtatcctaagtttgtaatga

SEQ ID NO: 21087 - DNA, 526 bp, Oryza sativa
  unsure (1)..(526): unsure at all n locations
  Clone ID: uC-osflM202020f04b1
gatgtaaagcctcaccctcgcgggccggagagtgagggatcgacgaaggcgccccgtacgtcgggccagcatatatatactcagaagccggaggaggacggtggaggcgccaccaccaccaccacccttcgccatgcaggaccaggccgcccccgtcccatggtccaccgacctctttgactgcttcgacgacagcagcaactgttttatgacgtggttgtgcccgtgcatcacgttcgggcagatcgcggagatcgtcgaccgggggtcgtcgtcgtgcgggacgagcgggtcgctgtacgcgctggtgtttctcgtcacgggctgcagctgtatctactcctgcatctaccgctccaagctgcggtcccagtacggcctgcaggagacgccctgccccgactgcctcgtccacttgtggtgcgagccctgcgccctctgccaggagtaccgcgagctcaagaagcgcggcttcgacatgagccttcgtaacaggaaagtttacagatggcacgcanacatggag

SEQ ID NO: 21088 - DNA, 483 bp, Oryza sativa
  Clone ID: uC-osflM202020f05b1
gtttatcaaatcagaaggaatttgtttgttgaagctgtagaattgtagtgaagagatcgatagatcgatcggcgatggatttggcggcgtggtttgggccggtgaattcggggctggtgctgctgatactgacaatgctgctgcgaaacctgcagaatttccagctgatgcagacgttcgtggcgcggcagctgaaccggcgggcgcggcggctggcggcgctcatcgacccctacctgtcgatcaccatccacgagtacgacgccggccggatgacgcgcagcgacgtgttcgccgagaccaaggcgtacctcgacggcgccgtcggcacgcgcgacgacgtgcgccacctcaacgccgaggacgcgcgcggcggcggcggcggcggcggcgcatgcgaagggggtggtgggtggcgctggcagcagtagcagcaaggggctggtgctcagcatggcggacggcgaggaggtggaggaccac

SEQ ID NO: 21089 - DNA, 471 bp, Oryza sativa
  Clone ID: uC-osflM202020f07b1
tgtttgagagaaggttgcaagaaaggagccgagggaaaaactatcttctgtaaagcacatggaggtggcagacgctgcgagcaccttggatgcacaaagagcgctgaaggccgcacagatttctgcatagcccatggaggtggccgccgttgtagccgtgatgggtgtagaaaggcagcaagaggaaaatctggcctttgtattaagcatggtggggggaagagatgccaaaaactgaactgcacaaagagtgcagagggccaatcaggcttttgcatcgctcatggtggtggccgtcgctgcaaacatgatggttgcacaaagggagctcagggcagcactaatttctgcaaagctcatggaggtgggaagagatgcacacatccgaattgcagcaagggtgctgagggaagcactgctttttgcaaggcccatggaggaaggaaacgctgttcagttgagggtgcccta

SEQ ID NO: 21090 - DNA, 66 bp, Oryza sativa
  Clone ID: uC-osflM202020f08b1
actacctcccctgctccccgcgccgcctcccccgcccaagttaaataatttaaccttgcctccttc

SEQ ID NO: 21091 - DNA, 502 bp, Oryza sativa
  unsure (1)..(502): unsure at all n locations
  Clone ID: uC-osflM202020f10b1
tgtattcccatacactttgtttctcttccccgtctcgtggtcgagagaaaccgagaggagagagagggagaggagcgctgccgattttccggagggggagatctttttcttctccctgaaggttcgagatcgatctgcgacgaggaggagcggggaatcgtaactttatttccgaggaaatttcaacaaattgatgcactaatggagtccaagggtggcaaaaagaagtctagcagtagtcgttcctccctgatgtacgaagctcccctcggctacagcattgaggacctccgacctgccggcggcatcaagaagttccgctctgctgcttactccaactgcgcgaggaagccctcttgatagcccccttggctaccttgacctagtagtttagttactcctctgaattctcgttttgggctttcttacatctttctggctagctgcttcccagtgaccgggaaggtcatcagacctgcttcctttttnctcatctctggca

SEQ ID NO: 21092 - DNA, 496 bp, Oryza sativa
  Clone ID: uC-osflM202020f11b1
tgtcaccgtgtagcgcctagggttttcttcgcccgcgcgcgtcgatccccttttcccctggtcattttctggtcctcttcaccgccgccgtgctccaccgtatccttcggcgaccgccgcgggcagcgcgagagggggggaggagagctcgcccgccgcgggcagcgcgagaggggaggaggagagttcgcccgagggcggaagccaacgaggggatgatggccggacggcgagctcgccgaggcacggctgttggagcgaactaatccggagggggtcgggccccttggtgtcttggtgctgctccgccccggatctgcctgccccattacttcactttctccttgcaatcacgtcggcggggaaggtcgtcgtcccacgagcagacgagctcatgtcggctcgacatggtctcccgagctcagcgggcatggggtagcttctttcctccatcctccatttggtctctattcagatttggttgtcttatgttgta

SEQ ID NO: 21093 - DNA, 528 bp, Oryza sativa
  Clone ID: uC-osflM202020f12b1
tttgtaccaacgacattgccaatgcttatggtattgctgaagttggagttatgatggttagcactgcactggttacgttggtgatgcttcttatatggcaaaccaatttgttcctcgttatgtgcttccctgttatttttggttctgtggagtttgtttacttaacagccgttctgtcaaagatacaagaaggaggatggttacctctggctttctcatcattgttcctctgcataatgtacacatggaactacggaagtgtgttgaagtaccagagcgagatgcgtgggaagatttccctggactttatccttgacctgggatccacgcttggcacagtaagagttccagggattggtcttgtgtacaatgagctggtccagggaattccgtcgatctttggccatcttttggtcacactcccagcaatgcactctacgattgtcttcgtttgcataaagtatgttcctgtcccatatgtcccatttgaagaaaggtcttgttccgaaggattggccaaaggactac

SEQ ID NO: 21094 - DNA, 280 bp, Oryza sativa
  Clone ID: uC-osflM202020g01b1
ggtgtttatcgtggtggaggtgatgcagttccctctgcaaatgatgactgcttcaaatgtggccgtgcgggacattgggctcgtgaatgtccttattccagtggaggtgggggtggtagaactggaaggtactcatccacttacagatatggcagtggaactggtggctgacgtggtgaccgtttcggagggtcagaccgagtcgctaaccggtatgtagatgacccatatgatggtgggcgctatgttgatgatcgctttggtggaggtggacgagatc

SEQ ID NO: 21095 - DNA, 489 bp, Oryza sativa
  Clone ID: uC-osflM202020g02b1
ctctagtttaataggttcgtacgtataggatatttgatccattgatcgatggccgtcgacatggagctcgacggcggtggcgacggaaagggcaaagccccgccgcagataagcctgtcggggctattccttgcgcgcatggtcgccggtggcgtgcagtacggctgggcgctgcagctctctctcctcaccccgtacgttcagacattgggaatttctcatgcactcactttagttatgtggctctgtggccctaattgctggcttaattgttcaggcatgcgttggcctgtacagtgacaagtgcacattcagccttggaagacgtagaccgttcattcttactggatgcataatcatctgcatatttgtgatcgtcatcgggttcttctcggacatcggatacgctttcggagacacgactgaggactgcaaggtttacaggggttcctcgtaccatgcagcggcggcattcatacccggattctg

SEQ ID NO: 21096 - DNA, 509 bp, Oryza sativa
  Clone ID: uC-osflM202020g03b1
cttgatatggcacatatattgcatctgcttcaacatcaagacagatggagtgagaaatggcaaacttcccatgctttggactcttccttcatcaattgcaggccatcttctcgtttgctgtttcttatagctaagaggtgagattttccagataaactggaagaaataccctgaattccagatgaaggaacagcctcaatcagattctggagtaaagtttgtgaatccatatgacaaaggcgtgctctgtaacattatagaatttctgaagcccgaataacacgagctgatcctaagtacagacgttaaaaacatgggaaatcattgcatcaagtgatctggaattctgaaagattgttttgcttcttacagcccaattgatgggaattttgtgtgagcatcatttgggcactagtagctagttagatcaacacgcaattgacactctttgaaaactttctttgtgagcgggaactgtattgcaatggaagctgcatccgacgtgaatt

SEQ ID NO: 21097 - DNA, 394 bp, Oryza sativa
  Clone ID: uC-osflM202020g06b1
gcttgactctcgcctggtcactactgcgcatctttccccgagagctgcttcaccgtataccagcgaaaacccttgaccagtattatagccgtgatgcctcccactgatctgcaaagggtcgtgtgtaataagaaaaaaaaccatcccggactcccacttcttctctttcatttttgccaccaatgcattcattattttttgtgtaaaaaacacgaattatctagtgatgtgggcttccatcattgttgtcccaagcacaccatgtatcatatttatcttcttttttggaagaaaatgtattattttcttgccgtggaaaaatgaataagtgaggacgagtgagctagggatttggttaatgtaagaacacaatgaaataagccatttgcctcaa

SEQ ID NO: 21098 - DNA, 524 bp, Oryza sativa
  Clone ID: uC-osflM202020g07b1
ttttgctttctcctcctcgcaccgctcctctccgccttcttctcgcgtcgcgccgccgccttcctcgcaccgtgcctctccgtcttctcctcgcgccgtgccgccttctcctcctcgcgccatgtcgccaccctctacccacacatctgcgcgcccacgacctgactcctgaggcctcgatgacggaaggctaatgggagacacaagatggatgggatctggaccgtggagtggttgagatcgacgggatcaatggctggattgatttgcttgatttgattttttttccatgaatcatgctctacttgctacttgttggggcatcatcaaattttagtccttcatcccagttgctttttcattcatcatgtacagagttctttttttgcaattattttttgggctgagttcggtctttgaccgagaccaaaccgaattaaccgaagaccgaaatactctatcttgagttttcttgaagaccgatcagtcttgtgatcgtaaagacccgatttttcaaagactga

SEQ ID NO: 21099 - DNA, 120 bp, Oryza sativa
  Clone ID: uC-osflM202020g09b1
ctcactctggtcggccagtgtcaccaccacaccaactcgtcgaggagagagaaggaggaggcggaggaggaggaggaggggaggagagctcgtcgccgattcgggcgtgggggggggggg

SEQ ID NO: 21100 - DNA, 187 bp, Oryza sativa
  Clone ID: uC-osflM202020h02b1
gaccggcccggactgactggctggaccgacgcacgcgtctgtttctctgatcgcactctatttaactgctcacggctcacgtctatcgtgtcctggcacacgcagccgagagcgagatgggccatgcacaggtggtagcggccgcttcttgccgttcttctcctatgtggccctcacaccaccatgg

SEQ ID NO: 21101 - DNA, 257 bp, Oryza sativa
  Clone ID: uC-osflM202020h03b1
gcgtccttttttgcaaacacgcgtcacacacacacgtgaagctttcacgtctagcgctcacgccattaatcctcctatatcgatacggctcgtgtacagctagcgttggtcgccgtcgtggcagctatgcttctggcgctgccatacaacatcatgggcgccatcagctgtggccagggcaacttcgtccggtggccgtggctgaaggacgcgggccgggtgtccggaccctagggtgcctgttgcagtgggggtag

SEQ ID NO: 21102 - DNA, 497 bp, Oryza sativa
  Clone ID: uC-osflM202020h04b1
gtcgaggacgccctccccagtggcggcgagcgcccgctccctcctatctcgaccaccgaggatgaacaataggaggaggaaggttttgcgcgccgttcgcggattcctgtccgttctcacgccccggattcgcttcgtcccgccgtcccgactgaagaatgaggatggacaggaatgaggaagagatggccacgaatgactcggaccctcttcttaagagggaaaacaaggaggcatagtcattgtggtatctgacaccggttaagcccatttccttgagcgcgctggagattgacgatcacgaaaatccccgtttttttgcttgctgctgactcattttttttgacacatgattcttaactatggtcatgaactgttttacctttccctgttcaagggaacttatcaatttgctcaccagttattcctttgccattggtgaactgtttaagaaggatttggctttcacattgtcaacatgcatgcttaatttcatt

SEQ ID NO: 21103 - DNA, 412 bp, Oryza sativa
  Clone ID: uC-osflM202020h06b1
ctccccaatctcgcgaggctctcgtcgccgaatcgaatcctctcgcgtcctcaagatgcagatctttgcgaagacattgaccggcaagactatcaccctcgaggtggagtcctctgacaccatcgataatgtcaaggctaagatccaagataaggagggcatccccccggaccagcagcgtctcatcttcgctggcaagcagctggaggatggcaggacccttgctgactacaacatccagaaggagtcgacccttcaccttgtcctccgcctccgtggtggcatgcagatctttgtcaagactctgaccggcaagactatcacccttgaggtggagtcttttgacaccatcgacaacgtaaaggccaagatccaggacaaagagggcattccccaaaccagcagcgtttca

SEQ ID NO: 21104 - DNA, 495 bp, Oryza sativa
  Clone ID: uC-osflM202020h08b1
cattagcaaacgagcaccacacaccagcagcagcagcaagtcgatcgatcgtcagcacacacgaccaagatcgagatggcccgtgcacagctggtgttggtcgccctcgtggcagctctgctcctggcgggcccacacaccaccatggccgccatcagctgcggccaggtcaactccgccgtgtcgccctgcctcagctacgcccgcggcggctccggcccgtcggcggtctgctgcagcggcgtcaggagcctcaactccgccgccagcaccaccgccgaccgtcgcaccgtctgcaactgcctcaagaacgtggccggcagcatcagcggcctcaacgccggcaatgccgccagcattcccttcaagtgcggcgtcagcatcccctacaccatcagcccctccatcgactgctccagcgtgaactaatctgatcgatcgatcgctaccggcccgagggtgtgacatcgcaggccgtacatgcacctgtcgtcg

SEQ ID NO: 21105 - DNA, 141 bp, Oryza sativa
  Clone ID: uC-osflM202020h11b1
tactggctctacaggcatccgcgcggattcaaatcaaatccctcgtcgttacccattccagccttcccctctcaccttccccaatctccctgcggtagaaccctagaggaaccttctagaacccccgagtcctccccctct

SEQ ID NO: 21106 - DNA, 496 bp, Oryza sativa
  Clone ID: uC-osflM202020h12b1
ttgttatgatcatcaaggttcctattgatgtattcaagggaatcacagatgatgatgcagctaaagttgttgatggtctggcaccaaagacaggtgacagacagtcttccatagaacagattaagaagctctatgaactgttctgcaagtctgattgcacactgctcgagattaatactattgctgagacagctgacaacaagctggtcgctgctgatgcaaagttgaactttgatgacaatgctgcctttaggcagaaagagatatttgccatgcgtgacacaacacaggaagatcccagagaggtggctgctgtcaaagctgacttgaactacattgggcttgatggagaaattggctgcatggcgaacggtgcaggattggcaatggctacaatggacatcaattaagttgcatgggggtacgcctgacaattttctttgttgtgggggaagtgcatcatagggacaggttgtggaagatttaaaattttgac

SEQ ID NO: 21107 - DNA, 446 bp, Oryza sativa
  Clone ID: uC-osflM202022a02b1
tctaaccctagcctccaagtcgtcgtcctccggaagcttccggcctccgccgccgccgcagcgccatggcctcggagacggagacgttcgccttccaggcggagatcaaccagctgctgtcgctcatcatcaacacgttctactccaacaaggagatcttcctccgcgagctcatctccaactcctccgatgcgttggacaagatcaggttcgagagcttgacggacaagagcaagctggatgctcagccagagctgttcatccatattgttcctgacaaggcctccaacacactgtcgatcattgacagtggtattggtatgaccaagtcagatcttgtgaacaacctgggtaccattgccaggtcagggactaaggagtttatggaggcactggctgctggtgctgatgtgtccatgattgggcagttcggtgttggattctac

SEQ ID NO: 21108 - DNA, 69 bp, Oryza sativa
  Clone ID: uC-osflM202022a07b1
ttttaagatgaggggctggagaatgagagcgaaggggatggagtcgatggaggtggaggaggggaagga

SEQ ID NO: 21109 - DNA, 361 bp, Oryza sativa
  Clone ID: uC-osflM202022a10b1
ttagagccccaatcccaccaccgatcgatccattcctgctgctcgcggccaccggagaaggagagagagagagagctcgacctcgtcggcgggtgaaggatcgcagcagcagcagcggcggtagagcaggaggagaggcgaagatgtcgtcggtgttcagcggcgatgagaccgcccccttcttcggcttcctcggcgccgcctccgccctcgttttctcatgcatgggggcggcgtacgggacggcgaagagcggcgtcggggtggcgtcgatgggggtgatgcgcccggagctcgtgatgaagtccatcgtgcccgtggtcatggctggtgtgctgggtatctacggccttatcatcgc

SEQ ID NO: 21110 - DNA, 363 bp, Oryza sativa
  Clone ID: uC-osflM202022b02b1
gaagaaggcccatgagatgagatgagatgagatgaagcccaccaccggcaccgccgccgccgccgccgtcgatcgccgctggcttctccccctcgccatcggctccgccctctccctcctcctcctcgtcctcctcaccaccttccccctccccttccccttcccctcctccgccgcctcccgccctcccaaccccaccctcttcgtcgagcacaagctcgccccctccccgccatccaccgcttccccccctcggttcgcctacctcatctccggctccgcgggcgacgccgccgcgctccgccgtgttcttcttgcgctctaccaccccaggaacctctacatcctccaccttgatgccga

SEQ ID NO: 21111 - DNA, 180 bp, Oryza sativa
  Clone ID: uC-osflM202022b05b1
tttctttctctctctttcccacccatgcctccaccaccaccacctctcccctctactgctcctcctccattcgccattcctgccctcccagctcccccctgatcctgcgcgcgcgcgcgcgcgcgcgtgcggggaggcgatggcgccggcgacggcgatatcctgcgcggtggtcaaatg

SEQ ID NO: 21112 - DNA, 392 bp, Oryza sativa
  Clone ID: uC-osflM202022b07b1
ttcagaactccgcgagagattttcgctttcctcccgatcaccccgacgcattctgctttcgtctccagaggcagacaagaactgtggcattaacaaggacaaagatgtcaagcatggcaggcttgggagcttctcagcatggatatcctccccgaagtcatgagccctggactaaacttgtacacagagagagattacccgagtggtttgcatacaatccaaagaccatgaggcctccaccacttagccatgataccaagtgcatgaagattttatcctggaatattaacgggcttcatgatgttgtaacgacaaggggttttctgcacgtgacttggctcagagagaagattttgatgtggtatgtctttcagagacacatttggaggaaa

SEQ ID NO: 21113 - DNA, 134 bp, Oryza sativa
  Clone ID: uC-osflM202022b08b1
tttcgtacagatacggcaataccgatacatccagcatagctaatatggcgaacagcacagactctgataaagctatagagaactagggctccaggatatggtggtcgaatgacaaccacggcgctcagcctacc

SEQ ID NO: 21114 - DNA, 350 bp, Oryza sativa
  Clone ID: uC-osflM202022b10b1
tgtaaaaagcttgggtgatttcttggaagcgaagagtgaggggagaagaagaagaagaagaagaagaagaggggggaggaggaggagcagcatggctgagcacaaggaggagcagtcggtgatggagaagctctccgagaagctgcacggcgactcctcgtcgtcttcctcggactcggacgacgacaagaagggttcctcctcgtcgtcggcggcggcggccatgaaggccaagatctaccgcctcttcggccgcgagaggcccgtccactccgtcctcggcggcggcaagcctgctgatctcgtgctatggaggaacaagaagatctccggtggggtgctcgccggag

SEQ ID NO: 21115 - DNA, 277 bp, Oryza sativa
  Clone ID: uC-osflM202022b12b1
tttcgttcgcggcgacgcacggatgtggtggccggagacggtgagctgatcgactgcccctcccttgccctggcccctaccccttcgtcgcattgcagctgcagctagctacacgaggagacctgttgctttgctaaatttcaacttgaatcctgcttccgacgacgagacgagacgcaattcctcgctgcctacgccggatgccggtggaccccgatgcttcccccctccgccagcactccgctgtcgtcgtccttcctcgccgccgctagcacct

SEQ ID NO: 21116 - DNA, 472 bp, Oryza sativa
  Clone ID: uC-osflM202022c02b1
tgaaggatattgatagatggtggagggtgtgtttctgggttgcagctgttccagcaactttacaagctcttggaatggagttctgtgctgagagcccccagtggctgtataagtgtggaagaacgactgaagcagagatacaatttgaaaaacttctaggtcctcttcatgttaagtctgctatggcagaactctcccgatctgaaagaggcgatgatggagaaaatgtgaagtattcggaattgttttatggtcgcaactttaatgttgtttttattggcacaacgctctttgctttacaacagttatccggcataaattctgtgttctatttctcatcaactgtgttcagaagtgtgggtgtgccccctaaccttgcgaacatatgcatggggatagcaaatttatcaggctcaattgtagctatgctttctatggaccaactaggaggaaagtacttctttcagggagc

SEQ ID NO: 21117 - DNA, 476 bp, Oryza sativa
  Clone ID: uC-osflM202022c04b1
ataagaatgttgaggaagccctagggatgttgaagatctgtttgcaagtcaccagtctgtgccagatgtgcaacaaggacattgcagaagccaggcttcattctgctttgaaaagtttggagttgattgagaaggattttctgcaaaatattcctctaaagcttctaaaaaaggctgttcagaagcaaataccaattgtcaagctgtacattgagaagaaagtttgcaatgagtttaatgagtggctggtggatattagaggacagcaaaggaaattggtaaggtttcgataagccaggcatccttggctcgtcagaaaaatgagggaatacattcccaacagagggaagcagaggactgcagccgtattgggtttgacgagcatgcttatgccttggatttggatctcataagtgaggaggaaagtacttggaattcgatcttacaccagtataccgagcaaactacattcacac

SEQ ID NO: 21118 - DNA, 358 bp, Oryza sativa
  Clone ID: uC-osflM202022c06b1
tctcctttgttaggttttcttccagtgagctctttttgctcatattcagatcttcacttatttcctagttgttactactgcctttgagtattgacagcttcatcctgccaactcagctcaatcttcctctgaagtttcagtctttgtttctgaatctcttcagtgttcagaggggaagttctgccaaaaaatttctctggccatccattttccaaggggagattctgccaaaattttcatctctgtccatcaatattcctggggaggttctgccaaaattttctctgaaatcggttaatttataagggaggttctgccgaaattttcgctggtcatcaatcttcccttttgtgacata

SEQ ID NO: 21119 - DNA, 470 bp, Oryza sativa
  Clone ID: uC-osflM202022c07b1
tcaccgacgagtcggagtccgtggagagcgtcgtcgtcatcgacgtcgccgccgacgcaaacgccgaggttgccaaggaggaggacgccgtggtgaagaagccccaagaggaggtcggcggcctccggctgctgaaaagcccggacttctggctctattttttcagctacatgttcagtggcaccctcggcttggtcttcctcaacaacctcggtcagatcgccgagtcgcgaggaatcgggcagacttccactctggtctcgctctcgtcttcgtttggattcttcggccgtcttctcccggcgttcatggactactactccgcgaaaagtggctactccatatcgaggacggggtccatggcgtcgctgatggcgcccatggcgggggccttcttcctgctgctcaaccagcgggacttctttctgtacctggcacggcggggatcgggacgtgcacgggcgccatca

SEQ ID NO: 21120 - DNA, 370 bp, Oryza sativa
  Clone ID: uC-osflM202022c09b1
gtccacaccacccaccaactgagagctgagcaggcgagcgagcggacatggcagcatcgctccaagccgcggccaccctgatgcagccggccaagctcggcggccgggcctcctccgccgcgctgccatcgcgcccgtcttcgcacgtcgccagggcgttcggcgtcgacaccggtgccgccggcaggatcacgtgctccctgcagcccgacatccgggaggtcgccaacaagtgcgccgatgccgccaagctcgccggcttcgccctcgccacctcagctctgctcgtctcgggcgccagcgcggagggcgtgccgaggaggcttaccttcgacgagattcagagtaagaccgacatggaggtgaaggg

SEQ ID NO: 21121 - DNA, 397 bp, Oryza sativa
  Clone ID: uC-osflM202022c10b1
tttgtaatgctgcagtcgtggaaagggacaatgcccttgctgctcttgagttagcacgtacaaacggattgaacatgaataacgggaatggattcccccaaggatctctcagcggatcaaagaacatccaccaccacgaccagctttctcatgctcagtcatcaccgctgcaactggcagattctccatatgatcatgctagagaaatgcacatatcagaagcataccctatctcaacagctccagggagtgctggaaaagcaaagaggccaaagaagaatagttcccaagcctctccattgaagaggccatcaggtgtgctccggaaaaccaagaaaccttctggtgactggaagaaatgtcggatgtctggttgtggagatgattctgctcatgc

SEQ ID NO: 21122 - DNA, 333 bp, Oryza sativa
  Clone ID: uC-osflM202022c12b1
ttcggtatccaggtcgggaacgcgtgctgggagctctattgcctcgagcatggcatccagcctgatggacagatgcccggtgacaagaccgttgggggaggtgatgatgcttttaacaccttcttcagtgagactggtgctgggaagcatgtcccccgtgctgtcttcgtcgatcttgagcctaccgtgattgatgaggtgaggactggtgactaccgccagctcttccaccctgagcagctcatcagtggcaaggaggatgcagccaacaactttgcccgtggtcactacaccattggcaaggagattggtgatctgtgccttgaccgcatc

SEQ ID NO: 21123 - DNA, 495 bp, Oryza sativa
  Clone ID: uC-osflM202022d03b1
gacgagtatcccgaccaccactctctctctctctctactctccctcctcgccgcgccgcgccgccgccgccgccatgagcgcgggctggaggacgctgctgctgcggatcggcgacaggtgcccggagtacgggggctccgccgaccacaaggagcacatcgaaacttgttatggtgtgctttgtcgagaatacgaacactccaaagatgcaatgtttgagtttctcctccaatgtgcagatcaattgcctcacaagattcctttctttggagtattgataggtttgataaacttggaaaatgaagatttttccaagggtattgtcgatacaacacatgccaatttacaggatgccttgcataatgaaaatcgtgacagaatcaggatattgctgcgatttctctgtggcctgatgtgcagcaaagttgtcctgccaaattctattattgaaacatttgaggcactattatcatctgctgcaacatattagatga

SEQ ID NO: 21124 - DNA, 398 bp, Oryza sativa
  Clone ID: uC-osflM202022d04b1
ttccgtggatatccagcccctcgtctgcgataatggaactggtatggtcaaggctgggttcgccggagatgatgcgcccagggctgtcttccccagcattgtcggccgccctcgccacaccggtgtcatggtcggaatgggccagaaggacgcctacgtcggcgacgaggcgcagtccaagaggggtatcttgaccctcaagtaccccatcgagcatggtatcgtcagcaactgggatgatatggagaagatctggcatcacaccttctacaacgagctccgtgtggccccggaggagcaccccgtcctcctcaccgaggctcctctcaaccccaaggccaatcgtgagaagatgacccagatcatgtttgagacctttacacccctgctatgtacgt

SEQ ID NO: 21125 - DNA, 454 bp, Oryza sativa
  Clone ID: uC-osflM202022d10b1
tctgcctgcctgccattgatagattccatcgtcgtcgtaggatagagagtactagtttgcaattcaattcaatcccccatacccataggccataggataggagtatgggaggcggcgatggcgatgaggtgctgctgctgccggagccgcgccctcgcaggggcctcgcctcctgggcgctcgatctgctggagcgcgccgccgtccgcctcggccacgacgcctccaagccgctctactggctctccggcaacttcgcccccgtccaccacgagaccccgccggccccggccctccccgtccgcggccaccttcccgagtgcttgaatggagaatttgtaagggtaggacccaatccaaagtttgtccctgtcgctggctatcattggtttgatggagatggaatgatccatgcgatgcgtatcaaagatgggaaagctacctatgtgtcgag

SEQ ID NO: 21126 - DNA, 301 bp, Oryza sativa
  Clone ID: uC-osflM202022d11b1
tgtcgtagatcgcgtgctgccgcgcttgcctttttttctctgaataatttgcccatttctaattatgagactcacaaaacacaacacggattaattatggggggaaccgcctaagacagcgtgctatgccttgtggatacactgataccgtgtgtgtactacacgtattgcaccacacatcgatcgatcatgccgcagctgaaggactacaaggggtacatacgggactgtgggcctatggtgatgcactgggtattgaccatatactgcgagcagaatcgcagattcaccttcaggacca

SEQ ID NO: 21127 - DNA, 367 bp, Oryza sativa
  Clone ID: uC-osflM202022d12b1
tgtgaaggtttcttctcggcggccgggagatcgtcaggacgggggatgatggcccgttggatgatggtcctgccgtggcgccggcggcggggtcgtcggcgccggcgacgtctgcggcggcggcgagggtgacgccggcggtgctgttcatcacggtggtgctggcggcggtgctgctggcgtcggggctgctgcacgtgctgcggcggctgttcctcaagagccaccgagccaacgccagcgcccaggcggtggagcgccagctgcagcagctcttcagcctccacgaggacggcgcctgcggcgcggggccggtgctcgatcaggccgccatcgacgcgctgccggtgtttacctacgccgagct

SEQ ID NO: 21128 - DNA, 406 bp, Oryza sativa
  Clone ID: uC-osflM202022e01b1
tgcacacgccacgcgagctccctctcctaaagccctaaccctagcctccaagtcgtcgtcctccggaagcttccggcctccgccgccgccgcagcgccatggcctcggagacggagacgttcgccttccaggcggagatcaaccagctgctgtcgctcatcatcaacacgttctactccaacaaggagatcttcctccgcgagctcatctccaactcctccgatgcgttggacaagatcaggttcgagagcttgacggacaagagcaagctggatgctcagccagagctgttcatccatattgttcctgacaaggcctccaacacactgtcgatcattgacagtggtattggtatgaccaagtcagatcttgtgaacaacctgggtaccattgccaggtcagggac

SEQ ID NO: 21129 - DNA, 291 bp, Oryza sativa
  Clone ID: uC-osflM202022e03b1
gcctcctctcctccactcctcctcccgcatccgcggaaaccctagcctcctctctctctctcctcgttcactcgttcctcgcgccgccgccgcgacccgcgagcgggaggaggagccatggcgccgaccaagggggaggggccagcgatcggcatcgacctcgggacgacctactcgtgcgtgggggtgtggcagcacgaccgcgtcgagatcatcgccaacgaccaggggaaccgcaccaccccctcctacgtcgggttcacggacaccgagcgcctcatcggggatgcc

SEQ ID NO: 21130 - DNA, 407 bp, Oryza sativa
  unsure (1)..(407): unsure at all n locations
  Clone ID: uC-osflM202022e04b1
gggaatgcgattcacagaaaattaatatattaattgccggtacattatttaaaccatgtacaaatagaaccccaaagtaaaatatcctattctgaatggagaagttgatatatttttgggtttctcaaactattttcacatgaagttgtttgtgatgtggataatacataaaagaatgcagtcattagcagaactagtggtataccgctataaaggctagacctaaatatgaactgctgagtgccgaatggcatgtagcagtaattatacattggcatgtgctaaattacacatgtaatagtggagtacacggagcatgagggagccatggccccaacacccctaccaggcttttggtcactttccctccgcactggttgttactgtgctgntacactcactttata

SEQ ID NO: 21131 - DNA, 409 bp, Oryza sativa
  Clone ID: uC-osflM202022e05b1
atggtcgactacgcgcgggagatgatggagctcaagacgctcgtcacccgcaccctcgagaagaagggcgtcctcgccaagatcagggctgagctaagagcaagtgtgttcgaggccatagaagaggaggatagggtagtggagaatgatgatggtgggaatcccgctttgcttggtagctgcaatgaccgagctaagcagctgcatgcttcaccatcaggtaggttattaacagcacttgtaagtgaatacttggagtgggcccagctaagtcacacgatgaaagtttatctgcctgaatgtaatctgccaaaggacttctggaagaatgaattaaaggatttttctaacaaaagcggagctgaagggagcaggagtgctgaaagtggccccatgcttctagatgttc

SEQ ID NO: 21132 - DNA, 462 bp, Oryza sativa
  Clone ID: uC-osflM202022e06b1
aaacagacagacagattgcgtagcttaaactccacggctccatcttcccttgaaacaaccaaaacagctaagccaactgaaaattttcatgtccgattgaattatatccactgcttcattcatatttggagcgaaggtgcctagcactgttttgccaaaatgattgttggggctggttactttgaggattcccacgatcaaagtctcatggcaggatctttgatccatgactcaaatcaagctcctgcaagcagtgaaaacacaagcattgatttgcagaaattcaaagtgcacccgtactcaacagaagctctctcgaatacggccaatctagctgaagctgcaagagcaattaaccaccttcaacatcaactagaaattgatttggagcaagaggttcccccaatagaaactgccaactgggatccagctatctgcactataccagatcatatcattaac

SEQ ID NO: 21133 - DNA, 345 bp, Oryza sativa
  Clone ID: uC-osflM202022e07b1
tctcatttcagcattcacgagtggttcaccaccgagaaggcaaccaccatgacacccttcgaggtggcgcatggttgcacgcggtgggagatgatagcgaacgatgccaaggatggcagcgtgttcaacgccggcatggttgaggacagccgtgtcgccatggatatcatcttgaaggagagctgtggcattttccagggcatcagctctcttattgatgttggtggtggccatggcgctgcagctgcagccatagcaacggcattcccaaacatcaagtgcactgtgctggatctgcctcatattgttgctgaggcttcagccactcatagcaacattcagttt

SEQ ID NO: 21134 - DNA, 217 bp, Oryza sativa
  Clone ID: uC-osflM202022e09b1
ttttggaaaatgaggcaagagagcttagggttgtcaattcaaggctgcagcaggagaatgcacatcttgccaggcgattggagctcacacgcctgccccctgtacccaagcccatcaataacatggaggtaaaagcattgcaggaagctgatcatttgaggcaagaaaatgacaagctggcaaaagaggttgaacagctcaagactgacaggttttc

SEQ ID NO: 21135 - DNA, 421 bp, Oryza sativa
  Clone ID: uC-osflM202022e10b1
ggcggccatggcggacgaggagcacgaggtgtacggacaggagatccccctcgacggggaggacgtcgacatgggcgcccccggcgacgaggccgccaagatgcaggagctcgacgagatgaagcggaggctcaaggagatggaggaggaggccaacgcgctccgcgagatgcagaccaaggtcgccaaggagatgcaaggtctggatcctaatgcgtcctcatctgaatcaaaagaggaaatggacgctcggtcggtatatgttggaaacgttgactatgcatgcaccccagaggaagtccagcagcattttaattcctgtggaacggtcaacagggtgacaatcctgacagacaagtttgggcaaccaaaaggtttcgcttatgttgaattccttgaagtagaagctgttcaggaagct

SEQ ID NO: 21136 - DNA, 503 bp, Oryza sativa
  Clone ID: uC-osflM202022e12b1
ctctctcccgcgagatggacgccgcggcggcgtcctcctcctcctcctcgtcggcgacgatggcggcggcggcggcgtcggccgcggaggcgtcgttgtccggctcgcctgcttcttcgaggaacgctcgccatcggcagcgtaagggggtccggctccggatgctgcgacggcgggggcggcagcctgtggaggccgagcgcgccccgggcgatgggggcggtggcgccgtgcaggaggatctcgcgctgcctctcggaatgtccttcgccgccgtcctcgcgcaggttataaatacaaagaatatttcaggacaaagattacatcctgatttcctctccaagatctgtacatcagcagtcaaggaatctctgacaaatatatatggtgacagttccaacagtttcatcaaaaatttcgaaaaatctttcaacagcacttttaggacgcttcatcttgttaatgaaatacctgtgaatgagagaagtcatattcctgaatgt

SEQ ID NO: 21137 - DNA, 408 bp, Oryza sativa
  Clone ID: uC-osflM202022f02b1
ttccatgctgaaactccggtaatcgcataaaccaacagaatatgtggacaaacatcttcaagcttggggagctccaaaatgtatcgtggtttcagtttcttcctgttgaaccagatccaagtacagcttctgagagaagttcaaaagctgagcagaaagatgctcttaacaacattgtgctgtcagcacatcttcacttacagagtgaaggtttcttaagtacttggacaaattcctttgttggtccatgggatccatcccaaggagagcataaccctgatgagaagaacaagcttttgttgtttctttctggccgtcactcgtttgtacctgaaatagctcagcatgctgtagccaaattaagagttgtttcaaatggtttatgggtagccccaagcaacttggaag

SEQ ID NO: 21138 - DNA, 425 bp, Oryza sativa
  Clone ID: uC-osflM202022f03b1
ttcttgttgcaatgctaataatgcacaccactgaacatactacataccaataatgtttagctccttttgtcgtgagtcagctgcgcccggagatccaagttgctgctcagaattgttgggcgaagaagggcggggctttcaccggtgaggtcagcgctgagatgcttgtcaaccttagtattccctgggttattcttggacactctgaaaggaggagcttgttgggtgaatcaaatgagtttgttggagacaaagtggcatatgcgctctctcagggcttgaaggtcattgcatgtgttggtgagaccctctagcagagggaaattggatcgaccatggatggtggtgctgtacaaacaaaagcaatttgctgaaaggatcaaggattggacttatgtgggttgttgccctataacctgtgtggg

SEQ ID NO: 21139 - DNA, 438 bp, Oryza sativa
  Clone ID: uC-osflM202022f04b1
tgcgaggagcggctgctgcggcggcggcggcggcttcgattcaggtgggggtgggtgccctagggtttcgctgccgggatggatggccgggagcagcagcagcagccgcgcgtgagctcgccgccgccggccggcggcggcgtgatgatgcctcagcacccctacggcgccgcgccggcgatgccgccggggtcggcgaatgttatgcacggggtgccgctctcgttcaaccccatggcgtcgccgaccgcctcgtcgcctatgaagcccgcggatatgtcggggaccatgtaccgcaccgatcccgtcgtgcagggcatgcaacagcagcccggttccggcggtggcggcacggcggtcggcggaagggagcttgtgaagaaaaagagggggaggccgaggaagtatggtcctgacgggaacaatcggttgggactg

SEQ ID NO: 21140 - DNA, 490 bp, Oryza sativa
  Clone ID: uC-osflM202022f06b1
ttctttcttcctcccccctcctggctccgctcgctggatctctcctctttctctctcgcaccctctccccggcgaggtaggagggatggggcgggaggtggcggagagctgcgtcgacggggtggtcatgcagatggtggcggcctactgcggcggcttctacgccgccaagccggagctcgccgcccgtcgcatcgaggccatcggcttccaggtcggccaccagctcaccgagagatatactatggagcgccctcgatttagtgatcatcttgaagcaatcaaatttatctgcaaagacttttggtcagagttattcaagaagcaaattgacaatctgaagactaatcataggggcacatttgttcttcaagataaccgtttccggtggcttactcgtgtttctgtagatccatctgtagagagcatggatgcaactgagaatgattcttcaacactaggtgatagcgcaacccaaacaacaagcatg

SEQ ID NO: 21141 - DNA, 343 bp, Oryza sativa
  Clone ID: uC-osflM202022f08b1
tcctctcctttcctcttcttccccaccggcgagtcggcggcgaccgatccctccccgagccgccgccgccgccgcgatgtcgtcgccgggagagagcgggccttcggcttcggcaaaggacacggatgccgcgcagagggcgcaggagcaggagcccgggaagcaggggggcgcgacgagggagcggcggatggagtcgctggggtggctgacggagtcggcggtgatgccgaagaagcacaaggccatcgagggggtcggcgccgcgtccatccttgacctcaaggcgcagctctaccgcacccaggaggaggcccgcaagcccaccgtccacgacgccgcc

SEQ ID NO: 21142 - DNA, 430 bp, Oryza sativa
  Clone ID: uC-osflM202022f10b1
tgtttcccgagcagtagcgacagaaaatggctgtgacgatggacaacgtcatcaggttcatgttcatccttagcgtcgtctacggcgccgcatatgccaaaaagtctgaggccaaggtcgctagtgctcctggcctagcagcggcggtcaacacggtcttcgacatcaccgagctcggcgccgtcgctgacggcaagacagatagcaccaaggcggtccaggatgcatgggacgcggcgtgcgggttggccgggtcacagaaggtggtgatccccaagggagaattcatgaccgggcccctcaactttagcgggccgtgcaagggctacgtcaccgtccaaatcgatggcaccatgtttggcttcaacgacatccccaagtacaacaagggcaactggatcgaaatcctccacatcgacaacgtcctcgt

SEQ ID NO: 21143 - DNA, 407 bp, Oryza sativa
  Clone ID: uC-osflM202022f12b1
ttcaaaaggttaatgaaatacgacatcccccatcgtctaatcaacggaatggcagaaagcgtgacagggatgacgaaccgcaacaaataaagagagacttgcctttgcgccgtgacgttggtgcctcctgccgtcttctaaagtttgctgttcgagatgctgtgaaagctgtacagcaaaccagcagctctacggaaccatcttctaagcgcctacgttttgtggtttccacatcatctgcagacagcctgcatggtaaaagaatagatacatctacagagggccacctgtatgacaaaaagccagaaagaactaggcaaattcttcaagtacctggagctgctttagctctcagagctgccgcagaggctgcttgagattctaccaaagttagatctactggaagc

SEQ ID NO: 21144 - DNA, 330 bp, Oryza sativa
  Clone ID: uC-osflM202022g02b1
aataattttagtttttttttttttggctttagatatattcccaatccccaacctcccaataatccgatctctcccagttctgttcggatcaaggctgtgtcgatcgcaaaaaagaaaaaaaaaaaaacaatttccttttggggtggttcatctgttgatcacttctttgtttcccgcgttttgttggggattcgattttcgggttaagattttctacacgatggccttgaacttggctcaaagcgccgcggcggcagcgtgcttcgcgaccgccggtgatgcgcggcgagctgcttcggtggtcgccatgccgtcgtcgtcgtcgtcggc

SEQ ID NO: 21145 - DNA, 316 bp, Oryza sativa
  Clone ID: uC-osflM202022g03b1
tttaatttattaatcaaaagaaacaaatggacaacagtggtagctaatacaatgaggcagtagacatggataataataagagaacgcagtggcacggcaacaacacgagaacaaacacacacacaccttatttcatgtcatttttatttaattaacctggtgatcgatcgatcgattgacaaaacgctagtgcgcatttttttattttgcgggcaaatttttcttattccgccaaagaaacaaagcgaatcatcattgccggcgccgggaccggcaagtaaccgcagctgatgcttcctgttgatgaagaggggct

SEQ ID NO: 21146 - DNA, 421 bp, Oryza sativa
  Clone ID: uC-osflM202022g05b1
ttttcaacagtggcataaacaagatattcataatgactcaattcaactcagcatctcttaatcgtcacattcatcgtacgtaccttggtggtggaatcaactttactgatggatctgttgaggtattagccgctacacaaatgcctggggaggctgctggttggttccagggtacagcagatgcagttagaaaatttatctgggttcttgaggactattacaagcataaagctatagaacacattttaatcttgtcaggagatcagctttatcgtatggactacatggagcttgtgcagaaacatgttgatgacaatgctgacattactttatcatgtgctcctgttggagagagtcgagcatctgactatggactagtgaagttcgacagttcaagccgtggtattcaattttctaaaaa

SEQ ID NO: 21147 - DNA, 400 bp, Oryza sativa
  unsure (1)..(400): unsure at all n locations
  Clone ID: uC-osflM202022g07b1
tttctttttccgtcctntcctctcctgtcctatcttatcgtccccacgcgcactccaacttgcgggcgatttgttttaccccgatttcctctcgtccgatccctccccatcacgcggccggagcgccaccccacactgcctccgctgctcccaaggtgattaaaaacacagaaaatggatggaactgctggctaacagtcgtcaaatttatatggccatagataattgtgcgatgtgtgtgggaggtaaaggtttctacctcaacagtaaggagacttccgacccttcaaggaaaaaccattccaaagtctctcagtatcggatggcatttgatacaccaagaattactaaaacagagacatcaaagttgaagaacctcattttagcaatattcaaaccc

SEQ ID NO: 21148 - DNA, 353 bp, Oryza sativa
  Clone ID: uC-osflM202022g09b1
ttccaagcaaaaccaccaccggccagtttcaaaggaacatgtcaaactggcgaaagatttccttcagattcatgcatgggtaagattgttggagctaggtggtttgcacgtgctggtcaagcaactggagagttcaatgctacaatgcacttgcattttcttaccaaccttatggccatggcagccacacagcgtccactgcagctggcaattttcatacgccagcaatatcaaagggctacaactttgggcatgcaagtggcgtaacaccttgagctcattttgcaatctacaaagctgcctattcttttggtggatacatgtcagatgttatagctgcagttgacaaggct

SEQ ID NO: 21149 - DNA, 354 bp, Oryza sativa
  Clone ID: uC-osflM202022g10b1
tcgtaaaggagatcccctgatccctcttcctcgccggcggcaatcgctcgccggagtcaaggtaggatgatggcggcggcggggctggagtcggcgtgggagtacctcatcacgcatttcagcgagttccagctggcctccatcggcaccttcctcctccacgagagcgtcttcttcctctccggcctcccctctctcctcttcgagcgcctcggcctcttctccaagtacaagatccagaagaagagcaatacacccgattaccagaacagatgtgtagtgcgtctcgttctctaccatgtctgcgtaaatctccctcttaaccattttatcatatcgcaccttcaaattcat

SEQ ID NO: 21150 - DNA, 391 bp, Oryza sativa
  Clone ID: uC-osflM202022g11b1
ttcaaaaagagttcgtgcgaaaaaaaaaagaaagaagagttcgactgttcgagcgaggagggagaagaagagggggagagagagagccagcagctagccatggcggagcacaaggaggaggagtcgttggtggagtcggtgatggacaagatctccgacaagctccacggccgcgggggctcgtcgtcgtcgtcgtcggactccgacggggagaggacggccgacttgaaggccaagatctaccgcctcttcggccgcgagaagcccgtccactccgtcctcggcggcggcaagcctgctgatctctttctatggaggaacaagaaaatctccgttggggtactcgctggcgccacggccatctggctgctgtttgaagtcatggattatc

SEQ ID NO: 21151 - DNA, 342 bp, Oryza sativa
  unsure (1)..(342): unsure at all n locations
  Clone ID: uC-osflM202022h04b1
tccactcccgcaccgcacgcacacgaaaccgatttccctccgccgcaaccggagctcacctcacctcgccggagaagatccgccatgcctcgcgtgcctctccccctcctcctcctcgtagccctcctcgtcgccggcggcggcggcgccgcggcggagacgaagccgacggcgtacgaggcgctggcgacgttcgacttcccgccggggattctccccaagggggtggtctcctacaccctcgacgacgccaccggcgacttcaccgncacgctcaacaccacctncacctgcgccttcttcatccagggctcctactccctccggtaccagcgccggctc

SEQ ID NO: 21152 - DNA, 331 bp, Oryza sativa
  Clone ID: uC-osflM202022h06b1
ttttgttgctagctacaaggaattgaagcaacaagttgtagcagattgagagagagttgggaagaattacacaagaaatttagagaaatagtactagctagctagcaagaatatagatatataatgtcgatcaagcactgcgagcaacacaaggattgcgagcggcagcgcctgtaccggcgttgctgcgcggccatcttcggcatccttctcctcctcctcctcatcgtcctcatcgtctggctcatcctccgccccaccaagcctcgcttctacctcaacgacctcaccgtcgtctgcctcaacgtcaccaccggtggttcctacgccg

SEQ ID NO: 21153 - DNA, 284 bp, Oryza sativa
  Clone ID: uC-osflM202022h09b1
acgtgttcttactcctggcgccggagacctctctgccactccaccggacggcgacggcgaggcgggtgagctctctcgccgcctccggctctcctgccaccgggcctccacattcggggacgcacctcgtttgcttcgcgtgaccccctggaaaacaggaacccataaaacttggccctttgcaaggtttgaagggcatttcaccgttgcttttgtcttgagcagaagttatagagccatacagctccgacaaaaggattcacctaatccagaatgtctgcttt

SEQ ID NO: 21154 - DNA, 485 bp, Oryza sativa
  Clone ID: uC-osflM202022h11b1
tttatttttggctgtctctcttcatttgcaaaggatggcaaatgatgagcacctccggcgagccttcctattttttgacaaggatggcaatggctacatagagcctgaagagcttcgagaggctctagtggacgatggagcaggtgacagcatggaagtggtgaacgacatattgcaagaagttgacactgataaggatggcaagattagctatgacgaatttgtagcaatgatgaagacgggcacagattggagaaaggcgtcccggcattactctagaggaagattcaacagccttagcatgaagcttataaaggatgggtccgtaaaactggtcaatgagtgaaggcctaaggatgataattttatgccgtgtagttaagcctttgggctcgctaagcagaaaccccttatccttttcttctcatgattattttgcgtggaaatttaaaataggtggaacctcccgattggcttacctgtgt

SEQ ID NO: 21155 - DNA, 170 bp, Oryza sativa
  Clone ID: uC-osflM202023a01b1
gttattgtccaatgcaaaatccaatcgagggggtggcgaaccctaaccctaggcaccgatcgagggaggcggcggcaattgccgacgaggggagcgaccacgagggccgagcgggcgccttctaggacgagggggatcctacggtcaccatcggtgagcacatcgagggg

SEQ ID NO: 21156 - DNA, 523 bp, Oryza sativa
  unsure (1)..(523): unsure at all n locations
  Clone ID: uC-osflM202023a03b1
gtctcttcgccgcaaccaccgccgcctcgccgcagcagcacccgcagccgccgccggcgccgccatggactccgtcgcgtcgtgggggctgaccccgctcgccgcggccgacccgctcgtccacgacctcctcgagcgggagaagcggcggcagcggagcggcatcgagctcatcgcctcggagaacttcacctccttcgccgtcatggaggccctcggctccgcgctcaccaacaagtactccgaggggatgcccggggcgcgctactacggcgggaacgacgtcatcgacgagatcgagaacctgtgccgcgaccgcgccctcgccgcgttccgcctcgacgccgcgtcgtggggcgtcaacgtgcagccctactccggctcgccggccaacttcgccgcctacacggngctcctcaacccgcacgaccgcatcatggggctcgacctcccctccggtggccacctcacccatggctactacaccgcgggcgggaagaagatctccgcgacgtcgatctac

SEQ ID NO: 21157 - DNA, 291 bp, Oryza sativa
  Clone ID: uC-osflM202023a04b1
gtttcatgattggggggaatccacggcgcacgcgcaggtcgacgcggtggcgcccgacgcgctgagcagctgcgacgccgccgtgttcctggcgcccgggcggtcgcaggtggagaagatgaaggccgccgccgacgcgctggacaccaagccggtggtcatgttcaacccggcgtggagcttccacgaggaggaggaggggttcgcctgcggcgcgaggggatttgtgggctcctttagcgtggtgtactccttcacggtgctggaggtgaggggccttttgagcaagaa

SEQ ID NO: 21158 - DNA, 344 bp, Oryza sativa
  Clone ID: uC-osflM202023a05b1
gaaaatgaaaatctgctgggtttttttttctgcctaccaactactctgcgttcctctgaagtctgaaccattacactatctcctttctctctctctctcatataatctcttggcagtattagtattagtgccgaattgcacctcttctaatctgtttccaaagcaaaattacagccaaatcgctcctcttcgtatatacttagtgccaatagaaggtaggaaagaccacatatccaggtttccttgctaggctctgctcatatcccgcaaattgagggttcagacttcataagttcgagctctgtccacaagaaaggaacaagagattgttcttggcagttgga

SEQ ID NO: 21159 - DNA, 476 bp, Oryza sativa
  Clone ID: uC-osflM202023a08b1
gtttagtgtgtctgtcagaggccttaatgtcgggttgagcagccgccgcctggagatcaataagatctgatgttctgatcaagctgacgatacatatacaactcacatctgcaggttggttcctttgtgtccaaaccaaggaaaggaaaggcacagtcatctctctctctccctactcctcatctccagccacatctgctgcttcgtctccttctcctgagatctctcgatcttcaagaggaggaaacctaggtgaccttgctctctggtggccacgccatgggagccgtcaagaggtctagctttctcctcgtcgtcggcgtcttcgctttgctcctcctgaccttcatggcagcaggagggaggaagatgttgatcaacaagcatcaagtgcaatcaatggagacgtctgatgatgaatccatgcatcaagggcaggaagacgactaaatgcttgcgatggtccacgagagaat

SEQ ID NO: 21160 - DNA, 516 bp, Oryza sativa
  Clone ID: uC-osflM202023a09b1
cttcacggcatcgatcgccatcctctcctccggggcaatggcgctcgcctcctcctcccgcctcctccaccgcttctcctcctcctctctgccgcgaccctgccggcgacgggtacccaggccacgcggccacagccgcttcgccgtgcggtgggagcaccgggcggcggcggtggtgctgctgctgccgagagctctcctcggaggaggattccaggatgccgatgcggctgagagtgacgaccaggaggaggaggatgcccatggcgtcctgcgcccgctcgacgctgacgacgtcaacctcgacctccacgcgcctccctccggccccgagcgctgggacgtcctcggcctcggccaggccatggttgatttctcagggatggtggacgacgagttccttcacagattgggcatacaaaagggtaccagaaaggctgccaaccacgaggagagagggcgtgtcttgcgcgccatggatggttgcagctacaaggctgccgctggaggctcact

SEQ ID NO: 21161 - DNA, 435 bp, Oryza sativa
  Clone ID: uC-osflM202023a10b1
gttcttctctggtgatcatcatcatcatcaagtcctattaaacatctggagaatggctgaagaaaagaagaccccatgcctgaatgagcggatcctgtcgtcgctctcgaagcgatccgtggctgcgcattcctggcatgatcttgagattggacctggagctcctcaggttttcaatgttgttgttgagatcacaaaggggagcaaagtgaagtatgagcttgacaagaagactggaatgatcaaggttgacagggtgctatactcatcggtggtgtacccgcacaactacggtttcataccgcgaacgctgtgcgaagatggggatccaatggatgtgctggtcctgatgcaggaaccagtgatttctggctgctaccttagagccaaggccattggcctcatgcctatgattgatcagggtgagaaagatga

SEQ ID NO: 21162 - DNA, 550 bp, Oryza sativa
  unsure (1)..(550): unsure at all n locations
  Clone ID: uC-osflM202023a12b1
cttctcccaccttctcccttctcctcgctcttccccctccgccgccgccgcagcggagcagcaacagcaggcgagcgacatgggagggtttgtcaagacccagaagacccatgcctacttcaagcgtttccaagtcaagttcaagagacggaggcagggcaagactgactacagggccaggattaggctcaccaaccaagataagaacaagtacaacacaccgaagtaccgctttgttgtgagatttacaaacaaagatatcacagctcaaattgtctatgctaccattgcgggtgatatcgtgatggctgctgcctactcccatgagctgcctcgttatggtcttgaagttggtctcaccaactatgcggcagcttactgcactggcttgcttctggctcgccgtgtgctcacgctccgtggtttggaccaggagtacgagggcaatgttgaggccactggngaggactactatgttgaaccagctgatgaaaggaggcctttccgtgctctcttggatgtggcctcattaggacaaccactggaaacc

SEQ ID NO: 21163 - DNA, 523 bp, Oryza sativa
  Clone ID: uC-osflM202023b01b1
gtttcttgctctgatatggaagttcgatttcccaccatttatggtcctgatcattgccatcctcaatgacggtaccataatgaccatttcaaaggacagagtaaaaccatccccacaacctgatagctggaagttatctgagatttttgcaactggggtcgtccttggtagttacttggccatgatgacagtcattttcttctgggtagcatacaagactgatttcttcccgagagtgtttcacgttgaaagccttgaaaagactgctcaggatgactttcagaagcttgcatctgctgtctatcttcaagtcagcacaatcagccaggccctcatcttcgtaactcggtctcgcagctggtcatttgtggagcgcccaggattcttgttggtttttgctttctttgtagctcaactgattgctactctgattgctgtatatgccaactggggattcgcttcaatcaagggcattggatggggctgggctggtgtcatctggctctacaacatcgtcttttac

SEQ ID NO: 21164 - DNA, 429 bp, Oryza sativa
  unsure (1)..(429): unsure at all n locations
  Clone ID: uC-osflM202023b03b1
gtcttatcgcaatatattcccaatatgggctcttggagagtatcagaaattagtatttcagaactatcagacctctagcatcaagcaaacaaatatagctccatctgctggcaatgctgctctgaagaattcagcaagtacaacagcgccaacttgatttcttggcagaatcaagcaaacagtccagtgtattgtaggtcatgtgaaagagtacaaaactctaaatctagaatctgctgtattgttttggtcgattttatgagatccttatgaattttttgtacattctttagatctgtgcaagaacatgtacatcacatttcacatttaggtactttgaaaaaggataacaaactttgcccctgangaaataaanaaagattaaaaaaaaattaaacaaatacaaaaaaattnaaggggggcggccct

SEQ ID NO: 21165 - DNA, 276 bp, Oryza sativa
  Clone ID: uC-osflM202023b04b1
cctcatccctgccgccgtctcctcgcctccgccgagaactcgcggctgcccttgccagctcacttcctccaccggcggctcccccctcgcggcgcccatcgcccccatcgccgccgcacggccacgcctcgcgtcgtcatagtcgtcttcctcgatcaatccgctccgctccgtcttccttcgatccataggattcgatagcaattggcgaagatgctgggcggattgtacggggacctcccggcgccgttgtccttcgccgacgatgacaagccc

SEQ ID NO: 21166 - DNA, 528 bp, Oryza sativa
  Clone ID: uC-osflM202023b07b1
tttttgatctctctgggattatcaaacaagagggctaccagggcgcgcatttcaatgatgcctgttggtacaccacgggtgccttacagaacacctggtgaaggaacttggcaatggcttgatatatggaatgctctagtaagactacacaatgcctaatggatatcgcgaacgaattatcttcattggggacagtatagatgaagagtttagtaaccaagtattggcgagcatgttgtatcttgacagcgttgataacactaaaaagattcttctatacattaatggtccaggaggagatgtaagaacttaacataccacaccttgtgttagcttcaattagccttttttttatgccacttatttttatgagtaaattgcgtctatagtacacaaacttggtaagtgggtgcgatctagtgcaagaatttgaaaaatgattatacaggtgtaacaacttggttagtgcgtgcattttggttaaaaaatctcttttcaaaccatactttttcagctatgtaaagaaaa

SEQ ID NO: 21167 - DNA, 528 bp, Oryza sativa
  Clone ID: uC-osflM202023b09b1
gatggaactagtgctgatcgcgagatccagcgcacactgatggaactgctaaatcagttagatggatttgatgaacttggaaaggtgaaaatgatcatggctaccaatagacctgatgttctggaccctgcgctactgcgtcctggacgtctagacaggaagattgagattccgctaccaaatgagcaagcaagaatggaagttcttaaaatccatgctgctggtattgccaagcatggagaaattgattatgaggcagttgttaaactggctgagggcttcaatggggctgatcttcgcaacgtctgcactgaagcgggtatggctgcaattcgtgctgaacgggactacgttgtccatgaggacttcatgaaggctgtcaggaagctgaacgacgccaagaagctggaatccagcgcccactacagtgcagacttcggcaaagagtaaggtgcaagattctgatcctgtattcgatcttctaaccatgccggagttctccgccatggtgcataagcaacagagaaa

SEQ ID NO: 21168 - DNA, 176 bp, Oryza sativa
  Clone ID: uC-osflM202023b11b1
tcttacttcacgcgtctcaccggagctccgccgccgccgccgccgttttctcccgtcgtacgacgctgcgtgttcccgagtctcccttccgccgccgccctccggagccggcctgagtttggacgaggttgggagggaggtcgccttggacgaggagggggaggaggaggaggtgg

SEQ ID NO: 21169 - DNA, 292 bp, Oryza sativa
  Clone ID: uC-osflM202023c03b1
ggagttgccagcgtacaagtcttctatgtatctgacctagaggtccccagcgaagtcactgctctgaaatttttcattcaaccgtgtgggcgtgatgggagttgccaaggactgcacgaatgcccaaagttccatttggttcctgttgattctgccatgtaacatttatctgcctaccttgctgttttcagtactctatgttttcacatcatttatcacgttatatgtttataaacagaatcgttcaatgtgatctttcaataaagagtaaatcatgttgttacctactttc

SEQ ID NO: 21170 - DNA, 521 bp, Oryza sativa
  unsure (1)..(521): unsure at all n locations
  Clone ID: uC-osflM202023c04b1
cgcacttgctgctctccccttccactctcatccccttcccctcccaccacccttcgccatggccgtctccacctccgcctcctccaccctcccgctcctctccctccatcgcgccgcggggaaccccaacccggccgcactctccttcccgcctcccctccgcgcgcccccgctccgctcccgcgccgccgctgccgcggcctccgccgcagcaccgcccgccgagaccatccccgacatgcccgaggagacggaggggacggggattccgatgccgtcgtcgattggggatgatgnggagcagttggcacccaagcagaagatcagaattaagctgaggtcttactgggtaccattgatcgaggactcctgtaagaagatcattgaagctgcaaaaacaacaaatgcaaagacgatgggtccagttcctctgccaaccaagcgaagagtatattgtgtgctcaattctcctcacgtgcacaaagattcaggttccatttgagatcagaacgcaccagcga

SEQ ID NO: 21171 - DNA, 472 bp, Oryza sativa
  Clone ID: uC-osflM202023c05b1
cgccgtgttccgcaccttcatcgaggtcgtcttcgagaaccccgagaagagcatcgactccttccacatcaacggctacgccttcttcgccgccggcatggggccggggatatggacgccggagtgcaggaagacgtacaacctgctggacacggtgagccggcacacgatccaggtgtacccgaggtcgtggacggcggtgatgctgacgttcgacaacgcggggatgtggaacatcaggtccaacatgtgggagaggtactacctcggggcgcagttgtacgtcagcgtggtatcgccggcgaggtcgctccgggacgagtacaacatgccggagatagccctccgctgcggcaaggtcgtcggcctgccgatgccgccgtcctacctccccgcataataaagcagaacccccaaccaagctcaggaacccatccatggtgctagctgctgctgtacacacaaacaacgc

SEQ ID NO: 21172 - DNA, 242 bp, Oryza sativa
  Clone ID: uC-osflM202023c06b1
gtgaattagtgatatcgatcagagtgtgaagaagatgtctctggtgaagctgtttgatacgttggcgttcgacgcctggaacccgttcagcatctttgggacgacggtggcggcggacgcgtggctggcgagcgacacgtcggcgttcgccaacacgtacatcgagagccgggagacggcggaggcgtacgtgttccgggcggacctgccggcgggggtgaagaaggaggaggtgcgggtgg

SEQ ID NO: 21173 - DNA, 440 bp, Oryza sativa
  Clone ID: uC-osflM202023c07b1
ggcggggctcttctccggcgtgtcggccaccatgctgcgccagacgctctactccaccacccggatggggctctacgacatactgaagaagaagtggacccaggagaacggcggcgtgctgccgctccaccgcaagatcgccgctgggctcatcgccggcggggtcggcgccgccgtggggaacccggccgacgtcgccatggtgcggatgcaggccgacgggcggctcccgctcgccgagcgccggaactaccgcagcgtcggggacgccatcggccggatggcgcgcgacgagggcgtccgcagcctgtggcgcgggtcgtcgctgacggtgaaccgcgccatgatcgtcacggcgtcgcagctggccacctacgaccaggccaaggaggccatcctggcgcgccgcggccccggcgccgacgggctgggcacgcacg

SEQ ID NO: 21174 - DNA, 532 bp, Oryza sativa
  Clone ID: uC-osflM202023c08b1
tcggttggtgttgctgcatctgctgcatataaaaaatgggagagagctgccatggctggtgtttctttggttgctgatgcagctgaagagcttgagcgcaacacagtgaacgctgatgcaagaatgttatctccatcatcaagcaatgcctgcacagttgatggtcttggcacaaatcatataaaggaagcagatcaacaagcacctgcaaagctaaagttgcagctatttccaataaatgaagctacacgaaaggcattagagaaggatgaacataatccacatctggaactcacattaagtgctaggaaaaaaatatcatcagtactagaacatttgaaccgcaagtggggcaactcaaacattgcatctggagagcttttgctttttccatattgtgctcatcaagaagatttagctacatatcagaggtggaccacaaaagatactgtcgcagtggctgacgttttcctttctgtgaatagcccatctgtttttcgattaaggtatggttggttttcccttgctgagc

SEQ ID NO: 21175 - DNA, 296 bp, Oryza sativa
  Clone ID: uC-osflM202023c10b1
ttttgctcacaagcccaagtcgcgtcgcaccgaagcagagtagagaaggagaggagcggagcgccatcagccgtccgatcgagtgatccgatggctctcgctctctccacctctgctgctgctgccgctgccgccgcggcgcgggcgctcgcggcgagggtgacgacgacgaggggttacgccgcgtcggcggcgtcgtcggcgatgaggcgggcggcggcggcggtggaaggcaagggcgctgacgtgatgacgcacgcgaaagacgggtcgtcgtcgtccgctgcgagggaggt

SEQ ID NO: 21176 - DNA, 456 bp, Oryza sativa
  Clone ID: uC-osflM202023d01b1
cttgcttttatcaccggcgacctcgtctactcgctgttcgtgtccgaggcggtggacaaggtggagctcctctactccaagttcgtctccctcgttcgctccgaccccatcatccagacgctgctccccatgtcgcccaagggggagatctgcgacatcaacggcgtgtgcgtggacgccaccgaggacgagctgttccggctcaccaccaaggaagggaagctgaccgtggagcgggagaaggtgaagatcgagacgcagcccttctcacccgtggtgcagttcgagcaggactcccggcagatccttgacgcgctgcttccgctttacctctacagccagatcctgcgcgcgctccaggagtcgctcgccagcgagctcgtcgccaggatgagcgccatgagcagcgccaccgacaacgtctttgagctccggaagaacctctccatggtctac

SEQ ID NO: 21177 - DNA, 533 bp, Oryza sativa
  unsure (1)..(533): unsure at all n locations
  Clone ID: uC-osflM202023d02b1
attttcaggtgtttgagattgcaaagtgttctttgcacagcagaaatttctggtttgttgcaatgtagcaagctggaaaagttgatgtttgtaagaattatatcagacctggaggttaatggtgtatgcatgcttctgagctgccatgcagagacattgctttctcttgaatttatccattgccagctttctccagctgtcatggataaaatttgtagtagtgtattgcagaaaggatcagtaaaccatgggatccagaacttcagtattaaatcatcacgtatttgtgaaagcaatcctctaaacatctctgccggcttattagattttctgtcaatgggaaagtcattacaattgctatcacttaacgatactaagatgcagccattatttgctaaaacaattgtccatactcttcttggatcttcaagtggcatacgaactcttgagatatcagaaaacaatgctggttaaagacaatggataaaagattngcatgcttttcatcagcactggagtcaaatatttttttg

SEQ ID NO: 21178 - DNA, 452 bp, Oryza sativa
  Clone ID: uC-osflM202023d03b1
gtcccgttgtactacggcgccgccgtggcgtccgtcggcggcgaccggctcgcctggggcgggaacgcgacggccaggaacgtgtgcctcagcagcggcgacaactaccagtatggcgcgtacaagtggaccgtcatgctcgtctccaaccccagccgcctcgagaagatgctcctccccatcttctggggcctcatgaccctcagcacgtttgggaatctggagagcacgacggagtgggtggagatcgtgttcaacataatgacgatcacggggggcctgatcctggtgacgatgctgatcgggaacatcaaggtgttcctgaacgcgacgacgtcgaagaagcaggcgatgcagacgcggctgcgcgggctggagtggtggatggagcacaagggggtgccgcacgggttccggcagcgggtgcggcagttcgagcggcaacggtgggc

SEQ ID NO: 21179 - DNA, 508 bp, Oryza sativa
  Clone ID: uC-osflM202023d04b1
atggccaaaaaaacaatactgcaggtggtttgcgcggtggcgctggtggcgctgtgcgcgtgcggcgtcgcggcgtcaccgtcgtcgccggcgggagcggggtgccggaagcacgtcgcgaggatcacggagtacggcggcgtcggggacgggaggaggtccaacacggcggcgttcgccaaggcggtggcggacctgtcgctgcgcgccggcgacggcggcgcggcgctggtgggccaagggaagtggctgacggggcccttcaacctcaccagccacttcaccctcttcctcgaccacggcgccgagatcctcgcgtctcagaacttggaagattggcctctgatagctcctctgccatcctacggaagaggaagggacgaaccaggcccaagatacagcaatttcattgctggatccaatctcacagatgtcatcatcactggtaggaatggaacgatcaacggtcagggccaagttggtgggacaagttccacgccaaggaact

SEQ ID NO: 21180 - DNA, 463 bp, Oryza sativa
  Clone ID: uC-osflM202023d05b1
cgcgctctcccccatcctcccgtaggttaggctaggctagggtttcgaggagctcgcggaaatggtggccttcaggttccatcagtaccaggtggtggggcgcgcgctgccgacccccggcgatgagcaccccaagatctaccggatgaagctctgggccaccaatgaggtccgcgccaagagcaagttctggtactttctgaggaagctgaagaaggtgaagaagagcaacggccagatgctcgccatcaacgagatctttgagcgcaacccaaccacgatcaagaactatggcatctggctgcgttaccagagcagaaccggttaccacaacatgtacaaggagtaccgtgacactacattgaatggtgccgtggaacaaatgtacaccgagatggcttctcgccaccgtgtgagattcccttgcatccagatcatcaggaccggcactgtccacttaagc

SEQ ID NO: 21181 - DNA, 505 bp, Oryza sativa
  unsure (1)..(505): unsure at all n locations
  Clone ID: uC-osflM202023d06b1
aatttatcctcctccacctcctcctcctccccccgatcggatcggcccggctcctcctcctccgccgccgccaccgccgtcgcagataggagaagatggccgcacttgataccttcctctttacctcggagtctgtgaacgagggccaccctgacaagctctgcgaccaagtctcagatgctgtgcttgatgcctgcctcgccgaggaccctgacagcaaggtcgcttgtgagacctgcaccaagacaaacatggtcatggtctttggtgagatcaccaccaaggctaacgttgactatgagaagattgtcagggagacatgccgtaacatcggttttgtgtcagctgatgtcggtctcgatgctgaccactgcaaggtgcttgtgaacatcgagcagcagtcccctgacattgcacagggtgtgcacggtcacttcaccaagcgccctgaggagattggtgctggtgaccagngacacatgtctggatatgcaactgatgagac

SEQ ID NO: 21182 - DNA, 498 bp, Oryza sativa
  Clone ID: uC-osflM202023d07b1
tttagagtttttctggattagaggttttttttgtcagcgatggggtcattgtgctgcgtcgcgtcgaggccccatggggccagcacggctagccgggagtggtcctcgattgggcggagcgatccgctctggcggactaacgctggcttttcgccgccgctgtcgaggaggtgggagtaccgcatcaattctgaggggctgtcgtatggctcccagggtgacagcggggctgctgcgcactacggttcgtcgctatcctcgaatagtaaagagcctagtaggagctgggagaggagtgatgttccaccggatcatcatcgttactccacctcggaaggtgccatttcgtattttaacagtccggatgttaccttccagaaccaccatattatgcttcctatgctgcaggattctggcattgatgaatacatgcgagtctcggtggctgagccaattggtgcattgctattgtcagaggggatatctggacagcaaaac

SEQ ID NO: 21183 - DNA, 482 bp, Oryza sativa
  Clone ID: uC-osflM202023d09b1
gtttgcccccaccaccgcacccgccggtgaggagggacaccgccatcacattcttgctatatccaacgacctccattgattaactacgtgcgtgtgagaaactaatcaaccggccggcgtgctggctttcctcatcttcaagatgcaccggtggttcattgccagctgcggagacatacgtgcggcggcggtgcgctcatcccgccgccgaggaggcgatgcgattgcgcccaagtcggcgccgccgtcgccgtcgccgccgccgaggctgaggaagacggtgtcggagacggcggcggtgatgctggccgtgcccaaggacgtggaggagttccggaccatgccggcgtacgggaccaacctcgagctgttcacctacgaccagctcagggccgccaccgtcgacttagccccgaacagatcgtcggcgagggcggcttcggcgttgtctacaagggccttattcatggcgccgtcgtcgc

SEQ ID NO: 21184 - DNA, 289 bp, Oryza sativa
  Clone ID: uC-osflM202023d10b1
ttgttctgagacacctgtctggattacctctaggttgtctgatttgaagaactggtttggatagcatttccaggaatgatgaactgcatgagatacacatgcatctcggacagcgttttggataggaacatgtgaaagtgtcataagcaggacatcctatggaacggaaggaatgtctacttgcgctgttgtggcacacggggaagaatcatcggccatggagagtaaactccgttctattggttgctaccttactttcaccttgtgaagtgctagacccgactactcc

SEQ ID NO: 21185 - DNA, 193 bp, Oryza sativa
  Clone ID: uC-osflM202023e02b1
ctttctgttactgtgcgcgctgcaacgcatcctctcctctcctagatcccatccgcatcttcttcctcgtttgacattgcccctgttgcttgcttcacgtctcctcttcatgtgatctgaggcgctcgctttcggattcttgctcttctcggcggctcgcgttgggggagcggcggtggggaggagatggggt

SEQ ID NO: 21186 - DNA, 329 bp, Oryza sativa
  Clone ID: uC-osflM202023e03b1
ttcgtttgtcgatcggtcgagcgagccggcgaacgcttgttgcctctcctccgttcgcgcttagctgggcagaggacgggggtgccaatgccgcttcggcggcggtgggcggcgcttttgttaggcgtcgccgtcgaccttgccgtcgccgccgtcggcgcgcgtgcgcaggactacaacaatggcggcggcggagacggccaggatgaggaggaggaggagaagccggcatccaaggcacacgaggcgtgcaacggtgcgctgctgcacgacacctttacggagagggagaaggagacccacgtggaccaagaacgcatcagcaccgg

SEQ ID NO: 21187 - DNA, 406 bp, Oryza sativa
  unsure (1)..(406): unsure at all n locations
  Clone ID: uC-osflM202023e04b1
actctcacaccagagtggtggtggaaggaaaggaaacgcgagaaagagagagagagagaggagagagaataagaggaaacaaaacctcacccccgatctcctcctcctcccactccgatcgctccccgccccgatcgccgccgctgacgccgacgaaggcatggagcagccgcacgccgccgccgtcgcagctggtggagggggggggaggngcnnnnttngccccgacaccggcctgtaagggccgaagggcatgttgcagctgtcatgaggtggcatgggctgaattacacatggtatagtggagttcactgagcatgaggtagccatggtcccactaccctaccaggcttttgggtactttctctcccccactgggtgttactgtgctgttcctctcacttct

SEQ ID NO: 21188 - DNA, 123 bp, Oryza sativa
  Clone ID: uC-osflM202023e05b1
gttatatccgtccatggcgaccccctcccgcacctgctgggccgacgttgccgacgccgaccccgacccggaccaggagcttgaagtctacagcatttactggcctatccgaagctattacgt

SEQ ID NO: 21189 - DNA, 503 bp, Oryza sativa
  Clone ID: uC-osflM202023e06b1
ctgtctcggagatccgcaagctctgcgccgccgccaaggacgtcttcctctcccagcccaacctcctcgagctcgaggcccccatcaaaatctgcggagatatccatggccagtattctgatcttcttcggttatttgagtatgggggcttcccaccagaggcaaactacttgtttctaggtgattatgttgaccgtgggaaacagagtatagaaactatatgtcttctccttgcgtataagattaagtacccagagaacttcttcctccttaggggaaaccatgagtgcgcatctatcaaccgaatctacggattctttgatgaatgcaaaaggaggtttaatgttcgtatttggaaggtttttactgattgtttcaactgcctccctgcggctgcacttattgatgacaagatcctatgcatgcatgggggtttatctcctgacctaaagaacatggaccagattcgcaacattgccccgccagatgatgttccagaccat

SEQ ID NO: 21190 - DNA, 470 bp, Oryza sativa
  Clone ID: uC-osflM202023e07b1
cttatcagcttcaacatggacagccgcgtcgacgcggcgacgctgaacgccgtcaactcctccgacgctgaaccagtactaatcaacaagacttgtccatcgtgatgaacctgcttgtcagcaacacagttgtaccggatgagctacagaacactgtcaagaccaaggaggttaagcagactaaggaaggaagacctgttaggcaccgagtatgtaatcctagagtgagtgggccggaatgggccatatgagcaccatgtccaggctgtcgatagttgcgtgtgagagagaaagcatcttaaaactaactctgtattcatttggatgagttgaggatgaactaggcggcgaaggcggcggcggcatcaaccctgtcgggttggtgaaatccatctgtgtgtgtgtatcgttgttctggttgggcgattcttcctctgtccttgggggtagctaacaaattggtatcagag

SEQ ID NO: 21191 - DNA, 283 bp, Oryza sativa
  Clone ID: uC-osflM202023e08b1
gtctcgccttgccgttgcgtctcgtataaaccctaagtctctctcttatccattcgtctctcttctctcatcagaagcggagcccgcggcgagagagcacagaggtatagtggtgggagggggaaggccatggcgccggcgctgagcaggagcctgggggcgtcgtccgttgcggcgctgaggccgaccccgtcgcggggccggggtcccacgctgcggagcgcggtcgcggtgcaggggaggggagcggtggccgtggcccttagaggggaggggtcttgat

SEQ ID NO: 21192 - DNA, 498 bp, Oryza sativa
  Clone ID: uC-osflM202023e09b1
tcggttctgcggacggcggagtgcggagagcggagagcccttgcgcctccaccaccgcgcctcttgctcggccgtcaactggtggccgcggtgtcgaggtgcggggggcgaaagggaggcctggtccgcctcggcggtcgggctcctcctcttccccggcgcgatcagaaggccggtgcctcccccaagcgcggaggccagcaggccgccactctggttgtctcgtctgttcgaaccgaaattggtgcgctcccttgtcaaacggcaatctccattgttttgcttggtgtgttagtggttgtgtgcataatctaggtttgaattctttttttaagtctaattgtactggtatggttaactccatagtcaaattatcaccattggtaaactaaactgtcttttgcaaagctagagaatttggagccaaagacaatagcattttgtttgcagcataagtacttactactacttgtggtccggtttgcttttgggatagag

SEQ ID NO: 21193 - DNA, 203 bp, Oryza sativa
  Clone ID: uC-osflM202023e11b1
tgtcttgatgtttgctttgtcgtttgtgcgcaccattgttattatcatgagcagtcttgggacgatgtaaggataatctattgaatgtcttgagtaagatgggggcttactgccttttcctgctaaaaaaaaataaaataaataaaaatatctctaacagtaaataattaataaataaaaaaaataaacaaaaaataaatagg

SEQ ID NO: 21194 - DNA, 414 bp, Oryza sativa
  Clone ID: uC-osflM202023e12b1
cacctacatcttctgggacgccttccacggcacggagagggtcaacatgttgctcggcaaggcagcctactccggcggcgccgacctcggccaccccatgaacatccagcagctcgccgcctggcagccgtagcagctgtcgccgccggcggtcgcgacatatatcctctctcttactctcttcgtcccgaaatataaagaattttggatgaatgagacatatcttagtactacgaatttagatatgaagtctgattagattcgtagtatgtgttacatccatccaaaatcttttctattatgcgacggatgaagtacttagggtatgaatctattcgtttttgcatgcagtgctactatgttgttgcagctaggtaggggatgagctaatgaacgagctggggtggtgtttgt

SEQ ID NO: 21195 - DNA, 480 bp, Oryza sativa
  Clone ID: uC-osflM202023f01b1
gtggaggcagatctccctcggccaaccccaagcggatcccgacgatgctgcccacgacggcgtccaaagggcgcggcgccgcccgctctgcgccgccgctcttcggcccctacctccgccgcatcgtcaagtggcaacaaatggatatcgagtacacattttggcaaatggtccatctctgtacttcaccaaaagtagtgtatgcatcctgccctcagtcctttcttcattgttcgtattatttattttgttacacaaatgcaatctgcaaattttatcatggtaacaacaaacctcttgtataatgaaattcttaatgccaatgttgcataagtgtgtcactcaacctactaagtttttattatggatgctcttgtgtgggcataactatcatggaatggaacattgatttcggataattcttgaggaatctagttttgaactttaagacttctattaccataactgtcataaacccag

SEQ ID NO: 21196 - DNA, 402 bp, Oryza sativa
  Clone ID: uC-osflM202023f03b1
gttgttttcacttctaatcttccactattagtagtacggttgccacactgctagccaatccacttcgattggttccaccgcgcctaccgagtttcccttgctaggcagtagagagagtctgtgatcgagagagaagaggatcgagcagctagcaagccggcgggcgccatggtgctctcgcacgcgagctccggccgggacgacgccgtgcgctgcaccttcgcgacgcgctacgcctgcgagacgctgccgcggttcaggatgccggagcagtcgatcccgagggaggcggcgtaccagatcatcaacgacgagctgatgctggacgggaacccgcggctgaacctggcgtccttcgtcaccacgtggatggagcccgagtgcgacaagcttatcatggac

SEQ ID NO: 21197 - DNA, 532 bp, Oryza sativa
  Clone ID: uC-osflM202023f04b1
cttctccctctcctctctgcaatcttcttgtatttttctccctagctctcctgcatcagcatcagttcttgcctgtggctaaggatcttttgatcttcaaagggagagaaaaggatcttgcctgagcttcagtttcttgtgctgcctcctcctctgtgtttgtgtgatccaatttccaacttggaggagttcttggtttcctggcattgtgctttcttggacccagagcttgacaagattgggtcaatagtttgccaatctagagagagagagagaatacttggtttcttggcaagggggacaccagggcatagatctttgtagttaatagttgctcttgccctctggactgaggagtaaatagttgtgtgccagtggtctcttgcttcatcttggtcttgtggctctgattctctggtgatctgtggagacttggaggagtaaagtaaagggtgaaaaacagaagggaaataagagaaaaaaaggtgacagattgaggctgctcttagtgtgtcaagatgaagtatatgaa

SEQ ID NO: 21198 - DNA, 527 bp, Oryza sativa
  Clone ID: uC-osflM202023f05b1
gtttttacatcattccggaggaactttgcggatccaaatgaggttgctgctgttatattgggtggtggcaccgggactcaactgtttcctatcacaagcacaagggccacgcctgctgttcctattggaggatgctataggcttatcgatatccccatgagcaactgtttcaacagtggcataaacaagatattcataatgactcaattcaactcagcatctcttaatcgtcacattcatcgtacgtaccttggtggtggaatcaactttactgatggatctgttgaggtattagccgttacacaaatgcctggggaggctgctggttggttccagggtacagcagatgcagttagaaaatttatctgggttcttgaggactattacaagcataaagctatagaacacattttaatcttgtcaggagatcagctttatcgtatggactacatggagcttgtgcagaaacatgtcgatgacaatgctgacattacttattatgtgctcctgttggagagagtccagca

SEQ ID NO: 21199 - DNA, 412 bp, Oryza sativa
  Clone ID: uC-osflM202023f09b1
attacggtggcatcaatgaagctctagatcaagagagaaaagataacttgtggaacagagatagcactccctaccacaaatcacttgtcattgatgcgagtgatctaaagttgtgtgattcaaaggatattagtgaagaactcaagcacaacagaactggaattaatgacaaccagtatttcgatgtggacccagatgaactttccccaagaacttttagcattaaaagaattgaggattggatcaaccaaattgatattgacgatggcacccttgtcgaggagcaaggagaaagttcaaactcggtgttgacaaaatataatgagccggtggctggtgttcctgctgtccggcctgatgctaaaagtcctcttggcatggagatagcttacacttatatttcgaaattgac

SEQ ID NO: 21200 - DNA, 530 bp, Oryza sativa
  Clone ID: uC-osflM202023f10b1
ttcgaacccagcggaattcgttgggcagcgggtgcgggagcagtagaggaggagaggtagatggattgagcaatcaagccctgctccggccgccgccgccgccgccgccgctgccgccgggcgatccccttaccctcgctctgtgcacccgcaccccgcacttaccccctccatggcgtgatccgatgatagcaacgagagcggtgcttcccctctccctgacggcgtcggcctccggcctgtacggcgcgcgcaccaagaagaggaggaagctgctgctgctgccgcggctgccatgtcgcccaatctggagagccacatcaagagccaggtgccggcgctgctgctgaggcgcttcttcggcggggcggggcggcggcgggtgttcgtgcagacggagactgggtgcgtgctgggcatggacctcgaccgcagcgacaacgcgcacacggtgaagcgccggctgcagctcgcgctcaacgtgcccaccggcgagacctcgctcaccttcggcgaccgcgtcctggaga

SEQ ID NO: 21201 - DNA, 416 bp, Oryza sativa
  Clone ID: uC-osflM202023g02b1
ctaggttttgctggtcatccggacgccgcaaaaaagaaaagcaccagaagaaagtgatgttgctgagtctagcgactgtatgattactagccctggatttgctgtcagtccaatgctcactccagtctctgggaaagctgttaagacttccaagtcaaagactaagaacaacaaagctgggcctcagacacctacatcaaatgttggttcaccacttaatcccccaactcctgttggtacatgccgttatgacagttcgttagggcttctcacaaagaagttcataaatttgctgaagcaggctccggatggcattctagatttgaataatgctgcagaaacactagaggttcaaaaacggggtatatatgatattaccaaatgacttgaaggaatagggttgattgaaaagacac

SEQ ID NO: 21202 - DNA, 332 bp, Oryza sativa
  unsure (1)..(332): unsure at all n locations
  Clone ID: uC-osflM202023g04b1
attattgggatgtacaggtcctctgttccccgttgggtgaatgaatccacttctatggtagtagcagtgaccggtaatagtcgcgatctccaactcatagaaactggcctcggatcgttcctgaccctgaggaacgtgataacgagaggctctgtttggcagttatgagctatgaacaccaatggagattaagcttacttatgtggtatactggtatgtaacgtactcctatatagtactacatgatttcctgtgcgttgctgctggaattggtataaaacttatgtttgcccaanaaataattctttacaaatatccttcatcaaccatct

SEQ ID NO: 21203 - DNA, 487 bp, Oryza sativa
  unsure (1)..(487): unsure at all n locations
  Clone ID: uC-osflM202023g08b1
tcgtttaatgttgataatactactgataatgatagtctgcctgatgattcaagtgcctttaaccaggttccaaaatcagatcctttgtttacctcagaattcaatggtgatacaaagtatatgaatccaccaagcaaagcccgagactcaaaccctctacatggttcaatgaatggaaattcagcacggggatcttctacggaggacttaggagatgccaagacaaagtcacagtctgcaaggtactctgatatttatgtcgatggctcaagttcagacagatatgctactgatggcgttggggatcagtcaccaagatctactgaatccgaagatgacatatggcttacagtttctgaaattcccctcttcacacagccaactaatgctccaccgccctcaagatcaccacctcttcttaaacaaagacctctgcangcaaaagctaatggtaattatgatgggtatgtgcggcaatcaaaccaaa

SEQ ID NO: 21204 - DNA, 382 bp, Oryza sativa
  Clone ID: uC-osflM202023g09b1
ttgtatcttgagctcaatcagcagcaacatctggctggttcttgcttagttgaggcctgcgccctcccaagaagatgaagaggtcttgctgcggcggctactgcggttgcggcagctgctgacactgcggcggaggttgctgcggatgcacgatgttccttgatgtggaggccacagccaccaccaagacctacgtcctcgctggtccatgcaacaaggcgagctctggaggtatggagatggccgtggagagcgcgtagaacggcggctgccgctgcaacacctgcaagagtggaaccagctgccgaggcttgtgctgctgctcctgcaactggaatttatcgacgttgtcacccggctgcatgaggatttatcgtatgga

SEQ ID NO: 21205 - DNA, 456 bp, Oryza sativa
  Clone ID: uC-osflM202023g10b1
tattgtgcacttcccggcgccgttcacgctgtgctccgtcacgtcgctcgccggcgcggcgctcacgggggcgttccaggccgtcaccgccgcgggcgggctcagccccggcacgccgcagatcagcctccagatcatcctctccctcctcctcgtggcgtatgtatgcagggcgggctagtaagctcggtgtgcgtgatgttccagacatgggcgctggagaagaaagggcccgcggcggtctccctctttagcccgacgcagaccgtcggatcggcgatcttctcggccttgttcttgggtagggtggtccccccagcgagcctgctgggaatggatttcctgttctccggcctttatggcgtcctgtgggctaagaagaaagaatgccaagttgacagaatggttgtggaccgtacagtccacgatttagagaaaccgctgtttttttaagat

SEQ ID NO: 21206 - DNA, 393 bp, Oryza sativa
  Clone ID: uC-osflM202023g12b1
cagctccagtggcatctatattggcgatagatgctatggacggttcatgttgacatcatttacattgagcaggtcttttcatgctacaggtcaacacagttcaccagagaaggactattacaagattcttggtgttcctaaagatgctttgcaggaagaaatcatgagggcttttcattcacttgtaaaaaggtaccatctagacacaaacagggggaatactgctgcaaaaaggacattttaggaaatatagatatgcatacgagacattgtgctatctttcctagagagagcagcatgattatgctattttattgagggtttgaaacaaattctctcaatagggggatggaatttaatggggtcctttcagatccatttttaggattttca

SEQ ID NO: 21207 - DNA, 320 bp, Oryza sativa
  Clone ID: uC-osflM202023h02b1
ttttcatactcacatggctgcaatcatagcacgggggggcctcttcatactggggcggctgctgaatggtgcgccgccggcagttcttggctacacgcgaggggatttcccggaggatttcgtcttcggatccgccaccttcgcacaccattatgagggtggttttgatcaggatggtaggagcccaagcaactgggaacatcttcactcatcaaggggaaaatgcccggccagaagcacatcctgatgtcccccgccgacggggacccacaacgtccaaatatgatttagaagctgatggttgccacccacctagaggc

SEQ ID NO: 21208 - DNA, 461 bp, Oryza sativa
  Clone ID: uC-osflM202023h03b1
tttactttttgggcggtgccgtgacgccggaggaccacatggacgagctgccggcggggagaggccgctaccacccgttcgaggagatcgccgagaagctccaggtcgacgacggcgagcccgcccacctcaccgacgccgagtccgcacgaaccatcgttgaggtgaacagcacggcgacggggatgatctcgacgctgatcgacgagggcgtgcacgagaggatcatcctgacggagttcccctaccttaccgatgagaaccgagatatttacttcgaggtcgacaacgacgacgccctcctggagagcatcatgggagaccacaagactgggcatgttatcatagggcttgacaacactcaggtctttgctgacttggatctgggagcggcatttgcgactgagtttgctcaagaagacgatgaccacgaccatgatgatgaccactcggatgatgag

SEQ ID NO: 21209 - DNA, 403 bp, Oryza sativa
  Clone ID: uC-osflM202023h07b1
ttgcgtatggtgaccgtcaggaggccgaggcgcccgtggccggtatcaagagggtgaaggaggaggaggcgaccgtcttcccaagtggtggcgagaagaagaagatccttccgaattggaggaagtcatcgatcccgtgtgaggggagtgagatcctgaagaagaagaaggaggcgattgcggcgaggcctctctgggtgtcgagggatgtcccggtggcgatggtgtgctggattgaggagcgccagatggccttggctgaagaggaggccgacttcgcgttcgggaagaagaagaggaagaaggtggtcaagtacaagatgtctaatggagttattcaacagatgatgagattcccctacacctacccggagtgcaccgaggaggagctgggccgacgttt

SEQ ID NO: 21210 - DNA, 482 bp, Oryza sativa
  Clone ID: uC-osflM202023h09b1
cttgattgctttgctctgatctggttgatcgatctcgtcgtcggcgatggagaagttgctttcctcctccggcgccgccgccgccgtggcgtcgcagggccagctcccggactgcttcgtgttcccggccgaccggcgcccaccggcctccaccgcggccgtgtcgctccccgtcatcgacctctccggcccccgcgacgccgtccgccgcgccgtcctcgacgccggcaaggagctcggcttcttccaggtggtgaaccacggcgtgccgccggagacgatgcgggagatggcggcggtgtgcgaggagttcttccggctgccggcggaggacaaggcggcgttctactccgacgcggaggagaaccccaaccgcctcttcttcagcaccatctacgaggtcggcgaccagcgctactggcgcgactgcctccgcctcgcctgcggctttcccgtcggcgacgacaccaacacccactggc

SEQ ID NO: 21211 - DNA, 420 bp, Oryza sativa
  Clone ID: uC-osflM202023h11b1
catctgcctctctccgctagtccgcttgccaaactgtagcaagcaagcaagcagtgcgagacaacgtgcagctcccactcccagccaatggaatcgagggaaagtttggcacgcccgcctccgtaccaccactagctcccgcccaccgatcgtcggcggctgcggcggcgacgccaccatgctccagctgcggctccagcccccgcgcttcacgccgctcccccgccgcagggtcgctggcggggggcaccaccgtcgccgccgcgccgcggtacccccgccgccccttgccctccgcttccagtggcggatccccgacgtcgacgcagatgcggtgcaagagcgggtgcggtcgtggctgtcgcgggcgaggggcgccatcgccgacgcggcgaacgccgcgcgggagaaagggaggag

SEQ ID NO: 21212 - DNA, 473 bp, Oryza sativa
  Clone ID: uC-osflM202023h12b1
tttttctggtctctttcgatgaggccattggcggagccgacttcatctcccttgacatgcctctcaccccagcaacatccaaggtcttcaacgacgaatccttttctaggatgaagaatggagttcggatcatcaatgtggccaggggtggagtgatcgacgaagatgctcttgtcagagcccttgactctggcaaagttgctcaggcagcccttgatgtcttcactgaggagcccccagccaaggacagcaagctagtcctccatgagaatgttactgttacaccccatcttggagcaagtacagtggaggcccaggagggcgtcgctatcgagatagccgaagctgtcgtcggtgcactgagaggtgagctcgcagcacagccgtgaatgctcccatggtcccagctgaggtcatgtcagagcttgccccgtatgtttcactggcagagaagctgggcaagctggcggtgc

SEQ ID NO: 21213 - DNA, 527 bp, Oryza sativa
  Clone ID: uC-osflM202024a03b1
ctttgtcttctcgcagcagtttgttggcggccggataaacgagacgaggcgaggcgaacgcgaaagctccccatctccctccctccctccctcattattgattgattgattcgcagattcgccgctgccaccgcatcccgcccacccaccgcgcgccaccgcctccgacgccgacgagcccccgcgggcaccgccaccgccacctcatgttctctcccaccaccgctccacagccgccctcccttacatggaagtcgacgtctccatcgccacgcccgcaccgcaggaatcttagctgatttgtgctttggactgcaggtctggacacgttgtccgtttcctgcttgtgcagacgtaggtttggagtctttctgagtgttaaggtggctttcctttttgtccttccatggttgaaatttgtatgaacaaccttgactgtctcgaagatctgtgttggtcgataagatgaatcgaagcagaacaatgctattgcttatctggctctgtgcaacattctgcctcatgac

SEQ ID NO: 21214 - DNA, 508 bp, Oryza sativa
  Clone ID: uC-osflM202024a05b1
ttcttttacactgtgtgctaagccaagtgggaatccccagacgagagatttagttctgcagttgctcgaaagaattttgtctgcccccaaagctcgaggcatcttactgaatggtgctgttagaaagggggaacgcctgattccccctgttacatttgatctgttcatgagagctgcatttcctgtttccagcgctcgtgtaaaggctacagagaggtttgaagcagcctacccaacaatcaaggagttggcccttgctggtcctcctggctcataaaccgtgaaacaagcagcacagcagcttttgccattgtgtgtgaaagcaatgcaagaaaataacgcagacctcaccggggagtctgctggtgtattcatttggtgcctgactcaaaatgcagagtcctacaagctgtgggaaagacttcatcctgaacatgttgaagccagtgttgtagtccttagcactatagtcacaaaatggagcgagctgtctcataagctcagtgct

SEQ ID NO: 21215 - DNA, 509 bp, Oryza sativa
  Clone ID: uC-osflM202024a07b1
tcgttttttttttttttatccaacagaaaattgagaatgcatttatcccactgaaattattctagaaccggtttgattcctcaagccgaaaacttatcagagccagtttttcagtagatatcatttcaaagttctgtgttgtgagcaaattcttagacaggtcagtccttcatattggatgcctgagctcaagaacagctctcgtaacaggcagaaacctgagggtcaccttccttacgtgtgaaaactgcgatctatcaaacacctatatacaatatgatttacttacatgataaactttcaaacaacatcctactttcagttgtgggggcacagtgtcagcaacgcgctggccgcttgtacgttgggggtaaagatgggcagctctcattcattttggcatacggttctattgtgttgtactccggtagctccatcctgtactcccccaggatctggcagaaggggagcttgtcagattctgtgttgcaccagcttggaagtctggc

SEQ ID NO: 21216 - DNA, 518 bp, Oryza sativa
  Clone ID: uC-osflM202024a08b1
tcgtttttcttttgtgacacatatagtgtagggtgagttccagcttcgtcgattaccagacggcaccggcgtcgcgcgagcgagcttgatcttgcgccttgcgcctgctagctgcttcggcggcggcggttatcttcttccgatctgtgacaggcccgatcaagaaaggatccaacccacctaggaggactaacctgaacgtgctaatgagttcaaagctagtaacatcacctctgaaatccatggagcagggccatctagagcaacctctgcgcgatccgcaggcgccggcggagcagcatgacatggggttatctcccctgacgctcctcggtttcgccttcctgaccttcaactcgggaatggcagtgtacagatcagatagagacttggcaaccatcttcttcgtggtcttctcctacgttgacctcgtatcgctcttctacttcctccgattatttgagaagacgccggcggagtcagctcgccgccaccacatcaagacggcggtgtggctc

SEQ ID NO: 21217 - DNA, 499 bp, Oryza sativa
  Clone ID: uC-osflM202024a09b1
tcgtttcccttcccaaaccctaacccccccaaatgtgccacaccgctcccccgccgccatggccgcctccgacgccgacgccgcggaggtcgagcggctctacgagctcggcgagcgcctctcctccgccaaggacaagtcccagcacgcggcggactacgaggcgatcatatcggccgtgaaggggcagagcgtgaaggcgaagcagctcgcggcgcagctcatcccccgcttcttccggagcttcccggcactcgccccgcgcgccatggaggccatgttcgacctcgtcgacatggaggaactcgcgactagaatacaagctattcgtggttttccacttcttgccaaagatgcagaatttgtctcaaaaattgccgatatccttggacaactccttgcaagtgaggaaaatgtggagcgtgatgctgttcataaagcactgatgtcgcttatacggcaggatgtcaaaagttccttgcagcctttatttaagcat

SEQ ID NO: 21218 - DNA, 513 bp, Oryza sativa
  Clone ID: uC-osflM202024a10b1
tctgtctgattgattcggattgggaagaagaagaggcatgggagcatgggcagcatgtcgtaccccacggtgagcgatgagtacctggcggccgtgggcaaggcgaagcgcaagctccgcggcctcatcgccgagaagaactgcgccccactcatgctccgcctcgcgtggcactctgctggcaccttcgatgtgtcgtcgaggaccggcgggcccttcggcaccatgaagaaccccggcgagcagtcccacgccgccaacgccggcctcgacatcgccgtcaggcttgtcgaccccatcaaggaccaacttcccatcctctcctacgccgacttctaccagcttgctggcgttgtggccgtcgaggtcaccggcggacctgaagtccccttacatccgggcaggcaggacaagcctgagccttctcctgaaggccgtctttctgatgccacacaaggttctgaccacctaaggcaaggcttttctgcgcagatgggtttgagtgacaaggac

SEQ ID NO: 21219 - DNA, 531 bp, Oryza sativa
  Clone ID: uC-osflM202024b01b1
ctttcttgcaactgctgattaccttgccacatatggtatcaatgcattaattacaaagatgcagcatgctgcaacagaaatcttgaaagagaaacaactgaaagaccctatgggcattgatgaagtcctagaaacaattttacaaatattgaagcagttcatgggtctttgtgaagataactcttggataaactaccttgtacctgagaatgccaatgtgtatgcacagctgatggctgtgtccagtagtggctttgatgattcttcacttctgaaggatgttaggaagcttgatcagttaatgtctgagacacgtatagttttgtcaaggtaaaatgctaatcctctgcatgtttagcaatatggtaatttgcactgcaaatttgttttctcaatctttcacatggctgcccattattttcatcatcagttttgattccttcaaaatgcttcacaaatacttttgatctcctatgaactaatctatatcatatggcatgtgctatgtaagcaactaggttgttgcttgat

SEQ ID NO: 21220 - DNA, 522 bp, Oryza sativa
  Clone ID: uC-osflM202024b02b1
ttctctatgcacctcaccaagcagaaagctagagagctagcaatggcgcccaccgtgatggcctcgtcggccacctccgttgctcccttccaggggctcaaatccaccgccgggctccccgtcagccgccgctccaacagcgccggcctcggcagcgtcagcaacggtggaaggatcagctgtatgcaggtgtggccgattgaaggcatcaagaagtttgagaccctgtcgtacctgccaccgctcacggtcgaggacctcttgaagcagatcgagtacctgctccggtccaaatgggtgccttgcctcgagtttagtaaggtcgggttcgtctaccgtgagaaccacaggtctcctgggtactatgatggcaggtactggaccatgtggaagctgcctatgttcggatgcactgatgccacccaagtgctcaaggagctcgaggaggccaagaaggcatatccagatgcatttgttcgcatcatcggcttcgacaacgtcaggcaggtgcagttgattagc

SEQ ID NO: 21221 - DNA, 453 bp, Oryza sativa
  Clone ID: uC-osflM202024b05b1
ttctttccgccgccgccgccgccagccaagctcgccgctcgccatggcccggatcaaggtgcacgagctccgggggaagaacaaggcggagctgcaggcccagctcaaggacctcaaggcggagctctccctcctccgcgtcgccaaggtcaccggcggcgcccccaacaagctctccaagatcaaggtggtgcgcacctcgatcgcgcgcgtgctgacggtgatctcgcagaagcagaaggcggcgctgagggaggcgtacaagaagaagagcctgctcccgctcgacctccgccccaagaagacccgcgccatccgcaggcgcctcaccaagcaccagcttgttttgaagaccgagagggagaagaagcgcgagaagtatttccccatgaggaaagatgctgctaaagcttaagttattaggaacataaatgttttaccggtcatgttttg

SEQ ID NO: 21222 - DNA, 530 bp, Oryza sativa
  Clone ID: uC-osflM202024b08b1
ttcgttaaaggggagaactcatcaaaggttgtgtctgaccagagcaatctagacccatcttcaaatagattccaagctcttgacacaactcaacccactgagatggttactgatcatagggaagctttcaatgctgttcaaacttcacaaagttcagattcagtggctgatgagatggaccatgaccgtgatctggatggaggatttgctcgtgatggtgaagatgactttatgcacgagattgctgaagatggaactccaaatgagtccacaatggaaatcagatttgaaattccacgaaatagagaggatgatatggctgatgatgatgaggacagtgatgaggacatgtcagccgatgatggtgaggaggttgatgaagatgaagacgaggatgaggatgaagagaacaacaacctggaggaggatgatgcccatcaaatgtctcatcctgacacagatcaggaggaccgtgagatggatgaagaggagcttgacgaggatctgctagaagaggatgatgatgaggg

SEQ ID NO: 21223 - DNA, 448 bp, Oryza sativa
  Clone ID: uC-osflM202024b11b1
atctttctcgacccgatctcctctccacccacccgatccacccgccggagaggaaggccgccgccgccgccatgctcagggtcgccgggaggcgcctcaccaccgccctcgcctggcgccccgccgcggcggccggcgccaggggcccgctcgccgggggctccctccccggcgacgacgaattctcgcgtgagccccagaggccgcgcttcgccgtggattccccgttcttcgccgcttcgaggggcttttcctcagaaactcttgttccaaggaaccaggatgtaagcttgactgagcttccagcaacagtgtcagctgtgaagaatcccagtgcacagattgtatatgatgaatataaccatgaaagataccagccaggtgacccaagtaaaagagcgcttgcatactttgtgttgagtggtggcaggtttattttatgcttcgc

SEQ ID NO: 21224 - DNA, 466 bp, Oryza sativa
  Clone ID: uC-osflM202024b12b1
tttttgggctgcctccatcgtcatcgatccatctgcgtatctctcaccgaccccaaatcgcacagctacagctgctcctcgatccccgcagagatcggcgagatggccacggcgatcccgcagcggcagctcttcgacgccggcgagtggcgcgcccccgcgctcggccgccgccttcccgacgtaaaccccgccaccgagtcccccatcggcgagatcccggcgggcacggcggaggacgtggacgcggcggtggcggcggcgcgggaggcgctggagaggaaccggggccgagactgggcgcgcgcgccgggcgccgtccgggccaagtacctgcgagcaatcgcggcccagataatcgagaggaaatctgagctggctagactagagacgcttgatcgagggcagcctcttgatgaagcagcatgggacatggacgatgctgctggatgctttgagtactttg

SEQ ID NO: 21225 - DNA, 534 bp, Oryza sativa
  Clone ID: uC-osflM202024c01b1
gtttattacgactacatggcttactgggatattattgactggagatggaacaaggatgcaccacgaccacttcatttagctggttttttcctgaacccattatttttcgatggtgttcgaggtggaacatcaagtgagatattctcaggtatgctagactgcgtagaaaggttggtttctgatgtgaaaatccaagataaaatccaaaaggagctcaatgtataccggagtgaggcagctggggattttcgtaggcaaatggctatccgagccaggcacactttacctcctgctgaatggtggtatacgtatggaggagcttgcccaaatttgacgcgtttagcagttcgcattctcagtcaaacctgcagtgctaaaggatgtgaccggagacacatttctttcgaacaaattcatgaccaaagaatgaatctttttgaacgccagcgaatgcatcatctcacatttgttcagtacaatctaaggctacaacacaggcaacaacacatgaccaaagcatttgatcctgtctca

SEQ ID NO: 21226 - DNA, 532 bp, Oryza sativa
  Clone ID: uC-osflM202024c02b1
ttttgttgatggacaggttccgcgcttggcagggagctcacaaccggtcgtacccgagcgcagaagaggcgctgcagcggttcgatgtgtaccgccgcaacgcggagttcatcgacgccgtcaacctgcgcggcgacctcacttaccagctcgccgagaacgagttcgcagacctcaccgaggaggagttcctggccacgtacaccgggtactacgccggcgatggccccgtggacgactccgttatcacgacgggtgccggagacgtcgacgccagcttctcctaccgcgtggacgttccggccagtgtcgactggagggcccaaggcgccgttgtgcctcccaagtcccaaacgtcaacatgcagtagctgctgggcgttcgtgacagcggcgaccatcgagagcctgaacatgatcaagtcggggaagctggtctctctgtcggagcagcagctggtggactgcgacagctatgacggcggctgcaacttagggtcgtacgggcgggcgtacaaatgggttgtcgagaa

SEQ ID NO: 21227 - DNA, 527 bp, Oryza sativa
  Clone ID: uC-osflM202024c03b1
gccattatgggtccaccaaagatgccaggcagtaattacccgttgactccgcaacagcaaatgcaactccagcaacagttccaacagaacccgctgcagcagcagcaactgcagcaactccaacaacagcagcagcaacaacaacaacagcaaatccagcagcagcagcagcagcaacagcaacagcagcagcagcagcagcaaattcagcagcagcaacaacaaatgggctctccgttacagcaggcggcacaggtgggctcacctgctggttcgcagcagtcattggtgatgtcgcagcatcagcaaataagcccacagcaaatggccgcgatgagtccacagctgagctcaggcaccatgcagcaagtgaataacaatgttatcaaccacgtagccacaccaggccctcctcctagcccgcagctcagctcacagacccatgggtcggtcaacagcatcgcaaactccccaatggagcagttgcaaggtgccaataaaggaggtccagggagcatgtagtgacg

SEQ ID NO: 21228 - DNA, 523 bp, Oryza sativa
  Clone ID: uC-osflM202024c04b1
ttattcggcctgtacaaggagcctaaatggggccatctcagggacctgcaccacgctctccgtcactgcaagaaggccctcctctggggcaacccctccgttcagcccctcggcaaactctacgaggctcgggtgttcgagatgaaggagaagaacgtgtgcgtggcgttcctgtcgaaccacaacaccaaggaggacgggacggcgacgttcagggggcagaagtacttcgtggcgcggcggtcgatcagcatcctcgccgactgcaagacggctggtgttcagcacgcagcacgtcaactcgcagcacaaccagcgcaccttccacttcgccgaccagacggtgcaggacaacgtgtgggcagatgtacagtgagggagaagatcccccgctacagcaagacctccatccgcacacagaggccactcgagcagtacaaccagaccaaggacaagaccgactacctctggtacaccaccagcttccggctggagacggacgacctgccgtaccggaggaggt

SEQ ID NO: 21229 - DNA, 514 bp, Oryza sativa
  Clone ID: uC-osflM202024c06b1
tttgttatcaagcaagcaagaagagacgagacgagggagagaaggagaagagggggccggccgcgggcgtcgtcgtgttcctccccccctctctctcctctcctctcctctcgatctccatccttccttccatccattcctccccgcacccttcgcattgctctcgtcgtctcgattcggtcgaggatctccaggaaaagaggaggaagcgatatgggttgcttttcatgctgcggagcggatgatgtcggcaagaagaagaagcgcgacgatccttacgtcccgatccctgatccaggtggtaactatggacgtagcaagcccgggcccccagccccttcgcgttctccccccaccagcagaaatctgccaattgcagtaccggcaattccccttgatgaaataaagggaataaccaagaacttcagcagtgatgctctcatcggagaaggctcgtacgccagagttttctttggtgtgctgagagatggcaagagatctgcggtgaagaagc

SEQ ID NO: 21230 - DNA, 526 bp, Oryza sativa
  Clone ID: uC-osflM202024c08b1
tgctctttgtcatccacctcgtgtcgctcgctcgctcgctcgcgcacacaccacccaacggattaacatggtggcgccggcggggagcttcttccaggaggccgccctcccggagcagcggctcgtcgagggcgtcgccttcccggcggtgctcgtcccgagcgccgccgccgccgcggccggtggcggcctcgacgcgttcctggacgccgtgcggtcggagagggcgtccacggtggagccgctgctgcggggcgccggcgcggtgctgctccgcgggttcccggcgcgcgccgtggcggacttcgaccgcgccgtggacgccttcgggtacgcggagctcccctacgtcggcggcgccgccccgcggagcaacgtggtggggcgtgtctttaccgccaacgagtcgccggccgatcagaagatcctctttcaccacgagatggcgcaggtttcgacattttccgcggaagctgttttttttctgcgaggtggtacccaaaattggtggtgagacacccattgt

SEQ ID NO: 21231 - DNA, 221 bp, Oryza sativa
  Clone ID: uC-osflM202024c09b1
tttatctgctcaagaagcaccagctgttacccaatgcctgacatgaagcgcatgttacgaacgacagagtttctttgcaaataagtgcatacagatgttgtgtgataggaatgtcatctcatctgtattatctaaaaataatgaacgtcatctgtagccattaagaaaattcacgaagcaacaactctgcatatcaatagagagcacatattggtatccct

SEQ ID NO: 21232 - DNA, 354 bp, Oryza sativa
  Clone ID: uC-osflM202024c11b1
attttagaaggcaagcatgaatctatgcagacggggacacaggagaataggaggccgggcggcgaggacgaggtggacctccacgactatctcttgtattggtctcctctggatcgccatgcttccttacatccatgggtccccgccccctcaccattgttgtcgtcgtctggatgcaggcgaggatctgcaggaacagaggaggaagcaacatgcgtagctgttaatgctgcagagcggatgatgcggccacgacgacgaaccgcgacgatgcttacgccccgatccctgctccaagcatcatctacaagcgccccaaggcggaccccccagcccctaggagttctgccagca

SEQ ID NO: 21233 - DNA, 229 bp, Oryza sativa
  Clone ID: uC-osflM202024d04b1
tatggttttccacacgctagtgctggtggagagcggggtttttatggggctgtcctttgcggtcaacttggttgagatacaccacgaggctgttcaagaggttgtccctggagcacatcgcgagttcaacgggaaaaacgttcctctgaaagagctgaagcgccaacacgtgggctcccactacggggatgaccctgccaaggatgctggcaggttaacgttgcaggtg

SEQ ID NO: 21234 - DNA, 526 bp, Oryza sativa
  Clone ID: uC-osflM202024d05b1
gccgtcgccgtcggccgtcgtcgcccgtgtccgtccccgccgcgccgcgacgcgacgcgacattctcggactggcactagccatgatctagtggaggcaattttcgttattgcagctgtttggtgggttgaatgaatgaatgaataaagaatgatcaacctgattgatttgagcgccggagccagcgccagggttgccacaagagatggttccccagtgcgagaaactcaatcggaacggaaggagtatgctgatctcaagacagtgactggcagcgtgcgaaggagctcgtcagatagatcgtgtggtagtggtacacccatgaaagtgctgatagcgcaggagatggcgaaggagggggacacaaatcagaagaccactagtgttgtagctaagctgatgggtcttgatgatgatgcagcccttcctaagcctgttcaacctttcacaacaggaggagatttccagatggccatttgtctgctatgttggcacgagttaataaccaaatgtcgtttgacaacca

SEQ ID NO: 21235 - DNA, 158 bp, Oryza sativa
  Clone ID: uC-osflM202024d06b1
ttttttttagtgaatagtacttgcaattttgagtgtgtgctttccatctcataaggtttccatgtttcataatgtcctcttgagtttaatttgagttttcaactattggaggaactataaatagcactagctaaatatgttgcacacgtgattcatgt

SEQ ID NO: 21236 - DNA, 533 bp, Oryza sativa
  Clone ID: uC-osflM202024d07b1
atttcctctctcacctctccgcgcgccgcctctcgccgccgcggacgaaaccctagctaaaaccctcctctccctctccctctccctctcaccgagccgcgcggcctcgccaaggaccggcagcgatggggaagagcagcagcaagaagaagaaggacaaggtgatcctgcccccgcagctgccgccggaggtggacgacgacgacgtggtggtctctgacgaggacgtcgagttcttcaggggcaacgagggccacgcccgcgcgctcgccacgctcgacaggaagtccatcgacagctacgtcaccagggtcgcccaccacgacgaggacgaggtcgagcgcctctacgaggagcgcgagcgcaggaggaaggcggtcgaggccctcaggcccaagaaccacgacgacgacgacttcgaggtcgaccgcgtcgacgccctccccgtcaagaccctgccaggggagctggtctacaacaacggaggaggtgaaggaggaactttcagctgaggaattatttgagaaaaagaa

SEQ ID NO: 21237 - DNA, 527 bp, Oryza sativa
  Clone ID: uC-osflM202024d08b1
ttgatatccctcttctaattctctcagaggcctccatagttctttctggtcctttgttctcatgaccacaatgcttgcagctagctctgaagtgaacagcaaccttccttgctcatcaaggatatcctgctggtcagacttcacatctggctactcctggcgtactatagaggctgcaaaactctgccagacacgagctgtgcgctcgctgcagataacctgtactgccacaaagcctgcaaagtcaccagctgaagaagaatggaagatcaagaagcaagtgctagtatacaagcggctccgtaaggttgatgtgaaggaagcactgcgccttcagaaggaaaacaattttgcaattcttgatgccaggccagtagcggactataaagaggctcatccacctggtgccgctaatgtgcaaatatatagattgataaaggaatggacagcatgggataattgcagaccggcagcatttgcattctttggcatagtttttggaacagaagaaaaatctgagttcatac

SEQ ID NO: 21238 - DNA, 515 bp, Oryza sativa
  Clone ID: uC-osflM202024d09b1
ttctgtcttccgcgccaccaacccgcgaaccctaaaaaccctagcgcctacgcgcaccaatccaccggagaggggaggcggggaagcggccatggcggagcacgacctgacggcgcggatggcggggcacctggactgccacctggtgctcccgctgctggagttcctgcaggagcggcacctctacccggaggaggagatcctcgaggcgaagatccgcctcctccggggcaccaacatggtcgactacgccatggacatccacaagtcgcgctacggcaccgacgacgtccccgaggacatggtcaagcgccgcgccgaggtcgtctccaggctcacctcgctcggcgaggccatcgacaacatccaccagaaccagcagattggtcctgatcagattgagactctgtatcagtatgccaaatttcagtttgactgtgggaattactcatttgctgctcagtacttgcatcaataccgtgctctgtgcacaaacattgagaggagcttgagtg

SEQ ID NO: 21239 - DNA, 526 bp, Oryza sativa
  Clone ID: uC-osflM202024d10b1
tggtgtcctcaagcctggtatggtggtgaccttgggtcccagcggcctgaccactgaggtcaagtcggttgagatgcaccacgaggctctccaggaggctcttcctggtgacaacgtcgggttcaacgtgaagaacgttgcggtgaaggatctgaagcgtgggtacgtggcctccaactccaaggatgaccctgccaaggaggctgccagcttcacctcccaggtgatcatcatgaaccaccctggccagatcggcaacggctacgccccagtgctggactgccacacctcccacattgccgtcaagtttgctgagctggtgaccaagatcgacagacgatctggtaaggagctggagaaggagcccaagttcctcaagaacggtgatgctggtatggttaagatgattcccaccaagcccatggttgtggagaccttctctgagtaccctcctcttggtcgttttgccgtgcgtgacatgaggcaaacggtggctgttggcgtcattaagaacgtggagaagaag

SEQ ID NO: 21240 - DNA, 482 bp, Oryza sativa
  Clone ID: uC-osflM202024d11b1
ttcttcgagagctttctctttctgtgtgtagtgtgtgcaactaggaggcttgttccatactagtttgctaggtcatggaaaagagcgagattttcgtaggagcacactcatatgcagctatatgtgcttttacactcatcataggatggttagctcactgggtatacagatggataaatcctccatgcaatgggaggcttcctccgggctcaatgggcttccctattgttggtgagaccttccaatttttcagaacaagtccatcaatagacatgccaatttactacaagcgaagactggagaggtatggacctatattcaaaactaacataggaggccagcacgtggtcatatcccttgatcccgaggtgaaccagttcatatttcaacaagaggggaaagttgttccaatcctggtttccagaaaccacactaaacatctttggaaagaagacactcaccacgtataatagaactgctca

SEQ ID NO: 21241 - DNA, 525 bp, Oryza sativa
  Clone ID: uC-osflM202024d12b1
ttgtacatgctgcgagagtgctagtgagagtgatagtaatggaagggacgccaactttcaaaatcctatcaaccctgttttatgttgctccaggattcacattcaaaggaaaatgatgtaaaggaagatggtagttctcagaatggcatatcacatacagcattaaatcagaacatgtcgatggctccaactcaaacgggtgtagtaatcgggggagttgctcccacaacaaacttgaacataggaatggactactggggtgctgctggttcttcgcctgttcctgcaatgcatggcaaagcatcgtctggttcagttcgaggagagcaatgggatgaaagagagctcaagaagcagaaaaggaagcagtctaatcgggaatcagcacgtagatcccggctgcgcaagcaggctgagtgtgaagagctatttgtacgcgctgacaatttaagggcagaaaactcctctcttagggctgagcttgaacggatcaaaaaggagtaccgagcacttttttacacaatg

SEQ ID NO: 21242 - DNA, 526 bp, Oryza sativa
  unsure (1)..(526): unsure at all n locations
  Clone ID: uC-osflM202024e04b1
atctcttacctctcctctcctcctcccccctcctctcctcctcgcctccgcaccagcagtttcgtgcaccgcacttcacccacctacctcccccaacctccccatcaaaaactagtagtagcagtatccacccatccacgcacgcgaccgagcgcgatcgattcgaggcggcggcggcggaggaggaggagggggagtagatccggcgggcggcagcgatgatgaagtcgctgctgccgcagagccagctgcggcggtcggcggcggcggcttcggcggcgcggtcttcgggaggaggcgcggggtcgggcggcgccgatggggccggctccgacggcggcgcgggcgggcgtgcccccgccacgtccacgttctggttcctcctccacgcgctctgctgcctcgtctcgctcttcctcgggttccgcttctccaggctcctcttcttcctgctcttctacaccaccgcgctctactcctccaccttgtngtncctctcctacggcgtgctccgggccacgacgac

SEQ ID NO: 21243 - DNA, 522 bp, Oryza sativa
  Clone ID: uC-osflM202024e06b1
ctttgttgatttttgaccttgattctgaggaagctgctaactctatccagggatctcttggagagcttatgaaggaggttgccttgtgcgttgcggctgtcagagacaaaaaaactggcatttctggtgatgctctaaaagaacttagagactctgcaaatacaattctaaaagtaatcgcaggctggatgtgtgcttcaacgtatttcaaagggattagccggatgttagaacattcaagaagtgttgtgaaaagaaaggcgcttggaatattgtgcgaaactgcaaagggaaatagcttgatccagaagaagcaaaagaaagctagaaaattaaatcatagcactcctgctactgcacttcaagtggacaagagctctgccccttgtttcagtgagttgtgcgttaagattctagagttggttgacagagaggttgattcagacagttcagtgagaattgcagctatttcttcacttgaaacactggcaaaagaatatccctctgataatcctgcatata

SEQ ID NO: 21244 - DNA, 533 bp, Oryza sativa
  Clone ID: uC-osflM202024e07b1
tcgttgagctagagctgtccctgccaaaggcaaataataccagatgaacacggcagcctctcgatctcgacaactcggggcggaataattctggtgttcttctcatcaccgatcgtttctgtacatgtaacaagttgaggatcgtggcgcctgcatgcatttggtggacgccacgtcaagaataaccgaggttacaggtgtctccccctgcatgcagcagggggcatctgcagcttgcggaactcggatggtttgagtttgaacgagttgcagcatgtcccccatggagtcccgtcctgatgatcttgttcctcccgcgatgcacaagccggcgatccaatgcgccgccgccgaggacgcgagcctgctgcgaagcccgacggtgtcgtcggaggagttcatgcagttcaagaggaaagccacgacgatcttggaggagtacttctccacggacgacgtcgcggcgacggcgaacgagctgagggagctgcgcgtgccgtgctaccactactactttgtcaggaagctggtct

SEQ ID NO: 21245 - DNA, 527 bp, Oryza sativa
  Clone ID: uC-osflM202024e08b1
tcttttagctagctagctgcggcgatggcctccagagcggcggcggtcgccgtcctcctcctcgccgaggcggcggcgccgctcttcgccgcggcgagcgcgcatggccgaggctaccttggtgccaagtcctggcctcctgacggcagcctgagctcatcaagctccggcgaggctgcagcggcggacgtcgacgacggccacacggactggaagtgctactcctcctgcatgagcaagtgctgtcaccgccacgacgacgacgacgacgacaaggccaatgccaaggccaacgccaccgccggcgccgccgccgtcgggctcgacgatgactacaagtgcaagaagcagtgcctcggcaactgcttcaaggacgtgccggccgtttgctaccacaagtgcgtcgacgactggtgcgcgaagctgccaccatatagctccgcgaaggtgcagtgctacaagaagtgcggcgaataatgcttccaccacggcccgaagcctgggcccaagcccaagcccaagccgag

SEQ ID NO: 21246 - DNA, 524 bp, Oryza sativa
  Clone ID: uC-osflM202024e09b1
tgttttcgtctcctcgcccgccgccctcgagtgccgtctactcgcctgccgatggcgccgatctccatcctgctagcagaggtggcgccggcgctctcctcctgctcccgccgcattcgctcaccggtgagcattctaatccatcccatccggcctcggcctcggcctcgaatttcgtctcctcgcccgccgcttgcgccgatccccatcctgcgagcagaggtggcgcccggcgtcctccttctagcttccaccgcatcgtcgctcgccggtgagcatccctccctacccacacctcatcaggtattctgcgttatccctcaaaaagtttgggggttcaaccgaaacagggttagatctgcctctgcccagcttcacctactttcaaggtgttaattttgatttccgtttttagcatatgtaaatcggttactgaatctcatccaacaccctaagaacgaacaagtaagctcacaataatttgtactcatccaaactacggaaatttttaagaagatctagac

SEQ ID NO: 21247 - DNA, 527 bp, Oryza sativa
  Clone ID: uC-osflM202024e11b1
ttgttgaatgtgacaaagtcgatggtaaattgtagatgtgtgacaaagtcagtggcatataatggattctctcctatatatatataggacttatgaaatgacttacctaaatgatttatcattttagaagtgattgcaagactccaattaatgaaacaaactgttcaatcatccatatattaaaaatattactgaattttaaattggcaaatcatgatatatgggttcttgttctctcttgtagctaatcgctataatatgtatgatatcgagttaccgatcatacatcaacgctacaaaatcactgttcactaaaccttaagtgagttgccatgtctcgtagatggcaccctccatctctaaatcttggcttcgccactgattattgttgcagcagttacacctattagacatgcattcagttgatgagcattgaccacccaaccaaggtaccaatcagttttcgtccaaaacatatgtttattctcattcatcgatctgggatgccaaatctatgcttcgatctt

SEQ ID NO: 21248 - DNA, 528 bp, Oryza sativa
  Clone ID: uC-osflM202024f01b1
tttaatctaatcggaatccatggagtcgtcgcggtcgcggaagtgggcccgccaggactgggacggcgccggcgcgccgccgccgtctggcggagctgtcggtggtggcgaggggcggcgcgtcgtcgccgtggagggacgacgaccgcgacgggcactacgtgttcgacctcggcgagaacttgaaccgacgatacaaaatcttgagcaaaatgggagaaggtacttttgggcgtgttttggaatgctgggaccgtgaaacacatgaatatgttgcaataaaagttgttcgtagtattcgcaagtacagggatgctgcaatgattgagatcgatgtgctcaaccgccttgcagaaaatgagagatacagatcactctgtgtccagattcaaggatggtttgactattgcattcatatatgcattgcttatggtggagtttcccttgtgaccttatgagtgtcggatgcataattgttgagctatgctcggtttgatttcttgtcatgcatttttttcctttcttttt

SEQ ID NO: 21249 - DNA, 542 bp, Oryza sativa
  Clone ID: uC-osflM202024f02b1
tttcataatccgcgtcctctcgccgccgccgccgcccgccgcggcgcgcgtgcgtgcatgttccgatccatggggacggggacggggacgaagccgccggcgatgacgacggagcggtacgagttcgggccgctcgtcggcgagggcaacttcgccaaggtgtacctcggccggcacagggccaccggcgaggaggtcgccatcaaggtgatggacaaggagaagctcgtcaggctcggcgccacggagctgatcaagcgggagatcgccgtcatgcagcggctgcgccacccgaacgtcgtccgcatccacgaggtcatggccaacaagcgccgcatctgcgtcgtcatggagtacgtccgcggcggcgcgctctaccgctacttccgcaggggccccagcggcggcgccgccggcctccgggagcacgaggcgcgccggttctttcagcagctcgtctccgccgtcgcctactgccactcccgcggcgtgttccaccgcgacatcaagctggacaacctccttgtcgacgagcaggggaa

SEQ ID NO: 21250 - DNA, 427 bp, Oryza sativa
  Clone ID: uC-osflM202024f05b1
caattgtgttattgcagtttcatgtgagggtgctcctcctgtccaaatgggagaaagatatcctcacatgttcttgatcctcctactttttcatggagcccatgcggctttgaaagatccagtacagaaatggcagactcttggaggtcagcgtcctcttgtcattgctcgcggagggttctacggcttgtttcctgattcaagccagttctcgcaccagtttgcaatgtcgagtagcttgcatgatgtggttctgtactgtgatctgcaattgaccagagatggattgggcttctgcaaaactggattgacattagagaactcgacgcttatctgcgaaacctgtgctaaaaggggcaagacctacaaggtgaatggagaggaaatccatgggtggtttgctttggatttcaccggatcccatctg

SEQ ID NO: 21251 - DNA, 370 bp, Oryza sativa
  Clone ID: uC-osflM202024f06b1
gatacaaatcatattagcctatatttgaagggactgaaggtggacttatccctaccagagtactatcacacacacaccccgaacgctactacgctttcacgctgatctcgtgaactttgacacgtagaaacatcacacatacaaataatatatatactccttactaaggtaacaatatattatatactccgatcactaacaaggattgacgtctggacgatcgccccgtacgcgcaggcaaaccacagcctcacaaacacgacaccagcagggtcatcgcggcagcggctccgaagctcgcggccttgagagccaccaccaccgttccggacaccgaccttttgatgcctgccttccccgacgacgggtc

SEQ ID NO: 21252 - DNA, 522 bp, Oryza sativa
  Clone ID: uC-osflM202024f07b1
tcgctcctctcgatctccattcgtttttgagttcctcgtttgctccgcctctctttcactcatgggcaagattaagatcggaatcaatgggttcggccgcatcggcaggctggtggccagggtggcgctgcagagcgaggatgtcgagctcgttgccgtcaacgatcccttcatcaccaccgagtacatgacatacatgttcaagtatgacaccgtccacggccagtggaagcatcatgaggtcaaggtcaaggactccaagaccctcatctttggcacgaaagaggttgcggtgttcggctgcaggaaccctgaggagatcccatgggctgcggctggtgctgaatacgttgttgagtctactggtgttttcaccgacaaggacaaggcagcagctcacttgaagggtggtgccaagaaggtcgtcatttctgctcccagcaaagacgcccccatgttcgttggtggtgtcaacgagaaggagtacaagtctgacgttaacattgtcttcaacgctagttg

SEQ ID NO: 21253 - DNA, 402 bp, Oryza sativa
  Clone ID: uC-osflM202024f08b1
ttgttttcactctctcttctccgctcctcctccgccgatcacgcgctccgcatccgcatcgccggcgacgatgaggacgtcgcgtgcggcggcggcggcggcatctctgccgctgctgctgctggtggcgctactcgtggcggcggaggggaggaggcacaaggacggcagcggcgacgaggaggcgaaggcgtgcgacaaggggtgggagtgcagcgggagccggttctgctgcaacgacaccatcaccgactacttcaaggcgtaccagttcgaggagctcttcgcccaccgcaacgaccgctcgctcgcccacgccgccgggttctgggactaccacgccttcatcaccggcgccgcgctctttgagccccgcgggttcggcaccacgggagggaagga

SEQ ID NO: 21254 - DNA, 534 bp, Oryza sativa
  Clone ID: uC-osflM202024f09b1
ttcggtctataaggagacctctccagccgccgaatcaaccgccgacacggcaacctctgcggcagccggatcaactgccgataaggagacctctctagcggccgaaccaaccgccgacacggcaacctctgcggtagccggatcaactgccgataaggagacctctccagcggccgaaccaaccgccgacacggcgacctctgcggcagccggatcaaccgctgataaggagacctctccagcggctgaatcaaccgtcgacacggcgacctctgcggcagccggatcaaccgccgataaggagacctctccagcagccgaatcaaccgtcgacaaggagacctctgcggtggccggatcaaccgccgataagaacacctatccagcggccggatcagccgccgagaaggagacctcttcggcagccggatcagctcctgtcgtcgacactgcgcctgcggccccgccgacaacttaatgttaattacaaaccattcggacttaatattttttaagatgctttacgactttaaa

SEQ ID NO: 21255 - DNA, 497 bp, Oryza sativa
  Clone ID: uC-osflM202024f11b1
tggtaatcgagaatcatgccttcccacggcgcccgactactgccgctgcctttcttcccatcctcctctcctctcgatctccctcttgccacccatacgccgcctgctcatggagcctgtagctagccgccgccttcccctcgggctcgccaagctgtagccgctgctttcctctcaagctcgctggaccagccgctgccgccaccgccgtgcggagccagtggttaccatcgtcgtcttcccatcaagcaagcggcgactgccgccgccttcttgcgagttcgatgtccactgctgccgccatttcatctccttccccatcccacgcggacttggttctgcaagatctgtgccgcatcgagcacccacaagcacgcggtaaccaaaaggcctggagctattttcggaagcacaaacgtaaggatcacatatattatcctatcataacattaacaacgttggaccatacttttggtgggtgctgcatgcagttatta

SEQ ID NO: 21256 - DNA, 545 bp, Oryza sativa
  Clone ID: uC-osflM202024g02b1
gtttatgttgtgccgaccggcgacgacgaaaggccggcggagagagatcccctcaccaccatggggatgctggatctgatgcgcctcatgtccatccagcgccagcgggaccaggagcgccgccgccgccaagcccaagctcccccccgtgatggattgattgctttacgggctaaaagaaagggctcaccctgccaacaagacggcgattctcagggtgctgctgacatagagataccaagccttccagaggacatctggcgtcttatacattccttgatgccaatgcgagatgctgcccgagctgcctgtgtgtctcgttcctttctaagtttgtggagatgccaccccaacctcaatttcagtagtgaagcatttgggttgaacaaaaatgcatgtggaaaggaagaattggctggacttttctacagcatagtcgaccacattctcaaaaggcactcaggcatcggcgtgaaaaaacttaagattcagatatattcagattatagtgggaaaggctcttcatatctcaacaattggcttca

SEQ ID NO: 21257 - DNA, 533 bp, Oryza sativa
  Clone ID: uC-osflM202024g05b1
ctttattgcaccactcacgacggccacagccaggtgaaggacttcatccagaccctcctcctgtacggcggctacaacgagctcgccgacatcctcgtcaacctcacctcgctcgccaccgagatgggccggctcgtctccgaggggtacgtgctcaccgtgctcgcgcccaacgacgaggccatggcgcgcctcaccaccgaccagctcagcgagcccggctcgccggagaacatcctgtactaccacatgatcccggagtaccagaccgaggagagcatgtacaacgcggtgcggcggttcggcaaggtgcgctacgacacgctgcggctgccgcacaaggtggtggcgcgcgaggccgacggctcagtcaagttcggccatggcgagggctcggcgtatctcttcgacccggacatctacacggatggcaggatcgcagtgcagggcattgacgccgtgctgttcccgccggatgacaccaagacggcgccggacacggcgcccgtcaggagggcgcccgccgtcaccgg

SEQ ID NO: 21258 - DNA, 530 bp, Oryza sativa
  Clone ID: uC-osflM202024g06b1
acctaattaaataaaaatcacccccgtggcatgtgcccccgcaacacagaattccccaattccccttctcccatcccaggaggagccgccggaaccctcaccgtccccccaagatccaaccaatctaccggtagacccggtgttgtgccgtgatggatccattaggcggtcgccgccgccgtactgctgcatctgagagtggaggaggatggatgaagggttgtaccagtgtgagggcgagagatacgaggagcaggaataggaagaggaagaggactgtagtaccacctgcagcagctacttttcctgatctgctgccggaggagattgtggtggagattctggctcggctgcccgtcaaatccctgctacgcttcaagtccgtctgcagagggtggcgtgcaatcatcttcgagccatccttcatccgaacgcaactccagtgctcggcttctaaacaggagccatccatcctcatcagcccccacaccctccttgggcgttgcgatattcaacccccagttggagga

SEQ ID NO: 21259 - DNA, 534 bp, Oryza sativa
  Clone ID: uC-osflM202024g07b1
tcgctgtcttcccgagcaccagcaccatccgaggaagaagagtcttcttcccacgcggcttgtccgagccgagcgaatgcgattgtaaagcaccgtcgtgaacctgacgacgagctccaggcggcggcgatggggtgctccttctccgggctgaacgcgctctacgacaccgtcggcggcggcggaggcgacatctgggtcaacgactaccgcttccgcgtcgtccgcaggctcggtgacgccgggccagcggggtccttcgtcttccttgtcaaggaggttgtcgccgccgccaccgcctccgacggcactggtggggcggtgcccggcgcctctgggctcgccaagaagaagggcatcgatccatcccacatctcagctgatggaacatatgccttgaagaaagttcttattcagaatgaacagcacttagagcaagttcgacaggagatccgagtgtcctctcaattcagtcatccaaatctacttcctcttcttgaaaatgctattattgcagttaagggtgtgcaagat

SEQ ID NO: 21260 - DNA, 498 bp, Oryza sativa
  Clone ID: uC-osflM202024g08b1
tcgctctacgacgcccagaagatcaccgacgacacccgcatccgcgcgtccgtgcccactgtcaagttcctcctcgagaagggcgccaaggtcatcctcgccagccatctgggccgtccgaagggtgtcacccccaagtacagcttgaagcctcttgttccacgcttgtctgagctacttggagtcgatgttgtgatggccaatgattgcattggtgaggaagttgagaaattggctgctgctttgccggaaggtggtgttctactcctagagaatgttagattctacaaggaggaagaaaagaatgatcctgagtttgccaagaagcttgcagctgtcgctgacctctatgtaaatgatgcttttggcactgcacacagagctcatgcttcaactgagggagtgaccaaatttttgaagcctgctgttgctggcttcctgatgcagaaggaacttgactatcttgttggagctgttgcaaacccaaagaagccattt

SEQ ID NO: 21261 - DNA, 470 bp, Oryza sativa
  Clone ID: uC-osflM202024g10b1
ttgatcagagagcttgcggaagcggaggtttggtgcggtcgcgcgcgtgtgaggggggagagaaggccaggaggaggcgacgccgtctcccgagggaggcaaaaatccgatcctcctcctgccctgctcgctcgctcgctcgcctgcgctgcgcgcacttggccccgtcccgtccgttcccgctcgccaggcatagaaagatggtgctctgggtcttcggctatggctccctgatctggaaccccggattcgacttcgatgagaagatcctgggcttcgtcaagggctacaaacgcaccttcaatcttgcttgcattgaccatcggggcacgccggagcatcctgcgaggacctgcacactcgagtccgacgaggaagccatatgctgggggattgcatactgtgtcaaaggggggcttaaaaaggagcaagaagcaatgaagtacttgaaagaagagagtgtgagtatg

SEQ ID NO: 21262 - DNA, 527 bp, Oryza sativa
  Clone ID: uC-osflM202024g11b1
ttctttgccctcgccgagatatattttcccctcggcggcgactcctcctccacctcgtgagctcgccttcggccgccgcctctgcgcctcgcagatccccacccgcgaccgagcgagctggtgccgcatcggtatcgcatcccgttcatcttctggctggacgaattcaattcacggacggtggtggtggtggtgttgactagggatttatttttttaccattggcggctcggctgcatccccaagtgaagaagagaattcgtacatgattccgctaaacaggagggcgagtcagactaggggtgggatggagtacttcgatgctaggcggaagcctcataatgctgggaaagttattgcagctctggtcctcacaacactatgtatatttgttttgaagcaatctcctggttttggtggcagcagtgtgttttctcgccatgaacctggtgttactcatgtcttagtaacaggaggagctggctatattgggtcacatgcttcattacgcctgttaaaggacaata

SEQ ID NO: 21263 - DNA, 197 bp, Oryza sativa
  Clone ID: uC-osflM202024h02b1
tttgatgtgaaggcaaggcataggtagacctcaccggacgccgacgcggaggagctcatcactggccagctgccgccgccgccgccaccactgctcacgctccgatagctgccgtctctcctcgcggggcgggtggggggggggaccgctgcttctctccataacgcctctggcgaccatgcccctgaccgtgcaaa

SEQ ID NO: 21264 - DNA, 425 bp, Oryza sativa
  Clone ID: uC-osflM202024h03b1
attttatatgctgagagagagagagagagggagagaggtgaataatatacacaaacgagccagccgagctcgatcatgggcaccgtccttggggagttgacggacgacagcgccggcggcttatacacaccatgtgcgagcgctgccaaggaggagaagccagcggtggtgctgccaccagcggctgcgcacaggggaggcaccctccgcggacgcggcagcggttgtccggtgctgctgagacaccgccctgcaggccgaccgctacggatacaatcatgctaagagcatttcctaccctacgctgcctttttcgagggcaaccaggctatggtcgccaaggtggccgccaccattctgagcaccaacctttgggtgtacggccaccaattgcgcaaggtccagggaggggccggcaaggggga

SEQ ID NO: 21265 - DNA, 483 bp, Oryza sativa
  Clone ID: uC-osflM202024h04b1
gttcgtttcctcgaagctgtgaaaagaccagaataccggtcatcctcaaaagccccaaacccgaggaggcgagaggaggaggaggaggagctcgtcggcggcgagcgatggcggcggcggtggcggagctgtgggagacgctgaagcaggcgatcgtggcgtacacggggctgtcgccggcggcgttcttcaccgccgtggcggcggcggcggcgctgtaccacgtcgtgtcggggatcttcgcggggccgcccccgccgccgtcgcggccgagggacgagcccgaggcggagccgctcccgccgcccgtgcagctcggggaggtctccgaggaggagctccgccagtacgacgggtccgatcccaagaagcccctcctcatggccatcaagggccagatctatgacgttacgcagagcaggatgttctatggacctggtggaccttatgcgcttttcgttggcaaagatgccagcagagcac

SEQ ID NO: 21266 - DNA, 419 bp, Oryza sativa
  Clone ID: uC-osflM202024h07b1
ttcgttgccgtgtccttcgtgtccttctcctacatcgacctcgtgctgctcttcgtctgcttgcgcatgttcgagaaggcggagcccaactcgcgggagagggggaacctcaaggcggccgtgtggatcctgacgacgctgctcaccgttgttttttcctataaggtcgcggcgatcatgccgctgcccgtgcaaatactggtttgggcgatggccggcgcgactgtccttgggggcttctacgccttcttcgtgcaccgggaatccaaggaaggctaaagaaccgtggcaaaaattcaatggggatgtgcccatcataaccctggttacgcatggtccaacattgatggaaaaaatcaagggccatggatatcagaacgtggtgtggtttctccctgttgaattctcgtcagggtata

SEQ ID NO: 21267 - DNA, 508 bp, Oryza sativa
  Clone ID: uC-osflM202024h08b1
ttgttttggcttccccactctctcttcttcttgggaggctgggagctaccagcacaacacaccaaggaagctgaggtgcgttgatttcttgatatcatggccaagaggcacctcttgttggtgacaacttgtttgtgggctctgtcatgtgccttgctgcttcatgcttcctctgatgggttcctgagagtcaacctcaacaagaagagattggacaaggaagatctcactgccgccaagttggcgcagcagggcaaccgtcttctgaagaccggcagttcagacagtgatcctgtccctctggtggactacctcaacacccagtactatggggtgattggcctcggctcaccgccgcagaacttcacggtgatatttgacactggaagctccaacctgtgggttccttcagcaaaatgctatttttcgatagcatgctaccttcacagcaaatacaactcgaaaaagtcgagctcttacaaagcagatggagaaactttgcaaatta

SEQ ID NO: 21268 - DNA, 544 bp, Oryza sativa
  Clone ID: uC-osflM202024h09b1
tcgcttacctctcctctcccgcaacctccacctcctatccgccgccgccttcttcttcctcctcccacccgcgcaagctatccgccgccgcatcgcgtcgtcgacgaggagatggtggggccaggcctgtacccggagatcggcaagaaggccagggatctgctgtacagggactaccagaccgaccacaagttcaccctcaccacctacaccagcaatggcgtcgcaatcactgctaccagtacaaagaaggctgatctgatttttggtgagatccaatcacagataaagaacaagaacatcactgtagatgtgaaagcaaactcagactcaaatgttgttactactgtaaccgttgatgagctaacaccaggattgaagtccatcttgagctttgctgttccggatcaaagatctggaaagtttgagcttcaatactcgcatgattatgctggtgttagtgcaagtattggtttgactgccagtcctgtaggcaatctctccagtggtttttggaaccaaggctcttgctgttggtgctgat

SEQ ID NO: 21269 - DNA, 496 bp, Oryza sativa
  Clone ID: uC-osflM202024h10b1
ctcctctctcgttttctcgatctctccacaactgcccccccccctccagctctctccaaagtccaagtctctctcggtgctcacgccgccgccggccaccgccgccccccgtccgtacaccgcgtggcccgcccccgcgcaggtgagggagctagcggccttcgtctgccggcgccggaggcggagccagattgttgggaaacgagttttccgcccgcttctctggtttctcggcggtgtcttttactcctggggcggcgatcccgacgcggggatgcggcgggctgtggcgcgatgcgtggatcggagcatggacttgatcgcgtcgcacggtaggagctgcagcggtcggggtgggagcaggggtcgcgcggcggggtgcggccatgacgatttacatagcgcgggcggctcccaaggtacggaggacggtgaccaccgaaaccccggtggagctctcagctgctgcgcgagaagtggggcttgctcctccccg

SEQ ID NO: 21270 - DNA, 345 bp, Oryza sativa
  Clone ID: uC-osflM202024h11b1
ttggtatgatcttactgcagaaggtgaaaagaggagggtaacgagaactgctgccatccatagcacccccaggcggatgctgcagaggaggacagggaatctgtgttaggcgtagtaaaacacgcaggattaagaaaaagaatgaacataacgggcacaaggagtataccatggacagagaccactgctggcaacaaaagggcacaccctcgagactcgcaacgtctaccgccctaggggctatacatggagagggagcaaggtgaggacatcaagagtgcacaggcggaggccaatacgaggaagacacaaacagttaacaggaacaaaaaaaacactaagagg

SEQ ID NO: 21271 - DNA, 538 bp, Oryza sativa
  unsure (1)..(538): unsure at all n locations
  Clone ID: uC-osflM202025a01b1
ggttgatttggccttcctactatttttgattctaactattgctatgcgttaggctacggttctggggcacttctccaatgtgggaagacaggactgattacgtcggttggcaacctcgctgctcctgtggaagaatggaccgttggtggaactgcattgacatcgttgatggatgttgagaggaggcacggaaagtacaagccagtgatcaagaaggctatggtggaacttgacggggcaccgtttaagaagtttgcttcattgcgagatgagtggtccctcaagaaccattacatcagccctggtcccatccagttcagtggccctggaagcaacgatgcgaaccacaccttgatgttggaactcggcgccgaggcatagagagacacgacgataccgacgtgtaccttttaaatnttttgttcttacagttctgaaaagttgagatggaacctcgcagagtgacctgcaggctccatatttgtggagtgttcataagaagttccattgggagtttctgtggagtagagatatgtgt

SEQ ID NO: 21272 - DNA, 477 bp, Oryza sativa
  Clone ID: uC-osflM202025a02b1
ccttaatttcctccattgccttcctcgcttcgcatcgccgctcccgccgccgccgtcgggctgctcgccggcattgggtgttggttgtgaccgtatacaattattgtttttggagctgagcgatcagatgcatgagccttccttttaaatgatctgtgtccaccatggcgatgaaccaaatgcaggaacttcccgcttaatgggctggatgcgttgtatgcacgtttgcagtgacaagaagacattgaaacgttggttttttattgacaagagggttggttgagtgtctaactcttaaggaatcctatagtctacttgcttgctcttgtgttgttagtaactggtcttacaacaactctgcggagagttctgttgatggatttgaagacaagcaactctcctgttattgctgatcctctccctaaattagccttgccatctgctgtgatgacgtacactacacctacgagtttcccc

SEQ ID NO: 21273 - DNA, 463 bp, Oryza sativa
  Clone ID: uC-osflM202025a03b1
gttttccttccaggctgactgtgccgagctcatgattgactgcaccactggtggttttgaggctggtatctccaaggatggccagacccgtgagcacgctcttcttgctctcactcttgcagcgaagcagatgatctgctgctgcaacaagatggatgccaccactcccaagtactccaaggcccgttatgatgaaatcgtgaaggaagtctcatcctacctgaagaaggtcggctacaaccctgacaagattccctttgttcccatctctgggtttgagggtgacaacatgattgagaggtccaccaaccttgactggtacaagggccccaccttgcttgaggctcttgaccagatcaacgagcccaagaggccatcagacaagcccctacgtctttccctttaggacgtgtacaagaacggcggtattggtaccgtgcctgtgggtcgggttgagactggt

SEQ ID NO: 21274 - DNA, 384 bp, Oryza sativa
  Clone ID: uC-osflM202025a06b1
attttattttccctcgaagcgaagcgtcgaatcgccttctcaagatgcagatctttgtgaagaccctcaccggcaagaccatcaccctcgaggttgagtcctcggacaccattgacaatgtcaaggccaagatccaggacaaggagggcatccccccggaccagcagcgtctcatctttgctggcaagcagcttgaggatggccgcaccctggccgactacaacatccagaaggagtccaccctccaccttgtgctcaagctcaagggaggcatgcagatctttcgcaagaccttgactggcaagaccatcacccttgaggtcgagtcgtctgacaccattgacaatgttaaggccaagatccaagacaaggaggggcattccc

SEQ ID NO: 21275 - DNA, 457 bp, Oryza sativa
  Clone ID: uC-osflM202025a07b1
tctgttggtcgagctcaaacgagagagatcttttccgaatccgaggaggagaagccacagaaacgatgacctcgctgtcgtcctccgccgccgtggcgcgcgccaccttcgtcatgccgtcgtcggttcgtgggggcatgagccgcggcaggaggatggcgaggctggtgacgcgcgcggcggcgtcgagcccgaagctcccgagcgggcggcggctgcgggtggcggtggtcggaggcggacccgcgggcggcgcggcggcggaggcgctggccaagggcggcgtggagacggtgctcatcgaacggaagctggacaactgcaagccctgcggcggggccatcccgctgtgcatggtgtcggagttcgacctgccgctggaccttgtcgacaggaaggtgaggaagatgaagatgatttcgccgtccaacgtctccgtcgacatccgcggcacgct

SEQ ID NO: 21276 - DNA, 166 bp, Oryza sativa
  Clone ID: uC-osflM202025a08b1
ttgcataaaaccatcactaaaaccacgcgagggaggagagtaggagacgactccaaaatccaaatccagtggtcgccgtcgccgtggtcggtgggtgccgcgcggaaaccctagcttcccccgcgggtggaggaggaggaggaggagaggggggagatgtcttttc

SEQ ID NO: 21277 - DNA, 388 bp, Oryza sativa
  Clone ID: uC-osflM202025a09b1
tcgctttccttcctcttcctctgctcactcagctctcccccgcgcgcgccaccgtcgtcgccatgtcgggcaacatcgccttcggccgcttcgatgactccttcagcgcggcctgcctcaaggcctacgtcgccgagttcatctccaccctcgtcttcgtcttcgccggcgtcggctccgccatcgcctacaccaagttgaccggcggcgcgccgcttgacccggccgggctggtcgccgtggcggtgtgccacgggttcgggctgttcgtggcggtggccatcggcgccaacatctccggcggccacgtcaacccggccgtcaccttcggcctcgccctcggtggccagaacaccatactcaccggcgtcttctactggatccgcca

SEQ ID NO: 21278 - DNA, 315 bp, Oryza sativa
  Clone ID: uC-osflM202025a10b1
tcgggttgagcttgagcttggagagagacaacaatggcggctcaggctcttctctctgggaggcagctgctggggaggccattgcaatcttcagtctccaggtcttcttcctccaggaaggcacccttcatggtcagggcagaggccactccccctgccaagcaaggtgctgacaggcagctgtggttcgcatccaagcagtccctgagctacctggatggcacgcttccgggagacttcgggttcgacccgctggggctatcggacccggaggggaccggtgggttcatcgagccacggtggctggcctaccgc

SEQ ID NO: 21279 - DNA, 319 bp, Oryza sativa
  Clone ID: uC-osflM202025a11b1
ttcgtttattcctcgcgccccatccatccattcccctgccatgggctgctcgacctccaagctcgagccgaaggaccagctggacgcctcggcgccgtcccaccaccgccgccgcggctttgccagcgacctctttggccgcgccaccaggaagaaccaccacaatggtggcaagagcgggtgcgaaagtggcgacgccgccgtccccatggccggccggcagcatgaggaggagcagccgcggcaagggaagaagggcggccgtggcaagcgcgaggtgcaagcggggtcgccaagctttcggtactactgtgagaat

SEQ ID NO: 21280 - DNA, 416 bp, Oryza sativa
  Clone ID: uC-osflM202025b03b1
ctgcatttgcatgcacgtggcctagaagagtttgtaatgcatggctggcttcggcgacgacgaccatcctcgtggcgttgatgtcggtggtagatggcggtggagtctacggtggcgaacgggcatgtggtggcggttgcgccggtgccggctccggtggcgccgaagactatcactgcgatcctgaccaaggccggtcagtttcaccaagttcgctcagctactgcagacgacgcatgccggtgagcagatcaccaaccagatcaaggggaaggcgtcgatctccggcgggctcaccgtgtttgtgccgacggacaacgtgtttgtggcgctccccaccggtaccctcaacaagcttttcgaccagcacaagacgtcctggtgcaggttcacgtcgtgctcgcgctgctccccat

SEQ ID NO: 21281 - DNA, 427 bp, Oryza sativa
  Clone ID: uC-osflM202025b05b1
ttttatttttcttttctctttctaggatttatggcgctcaggcgaacagtgtgtccccttgttggcgacgttggatatggaagcgaggggtcagaggaggagcatgctgcccatctccgccggatctggactcccctctccggtgacctctctccccaggcggcagcgttcggatcagcccctcagcagacgtgaggcgcgagccatcggcagagggctccatggcggcggtgtcctggccttctaggggtcggcggagtggcctaggtgacggcgtatcttgtgccgctggcactcacctattcctcgccatcttcctagcctccgtcaccactgtccctccttgtcagacgaacagcttgatggtggcggcgcaagagcaagccaaggtcagtcgtttcttacaccccttgcctttgcccccact

SEQ ID NO: 21282 - DNA, 330 bp, Oryza sativa
  Clone ID: uC-osflM202025b06b1
ctgtggaatacagctttctcttttttttcccacgatgtggcgccatggcgagagatgtgtgatccttgctgtcgccgccgtggctcttgtcgcggcggcgacggcaacggcggcggcggccgttgggggtgagaggaggacgtacatcgtgcacatgtcgcggtcggcgaagccgaacgatttcgtggagcacggcgagtggtacgcggcgtcgctgcagtcggtgtccgacgcggccaccgtgctgtacacctacgacaccatcgttcatggctactcggcgcggctgacgcgcgcggaggccgaggcgctggagtcgcaacccggggt

SEQ ID NO: 21283 - DNA, 434 bp, Oryza sativa
  Clone ID: uC-osflM202025b08b1
tcgtcttcacaccactccatttctgagctcttctagtttgagtgagagagcagcagaagggagtagtgcaagatgccgatccgcaacatcgccgtggggagccaccaggaggtgtaccacccgggtgcactcaaggcggcgttggccgagttcatctccaccctcatcttcgtcttcgccggccagggctccggcatggccttcagcaagctgaccggcggcggagcgacgacccccgccgggctgatcgcggcggcggtggcccacgccttcgccctgttcgtggcggtgtccgtcggcgccaacatctccggcggccacgtgaacccggccgtgaccttcggcgccttcgtcggcggcaacatcaccctgttccgcggcctcctctactggatcgcccagctcctgggctccaccgtggcgtgctttctcct

SEQ ID NO: 21284 - DNA, 524 bp, Oryza sativa
  Clone ID: uC-osflM202025b09b1
tcggatctctaaagcctggtggagttctatgcaatcaagctgagagtatgtggctgcacacacatctaattcaagatatgctttctatctgtcgtgaaacattcaagggagctgtgcattatgcctggacaagcgttcctacctatcctagtggtgtcattggttttttgctatgtgcgaaagaaggtccagcagtgaacttcctttctcctgtgaatccaattgagaaactggaaggagctatggaagctggaagggaaatcagattttacaattcagaggttcatcgggctgcttttgttctgccaacatttgtaaggagagaactggaatcacacaatacttgtgctgaaaaggataaatcagaaaccaagccagtcgcgaaaccaaagaagatgaaaataatgccgaatagtgccattccgactgctttctagattcgggcggccatatgcgacaaccatgttcgacgtccttagctacagtatattgccaactataagaggagaatgtcgctgtaactc

SEQ ID NO: 21285 - DNA, 361 bp, Oryza sativa
  Clone ID: uC-osflM202025b12b1
tcgtgtcattggtgagatatatcatcaagaacaagatttagagaaggcttcagattacctggaaaaatcggctgatctttttgacagtgaggggcaatcatctcaatcaaacagtatcaagcagaaagttgcagaaattgctgctcagttggaacaataccagaaggcaaatgagatatttgaagcaattgctcgccaacaaatcaacaataatcttcttaagtacagtgtcagaggtattctcctcaacgcaggcatttgtcagctatgcagaggtgatgttgttgctatcacaaattcaatggagcgatatcaggatattgacccaacattttcggggacacgagaatacaagctttta

SEQ ID NO: 21286 - DNA, 410 bp, Oryza sativa
  Clone ID: uC-osflM202025c01b1
ccttgctttcgctcgggccgctttgtcatcggcgggcctcacggctacgccggcctcaccggccgtaagatcatcatcgacacctacggcggatggggcgcgcacggcggcggcgccttctccggcaaggacccgaccaaggtcgaccggagcggtgcctacatcgcctggcaggccgtcaagagcatcgtcgccagcggccttgcccgccgctgcatcgtgcaggtgtcgtacgccatcggcgtccccgagccgctctccgtgttcgtcgactcctacggcaccggcaagatccccgacaaggagatcctcaagatcgtcaaggagaacttcgattttaggcccgggatgatgaccattaacctctacctcaaaaggggcggcaaccgggttaataagaccgtggcgta

SEQ ID NO: 21287 - DNA, 537 bp, Oryza sativa
  Clone ID: uC-osflM202025c02b1
ctttcgttcaaaacccacgccctagctcgcctcgggcgccgcgcgtcgtttgatgcgatttcggcggcgatcaccaccaccaccaccaccaccacgcgctcctccggcgtagcgttcgggcgatctcgcggcggcggcggcgatggctggcgggggcagggctggcaccgagaagggggcggcggcggggcgcgggcagacggcgatccagtccaccatccagtctatcaaggaggtcgtcggcggtcactccgacgccgacatctacgccgccctccgcgagtgcaacatggaccccaacgagaccacgcagaagctcctcaaccaagatccatttcatgaagtgaaaagaaaaagggacaagaaaagagagagtgctggacagaaaactgttcctgatgcttctgcacaagctgagcacaacttacagtggacgaagccacgcacacaaagggttgagaatgaccaaagaagagcttacagccatggtcaggcatctggtcctaatccgggaattttggggtgtgagagacagca

SEQ ID NO: 21288 - DNA, 441 bp, Oryza sativa
  Clone ID: uC-osflM202025c03b1
cgcttctttcgctgtaggtgtgctcatggagaacggcggcggcgacgcgtcggcggcggcgtggcggttcggggcggcgaacccggcgatggaggcggcgaggtcgcagagcatccgcgcgctggtgtaccgggtgtacgcctgcctcgacaggggcgacgcgcggtccgtggcgccgctcggacacggcgaccccgccgcgttcgcgtgcttccgcgcggcgccggcggccacgggcgccgtcgtcgccgccgccgcctccggcgcgcacaacagctacgcgccggccgccggaatcgcggaggcgtgcagcgcggtggcggcgcacctgtcgcgggagctcccctacgccgtctcgccggcggacgtggtgctcaccgccggctgcaaccacgccgtcgagatcatgatgtccgtgctcgcgttgccgggcgccaacgt

SEQ ID NO: 21289 - DNA, 473 bp, Oryza sativa
  unsure (1)..(473): unsure at all n locations
  Clone ID: uC-osflM202025c04b1
gtgctctttatggttccttactgggggattatccctttttcacatcagtgccttcggggagagttggctcttgccatgaagctgtattcagatcaaatgaagagttcaagaaggccatctcattgagagagttggaagatgtcgcatctcttgaggacaagttgggaaggggacttacaaaggaggagaaaaacagaataggagtgagtaacttgagactatttttggaagaattgctgaggaagaggtacattgagagtgttccattaattattccacttcttgagaaggaacatcgtggtgcaacaaggaagctgcgtgaagtcaatcaagaaatcagtgatttggatgaagcaaaaatgaaggagaaagctcgcctgttccatgattcattcttgtcgaagttatctttgctattgaaaggcatggtggtggcaccgnctgatagatttggagaaactttaattaacgag

SEQ ID NO: 21290 - DNA, 402 bp, Oryza sativa
  Clone ID: uC-osflM202025c05b1
tttcctttttctcctcttcctcccccccccgcggcgcggccttctcctccgcggaggccactccacccagtccccctcccccccgcccttcgccgccgccttctccggcgaaccggtggccacgcgcgcttcccaacgtaccgtggcggtccggccgtcacccatttgagttgggagcacggtggcaatggggattgcggaggtggccctccacagtatgccgggggcattcgccgcccactccccggcatccaatttgcccctcgcggacgacgccgcgaggggcaggaggaggagggagcgccattcgttgcacaacttccgggcgcttcaaggtccgggcaggtttccggggctgcgggccgcctggagtgccagtgccagcgcatcgatgaccttgcg

SEQ ID NO: 21291 - DNA, 360 bp, Oryza sativa
  Clone ID: uC-osflM202025c06b1
cgtttcaatcccgccgtttccaagcttgctctcctctcccccccaatccttccctcccgagtggcagggtgctcgacgggatggcgcagaaggaggccaatggcagcagcaacggggagcacaccacccgcccgccgccgacgccctcgccgctccggttctccaagttcttccaggcgaacctgaggatcctcgtcaccggcggagctggcttcatcggctcgcacctcgtcgacaagctcatggagaacgagaagcacgaggtcattgtcgcagacaactttttcactggttcaaaagacaacctgaagaagtggatcggacacccaagatttgagctaatcccgcatgatgtcaccc

SEQ ID NO: 21292 - DNA, 458 bp, Oryza sativa
  unsure (1)..(458): unsure at all n locations
  Clone ID: uC-osflM202025c07b1
tttctcaccatgggcaccctcccaccattcccgcccctcctcctcctcgtcgccgtcatcttctccttcctctcctcgtcgtgctttgctgtgaccagccatgaggcggcggccatcgcgcggcgccagctgctcaacttcgagaagcacggcgaccacgtccacatcgatatcgacatcgagatcaaggtgagcaacccgcggctggcggcggcgcacagggcgctgcacgcgctgaagcgggcgctctactccgaccccggcaacttcaccggcgactgggccggccccgacgtgtgcgcctacaacggcgtgctctgcgcgccgtcgccggacaacgcgtcggcgagcgccgtcgcgtcgctggacatgaacgccgccgacgtcgcgggctacctgcccagggagatcggcctnctgtccgacctcgccgtgctccacctcaacttcaaccgttt

SEQ ID NO: 21293 - DNA, 441 bp, Oryza sativa
  Clone ID: uC-osflM202025c10b1
tcggtttgagtgccctgtggggaaagctggcagccgagattttgatgcagaactgggatgttgcactggatgagctcaaccgtttgaaggagattattgattcaaagaacttctcatcaccactaaatcagctccagaataggatatggctgatgcattggagtatttttatcttctttaaccatgaaaacggcagaaatgggatcatcgatctgttcttccaggataggtacttgaacgcaatccagacaaatgcaccccatcttctgagataccttgctacagcagttgtcgtgaacaaaaggagaaggaacatgcttaaagagttgattaaagtcattcagcaagagcagcacagctacaaggatcccatcactgaattcttggaatgcttgtatgttaactatgattttgatggtgcacaacagaaactcatagagt

SEQ ID NO: 21294 - DNA, 293 bp, Oryza sativa
  Clone ID: uC-osflM202025c12b1
ctttcgcgtccgcccacgcgtccggagcgcggcgcgagcaagaggagcgcgcaccccggcgacatcagagctcgtcgacgccggggactctgcgcggcggctagggagttcgcccgccggagcaagggctgggcgggacaaagagaagaaatctgcagcgaacccatggcgattctgcccctctcgatttcccactctcttacctccgccttgtccgccacctcctccggcatcggcaggccagttgcccgcctcctccacccgcgggtcccctcccgttccaccgtcatctg

SEQ ID NO: 21295 - DNA, 517 bp, Oryza sativa
  Clone ID: uC-osflM202025d01b1
gtttcctttcttcctctctaccctataccctagttcgacgccgccgtcgcctcggcatagactcccctccccgtctcttcttcgcgagctcgccccgccttctgcgccgagcaccgcctatcttcgccggcgtcctcccgctgcatcagaggtctatctggtggtcgcttgaatcgggaggtttttgttggattggattggattcggagagatggaggatgtggagaacaagctaaaggactatgagattgtgagggaaggcgaggcggagatcatcatcaacaagaaaatagcagcaaatgaagtgttctacaatcccgtgcaggtccacaatagagatatgtcagttgctcttttaaggactttcattgccaagcgtgaggaagaacataaggcaatgatggataagagggacaaggcgcataacaaagtgagccagaagaaatcatctggtccaaatggagagaatgggtcaacaggacagcatgatgaaatggatgttgatgctgaaaggaaa

SEQ ID NO: 21296 - DNA, 503 bp, Oryza sativa
  unsure (1)..(503): unsure at all n locations
  Clone ID: uC-osflM202025d02b1
atcgaatcctctcttctcctcgtgcccaccaccaccaccgtagcaatggcgggcaacgggccgatcaacaaggaggacccgctcaactggggcgcggcggcggccgagatggccggcagccacctcgacgaggtgaagcgcatggtggcgcagttccgcgagccgctggtcaagatccagggcgccaccctccgcgtcggccaggtggccgccgtcgcccaggccaaggacgccgccggcgtcgccgtcgagctcgacgaggaggcccgcccccgcgtcaaggccagcagcgagtggatcctcaactgcatcgcccacggcggcgacatctacggcgtcaccaccggcttcggcgggaccttccaccgncgcaccaaggacggncccgccctccaagtcgagctcctcaggcatctcaacgccggaatcttcggcactggcttcgatggccacacgctgccgtcggagacgggtgcggcgggcatgctcgtgcgcatcaacac

SEQ ID NO: 21297 - DNA, 429 bp, Oryza sativa
  Clone ID: uC-osflM202025d05b1
ctttctctcccccccggttgctgctgctgcagctgagcctccgttcttggaagcgagagagagggagggaggagggaggcaattggtgaggcttttggaggaggaaagggaagcttcgggccccagcatcctcctcctcctcttgctcactcaccacgctctcctctcaccaaactctctcttatctccttccaagatcccaaccccttttcttctttttttttgattgttcttgttaggatcattttcttgatctttcaagctcagctccagcactccccccgttcgtttccagctgcagcagagatcttggttagctggatttttagcttcccgtgtttttgagcgagttcttggtttattgctccaatccgagaaaaatcacccagtgtcctttgctttccttccttcccccttgttttctgggct

SEQ ID NO: 21298 - DNA, 451 bp, Oryza sativa
  Clone ID: uC-osflM202025d07b1
tcgctttgtacgcgatgacagggcagcttagcacgaagagcgatgtctatagcttcggagtcgtgttgctggagcttttaactggtcgcaaaccggtcgatcatacgctgccccgtggccagcagagtcttgtgacatgggctactccaaggctaagtgaagacaaggtgaagcaatgcgtggatccaaggcttgaaggggattatcctcccaaggctgttgccaagatggctgccgtagctgcgctgtgcgtgcagtacgaggcggacttcaggcccaacatgagcatcgtcgtcaaggctctgaacccactcctcaacagccgcccgaacaatcgccccgcctccttcaccgacgccggcgagcgatcccgattatgagcacgccatgaccatttttctcatcggactccggtgacaccacgacgacgggagggaaggcttcggtttca

SEQ ID NO: 21299 - DNA, 320 bp, Oryza sativa
  Clone ID: uC-osflM202025d10b1
tcggttttccacgcggtgatcgtgcatgccaccacgcgtctggtggacacgcggtccaccggccggcatctgctggggcgggggatgatcacggagcgctcggggagcgttggcactagcggcctgtagccactcaagtggagggcgcggccggcgatgcaacatccggagtacccggacgcggaggttctagagggctcgaagtgcgagctgtcatcattaccgtcgatggtgttcgccagcgtggcgctgtagctggcagagcgtgtcgtggacaccgccatggggcgtgccttactactgccaggctgcgactgcgc

SEQ ID NO: 21300 - DNA, 352 bp, Oryza sativa
  Clone ID: uC-osflM202025d11b1
tcgcttatcccttcccgaaaatatctcgccgtcgttgcgcgcggtagctagctagctagctgcgccatcgacgacgaagtctcatccatggaggcggcggctgcgctgacgacgacgaccggcgcccagtacagctgctgcttcggtctcgcgcatggcggcgccgcacaacggaggaggaggacggcggcgggtttcggggcggcgaggtggtcggggcgggcggctgcgggcgctgccgccgcaggtgagcgagttcctcagccccgagcagctggtccccggctcgccggacgacaccggcgacgtcttcctccttatcccaatcagggctctgatgctggtcttctac

SEQ ID NO: 21301 - DNA, 463 bp, Oryza sativa
  unsure (1)..(463): unsure at all n locations
  Clone ID: uC-osflM202025d12b1
ctcttgttcctcggagccagttccctgttatgggttcagtgtccaagaggtggatgtcattcctcgagagtaaggaattcattgctgtaaggaaagaggttgggaagcttgaggagtgggtgtatgtcctgactgctgatgctggatcaaaggggtcccattgggaagttttagggtgttcagggcaaaagcacagccctcttccacccatgcctgggccaaccaaagatggttttggtgtnggttgttctagatggaaagcttttcgttattgctggctatgctgctgatcatgggaaggagtgtgtttctgatgaggtttaccgatacgattcttgcctaaacaggtgggttgagctttctaagatgaatgtggctcgttgtgactttgcttgtgcagaggtcaacggtatgatatatgttgctggtggttttggtcccaatggtgatagtttatctagtg

SEQ ID NO: 21302 - DNA, 491 bp, Oryza sativa
  Clone ID: uC-osflM202025e04b1
catggttgtttttttcttctcatcgaaacaacttttccttttcttccgtgttattgcactgaaatagttgtcatctatataatttagggaagtaagagatctgaacaactggtggagcaagaaaagagtgatgttataagtccagtcgatgccatccgtaagattcctgtgccctttctgttctactacctccccacgtcttcttaaggcttattttgatttgaaaaagtattcaacaataagcacctgcataatatcagtgtgagaactctttgaaatataaatctattggtatgttttatgcactaaatgtaattgtagtttgaccaagttttgggttaaaatctacaaaaaaattacctttagaaatcaaaatgcaccttaatcgtcacagcagcacaagtttgtagtttcatgtggcagttggatgagcttttggcttaatgctcttacaactttaaaatcacaggtcctgctgatgatgtggagct

SEQ ID NO: 21303 - DNA, 447 bp, Oryza sativa
  Clone ID: uC-osflM202025e05b1
ctttgttttgtacattaaacccatatgttggtcagcaatatgttccaatttatggagtttcatccgcagcaaatactgctagccaaccatttagccagttcagcccgtccatttctggtgggggtaatggttatgtggctattcatggttacaatgtgccaggaaatccatttgtacagttaactggatcaaactttagcagtgcatcgcctacacctcggcccaccattcaggccccctttttagttgcaccggttcctactcacccgcacttggtcctcccagctcactcacctcagtttacacaggctagtggttcagaccaaagagcaagctgaactatgctgccaaacatttgtaccttgaggtacccttagattgcagcaagacaaaagagcagtgctgcttgattttgagtactggttcttacctggcaaagtatccccc

SEQ ID NO: 21304 - DNA, 387 bp, Oryza sativa
  Clone ID: uC-osflM202025e06b1
ctttacttttcagcagcggcaaagcagccagcgagagatcgaggcaaggcaaccgccatggccaccgtcagcgccgccgcggcgacctccgtcgttgcccgcgccgtcctcgccgggccacttgggctgccgcagatgagggcgaggaggagcgagagggtgaggtgcaactactccaaggaggcggcgacaccggcggcggccgtcaagggagccggcgcgtcgctactggcgatggcggcgacggcggcgcccgcgatggcgctcgtcgacgagaggatgtcgacggagggcaccgggctcagcctcgggctgagcaacaacctgctggggtggatcctgctcggggtgttcggcctcatctggtcgctctacaccatctacacc

SEQ ID NO: 21305 - DNA, 418 bp, Oryza sativa
  Clone ID: uC-osflM202025e12b1
tcggtgttgcgacttcacccgcggcaacggcacgggaggggagtcgatctacggcgagaagttcgccgacgaggtgttcaagttcaagcacgacagccccggcatcctgtccatggcgaacgccgggcccaacactaacgggtcccagttcttcatctgcaccgtgccctgcagctggctggacgggaagcacgtcgtgttcggccgcgtcgtcgagggcatggacgtcgtcaaggccatcgagaaggtgggatcccgcggcgggagcaccgccaagccggtcgtcatcgccgactgcggccagctctcctagatctgtgctgttccccttcgcctttcgccagtatcagtcgtcttgagtcgtcgagtccctaaataaggaggaggtggtggtggtagtaagtctttttatgaagtt

SEQ ID NO: 21306 - DNA, 476 bp, Oryza sativa
  Clone ID: uC-osflM202025f01b1
ccaagcgcccttcaaacccatctcctctcccctctccctcccaattcgatgcagccgcggtagcaattcgcatcgccccgccctcctcgccgcgcggattcgctcgccgcccccgccaccgcacccccatggacgcctccgccggatccggcaatgcctccggtggcgccggcgccggcgcgtccgcgtgctgctactactccctgctcggcatccggaagaacgcgttcgccaccgacgtgcgcgccgcctaccggaggctcgccatgaagtggcacccggaccggtgcgtgagcgaccccggcgaggccaatcggcggttccagcggatccaagaagcgtactccgttctgtccgacaaggggaagcgagccatgtacgacgccgggctgttcgatcccctcgacgacgacgaccaggatttcttcgatttcatgcaggagatgctggtgatgatggataacgtgaaaaacgag

SEQ ID NO: 21307 - DNA, 454 bp, Oryza sativa
  Clone ID: uC-osflM202025f02b1
gtgccgttccctctcctctctgtcgcctcgccaccaccatagctaatcctcctcctccgtttattttacttttctcccctcttcgcctctcctcgctgctgttatatccgctttcctctccccctcctatcccccctctcctcctgctcctcggcctcctcccctggatgccagccgcggcctgaccctcaccgctggggagcccccctcccattcttcgcttcccccgcggttgcgttcccggagcggcgttccagcggccacagcagctttccctcattgtacacatgatgggttgcttcactgtcctgagatccaagaagaagaagcctcttgctctcaccaagaaatcggttgatgcaagggaaagcacgttctcaagactcccagagccagaagcgcatgtgccatcgttacaatctgctcctcctagttttaggaacaaggctaaaat

SEQ ID NO: 21308 - DNA, 483 bp, Oryza sativa
  Clone ID: uC-osflM202025f07b1
tcgcttcgatctggactcgactcgacggtcgacgccaccccccaccggccggccccgtctcgccgtcgccgccgtcgtctccgccacccaaaaccctagccctgcagcctcccctccgcagctcgccccctctcctcgccatggccaccaacggcagctccccgagggcgagggagactgagagcagcctggagaaggtgaagcggcagctctcgtcggggtccgggcggtacctgctgcaggggccactgctgaagcgatctgagacgttgaggaaatggaatgagagatgggtaattttagaccctacttcaggaaagatggaatacaaaattcggagaaatgaaactgccattaaaggaaccattatatttgatgcttcaagcactattaccttgtcccctgtaaatttccaagggatgccaaagtatgaaggctgctgtttctacattgggactccttcaaaaaaggataactttcttt

SEQ ID NO: 21309 - DNA, 437 bp, Oryza sativa
  Clone ID: uC-osflM202025f11b1
ttcgcttttcaagaaaggatccaacccacctaggaggactaacctgaacgtgctaatgagttcaaagctagtaacatcacctctgaaatccatggagcagggccatctagagcaacctctgcgcgatccgcaggcgccggcggagcagcatgacatggggttatctcccctgacgctcctcggcttcgccttcctgaccttcaactcgggaatggcagtgtacagatcagatagagacttggcaaccatcttcttcgtggtcttctcctacgttgacctcgtatcgctcttctacttcctccgattatttgagaagacgccgtcggagtcgcctcgccgtcaccacattaagacggcggtgtggctcctgacgactattctcacccgcgtgttttcatataaagtggcggccattatgccttttccggttcaagtgc

SEQ ID NO: 21310 - DNA, 440 bp, Oryza sativa
  Clone ID: uC-osflM202025f12b1
tcggattaagaagtttactccccagagaggggggagatttgagattgtttttgtttcaccaactggagaagagattaagaacaagagacagctgagccagtatctgaaggcacaccctggaggccctgcatcctcagagtttgattggggaactggtgatactccaaggcgctctgctcgcattagcgagaaagttaaggctttcgatagcccagaaggggagaagatcccgaaacgttctaggaactcatctggcagaaagggcaagcaggagaaaaaggaggccaccgaaaatgaagaagcgaaagacgctgaagctgacaaggaggcccctagcgaagatgctccaaaggagactgatgtagagacaaagcctgctgaagaggcgaaagaggcccctagcgaagatgcttcaaagacaccgatgtggagatgaaaac

SEQ ID NO: 21311 - DNA, 444 bp, Oryza sativa
  Clone ID: uC-osflM202025g01b1
gattccgttttctgtcctctggggctacttcgccttcatggccattgagagcttgcctggtaaccagttctgggagaggatcttgctgctcttcactgctcccagcagaagatacaaggtgttagaagagtaccacaccacgtttgtcgagaccgtgccattcaagacgatagccatgttcacactcttccagacaatgtatctactcgtctgcttcgggatcacatggatcccgattgctggggttcttttccccctcatgatcatgctgctggttccagtcaggcagtacatcctcccaaagctcttcaaaggtgcacatctgactgatctggatgcagcagagtatgaggagtcaccagctataccgttcattgccgcgcaagatattgatgttgcattggcgcgcacccagagtgcagaaatccttgatgacattgtcac

SEQ ID NO: 21312 - DNA, 447 bp, Oryza sativa
  Clone ID: uC-osflM202025g02b1
attttcttttgccctaatcatcatcgtcttcctcctcttggatcttctcctctgccatggcgggcaacagaggaggcgatgccggggaaggggagtggctcaaggtcgccgagctcagggccacggtggaagcccaggacccccatgccaaggaagtggacaacctgacgctgaggaggttcctgcgggcgcgagaccacaacgtggagaaggcgtcggcgatgctgctcaaggcgctccggtggaggagggaggcggtgcccggcggctcggtgccagaggagaaggtgcaaagcgacctcgacgacgacaaggtctacatgggcggcgccgatcggaccggccgccccatccttctcgcctttcccgcaagcactttttcgccaacgcgacatgcctaaggtcaagaggtattgtgtctacttacttgacagcatctgtgcaagg

SEQ ID NO: 21313 - DNA, 474 bp, Oryza sativa
  Clone ID: uC-osflM202025g03b1
ggttaggttttctccgacctcgaagagctccaggtcgtccgcgtccagggcaccgacagggccgggaggcgcatcgtccgcgtcgtcggcaggttcttccctgctcctgtcataggtggtgatcgtctgaagaagtatgttcttcacaagctgcgcaccgaattgccagaggggccattctgccttttgtacatgcacagcactgtgcagtcagatgataacaaccctggtatgtcaatcttgaggggggtctatgaagatcttccacctgaatacaaggagagactgcagatcttatacttcttgcatcctgggcttcgctctaggttggccatcgccacgcttggcaggctctttttaagtggaggtttgtattggaaaatcaagtatgttagtcggctggagtatctttggggggacattagaaagggggaagttgaaattccagatttcgtgattgatcatgataagatt

SEQ ID NO: 21314 - DNA, 435 bp, Oryza sativa
  unsure (1)..(435): unsure at all n locations
  Clone ID: uC-osflM202025g09b1
tcgctttcttctcctccggctcttcttcagtatcgaatcctctcttctcctcgtgcccaccaccaccaccgtagcaatggcgggcaacgggccgatcaacaaggaggacccgctcaactggggcgcggcggcggccgagatggccggcagccacctcgacgaggtgaagcgcatggtggcgcagttccgcgagccgctggtcaagatccagggcgccaccctccgcgtcggccaggtggccgccgtcgcccaggccaaggacgccgccggcgtcgccgtcgagctcgacgaggaggcccgcccccgcgtcaaggccagcagcgagtggatcctcaactgcatcgcccacggcggcgacatctacggcgtcaccaccggcttcggcggcacctnccaccgtcgcaccaaggacggccccgcccttcaagtcgagct

SEQ ID NO: 21315 - DNA, 447 bp, Oryza sativa
  Clone ID: uC-osflM202025g11b1
tcgctttcatccttctcttccattcccagctccctccacagctttcttcacctgtgataccttcaagtagcacaaaacaacaaaaaggaagcagagctagcttaaattttccaaaatcactaggaaaagagcttctttggtccctaggttgctggcattttggtgcctacttttttgctcgctgttgccgccttctctaatcccaagaggggagaaatggagtagaaggctaaaataattcagatgcagctttgctcatggcttcctcaggcagttagggcctaggggtggagaagcctgaagctttgcctgattgcctccccaatcttcttgcctcctctcctttcacttcttctctcctcttcgctgtggtttcttgctggttcttggaggcctccacttggttaaatgatgggtgtaggtggtggtcttggtatggaagctact

SEQ ID NO: 21316 - DNA, 484 bp, Oryza sativa
  Clone ID: uC-osflM202025g12b1
ttggtttatagtcctgctactaatagatctgctactctagattttctgatcatcaacatgctgcgtgcttttgtggagtatgagacccttgaagatgctgagaaagcgattctggagcttaatgatgagaagaactggagaaatgggcttagagttaggttattgaatacttgcatgacaaagggggcaggcaaagggaaaaagggagtgcatgaagctgatggaaatggcgaggaggatgtctccacttcaaaccaatcaaatgagaagcaactcgaagaaccctctcaattgtcagatatgttgccagatcacttgtttgatgacagttccaatgataaggaaggttcaagacgtggcaaaggatgtggacgtggtggcagagggcgagggcgtggctaccattcagcattacaacaacccatttcaacaaccagaactaccacaacgggtaacaccacatttaccatgccaacaaccacca

SEQ ID NO: 21317 - DNA, 445 bp, Oryza sativa
  Clone ID: uC-osflM202025h02b1
ccttgttttatcttgagcctgtcaggccttacgagtccagttgagtcagtgagctttgactcatctgaagctatgataggtgctggagcatcaagtgggacaataaagatatgggatgtagatgaagcaaaagtcgttcgtacttttactggacatagatcgagttgtgcgtcccttgatttccatccttttggagaattcttcgcttctgggtcttcagacactaacatgaaaatatgggatatgcggaaaaagggatgcattcacacatataaaggtcacacacggcggattgatgtgcttagattcactcctgatggccggtggattgtctctggtggatctgataactcttgaaagatctgggatttgacagctggaaagctcttgcatgactttaagaatcatgaaggcccaattaactgcttagattttcacccccatg

SEQ ID NO: 21318 - DNA, 457 bp, Oryza sativa
  Clone ID: uC-osflM202025h03b1
gttgttacttacgcatattttgccgttagttaattattatccggtaaagaagattagtagtaatccaaaattttcccaaccccaacctcggaacaaaaaccgcgtagtatttgtcgtaaccaggagcatccgagtcattaatttacacccaaacacaaaaaattagcagcacgcagccgccttcccaatcctctcctcttctccaagcggcaattcgcgcgaggttttctccgatcaaaccctcgaatccccccctcgcgaatccatcggagggtagccccgcgatccgcgtcggcgagagcggattccgattccgcgatggagcgggtgttctccgtggaggagatctccgacccattctgggtcccgcctccgccgccggagtcggcggcggcggcccagcagcagggcggcggcggcgtggctttcggaggtggtggtggtgtaccggggggcg

SEQ ID NO: 21319 - DNA, 243 bp, Oryza sativa
  Clone ID: uC-osflM202025h04b1
gttttgttttggttgtaagctgacacccggggaccgacccctgatgcgccggcgcgctgagcgggcacctactgctcctgaccgggggtcgctgccttgcttccgcgatctgccatgggggacgacttatgccggctggggaccagccgtggtctctcttccccgaccttccatgcaccggtggcacctgcacttactcgatggtggggctcatcgaccacgacgacaccgcgacacggctga

SEQ ID NO: 21320 - DNA, 461 bp, Oryza sativa
  Clone ID: uC-osflM202025h05b1
actttgttttcagagtcggaggaaattctaaagagacattaagggagttgggcggtcttgatagtatttttgacgttatgatggattgccattcaacattggagaatctcataaaggatacctcaacttcagctttggacctaaatgaaggaacatctttgcaaagtgccgctctcctcttgaaatgtttgaaaatattggaaaatgccacatttctaagcgatgataacaagacccatttgcttaatatgagtagaaaattgtacccgaaacgctcctcgctttcttttgttggtgtcattatcagtattattgagttattatcagctcttttaatactgcaaaatttttctgttgtttccagctctacatatccgaaatcgtctaaagtctctcagcagagttgctcttatgtcatggggggaacttcatttaatgatggaaagcgcaagaacttgaag

SEQ ID NO: 21321 - DNA, 399 bp, Oryza sativa
  Clone ID: uC-osflM202025h10b1
tttgtacttacccacaagttaggtgcatgccatggcaccattcatggcgtgcgcctcgccaccggtactcacgctggccctgctcgcgtcgtgcggtgcccttctcgccacctccatgctcccggcgcgtgcgacggcgggcagttgcttggacgtcggcgacatggtgatgatggacaggttccgcgcttggcagggagctcacaaccggtcgtacccgagcgcagaagaggcgctgcagcggttcgatgtgtaccgccgcaacgcggagttcattgacgccgtcaacctgcgcggcgacctcacttaccagctcgccgagaacgagttcgcagacctcaccggggaggagttcctggccacgtacaccgggtactacgccggcgaaggccccgtgga

SEQ ID NO: 21322 - DNA, 302 bp, Oryza sativa
  Clone ID: uC-osflM202025h11b1
tcggttttgtcgatttctttgcacaccacccagagagcctgcacatggtttgcttgctctttgacgacgtaggcatcccactcaactacagaccacatggagtgactatggtgcgaacacactacactactagtcaataaaggattcgaaagtcctcactcttgccaatattccacatggaagctctaccctgtggtcgtcagaattgcctgtatggatgaatgaacgctatagaactgtatggacgggcaaccttgccaccagcccatcgccacagataggatctttgatctgaatttcta

SEQ ID NO: 21323 - DNA, 483 bp, Oryza sativa
  Clone ID: uC-osflM202026a01b1
gttttattggccgtaggtcttgcttctattggggggggagttggtcaaggtactgctgcaggacaagctgtagaaggtattgcgagacagccagaagcagaaggtaaaatacgcggtactttattgcttagtctagcttttatggaagctttaacaatttatggactagttgtggcactggcgcttttatttgcgaacccttttgtttaatcctaaaaaagaaaacgagtgctttagatcagatactttgttgtttttttagtaaattggtatttgcttctgcaattccaattatatcaatactttactcctaatttattactcctagagttctctatttatggggacagacaataccccaccccaggaatagctgatttgaggatgatcaatttagaggatatgctcggccgtcttgcttaccgacctttgattagggcagaggaaaggattttttcttttattttaggaattttgggaaca

SEQ ID NO: 21324 - DNA, 527 bp, Oryza sativa
  Clone ID: uC-osflM202026a02b1
cggtttcgtgggaacgaagcgaggtcacggatgcgggcgatgccaccgccgtcttcttgtccctagatccatcaagtgaccagttctctgatcagtgagaataatggccgctgctgaagcaagggctgcttggcagcgtgctgcaaaccgttgcatcgttcaggaggatagaaaaagagcaccaaaactagcctgctgtccaccatcatcagaacagcagcatgccaaaagcaatggaaattgtaggaattctgaagaccgccctgtgcccaatttcatgccattgagctggaatcccatgaactccagtctgccacctgatattagatggtggcttcagttacaaccaaatttaggagggcagaagaatcttgcaggtgagcacctatattttctgggaagagagatcagtgataaggaagtggaggattcagcacataagaatatacacgacgaaccattattttgtgaaatgttcgacaccaatcctgagaagattgaggatgtttatgagccttcatggatgg

SEQ ID NO: 21325 - DNA, 541 bp, Oryza sativa
  unsure (1)..(541): unsure at all n locations
  Clone ID: uC-osflM202026a03b1
gctgtgcgcaccatggcggccaccgcgctccacctcccgccactcctcctcgcgcgccgcctccgcttctcctccgccgccgcttccacgtctacctcgcgcaggaccacgcgcctctccgcgcagctcgacgacaccgccgctgcttccacctccacctccacctctgataagcccgccgccgcctcctccttcgcgccgcctcccgacttcaagcctccggagcccaagaccttcgaggtgaagcccggccagtccgacgacatcgtcaccgcctccctcgccattcccttccgcctcggcaccggcgtcttcgcccttggatattcggtatcgctggtttctcctgacgaggtggcaccagatgaatatgctttggatttccaaggtcggaaggttaaggagtcatcaaagatagggcagtgtcctcgaccagaaaagcctatcgagatttacgagtttgaaggctgcccattctgccgaaaggtcagagagatggtggccgtctggcnacctgatgttttgtttacccctgccctaa

SEQ ID NO: 21326 - DNA, 474 bp, Oryza sativa
  Clone ID: uC-osflM202026a05b1
cttttgaaggagaacaaggagaggagcagtgcgggcgtcttcggtggcagcggcggcgagcacattcctggggacgaggctggcggacccggcgccgcatagcgggaggatcgtggccaggttcgggttcggtggcgggaagaaggcggcggctaagaaggcggctagggcgtcggcgccgacgacggacaggccgctgtggttccccggcgcggtggcgccggactacctggacgggtcgctcgtcggcgactacagcttcgacccgttcgggctagggaagccagcggagtacctgcagttcgagctggactcgctggaccagaacctggccatgaacaacgccggcgagatcatcggcacccggatcgagaccggcgaggtgaagtccaccccgttccagccctacaccgaggtgttcggactgcatcgcttgcgcgagtgcgagctcatccacggtcgctgggccatgct

SEQ ID NO: 21327 - DNA, 512 bp, Oryza sativa
  Clone ID: uC-osflM202026a06b1
ttttatctatgatggcaggtactggaccatgtgggggctgcctatgttcggatgcactgatgccacccaggtgctcaaggagctcgaggaggccaagaaggcatatccagatgcatttgttcgcatcatcggcttcgacaacgtcaggcaggtgcagttgattagcttcatcgcctacaagcccccgggttgcgaggagtccggcggaaactaagctagttggcaagccagcaagctcactcgtgagctctatacagaggagactcgattgatctattccgttttggcagctttgaacgttcgaatcgggccaccttgcattggattcccctttcccagtttgttgcttcagttttttttttcatcttggttgtgtcaacatcagctgtgtatgtatgtacatatgtatgtatcaacataggttgaagagcatgcatatgtgaatgctagcaccaggctaatcatatgcacatacacatcgtaataaaaaaaaaaaaaaaaaaaacgggcgg

SEQ ID NO: 21328 - DNA, 539 bp, Oryza sativa
  Clone ID: uC-osflM202026a08b1
tttcacgcgctgccacgccggcgacacgaccactgcctccccccgcgcgggcgcgccaagcgccgggatcccgctgctgcgttccagttcgcggccggggcgtagtaaccacagcagtgcaatacaccttaaaatggggtctacacgatcaaagaatgaagatgacaaggccattgtcttatgccacgaaagaaaacgatatgttagagaagcacttgatggaagatgtgcattcgcagctgctcacttcgcttatattcaatcactgagacacacaggatttgctctgagaaaatttttggagcctgaagtgccaacagattcttcgctgtacacatcgacatctgcaacaccagaacctcctactattcggcagaaatcgaggaacttatctccatctatttcacatcaggccagtgactctttctccccagttccatcccctttatcttccggacggttccgtatcaatcatatgaaatctggggggaaccctgtcatgaccattgaggagaaggtgcctgttcctgtaacagcaa

SEQ ID NO: 21329 - DNA, 238 bp, Oryza sativa
  Clone ID: uC-osflM202026a09b1
gtctcgacggcgccagcgcgaaccccggcgacccgccctcgccggcctcggcgaggtcggggcagcggaagcacgtccccgactggctcaacagcccgatctggtccgcgcctccccctcccgcgcgccaccgcgccccgtcccctcctcgcccgcccctgcttcccagttcgttcacgcatggcctacatcacactgagccgcccgacacgagctgaccaggccgaggctattacca

SEQ ID NO: 21330 - DNA, 457 bp, Oryza sativa
  Clone ID: uC-osflM202026a10b1
tttttcacaactccggccggccactacgactgggggagttcgtacactgcagagggaagctcaagatggccgcaacagcgggcaggaccgcgggcgcattggccgtcctgcagctcgcctccatcgtcgccgctgccgtcctcctctcctccccacctgcggctgctgctgagccgtctgtggacttcattgacgtggtggcgtgctcgcagtcgcaggtggactccatcgtgcgctcagccgtgcaggcggcgctccagcgtgagatcgccctcgccgccggcctcatccgtatcttcttccacgactgcttcccgcagggctgtgacgcgtcggtttacttgagtggcgccaactcggagcaggggaatgccgccaacgccaactcgctgcagcccggggcgctgcagctggtggaggacatttcgcccaaggtgcacgccgcatgcgggcccac

SEQ ID NO: 21331 - DNA, 523 bp, Oryza sativa
  Clone ID: uC-osflM202026a12b1
tttttaaaaaaaagaggccaacgccaacccacgcgtcccctcccctccccttcctccgcccacgagtccacgaccaatccggcaatcgagttaaaaatggcatcagctgttaccatcagttcggttggcgctcaggctggcatgatctcaaagccaaggaatcatggcttcacaagctacagtggcctgaaggcagcatcatccgttagctttgaatcagggtcgtcattcctgggtaggaatgcatctctccgggcatctgttgctccaaggattgtaccaaaggcgaagtctggttctcaaatttctcctgaggcttcgtacaaagtggcagtgctcggtgctgctggtggtattggccaaccattgggccttttgattaagatgtctcctctggtctcagagctgcatctgtatgatattgcaaatgttaagggaggtgctgctgatcttaaccactgcaacacaccttctcaagttctggacttcactgggcccctcggactagccaactgcttgaaag

SEQ ID NO: 21332 - DNA, 537 bp, Oryza sativa
  Clone ID: uC-osflM202026b01b1
atcgttccctgagctagagctgtccctgccaaaggcaaataataccagatgaacacggcagcctctcgatctcgacaactcggggcggaataattctggtgttcttctcatcaccgatcgtttctgtacatgtaacaagttgaggatcgtggcgcctgcatgcatttggtggacgccacgtcaagaataaccgaggttacaggtgtctccccctgcatgcagcagggggcatctgcagcttgcggaactcggatggtttgagtttgaacgagttgcagcatgtcccccatggagtcccgtcctgatgatcttgttcctcccgcgatgcacaagccggcgatccaatgcgccgccgccgaggacgcgagcctgctgcgaagcccgacggtgtcgtcggaggagttcatgcagttcaagaggaaagccacgacgatcttggaggagtacttctccacggacgacgttgcggcgacggcgaacgagctgagggagctgcgcgtgccgtgctaccactactactttgtcaagaagctggtc

SEQ ID NO: 21333 - DNA, 499 bp, Oryza sativa
  Clone ID: uC-osflM202026b02b1
gcggaacttatggttttactcattcatcatgtcacacatgcacgtcgccggcctgcattcgcgccgccccccggactctctcttggtgattgattgattatcgttttgacggttttgctgttggtgatggttgtcgcgaggatggcggcgcgcgagcgcagcgtggccggacccggtgccatcagaggagcccgcgtaggcgtcggcgtacaccgtcgtcgtcacggaggacaagcccgatccgccgtcggcggaggagaagagcgaggaggtcgtggtggtctctaatggcggctctatggacacagcggaagagcgcccgtgtagacggaggcagccgaggaggacagtggcttgtacgacatcctgagcaagctggacatccatgtgacaccaactcttgtcctctatggataccgtgctgtgggtgtcctatgggacatatcttcggttgcatatgcagacgattacattgccttgcatatgtgatctgacattt

SEQ ID NO: 21334 - DNA, 536 bp, Oryza sativa
  unsure (1)..(536): unsure at all n locations
  Clone ID: uC-osflM202026b03b1
caccctagcagcagcagcagcagcagctgagcttgaagcagcagagcgaggtagacatggccgccgccaccatggccctctcgtccccggcgctggccggcaaggccgccgcgaaggtgttcggcgaggggcgcatcaccatgcgcaagtcggcggcgaagcccaagcccgccgcgtcggggagcccgtggtacggcgccgaccgcgtgctctacctcggcccgctctccggcgagccgccgagctacctgaccggcgagttccccggcgactacgggtgggacaccgcggggctctccgccgacccggagacgttcgccaagaaccgggagctggaggtgatccactccaggtgggcgatgctcggcgcgctgggctgcgtgttcccggagctcctcgcccgcaacggcgtcaagttcggcgaggcggtgtggttcaaggcggngtcgcagatcttcagcgagggcgggctcgactacctcggcaacccgagcctgatccacgcgcagagcatcctcgccatctgggcggtccag

SEQ ID NO: 21335 - DNA, 534 bp, Oryza sativa
  unsure (1)..(534): unsure at all n locations
  Clone ID: uC-osflM202026b04b1
tttttggaggcttcaaccccgcatccgccgtcgcgtgcgcgccgccggaggccggagcccgccgccgtgggatactagtccagcttggaagcggggagggagaggctccagccagtgtgccgaaacctacccttccattctgacccaccacgccatggcggagcccacgccgccgctgccgtcgaacgccgggctccgcatcctcctcagcaaggaccggccaccggcctcctcttactccgcgctcgccgacgacacctacgccgccgtttacagccacaccgaccgcgaccgcatcataggagtgttccgggatgcgctgtctaggactgaatcccctgaagctcttgcccttcaggccgttcaggatgcgattaaacctcataagcaaacagtgttggttctggaggagaaccaatccttagaaaatgctctacgcaaattgctgcaggaacttgcatcatctgcagttcagtctggtaaaagaataatgcaatatggngataatgaagaaaataattgcccgataacacg

SEQ ID NO: 21336 - DNA, 512 bp, Oryza sativa
  Clone ID: uC-osflM202026b05b1
ccagcaacctggagatccgtatgcacagatgagtaaggcagcaatgatcgctgctgcttttggtggaacattgcctcctggagtgtctggcatcaatgaccgttgcacacttctagttagcaatctgaacactgataaaattgatgaggataagctcttcaaccttttctcaatgtatgggaatattgtgcgtatcaagatactcaaaaataaaccagatcatgccctcatccagatggctgacgggcttcaggctgagcttgctgtactgtatttaaagggagcaatgctattcggaaagaagcttgaagtgaactactccaagtacccaaccgttactgctgatccagatgcgcgtgactactcaacttctcacctcaacagatttaacagcaatgtggtgaagaactaccgccactgttgcgccccaaccaagatgatccacatcttagcgcttacacaggacataactgacgataccatccattcccttgttggtgagcatgggacta

SEQ ID NO: 21337 - DNA, 459 bp, Oryza sativa
  Clone ID: uC-osflM202026b06b1
cggtcgcgtgggtccagatccaccagatccaacaaagagcaccctatcctcctgcctacctcggaggcggctctaacggtggttctggtactcgggtgcaggagcgcggcggatccagcaactgtgtgtggcggtgatggagacggaaggagagtgcgcagcggagacaatagcaatgcatgcggcggtgatggtgacgaagggcgagcatcggttcttgggcggtgacgcgcagtcccttggactccctcctgttgccgcctctgtccctcctcccttctttctacaccgtcaccagactacgttacctgttcaccgctgtgtggcggaagagggcacagccacggtgaaggaggtgtggcaagcgagagccgtacggcgcgggggagggtcttgacagccagcgggccgcgcctggagcatgggacaggcaactacgacgacgacaaccacgaacgc

SEQ ID NO: 21338 - DNA, 530 bp, Oryza sativa
  Clone ID: uC-osflM202026b07b1
tttcaacaacctcacctcgcctcgcctcttctcgcggccaacgagagagggagagggagagctaggaccaccgccactgcctcgggaagtaggtggctcccctgctttccctcctctcctccgccgtcgccgaggcagccagccaagtcgtcccagcaggtggtaggctactagtccgggtggccggcagtgagcaggaggaatcatctctggcgttcttgtctccgaggaactttgattctttctgggaggggatttggtgtgctgctgctgctccagatgcttcccaccaacaggaacaggccccagcagaggcctgccagatcttggtatttcatctcagacatggacttctccgatccgaagcgcaagccgcggtacctcagtaagatcctcatggtggcgctcctcaccgccatgtgcgtcgtcatgctcacacagccgccctgccataggaggactcccagtgtgttctccatccatgaacccggcgtcacgcatgttctagtgacgggcggcgctggatatat

SEQ ID NO: 21339 - DNA, 403 bp, Oryza sativa
  Clone ID: uC-osflM202026b08b1
atttggctatgtttctagctggaaggcaagcagatgctcctcaagaagcccttcaagtccttgacattgtgttacgtgaattgcctaccacaaggtactcaccagttggtcggtcattttattctcccaatttagggagacgccagcaacttggtgagggtttggaaagttggcgtggtttttaccaaagcataaggcctacccagatgggtctctcactgaatattgatatgtcatcaactgcatttattgagcctctacctgtgattgactttgttgctcagcttctgaacagagacatctcagttagaccattatctgattctgatcgtgtgaagataaagaaagctctaagaggtgtgaaggttgaggtgacgcatagaggaaacatgcgtagaaaata

SEQ ID NO: 21340 - DNA, 498 bp, Oryza sativa
  unsure (1)..(498): unsure at all n locations
  Clone ID: uC-osflM202026b09b1
gtacaagattaggttcctggctctcactgataaggaggttttgggcgaaggtgacactgctaagcttgaaatccagattaagctggataaggagaagaagattctctccattcgggataggggtattggtatgaccaaggaagatctcattaagaaccttgggaccattgccaaatctggaacttcagcttttgtggaaaagatgcagactgggggtgacctcaatctcattgggcaattcggtgttggtttctattcagtatacttggttgctgactatgttgaagtgatcagcaagcacaatgacgacaaacagcacgtctgggagtccaaagctgatggatcattcgctatctctgaggatacatggaatgaacccctgggccgtggaactgaaataagactgcacctccgagatgaagccaaggagtacgtggaagaagacangctaaaggatttggtgaagaagtactctgagttcatcaatttccccattac

SEQ ID NO: 21341 - DNA, 525 bp, Oryza sativa
  Clone ID: uC-osflM202026b11b1
gttacgaaccaattcacaccgatcgatcgagcaacagtagtaggaaccatggcccgtgcacagttggtgttggtcgccgttgtggcagctctgctcctcgccgccccgcacgccgccgtggccatcacctgcggccaggtcaactccgccgttgggccctgcctcacctacgcccgcggcggcgccggcccgtcggcggcctgctgcagcggcgtgaggagcctcaaggccgcagccagcagcaccgctgacaggcgcaccgcgtgcaactgcctcaagaacgcggcccgcggcatcaaggggctcaacgccggcaacgccgccagcatcccctctaagtgcggcgtcagcgtcccctacaccatcagcgcttccatcgactgctccagggtgagctgagctatcgatcggatggatcatttatatgcatacagaagcgcgacggtgggtcgatgtgtggagccgatcgaattctgtatccaatattagtagtatctgtacgtattctggaataaaaagatgagc

SEQ ID NO: 21342 - DNA, 56 bp, Oryza sativa
  Clone ID: uC-osflM202026b12b1
ttttcagtttcctgtgggacagcagtatgcgggatgaataagttggatttgaacct

SEQ ID NO: 21343 - DNA, 488 bp, Oryza sativa
  Clone ID: uC-osflM202026c01b1
ctgtttttgagtcatggctgccaagctagctcgcctccacagtctccgcgaacgcctcggtgccaccttctcgtctcatcccaatgagttgattgcactcttctctaggtatgttaaccagggaaagggaatgctccagcgtcaccagctgcttgcggagttcgatgccttgatcgaagctgacaaagagaaatatgctccctttgaagacattctccgggctgctcaggaagccattgtgctgccgccctgggttgcactggccatcaggccaaggcctggtgtctgggactacattcgggtgaatgtaagtgagatggcagcggaagagctgagtgtttctgagtacttggcattcaaggaacagcttgttgatggacacaccaacagcaactttgttcttgagcttgattttgagcccttcaatgccttcttcccgcgcccgttcatgtccaagtccatcggaaatggggtgcagttccttaacc

SEQ ID NO: 21344 - DNA, 538 bp, Oryza sativa
  Clone ID: uC-osflM202026c02b1
atgtttgccaagctgactccaagaatgttgttcacaagttcaggtgggagcatcctacctaaccatactaggaaggtaaacccatcatcaagaaggtaaagaccaccagtgtctaagcactgcatggttagtggcaaccacttcaaggatccaccgatcctatctggttccattgacaatacttcatcaaccctgtacaatgaaggataaataaaattgagcagcttttttgcaggcagtatcatcatgctgaaaccagcagcacaacgttcatcaagagaaacatctgcgtaaccaccacgaagagcaagagacttgcatatggacagaatgtacaacggcaagaatcttaaagattctggatatataagtctccctcctatccggtgctgtacaacatataggttccggtattccttcaaacttctcacaagctttaattgtaattgttgccgaacactgtccagcttatcagacagtgaattttcaacagcgattctactcaacaatgacacaatggcaccagtatctgcttgac

SEQ ID NO: 21345 - DNA, 416 bp, Oryza sativa
  Clone ID: uC-osflM202026c04b1
gtgttttggtgtgaaggcagagcattctgatagttgggacagattctatattaagggagggcagaagtacaaatctcctggaaatgcctatgttgaaggtgatgcctcaagcgcgagctatttcttggctggtgctgcaatcactggaggcactgtgacagttcaaggttgtggtacgaccagtttgcagggtgatgtcaaatttgctgaggtacttgagatgatgggagcaaaggttacatggactgacaccagtgtaaccgtaactggtccaccacgtgagccttatgggaagaaacacctgaaagctgttgatgtcaacatgaacaaaatgcctgatgttgccatgacccttgccgttgatgcactcttcgctgatggtccaactgctatcaaagatgtggcttcctggagag

SEQ ID NO: 21346 - DNA, 542 bp, Oryza sativa
  Clone ID: uC-osflM202026c05b1
tttaccgtacggatgctggtcaacgcaactacaagtcatcagtttcacctgtggctgaactacctcaccgtgtagatgatggccaacgcaactacaagttatcagctttacctgccactaatgaactacctcaccgtatagatgctggtcaacgcaactacaagtcatcagtttcacctatggctgaactacctcaccgtgcagatgatggtcaacgcaactacaagttatcagtttcacctgctgctgaactacctcaccgtgtagatgatggtcaacgcaattacaagttatcagttttacctgccactgaactagttcactatacagatggtcaacgcaattacaagtcatcagttttggagacgccagaacttctcaaagaccccgacatggcgctcttcttccttgagaagaatcttcaacaaggtaaaaaaattaataacgccctccacttcgccaacttgttggccactacgaactccaagttcctgccacgaggcaaggcggactccatcccgttctcctctaaagaactaccc

SEQ ID NO: 21347 - DNA, 544 bp, Oryza sativa
  Clone ID: uC-osflM202026c06b1
ttatcttctcctccggctcttcttcagtatcgaatcctctcttctcctcgtgcccaccaccaccaccgtagcaatggcgggcaacgggccgatcaacaaggaggacccgctcaactggggcgcggcggcggccgagatggccggcagccacctcgacgaggtgaagcgcatggtggcgcagttccgcgagccgctggtcaagatccagggcgccaccctccgcgtcggccaggtggccgccgtcgcccaggccaaggacgccgccggcgtcgccgtcgagctcgacgaggaggcccgcccccgcgtcaaggccagcagcgagtggatcctcaactgcatcgcccacggcggcgacatctacggcgtcaccaccggcttcggcggcacctcccaccgtcgcaccaaggacggccccgccctccaagtcgagctcctcaggcatctcaacgccggaatcttcggcactggctccgatggccacacgctgccgtcggagacggtgcgggcggacatgctcgtgcgcatcaacacccttcttcagggt

SEQ ID NO: 21348 - DNA, 534 bp, Oryza sativa
  Clone ID: uC-osflM202026c07b1
tttatgtgttgcagataaccgttgcctttgatgagaccacaaccttggaggatgtcgacatgctgttcaaggtgttcaatggtggcaagccagtgaacttcactgctgaatccctcgcaccagaggtctcaagctcaattccgagtagccttgtgcgcaagagcccctacttaacccacccgatctttaacatgtaccatacagagcatgagcttctccgctacctgtacaagttgcaatccaaggacctttcactgtgccacagtatgatccctcttggttcttgcactatgaaactaaatgctacagtggagatgatgcctgtcacctaccacaactttgcaaacatgcacccatttgcacctactgaccaagccgcaggatatcatgaaatgtttgatgacttgagcgatctgctgtgcaagatcactggctttgattctatctctatgcaaccaaatgctggtgcttcaggggagtatgccggattgatggttatccgtgcttaccacagggcaagaggagactaccacc

SEQ ID NO: 21349 - DNA, 512 bp, Oryza sativa
  Clone ID: uC-osflM202026c09b1
gtcgacgacgatgacgacgacgatgatgatgacgacgacgacgacgatgacgaagaggaagaggaggaagtcgagggcgacgagcaggaggtataattttttttcacgccttgatccctcgaatatatgctagtatgctttgttcatgtgttcttcctgcctgccctgatagatctatctttatgctctactgttacgattagtatgaaattcttcagcttcctgcgcgttttcttgctaattttctcttgcacaaatctggaaaagtagttctattctcagatctgttcagcacctttgtccctaaaatactccagtagatgtatctgcttagttttgaatacaatagcgttctctcacatcagtagatgtatcagcttagttttgaagacttttcctctcaaaaaacctttctagaaggtcgagatttttgcaagtctgaggtcgttttttttttttttttttttttgcatatcgatttctgtagacggtcaaaacttaattttgttttt

SEQ ID NO: 21350 - DNA, 473 bp, Oryza sativa
  Clone ID: uC-osflM202026c10b1
tttaacgaaccaattcacaccgatcgatcgagcaacagtagtaggaaccatggcccgtgcacagttggtgttggtcgccgttgtggcagctctgctcctcgccgccccgcacgccgccgtggccatcacctgcggccaggtcaactccgccgttgggccctgcctcacctacgcccgcggcggcgccggcccgtcggcggcctgctgcagcggcgtgaggagcctcaaggccgcagccagcagcaccgctgacaggcgcaccgtgtgcaactgcctcaagaacgcggtccgcggcatcaaggggctcaacgccggcaacgccgccagcatcccctctaagtgcggcgtcagcgtcctctacaccatcagcgcttccatcgactgctccagggtgagctgagctatcgatcggatggatcatttatatgcatacagaagcgcgacggtgggtcgatgtgtggagccgatcgaat

SEQ ID NO: 21351 - DNA, 464 bp, Oryza sativa
  Clone ID: uC-osflM202026c11b1
tttgatgtataaagttagtgttcagatgattgaaatatacaatgaacaaatccatgatctcctcggcaacagtggttcagagaagaaacttgggattttgaatgccagccaacccaatgggcttgctgttcctgatgcaacaatgcatcctgtcaactcaagttcagatgttattgaactaatgagaacaggacttgagaacagatctgtaggcgcgacagcattgaatgaaagaagcagcaggtctcacagtgtagttactatgcacattcaaggtgtagatctaaaaaccggagttactttgcgtggtgcgctacatcttgttgatcttgctggaagtgagaggattgatcgctctgctgctacaggagatagactaaaggaagcacaacacatcaacaaatctttgtctgctctcggagatgtcatattttctttgtcacaaagaatgctcatgtaccgta

SEQ ID NO: 21352 - DNA, 494 bp, Oryza sativa
  Clone ID: uC-osflM202026c12b1
tcttagcttcgagggaaagggacaatggcaagggcatctttgatcatagtggccaagaaagcaaagaagattcagacatcccagccctatgggcctgctggaggagtggtgttcaaggaaggtgttgatgcatctggaagggtagccaagggaaagggtctttaccagttttccaacaagtatggagcaaatgttgatgggtacagcccaatatataccccagaagaatggtcttcaactggtgatgtctatgttggaggaaaggcaggtttacttctctgggcaatcactcttgctggaattctagttggcggcgctattcttgtctacaacactagtgcactggcttagctaagtgcagcagaccaagctgtgcctgcttccatgtatataatcttcactaggaatgtaaccagttatgtacctggactggacttgactgccagcggtggtaatgaataaggccgagtaatgttaattctaagttatgcaaa

SEQ ID NO: 21353 - DNA, 538 bp, Oryza sativa
  Clone ID: uC-osflM202026d02b1
gtgttgacggcccacgcggagcagcagagagtggcgggctcagtgtcgggctcgccggagtccggccaatccggtcggttcatgcttcattctctcggttctgtcttctcagtccgtgtgagtgtttcatcatattggctaccaagatgatcactcttcgtttatcaagagagtagggacattaacctggtttacttgtaagaaagtaaagccatggactcctcataccagcatgacaagcctctgctggatgaagagaactcctcgcaagtgacccttgaatatacaggtgatggatctgtttgcatccgtgggcatcctgctttaaggaaacatacagggaactggaagggttgctcattagccatcgcttgttcattctgctcttatctggcctttacttgaatggtaaaaaacctagtcagttatctcacaaaagttctacatgaaacatacgtggccgctgcaagagatgttgcaacttggtcaggaacaagttatctcgcacctctggttggagccttcttagctgattcat

SEQ ID NO: 21354 - DNA, 490 bp, Oryza sativa
  Clone ID: uC-osflM202026d03b1
gtacgcacgcaccacacacgtagcagcagagcaatggcggcggccatggcgctgcaggtggtggccggcggcggctgctgttgccagcggcccgttcttggagctggtcggcggcggttggcggcggcgcgtgcggtggcgtcggacgcggcggcggcgaaggtgagcgaggaggaggggaaggtgaggctgggtgggtcggaagtggcggggagcaagctcggcatcggcgcctggtcgtggggggacaccacctactggaacgactcacagtgggacgacaggagactgcacgaggctaaagcagcatttgacacaagcatagataatgggatgaccttttttgatacagcagaagtttatggtacagcgctgacgggagcagtaaattctgaaagtttactcggaggtttcatcaaggaaaggcaggagaaagaacagattgatgttgcctgcgcaacaaagtatgctgcacttccatggagatttg

SEQ ID NO: 21355 - DNA, 504 bp, Oryza sativa
  Clone ID: uC-osflM202026d04b1
gttgccatgacgaacgggtacctgttccgggagtacatcggcgcgcagttcaccggagtccgcttctccgacgtgcccatcaacccaaacctcagcttcaacttcatcctctccttcgccatcgactacacgagcccggccggcggcgccacgccggcgccgaccaacggcgtgttctcgccgtactgggacacggccaacctgtccccggccgacgtcgccgccgtcaaggcggcgcaccccaacgtcagcgtcatggtcggcctcggcggcgacagcgtgcaggacaccgccaaggtcttcttctccccgacctccgtcgactcgtgggtggccaacgccgtcgcctccgtctccggcatcatcgacgcctacggcctcgacggcgtcgacgtcgactacgagcacttcaacgacgacggcggcgccggcgtcgacacgttcgtggagtgcatcggccgcctcctcaccgagctcaaggcgcggcacccgaacatcaccacc

SEQ ID NO: 21356 - DNA, 432 bp, Oryza sativa
  Clone ID: uC-osflM202026d05b1
ctttgcaccaaatccccccaccatggatcaccgcctcctcctcctcggcctcctcctcctctccccggcggtggccgccgcctcagtccccggcgaggaggagccgctgatccggcaggtggtcggcggcggcgacgacaacgagctggagctgaacgcggagcgccacttcgccagcttcgtccagaggttcgggaagtcctaccgtgacgccgacgagcacgcgtaccggctctccgtgttcaaggccaacctccgccgcgcgcgccgccaccagctgctcgacccctccgcggagcacggcgtcaccaagttctccgacctcaccccggccgagttccgccgggcctacctcggcctccgcacgtcgcgccgcgcctttctgcgggggctcggcgggttccgccacgaggcgcccgttctccccaccga

SEQ ID NO: 21357 - DNA, 508 bp, Oryza sativa
  unsure (1)..(508): unsure at all n locations
  Clone ID: uC-osflM202026d07b1
gacccagcaagcaagagcgtctagtcacctcaaccacgaacttgaatccgctgctctgctgctgctgctgcaactgttgcgctttgagtgtgactacagtgtctgctactcctactactctgctttgccactacttggttcacaggagggtggcgagagggagagtgtgaggagctgagagagggagagggactgggatggagttcttggtggctcaagcgctcctcctcctcgtcgtcgtctccaactccctcctcctcccttccttgggtcttgctgtttcaggtcaagaagcacacgaggtggccatggctggcctccatgatcagcagccgccatctccggcagcggtggctgcgcgtgtatcggtcgctcacgcggacctccccatggtggcctcctcggttcttggggcggagtcctggctcagggcccatgtcctggctcactacccctccaaccacgtcaccgccatcgccgtcgncgtcgcctgcgcccgcggcggaag

SEQ ID NO: 21358 - DNA, 537 bp, Oryza sativa
  Clone ID: uC-osflM202026d08b1
ctccgcgacaccactaagctccgctacttccccctgccgccgccgctcagtcccaacaactcgttaacaggctctccaaggcctcatcgtgacattgcccttgtccaaggtcggatcaagttcatcgagacgcggcttcatgtcaagccaggttccatcatcaacggcaccttcatctctcaaggttggactgctgccacctggactgcaccggacaccaatccctggaaccaaggttggcgccaggactgcaaactcactgcttccgatatctctgttgatgacagcaagatgaattttgagttgctgcctaagcttttcgatgaccaaggcacacctcagccaaccttggagagacttcatggtgggtcatccaacgctcagcttgcactctgatgacattgtttgcttcatggccaaggccgaccaatgggacgacgatgcttgggtgcttgctgttgatatgaagaacaagaggctaaaagctgtggctgagtttggtgcaagaagaacccttggcattggctatgcctacat

SEQ ID NO: 21359 - DNA, 501 bp, Oryza sativa
  Clone ID: uC-osflM202026d10b1
ttgaaaatttccccaatccgacgccctcctcctcctcccccctcccccctgctggatctcctccactccccatggtagcctcccccgccccgcgctgctgacccctgggccccaccgccgcttccgccgccgctcccgtttcccccggctctcgctctcgcgcgagccgtagccgttgctggggaggaggaggaggggaaagctcgaggtatttggatgcgcgcgagccgatggcgacgccggccgccgagaagcccgacggggtggagatccgcgaggtgtgggaggacaacctcgaggccgagttcgcggtgattcgggagatcgttgacgacttcccgtacgtcgcgatggacacggagttcccgggcgtcgtctgcaggccgctcgggacgttcaagtccaacgccgatttcaactacgcaacgctcaaagccaacgtcgacatgctgaagcttatccagcttggtttaaccttctcgaatgagcatggtgggctcc

SEQ ID NO: 21360 - DNA, 532 bp, Oryza sativa
  unsure (1)..(532): unsure at all n locations
  Clone ID: uC-osflM202026d11b1
ttcctcctccttcccgtcgaaccctctccagtctccactccactgaatcctcccacctcggctcgaaggaatggcaagcggtagtgaagctgagaagtcacctgaggttgtgctggagtggcctaagaaggacaagaagaggcttctacatgctgtttaccgtgttggagatttggatcgcaccattaaatgttacacagaatgctttggaatgaaattactgaggaaaagagatgtgcctgaagagaaatatacgaatgcatttcttgggtttggacctgaggacaccaactttgcacttgaattgacatacaattatggtgttgataagtacgacattggagcaggatttgggcatttcgctattgcaactgaggacgtgtacaaattggctgagaaaattaaatccagttgttgctgcaggatcactcgtgaacctggtcctgtcaagggaggatccactgtgattgcctttgcacaggatcctgacggttacatgnttgagcttatccagaggggtccaacacctgag

SEQ ID NO: 21361 - DNA, 529 bp, Oryza sativa
  unsure (1)..(529): unsure at all n locations
  Clone ID: uC-osflM202026d12b1
tttttacctcctccacctcctcctcctccccgggatcggatcggcccggctcctgctcctccgccgccgccaccgccgccgcagataggagaagatggccgcacttgataccttcctctttacctcggagtctgtgaacgagggccaccctgacaagctctgcgaccaagtctcagatgctgtgcttgatgcctgcctcgccgaggaccctgacagcaaggtcgcttgtgagacctgcaccaagacaaacatggtcatggtctttggtgagatcaccaccaaggctaacgttgactatgagaagattgtcagggagacatgccgtaacatcggttttgtgtcagctgatgtcggtctcgatgctgaccactgcaaggtgcttgtgaacatcgagcagcagtcccctgacattgcacagggtgtgcacggccacttcaccaagcgccctgaggagattggtgctggtgaccagngacacatgtttggatatgcaactgatgagacccctgagttgatgcccctcagccat

SEQ ID NO: 21362 - DNA, 104 bp, Oryza sativa
  Clone ID: uC-osflM202026e02b1
cttgtaatctgggctgaattatcaatcaagaaattatcaaaccatccaaatgaggaacatagataatttcttgattgataattcgtaccttggaatctgggctg

SEQ ID NO: 21363 - DNA, 527 bp, Oryza sativa
  Clone ID: uC-osflM202026e05b1
ctctatctcgtcgccgtcttgctctgctgcctctggcgcccgtgcagcagtgagcagcagcaagagcagcaaaatggctctacccgggcgcctccgcgccctcatcctcgccgttgcattgccgctgctcttactgtccgcttcagaggcgggcacggtggggatcaactatgggagggtggcgaacgacctgcccaacccggcggcggtggtgcagctgatgaagcagcagggcatcgcgcaggtgaagctgtacgacaccgagccgaccgtgctgcgggcgctggccaacaccggcatcaaggtggtggtcgcgctgcccaacgagcagctgctcgccgcggcgtcgcgcccgtcgtacgcgctcgcctgggtgcgccgcaacgtcgcagcgtactacccggccacgcagatccagggcatcgccgtcgggaacgaggtgttcgcctcggccaagaacctcacggcgcagcttgtcccggcgatgaccaacgtgcacgccgcgctggcgaggctcagccttgaca

SEQ ID NO: 21364 - DNA, 537 bp, Oryza sativa
  Clone ID: uC-osflM202026e06b1
tcaacattgaaagatccctgtccagttcattagcaatggccaaagccgtcgccctactccttgcagccatcgcggcatcggccgtgttagtgcaagtggaatgcgacgcccccgtcgagaagagcttcaacaaggccctcctcgcccctgtcgataagcgcttggatgaggcaactcaggccatcaacgaggccgccgactccgttgtggctgctgccccaccagcaaaaaaggatgaagttgaagctgccacgtggaagcggagaatgttcgcctttgctgctctcgggatggcccaaggagatgagaagaaagttgctgcaacttcacttgcctacaagaaagcagctaaagctgtcctcgatgccgccccagctgacaagtttaagttgatggatgaatccttcaaagtggctgctatggaggtaatcgcatcatgagccacacgccaaccttcaataaaggtctactgctacaccgccgacattggtagacgaccggacacgtaccgagtatcaacggttatttatgtaataa

SEQ ID NO: 21365 - DNA, 534 bp, Oryza sativa
  Clone ID: uC-osflM202026e07b1
gtctactcccgccatggcgcggcacacggctcctggtgctcgccgtcccaacccacgtctcaccagacgacttcgtccgcttctgcggcccttacatcgagcacgcctccgatatccatgtcgtcagggatgatggggtggaggaccggtatagcgtgctcgtggagtttgaggatcagaagagtgccgatgggttctacttggacctcaacggttggaggttctcgtcatccgaggtagaggtttgccatgttctgtttatagttgctgtccaatatacaccatcaaccaagcctgcggtgactccaccagttggatccactgagctcccaacatgtcctgtctgtattgaaagattggatcaagacatcagcggaattatggcaacgacttgtgatcattcgttccagtgttcatgtgtttcaatgtgggtcaattcatcttgtccggtttgccagttttgtcagaagcagtctaagaatcctacatgttctgtttgtcaaacctctggaaacctatggatctgtataatat

SEQ ID NO: 21366 - DNA, 524 bp, Oryza sativa
  Clone ID: uC-osflM202026e10b1
tgtcttcgtactcgcctctctccgcgccctcctccgccgccgctcgccgccgttcgtctccgccgccaccgccgccgccatgagggagtgcatctcgatccacatcgggcaggccggtatccaggtcgggaacgcgtgctgggagctctattgcctcgagcatggcatccagcctgatggacagatgcccggtgacaagaccgttgggggaggtgatgatgcttttaacaccttcttcagtgagactggtgctgggaagcatgtcccccgtgctgtcttcgtcgatcttgagcctaccgtgattgatgaggtgaggactggtgactaccgccagctcttccaccctgagcagctcatcagtggcaaggaggatgcagccaacaactttgcccgtggtcactacaccattggcaaggagattgttgatctgtgccttgaccgcatcaggaagcttgccgacaactgcactggtctccagggcttccttgtgttcaacgctgttggaggaggaacgggctccggtc

SEQ ID NO: 21367 - DNA, 485 bp, Oryza sativa
  Clone ID: uC-osflM202026e11b1
tttacaactcgaagaagatgaaggccgccatggggtgcttcgacccttctcttccgcctcctcgccggcgccgcccacggggcgccggaagacaccaccaccaagaccatacgcctcccgaccgacggaggatcagcacagcaggcgccgacgacgaagaggccgtggaagtgctgcgacaacatcgagcagctgccggagaagatctccccgccgttctggcgctgcaacgacgagctggagcccagccagtgcgtggcacagtgcgaggtgtgccaggaggcgccggggccattcccgggcccgctcatctgcagcgacgtctactggggcgccgacccgggccccttctgcacgccgcggccgtggggagattgctgcgactacaccggctgcaccagggagtatatcccgacctgccgctgcgtcgacaaggtggcgtcgagcgccgccgcgtgcaaggatggccgggcagtggaatcgtc

SEQ ID NO: 21368 - DNA, 142 bp, Oryza sativa
  Clone ID: uC-osflM202026e12b1
tcatacttgctgcttcttgcttcttgttgctgggggtcttggttggatctttgatgaaggtggggaggggatcgagggggggaggtggcccccatggcggcggcctggtggaggaggagaggagcggcacactgacggctcc

SEQ ID NO: 21369 - DNA, 544 bp, Oryza sativa
  Clone ID: uC-osflM202026f01b1
cgtttaggcgctcgacaaccctcgccaccgcctcatggttttgcgtatggcaatggatatacagaaatttatgcagaatcctcaactgcatgaattcgaattccagcattttccaacttcttatctccgctgtgctgctcatcgtgttgcacaacactatggtttagagactacagtagcagatagcttagtagatggttcagttagcaagatagttgcaaagaaaacatctgaaagcaaacttccagttattgcattgtcagaagttcccagcaaacaagcaagaaatgagcatgaagctgcagagaagcttaagtttgttatttgtccaaggcccaaggctttccaaaatggtgcaggtgatgccggtgccaagaacaatgcagcaagaactgttgaagagaggatagaggaatacaacaaagcacgagcacgcatttttaacggttccatttctgatattgaaggcacaagtgatttgggagctttatctgttgcgagagatgaaccaattaatgttgagcctcctgttgatgagaataag

SEQ ID NO: 21370 - DNA, 538 bp, Oryza sativa
  Clone ID: uC-osflM202026f02b1
cgtgcatcaggatttttgctgccactgtctggtggtgcggatagttcatctgttgcagcaatagttggttgcatgtgccagcttgtcgtaaaagatatagagaatggagatgagcaagttaaggcagatgctatgcggattggccagtacaaggatggagagttccctaaagatagcagagagctcgcaaaacgtttattttacactgtttacatggggactgaaaatagttctgaaggtactcgatcacgagcgaaaatgcttgctgaagagatcggttcattccacttggatgtaccaattgatagtatagtatctgcattgctttctttgtttgaaagattgactgggaaacgcccacggtacaaggttgatgggggttccaatactgagaatctgggattgcaaaatattcaagctcgaatcaggatggtactagcctttatgatggcgtcacttatgccatgggttcataacaaatccgggttctatcttgttctgggaagttcaaatgtggatgaaggattgcgtggttatt

SEQ ID NO: 21371 - DNA, 539 bp, Oryza sativa
  Clone ID: uC-osflM202026f03b1
gatgatgagaagggcaaatcgattcgccatggctgctccccgcacgcctctccccctcgtcctcctcctcgtctccgccgcgctcctcgcggcggctcccctctcgccggcggccgagaccggtgccgccgcgttcgacgtccgccgccacctctccaccgtcaccaggtacgatgtggcgaggggatccaatagtgtgtcctccgcgccgtctatgtcggatgagtgccgcgtgatccacctcaatctcgtggcaagacatgggactcgcgcacctaccaaaaagagaatcaaagagctggatagactggcggttcggttgaaggctcttatcgatgaagcaaaacaagggcctgaaagtgactccctgaaaaaaattccttcatggatgaaagggtgggagtcaccctggaaaggtagggtgaaaggtggtgagctggtcagtgaaggggaggaagagctatacaaccttgctatcagagtcaaggagaggtttcaaggcctatttgatgaggaatatcaccctgatgtgtattcaa

SEQ ID NO: 21372 - DNA, 537 bp, Oryza sativa
  unsure (1)..(537): unsure at all n locations
  Clone ID: uC-osflM202026f04b1
cttcctcttcccatcgcgatacctcctccttcccgtcgaaccctctccagtctccactccactgaatcctcccacctcggctcgaaggaatggcaagcggtagtgaagctgagaagtcacctgaggttgtgctggagtggcctaagaaggacaagaagaggcttctacatgctgtttaccgtgttggagatttggatcgcaccattaaatgttacacagaatgctttggaatgaaattactgaggaaaagagatgtgcctgaagagaaatatacgaatgcatttcttgggtttggacctgaggacaccaactttgcacttgaattgacatacaattatggtgttgataagtacgacattggagcaggatttgggcatttcgctattgcaactgaggacgtgtacaaattggctgagaaaattaaatccagttgttgctgcaagatcactcgtgaacctggtcctgtcaagggaggattcactgctgcatgccttgcacaggatcctgacngttacatgtttgagcttatccagaggg

SEQ ID NO: 21373 - DNA, 534 bp, Oryza sativa
  Clone ID: uC-osflM202026f05b1
gtggtgttggctacatatccaaggacattgtcttgaaaggtttgccacggccaggggaggattctctgatccttgtttgtggtcctccaggtatgatgaatcatatatccggtgacaaggcaaaggatatatcgcagggcgagctcaccggcattctgaaagagttaggatacactgcagagatggtatacaagttctgagtgcgtcttcaagacgttagaatgctgacatgcttgctgcaatggcgccatggccatgatcaaataaaccacagctgaacacttgttttattatgccacagcagttgggttccagacttgagaaaggtttgacatttctcaataatgttcattgagaatcacatctttttgcgtggtttgcttctgcgatatgttctagcggcccatgcacctgcatatgcattgcttcagcacgctatgagatggtctggaattgacgtggatgatcttatagagatagatccattcacagatttgagactaccttgtgcactgcattttgagtatttacctg

SEQ ID NO: 21374 - DNA, 497 bp, Oryza sativa
  Clone ID: uC-osflM202026f06b1
ttcttctccaccgccgccgccgcctccgcgaaatggggaatctgccgccgtcgctctccatcggcgccgcctccttcgccgcgccctcgcccccgccgccctcgcctggcgcctcctcgtcgtcgtcggcggcggcggcggcggctccgggggccgccaaggaccggaagatggcgtccgcggagcagctcgtgctcgacctctgcgaccccgagctgcgggagaacgccctcctcgacctctccaagaagcgagagatttttcaggatcttgctccactcctgtggcactcttatggaacaattgctgcactactccaggagattgtgtcaatctatccatcactttcacccccaacattatctccaggggcttcaaaccgtgtctgcaatgcacttgcacttcttcagtgtgttgcctcacacagtgacacaaggattcctttcttgaatgctcacatcccactgtatctgtaccctttcttggatactactagc

SEQ ID NO: 21375 - DNA, 528 bp, Oryza sativa
  Clone ID: uC-osflM202026f09b1
cgctgtctagggtttgcggcggcggcgcccgctcacctcctcgccggccggacggcgcgaggaggaatctctccacccccacactcctcgcgccggtgcccctccctccccctccatcctcctcgcgtttcgcttcccctcttcgcactactccgactcccagccggaagcgccggtgtcgatggcggacgatgccggtgccggtcgcactcgcagtcgcagggatccttccgatcgccctacgcgttcaggccaatttctaatcagggctttgctacgaggcgaattggaggagcgcactgcagacgcaaggtttatcccacttacaccaataatggaggatctatttgtcagcggcattgaagagattcccgaagacacttctgtgcatcaccagcaaactgatgagccaccaccatcctacaacaccattaggaggggtgaaggcacattaatggctgaactgcgtgaggctacggagcaactacgtttgtctttctatgccaacacagatgaagaaactcgggc

SEQ ID NO: 21376 - DNA, 533 bp, Oryza sativa
  Clone ID: uC-osflM202026f10b1
taaaatcacaagcaagtacttgaaagatccaatcattattgacctagttggtgatgaggaccagaaattacctgaaggaatctctctttattcaattgcctctgagcactatgggaagccatcaattcttggtccattgatcaaagagcatgctaatggtggaaaatgtattgtgtttactcaaactaaacgagaggcagatagattagcatatgctatgggcaggagctatgcatgtcaggcgcttcatggggatatttcacagaatcagagagaaaggacactatcaggatttcgagatggccgctttaatatcctagtagcaaccgatgttgctgctcgtggattagacatacccaatgttgatcttgttatacattacgaactcccaaacacctcggagttatttgttcacagatctggacgaactgcacgagcagggaagaaaggaagtgcaattttaatatacacaaatgatcaagctagagctgtaaggatcattgagcaagatataggatgcaaattcacagagc

SEQ ID NO: 21377 - DNA, 518 bp, Oryza sativa
  Clone ID: uC-osflM202026f11b1
ttgttagatcaagagagaggaagtgatagatttgggttacctgacctagctgtggggtactttgatttgttaatttcttgtgcatttgctgtttgtgatccgttgctgtgatcgatgtgcccctgaacgaggtccacgacgtcgttggagttggcgccggcgagccggcgaagatggatcgccgccgcgcggcggagctgatgctgctgtccctctcctcgcagagaacgcgcatggcgctcgtgggtggcaaccacaccgccgcccgcttctgcacccgctaaccccgccgccgccgccgtctcctcctcttcttctcccatctcttctctctcttgatcatcttctccgttcatctctgctctgagtgtgtttgatcctcttcttggcgatatttttgtgttgggatcaatggcgactatgaagaaattagctgcgagggatggcagggccgccagcaatggcaggcttctccggctggtggcgcgggcggggctccttcgccgcgtcgtgctttc

SEQ ID NO: 21378 - DNA, 493 bp, Oryza sativa
  Clone ID: uC-osflM202026g01b1
catttattcacttgtggctcagagagcttaaacgagctagcgtcttctataaaacaaagattaagtattactgacgaagagggcataatgcaactcctgtacgaagacgatgaaggtgaccgggtgctactgacaactgatgccgatcttgctggtgccgtgctccatgccaaatcgtccggtttgaaggttctgaagttgcatatcgacctgtctgaatccagcacagaggtgacaaagccatcacagcagctggcagctgcacgcaggagtcggttgtcgcctgttcgtgttgggctgatggctggtgtggacgctctcagcggtgcagcagtgatggtttacctgaaacgagctaaagtgtgatttccccatgaattactggtaattttttcaaacctgtattttttccagttcctggagctaattatgcatcatgccaaagaaatgacacattggagagcaaccaaagttgcatcagatgcactgaaac

SEQ ID NO: 21379 - DNA, 401 bp, Oryza sativa
  Clone ID: uC-osflM202026g02b1
gatttatccatcactcgatcgtgacaactttgtagtcacgcgccatgcagccgacgtggctcgctcacgatgccggcagcgtcgtcgctggtcgtcggcgtcgcgttcacggccgccgtggccgtggccgtggccgccgtcgtggcgaggcgcgcctggaggcacaggggcctccgggtgccgaccgggccgtcaggatggcccgtcgtcggcaacctcctgcaggtggtgttcgccgggaagccgttcatccactacatccgtgacctgcggcgggagtacgggcccatcgtgaagctgcagatgggggtgcgcacgctggtcgtgatcagcagtgccgagctcgtgcactaggcgctcgtctagaagggccggtagttcgcgaccaggccggtggagag

SEQ ID NO: 21380 - DNA, 547 bp, Oryza sativa
  Clone ID: uC-osflM202026g03b1
gtctatctgaaattgcaggcgtgaagagagtggttcaagagaagatgcctgaaggcgtgaatgacaatggccttaccttgactggattcctttgtcttcatgctctttttattgagaaaggacgactagaaactacatggactgtcctaaggaagtttggttatgataatgaaatcaagcttagagatgaccttattccaacaattaaacgagcgcccgatcaaaccctggagttgacaggtcaagccattgatttcttgagaggaattttcaatatgtttgacacagataatgatgatgctttgctacctgctgagctggatgatcttttttccactgcacctgaaaacccatggtctaataatccatatgtggactgtgctgaaaggaatgtcttgggtgggttgtcccttgaaggatttctctccaagtgggctcttatgacacttctagatccagcagataggtttgccaaccttatatatgttggctattcgggtgattttggctcagcatttaccactatgaggaaaaagacgagttgatc

SEQ ID NO: 21381 - DNA, 531 bp, Oryza sativa
  Clone ID: uC-osflM202026g04b1
ccctgctagaaagctaatcatgaagacaaggtgcaactcaatatgctggaaccctagggagcctatgaacttcactgccgtaaatgaagatacaaattgctattcctttgatgctagaaagcttgatgaagccaaagttgttcacaagggccatgtttcagcagtgatggacattgattattcaccaacagggcgtgaatttgttacgggttcctacgatagaacagtgcggatcttccaatataatggtgatcatagcagggagatataccatactaagaggatgcaaagggtgttttgtgtgaaatacacctatgatggaacctatttggtttctggcagtgatgatacgaatcttcggctgtggaagtccaaagcttcagaacagttgggagttcttcttccaagagaacgcagaaaacaagaatacctagatgctgtcaaggagcggtataagcaccttcccgaagtcaagcggattgtgaggcataggcacttacctaagccaatctacaaggcggccaacttaag

SEQ ID NO: 21382 - DNA, 536 bp, Oryza sativa
  unsure (1)..(536): unsure at all n locations
  Clone ID: uC-osflM202026g06b1
tttttggcaaggcagcgattggggcggcagagcctgtccctgtgcttgtggagatgatcggaagcggaaccccgagaaatcgagagaatgctgcggctgtcatgctacatctgtgcagtggagagcaccatcttgtgcatttagctcgtgcgcaggagtgcgggatcatggtcccgttgcgggagctggctttgaacggcaccgatagggggaagaggaaggctgtgcagctgctcgagcggatgagcagattcctagtccagcaacaagaggaacaggagtcccagtcgcaagcctccgcgcaggtccctcctcaggccacccctgagcaggtcccggaaaatgacatccctgaacaattggacagcccagcgtctcaataccctatggttgtatgaactcgatgatgagcgagtcatcgtcgcaatcctatcaaatgtcggattgagtagcatcctggtcactttgcattctgctcatgattcatggcatgccgaccaattgaggtttttcacangcttgacctataaggtttc

SEQ ID NO: 21383 - DNA, 492 bp, Oryza sativa
  Clone ID: uC-osflM202026g07b1
tttcgatccagaggttttggttttgtttctttcagaaatcagcaggacgcacaaaatgccataaatgaactgaatgggaagtggctcggcaaccgtcaagttcgttgcaattgggcaacaaagggtgctaatgctggtgaagagaaacaaaatacagactccaagggtatgatagagttgacaaatggttcatcagaaggtggaaaggataatgcaaatgaagatggtcctgaaaacaacccacagtacacgactgtttatgttggcaatcttcctcatgatgtcaacagcaatgatgtgcacagatttttccattcacttggggttggttcaattgaggaggtgcgtgtaacgcgtgataaaggttttggctttgtgcgttacagcacccatgaagaagctgctctagcaattcagactggtaatggacaacttattggcggtaggcagatcaagtgttcctggggaagcaagccaactccaccagggaca

SEQ ID NO: 21384 - DNA, 543 bp, Oryza sativa
  Clone ID: uC-osflM202026g08b1
gtctacgccttccccgctagtcccacacatccggcgaagattccggaagtttcgtcgatcctccgatcgatcaagcggcgagcggcgggaggcatggagaggtacgagctgctcaaggacatcggcgccgggaacttcggggtggcgcggctgatgcggaacaaggagaccaaggagctggtcgccatgaagtacatccctcggggcctcaagattgacgagaatgtggcgagggagatcatcaaccaccggtcgctgcggcaccccaacatcatccgcttcaaggaggtggtggtcacgccgacgcacctggcgatcgtgatggagtacgctgccggcggcgagttgttcgaccggatctgcaacgccgggaggttcagcgaggacgaggccaggtatttcttccagcagctcatctgcggcgtgagctactgccacttcatgcaaatttgccaccgggatttgaagctggagaacacgctgctggacggcagcccggcgccccgcctcaagatctgcgacttcggttactccaagtcgtcg

SEQ ID NO: 21385 - DNA, 504 bp, Oryza sativa
  Clone ID: uC-osflM202026g09b1
tttttcccgccggatcgagcagctagggtttggacctttttttttcccaccaggagggcgacgagatgttcgggcgcgcgccgaagaagagcgacaacacgcggtactacgaggtgcttggggtgcccaaggatgcgtcccaggatgacctcaagaaggcgtaccgcaaggccgccatcaagaaccaccccgacaagggcggagaccccgagaagttcaaggaattggctcaggcttatgaagtcctgagtgaccctgagaagcgtgaaatctatgatcagtacggtgaagatgctctcaaggaggggatgggtcctggtggtgggatgcatgacccatttgacattttttcctcattctttggaggtggctttggaggtggtagcagtaggggcaggagacagcgtaagggagaggatgtggttcacccttctgaggtttttctggaggaattgtacaatggcacatcaaagaagctcttcctttttcgcattgtgctttgct

SEQ ID NO: 21386 - DNA, 527 bp, Oryza sativa
  Clone ID: uC-osflM202026g10b1
gtcctatcctcctcttcttccccttgctctgctcgccctcctcttcctctgtctcctccacggcgagcgcgccgccgccgccgacgacgacctcacctccggcaccggcgacggcagcgagctctggggatacgtccaagttcgcccgaaggcgcacctgttctggtggtactacaagagcccgcagcgggcgtcgtcgccggggaagccatggccgaccatcctctggcttcagggcggcccgggagcgtcgggcgtcgggctcggcaacttcctggaggtcgggccgctggacgtcaacctgaagccgcgcgactcgacgtggctgcagaaggccgacctcatcttcgtggacaacccggtgggcgtcgggtacagctacgcggacgacccgagcgcgctggtgacgacggactggcaggcggccacggacgccaccgagctgctcagggcgctcgccgccaaggagatacccaccctgcagagcagcccgcatgtcctcgtcgccgagtcctacggcggcaagt

SEQ ID NO: 21387 - DNA, 531 bp, Oryza sativa
  Clone ID: uC-osflM202026g11b1
tgtccggagttggaagcgatcgatggcggctactgcgacgggacgagttgttgcactcggcgcggtggccgtggtggtggcgctgacattcctcgccggcggcgcggacgccgactgctacgacttctgcttcaaggactgcatggccagggagaacaacatggtcgactactgcagctacgcctgcgacaagacgtgccagccggacaagcccacgctgtactcgtcgtcgtcgtcgtcccgcctcgccggcgacatggagtgccaactctcctgcgccttgggctcctgccaccgcctccttccggacggcaagggcgccgtggaggcctgcttcgggcagtgctacgacggctgcaagaccacggcggcggccagactgccgaggcctctccgcgccggccactacgtgctctctagtccccctgatgacgtagaccatgatccggaccaccgctacgtgttctctagcccccatgatgacgtagaccatgatccggaccaagtgttcgctagtccacctgacgacat

SEQ ID NO: 21388 - DNA, 533 bp, Oryza sativa
  Clone ID: uC-osflM202026g12b1
tttttaccaaagaatctcctgtgatcaaggcaggggacggaactctttttgaagctgagcacagatccactttttacattccctattggaatcttcctttaactagatggatagttccaaggcaacgcaagttccacagtgacctcaaggttattaatgattgccttgatagtctcataaaaaatgcaaaagagacaagacaggaagctgatgtcgaaaagctccagcaaagagattactcatcattgaaggatgccagcttgctgaggttccttgttgatatgcggggagctgatgttgacgatcgccagcttcgagatgaccttatgacaatgcttattgctgggcatgaaacaactgctgctgttttgacatggtctgtttttctactagcccagaatccctccaagatgagaaaagcacaggcagaggttgattctgtactcagcaatgagacaattaatgtggaccagctcaagaaattggagtacataagactgataattgttgaagctcttcgcttgtatccccag

SEQ ID NO: 21389 - DNA, 333 bp, Oryza sativa
  Clone ID: uC-osflM202026h01b1
ctgtacccccgtggtacccctccgcaaataccggattcgacccaccacgcccccttatttccgaccgcgcggcaccaaccccaaccccagcaagaaccccccctggcgcacgtttccccaaccacgcgcagccgcagccgctgcagcttcgactcctctccaatctccaccaccacaatctcctcagatccaaacccacacgcactctcccccgcttctgctggttttccgccatgccgccgccgaggctgccgagcctggcggcgttcctggcgctggcactggtggaggtggagagcgcggctgacccggacgcgaacagggcggcgctgc

SEQ ID NO: 21390 - DNA, 523 bp, Oryza sativa
  Clone ID: uC-osflM202026h03b1
aaattaaggaaaaaaaaacaaaacacaccaagccagaataaaagcgacaatgggatcgctcaccaccaacatcgtcctcgccgtcgccgtggtggcagcgctggtcggcggcgggtcgtgcggcccgcccaaggtgccacccggcccgaacatcacgaccaactacaacgccccgtggctccccgccagggccacctggtacggccagccctacggctccggctccaccgacaatggtggcgcgtgcgggatcaagaacgtcaacctgcctccctacaacggcatgatctcctgcggcaacgtcccaatcttcaaggacggcaggggatgcggctcatgctacgaggtgaagtgtgagcagccggcggcgtgctcgaagcagccggtgacggtgttcatcacggacatgaactacgagcccatctcggcgtaccacttcgacttctccggcaaggcgttcggcgccatggcttggcccgggaaggagaccgagctccgcagggccgcatcatcgacatgcagt

SEQ ID NO: 21391 - DNA, 540 bp, Oryza sativa
  Clone ID: uC-osflM202026h04b1
gccgtccttttttttttttttttcacacaaagtactcatccaaatgctgatgaatattttcttctcggttcataatagatagattcatagatagatcagacagtgcaaatccatggcttgtctctcaaaccgacccaacgaaacaaaaagattaaaccactccaagactcccatcccattacatagaacgacgacgacgacgaaccgatagatccatagctttcctaacgagatctacgactactaataagatagaactgatcacccgctgctcggtgattcagtggagggaggggggagcaaaacgcatcatgggagggagctggatctgacgccgcgagcagcgcctagtaggtcttgctggggcactcgcgagcgatgtggccggtctcgccgcagttgtagcacccgacgtcgtcgtcgtcaccaccaccgacgaggtagccgccgccaccaccaccgtagccaccgccgtcgcctcctccctgggagcagtccctggccatgtggccctcctcgccgcacttgtagcacgcgcgg

SEQ ID NO: 21392 - DNA, 396 bp, Oryza sativa
  unsure (1)..(396): unsure at all n locations
  Clone ID: uC-osflM202026h06b1
attttcctccattgccggccgttgtcggcgccgccgccgcctacctgatgtgtctttgatcagtagtgactggttgctccatggaagaagaagaagatgggaagatgatgaaagggttgaaatcgacttgcgaagttgctagtgatatcggtgtagcagccagagttttagtgttcagatatcttcggcgttttatccttttttcatttttttgagtcagctgaaactgcaagagagctctgcagtttgctctatcagtttgtcttgttctttttttttttcaggttgttgtgtaaccgcatctgtaatactgtctctttcaatatgaaggaaccatatgtgatactggcaccataattcatccnannnaaaaaatacnaaaaatacttattctat

SEQ ID NO: 21393 - DNA, 495 bp, Oryza sativa
  Clone ID: uC-osflM202026h09b1
tttttgcttccggtgcttactcttccctcttgcgtgttccaagataggaatccaataagctgtcctgttagttttcagtttttcatccaaaaggtgtagattaggaggtgaaaatgaaggtgcaagtagaggactagaggttccttcaggttttctacttgccttgcgcttgcagattttgcagagaaggatatcctatcaccttgcaaacatggcgcaggctctgagtttggggttgcttcttgcgtttctggcaattcaatcctgcatcgccattgagctgactgatcacatcgacttgtggcctatgccaacgtcggtgagccatggaacacaaagactttatgtcagcaaagatatcacaatgtcaatggagggaagcacgtatcctgacgggaaagggatcttgaaggatgccttccagagggtagttgatttaatgaaactgaaccatgttcggtgatggtgcaaaccccaagtttttttggactcact

SEQ ID NO: 21394 - DNA, 520 bp, Oryza sativa
  Clone ID: uC-osflM202026h10b1
gttgaaaaccttggcccttgaatagttgtgggggtctctgaaacctttttagagaggtgagtgcttgttcatcagaagcagagagacaagatgtataacgctccaatggcacaggacatgtcctactatgaacatgtgcagaggcgccatgaggagaagggttgcctctatgcatgcatcttcactgcactgtgctgcttctgctgctacgagacctgcgagtgctgcctcgactgcctctgctgctgctgcaactaggctgccatatcaagccatagcaagaacatgatcaagatgaggatggagatcgcctccatctctcttacccctgagatttcataatttatcagcccgttgtcatcatgtaaaattaataaacatgtagtagatggaaactttgtcagaatcgagcatttgtgttctgaaaaagaggactattgtaagaaacccagaatactgttatctgaagtgctttctatgcgtgtgaaattatctcttgcagggttggtatttggtacat

SEQ ID NO: 21395 - DNA, 513 bp, Oryza sativa
  unsure (1)..(513): unsure at all n locations
  Clone ID: uC-osflM202026h12b1
tgttcgtttccttaaccttgccgggccagctttggagaaccttgctgcaagctgcccatggccaagcatgccaatcgtcgcggcactgtggactcagaaggtgaagcggtggagtgatttcctagtgttctcggcttcacgcacggtgttccaccataacaacgacgcagttttccagctcctccgaagctgcttcaccgccacccttggaatgtcgtctaccacatcagtatgcagctgcggtggcattgccagccttcttggtcacggcttcggctctcattgctccggtggcctctccccagtcgcgccgggaatcctctatctccggatattccggtgcatcaaggactgctccatactcgcggaagatatactgcgcctcctcatgctctcggtgaaagacatagccgaaacaacggtgtcgaggcaccgatccgacaaggtcaggaagaccaagtacgtgatgagacatggccaggtatccctctcttccgccatgacgcangtgaa

SEQ ID NO: 21396 - DNA, 375 bp, Oryza sativa
  unsure (1)..(375): unsure at all n locations
  Clone ID: uC-osflM202027a01b1
tttccgtcttatgcatacaggggagcttgaggttcactggcttaaagcacccctttgaccagccaagaaacttctgaatgagctaaacgagcacttgctaaacccgtaagtgtgcctaccagaacatccaaatctgtatggccaccttctacttcgtctgcaacgacaacaacacacaattcccaaccctagccggcggttggatgtgctgttacgaatgagcggaaatgctctctacatgaaccgttagggctaccgagccgatcgagcggtgggcctaaaaccctagccgagagaggatgcattctgggggtggattgnggatattcctccaaaattgtaaactagaaaccactatcctggtggaagccttgg

SEQ ID NO: 21397 - DNA, 376 bp, Oryza sativa
  Clone ID: uC-osflM202027a02b1
ccacgtttccgttttaccgtttaagaaacactagagattcccggagcgactacttcgctacccatactgctccaatggcctctttcttacctggagggcgagctgagctatatgatgctcatgcatatatgcgccgacatatgttagacatacggcagcatagaggcctaaagctaccaacactgacaaaaacccctagaggagtatttatgggggaaaaatttaagagctggacagcttatagcctggatcaaatcaaattccattctatacaagcagctggcactatattaaaggataccacaattgtgccctatagaggtcgttcctgtgttaagaacgaaatgctaccgagctagtcaaccaatgctggcct

SEQ ID NO: 21398 - DNA, 244 bp, Oryza sativa
  Clone ID: uC-osflM202027a03b1
acgttttcgttccgtttagctccctgaccctccgtcgccggcgccgacgatcatcatgagcaagttgcagagcgaggttctcaaggaagccatctaccatggtgatgctgaatacaaggagaagggcaggaagttcaccgagaccgctgagcttcagattggactgaagaactatgacccgcataaggaaaagcgtttcacccgatccgacaagctgccccatatcccccgccccaagatgaat

SEQ ID NO: 21399 - DNA, 431 bp, Oryza sativa
  Clone ID: uC-osflM202027a04b1
ttcacgtgttcgttgatacagacgttcggggcgcgggagctgaaccggcgggcgcggcgggctggcggcgctcatcgacccctacctgtcgatcaccatccacgagtacgacgccggccggatgacgcgcagcgacgtgttcgccgagaccaaggcgtacctcgacggcgccgtcggcacgcgcgacgacgtgcgccacctcaacgccgaggacgcgcgcggcggcggcggcggcggcggcgcaggcgaagggggtggtggtggcgctggcagcagtagcagcaaggggctggtgctcagcatggcggacggcgaggaggtggaggaccacttccgcggcgcgacgctgtggtggtcggcgcactgcgagcaggacgactacaaggggcggcgcggcggccgcgggcgcgcgttgcagcgccgctcctacc

SEQ ID NO: 21400 - DNA, 411 bp, Oryza sativa
  unsure (1)..(411): unsure at all n locations
  Clone ID: uC-osflM202027a05b1
tgcgtttaggctctccttgctcctgctcctcgccctcgtcctcccggcttccggcgatgacgccgcggcggcggaggcggcgccgccgccggcgccggcgggcggcgcgtcgttcaacgtgacggagatcctcggccggttcccggagttcgggctgttcagctacctgatcagcaagacgcacgtcgaccgcgacatcaacagccgcaacacggtgaccgtgctggtgccggacaactccgccgtggactggctcctccgccgcagcgccaggctgccgcgggcggcgctcgtcgagctcctctccgtccacgtcgtgctcgactacttcgacgccgcgaagatcgccgcgctgccgccggngaagcccaccgtgtncaccaccctgttccagaccaccgggaacgcgcg

SEQ ID NO: 21401 - DNA, 447 bp, Oryza sativa
  Clone ID: uC-osflM202027a06b1
tgttcgctttgtccttgatctgatggattgatgccggggcggccgtgatggcggcggaagcaggaccggccggcgggggcggggagggcgacagcaacgggggaggcacctccccgggtggcgtgtcggcggcggcgccggcgatcgggccccaccacctcggggttgccgccgcggaagaagcaatgtggcaaatgactttaggaggaggagagtctatggagtccactccataccctgagcggataggagagccagactgcagttattatatgaggactggactatgtaagtttgggatgacctgcaattaaattcaaccccccaaatagaaaactggctgttgctgctgcaaggatgaatggagagtatccttatagagttggtcaacctgagtgtcaatactacttgaaaactggaacgtgcaagtttggtgcaacatgcaag

SEQ ID NO: 21402 - DNA, 409 bp, Oryza sativa
  unsure (1)..(409): unsure at all n locations
  Clone ID: uC-osflM202027a07b1
tcttctggttccagtggagctttaagttcactgacttcaagcacccctttgaccaggcaagaaactcctgcggatgcttcacgagcagctcctcaacccctagttgcacctacaagaacaccccagcccgaaaggccacctcctccgccgccgacgacgacgacgacgccgcatccccaaccctagccgccgctcggcggtgctgcgacgtaggagcgggtctcctctctgcatgatccgttagggctaccgagccgatcgaccggcgggcctaaaaccctagccgagagaggctgcgggttggtggggtggngtggccgtgctcgactttccggcggcgccatgaagctgacggtgaagacccttaagggcacccagttcgagatcccggggcagtccaacgacacca

SEQ ID NO: 21403 - DNA, 409 bp, Oryza sativa
  Clone ID: uC-osflM202027a08b1
tttccttgctacccttcaagaaacaagaaagataacaccaacaaactagctagctcgccaatggcctcgttgtcctccttccggctctctgtggcagtggcggcattgatggtcgtcggctcgtgcgccactgaggtcaccttcaaggtcggtgagggttctagcggaaaaagtctagagctcgtcaccaacgtcgccatctctgaggtggagatcaaggagaagggcggcaaggactgggtggcactcaaggagtcatcgactaacacctggtcgctcaagagtgaggcggcgctcaagggccccttctacgttcgcttccttgtcaagaacggcggctaccgtgttgtcgacgacgtcatccccgaaagctttacggtcggctctgaatacatgagtgggatcaacg

SEQ ID NO: 21404 - DNA, 428 bp, Oryza sativa
  Clone ID: uC-osflM202027a09b1
tgttcgttcactcacacactcagcttaatgcgagcgagcgagtgaacgagagagagagacagagatggcgagtgttgcctacttcccggagatcaacatggagaacctggagaccgaggagaggggcgcagcaatggaggtcatccgcgacgcctgcgagaactggggcttattcgagatgctgaaccatggcatcgagcacgagctgatggacgaggtggagcgggtgagcaaggcgcactacgccaactgccgggaggagaagttcaaggagttcgcgcggcggatgctggatgcctgcgagaagggcgcacgacgtgaagggcatcgactgggagagcaccttgtttgaccggcaccgacccgactacaaccttgtcgaccttcccgacgtcgacgaccactacagtcaggtgatgaagcaattt

SEQ ID NO: 21405 - DNA, 468 bp, Oryza sativa
  Clone ID: uC-osflM202027b03b1
cacgtgaacctggaacgcgctcccctactcctgcttccaagaggcgacttcttacgatatccggctctccgactccgcctactccggctcggagcacacgctaaccgtagccgtaaccataccaatcctcctacaccgatgggagccgacacctcgacggtcgggggccgatgcgccttatacccgccgagcccgccggaagacggagccgaggccccgactccccccgacgtggcggacgccggggggggggtactaaagaaattatccatgaaaataaaaaaaaaactcagttttcggttttcatttattcgatggttttcattggatattcctccaaaaatgtaaactagaaaccactatcctggtggaagccttggagaagttaacaattttttttttatctcatatacaaaaggtgatatcggataaccatagaaattttgaatatcaaactttgtttgtgat

SEQ ID NO: 21406 - DNA, 513 bp, Oryza sativa
  unsure (1)..(513): unsure at all n locations
  Clone ID: uC-osflM202027b04b1
ttcctttccacatccaggctcctcctcttggtggtccagatagagccgaacagtcatgacagaagtcctatcaagacctcttgaacaccgtctaagctctccaaccttagatggtcactatgaagagaagaggaaatccaatgttgaatactcagaggatgagaagaaagccaaaatcatatcgctgaagaagaaggcaatgagtgcttcacaaaagttaaggcattcaatgaagaagggngaggaggagtagcaaggtcatatccatctcaattgcggatgaacgtgatcctgaggaggtgcaggctgtagatgccttccgtcagctccttgtacttgaagagttgctaccatctcaccatgatgactaccacatgatgctaaggtttttgaaggcaagaaagtttgatgtggagaaggcaaagcaaatgtgggttgatatgctgcagtggagaaaggaattcgctgcagataccattcttgagggattttgaatttgaagaagctgacaag

SEQ ID NO: 21407 - DNA, 537 bp, Oryza sativa
  unsure (1)..(537): unsure at all n locations
  Clone ID: uC-osflM202027b05b1
tccagttagcggcagcggcagcagcagcagttgttgttgggggtaggtgcgcctcctccccaaccaaaccctcgcttccctcgcgcgcggcgcggcgatggcgctggcgctggaggcggcgaggtcgtgggcggcgtccgtgctgccgccggagctcgccgccgcggcggggggcgacccgctcgccgccctcgccgccacggccgcggcgctcgtcgccggggtggtcatcctcgccgtgtggttccgatccggtggaggggcgccgnccaaggccgncgcgccgccgccgcgcccgccgncggtcaagatcgaggccgacgccgacgccgacgacggccggaagcgcgtcaccgtcttcttcggcacgcagaccggcaccgccgagggcttcgctaaagcgatggcagaggaggcgagggcgcggtacgagaaggcggtgttcaaagttgtggatctggatgactatgcagctgaggatgaggagtacgaggagaagctcangaaggaaactatcgggttgctcttnctagcaac

SEQ ID NO: 21408 - DNA, 505 bp, Oryza sativa
  unsure (1)..(505): unsure at all n locations
  Clone ID: uC-osflM202027b06b1
tttgtttacggccgaactactggaggaactccacaccgaaaaccagccaacctcctccccccttccccgtcgaactccacgccgggctctcctccccctttccatttccggagctcatcaatcccacccacggtttctggaaccaccacccccccccccccggaaaatttcaaaaatttatctcacaccaacgagctctctctctctctctctccctccccgtctcgtcccctccaatccccaatcccgccgcgccgccgccgnctcaccgcaccgatctccatcaccgcgagcggctgtgccggcgtcctgccgcatcctctccggtgaacgaccgtacgcgcatcctctctcgctctgggtgtgtacgtggctctcgtccgctcgaatcgcacacactctcgatccacccgcattcgccaaattcgtgccccagtttttgctccgaatcggtagatctcggtctcgggtcggtgctgcctttgcccaatcgcgcggtccgaga

SEQ ID NO: 21409 - DNA, 461 bp, Oryza sativa
  Clone ID: uC-osflM202027b08b1
tttccgtagagcttgcggtggaacgtgcaggcggagctggtgcactgccggtgggcgatgctgggcgcggcgggcatcttcatcccggagttcctgaccaagatcggcatcctcaacacgccgtcgtggtacaccgccggcgagcagcaatacttcaccgacaccaccaccctcttcatcatcgagctcatcctcatcggctgggccgagggccgccggtgggctgacatcatcaagcccggctgcgtcaacaccgaccccatcttccccaacaacaagctcaccggcaccgacgtcgggtccctggtggtctgtgggttgacccgctcggctggggcaccggctcgccggagaagatcaaggagctgcgcaccaaggagatcaagaccggccggctcgccatgctcgccgtcatgggagcttggttccaggcagagtacaccggcaccggccccatcgac

SEQ ID NO: 21410 - DNA, 473 bp, Oryza sativa
  Clone ID: uC-osflM202027b09b1
tttccttagaaaacaaacagggatatctgtggcgaaaaagcgaaaacctatgaaaatcggaactaaaagttttctaaattattgaaaaaattactagaaatatgtgtaagcatggactacattcccttcaaatctctctgtctaaactcaactttatttggaaggaaaagaagacaaaattttggtgaatagtaggaagctggatttgaacttgagatttggtggaaatgtagttcacacctatacttatctctagtaaattttccatgaatttagaaaaaaattcagtttcggttttcatttattcgatggttttcattggatattcctccaaaaatgtaaactagaaaccactatcctggtggaagccttggagtagtttacaattttttttttatctcatatacaaaggtgatatcggataaccatagaaattttgaatatcaaacttttgtttgtgataatattccttt

SEQ ID NO: 21411 - DNA, 464 bp, Oryza sativa
  unsure (1)..(464): unsure at all n locations
  Clone ID: uC-osflM202027c01b1
tctagttcgcggggccatgcgacgcgacctggtactcggtgactagtcggagagctcgcgcacgccacctgggcccacccaggcccaggcccacctcgccgaggatcgccggagtagggggttgtcggtcagagcggctgataccaccatacggtcaagggttgcggcgagtgcgtaccaacgggatccaagagggccacgaggcgaacaagggatcatgcccaacgaagctgcggtacactcgaaacataccaagcatgctgcattgtgcgctgagagccaatctttcatctatagcgaagagctatctnttaggtcacagcggtaatatcctagtcaaccttattgggaaatggaaggaagctgagtactctggccattctgttcctgttggatggtcttgcttactatgcaactgctgcatcaagtttagctgatgttctcgtaaatccattcgatgcact

SEQ ID NO: 21412 - DNA, 438 bp, Oryza sativa
  Clone ID: uC-osflM202027c03b1
acgttgccgtgctctcctccattggaggattagaacggagagagaggaaggtggcgaaaattgttagatttgcccatccattatattttcttgaaaggaaaaggaaggctaatgaattcaggtatttgcatcacatcacaatctgcaaagcaggaatacctgaaactctcatccagagttgacgaaatcatgtcaacttagaatgatatcaaggctcttgttacattcagaagatcagggcttcaggccctgcttgtttgttgctggatgaagacattcaccaggaaaccactgcaaagtgcagtgcacgtacaattccttcgatcaagtggaagggcatctcatgggcttatagatcaactttgttccaaatgtcctaaacatgatgatggagccactgtgcaaagtgaaaccacttcaagcaagttcatgtgttta

SEQ ID NO: 21413 - DNA, 514 bp, Oryza sativa
  Clone ID: uC-osflM202027c06b1
tgcatatcttgttagccggatgcctatgctgtatgagtgtaacgattcctgtacatgctcacataattgccggaaccgagttgtacagaaaggttctcagatccactttgaggtgtttaagacaggagatcgaggttggggacttcgtagttgggatccaattcgggcaggcacatttatttgtgaatatgcaggagaagttattgacagaaacagtatcattggagaagatgattacatctttgagacaccttctgagcagaatttaagatggaactatgcaccagaattactgggtgaacccagtctttctgactcaagtgagacacctaagcaactgccaataattatcagtgcaaaacgaactggaaacatagctcgctttatgaaccacagctgctcaccaaatgttttttggcaaccagttttgtatgatcatggtgacgagggatatccacatatcgcattctttgcaatcaagcatattccttcgatgacagagcttacatatgat

SEQ ID NO: 21414 - DNA, 419 bp, Oryza sativa
  unsure (1)..(419): unsure at all n locations
  Clone ID: uC-osflM202027c07b1
tcaaatttcccttcccatgcgacgcgacctcctcctcggcgactagccggcgaactcgcgcacgccacctcggcccacccaggcccaggcccacctcgccgtggatcgccggagtagggggttgccggccggagcggcggctaccaccagatggtcggcggcgggggcgagtagcgcgacggcggcggcgaggacgacgagcggcggacggatctgcggcgcggcggggcggcgggggcgggggccaccatgtctgccgtagtgtggggaaggaggtcctcctccatcttcggcgacgagctcactgttcttttcacagtccttngccattccactgcccaccaccaccaccaccccggcaagcgctgccgctgcttcccggcccgcgcctttgacgaggcgactcaccgtcgggaggc

SEQ ID NO: 21415 - DNA, 351 bp, Oryza sativa
  Clone ID: uC-osflM202027c08b1
ttgtccttggacgcgtgggcggacgcgtggggttctagatcgcgagcggccttacctgacggtagatggaggggatgttgcccttcatgaaattggcgggaatgtggtgaggctgaagcttcaaggagcttgtggatcgtgcccaagctcgctgatcacgatcaagaggggcatctagcgccgcttgatggagaaaataccagatgttgctgctgttgaacctgttacagataaggagactgggcttgagctgaatgaagagaatgttgagaaagttcttaatgaaatcatgccataccttgctggcacggaggtggtggccttcaggttctcatgatcaagggccccatt

SEQ ID NO: 21416 - DNA, 333 bp, Oryza sativa
  Clone ID: uC-osflM202027c09b1
tttccttcgccagatcgcgcgcgagatcgccatcctccgcaccgccgagcacccggcggtggtgcggtgccacgacatgtacgagcgcggcggcgagctgcagatcctgctcgagtacatggacggcgggtccctcgacggccgccgcatcgccgacgagcggttcctcgccgacgtcgcgcgccaggtgctcttcgggatcgcctacctgcaccggcgacacatcgtccaccgggacatcaagccgtgcaaccttctcattgactgcgcgcgccgcgtcaaagatcgccgacttaggcgtcggccggatccttaaccagaccattggatccc

SEQ ID NO: 21417 - DNA, 441 bp, Oryza sativa
  Clone ID: uC-osflM202027c10b1
tttttgttcaatcgatcggcctgtaccgcgagcgcacgatggcgagcgctcgtcgcagccgcggcgtggcggcggtggggatcgcggtgtttgtggctgtcgtggtggtggcggcgggcgccgggggcgcggcggcggtgtcgtgcggcgacgcggtgagcgcgctggcgccgtgcgggccgatcctgctgggcggcgcggcgcggccgggcgatcggtgctgcggcggcgcgagggcgctgcgcgggatggcgggcacggcggaagcgcggcgcgcgctgtgcaggtgcctggagcagtccgggccgtcgttcggcgtgctccccgaccgcgcgcggcgcctcccggcgctctgcaagctcggactcgccattcccggtggtgccgacaccgactgcagcaagatatccttagtggcagcggcggcgacgacgacgccgc

SEQ ID NO: 21418 - DNA, 447 bp, Oryza sativa
  Clone ID: uC-osflM202027c11b1
tttccttttatacacggagtttaattagtttattgccttctacaatggataggatcttcgcccgtttcttttgcttcctactgattgcggcagtaagccatgcagctgatctgtcccccgagcaatactggcgatccatcctccctaacaccccaatgccaagctccatctcccaacttcttaactacccttacttgcctgctgttagattacctcgccgtacggatgctggtcagcgcaactacaaatcatcagtttcacatgtggctgaacgatctcaccgtgtagatgatggccaacgcaactacaagttatcagctttacctgccactaatgaactacctcaccgtacggatgctggtcaacgcaactacaagtcatcagtttcacctgtggctgaactaccttaccgtgtagatgatggccaacgcaactacaagttatcag

SEQ ID NO: 21419 - DNA, 510 bp, Oryza sativa
  unsure (1)..(510): unsure at all n locations
  Clone ID: uC-osflM202027c12b1
tgctcccttctagagagatctctcccgagctcgatccgggtcaccgtgacacgaagacgaccatggcgatggctcgctcccagcttgccgccgtgttcctcgccgtcctcgtctcggtggcgccgctcgccggcgcggcggacaacctccaggacgcgtgcaaccggacgctgttccccaaggtgtgcatccaggcgctgacgacgaacccggagagccggacggcgaacgcgcggcggctggcggagctgtcggtgtacgtggcggcggaggtgggcacggcggtggcggcgttcgcgcaccacgagctgaacggcgtgaaggaggacgccctgttcaagtgcgtggacagctgctccgacgacatcgaggaggcggtggcgcacctcagcgcgctcacccgcgagctcaccgacgccaagttcctcgaggtcaaggcctggctctccgncacgcttcgcggctcctccacctgcgaggacacctgcaggacgcccncatagcgagatc

SEQ ID NO: 21420 - DNA, 279 bp, Oryza sativa
  Clone ID: uC-osflM202027d02b1
acgttcgtgtcttgatccattcatatatgcatccaaggagtgtggaacgcaacacgtattttttttttatctatgctaatctgatcattagcagaggagagttctagcagtaggattggattaaattggagtagcttcatagtttgcgtgtagggatcttaatgagatatggttagacagacagtacagtagacgagaggatgttgggtgcgttcaacggcacggcgggggaagggacagcggactttttggactgcggaggacgtacgctgttgctca

SEQ ID NO: 21421 - DNA, 492 bp, Oryza sativa
  Clone ID: uC-osflM202027d04b1
ttaaattttaaaacaaaagaaaaaaaaacaccacacgagcaaaatctccttggcccgccgccgccgcctccgccgtcgcgcggcgatctccaccaccgcgacgcgagcggcggtgcccggcggcgtccagctgctcccgccgccgcgtaccctcgcctctggctcctcctcgccgcgcccaagccaatctctccccacccgccacctcggcctctcgactcgcgagcgagttcgccgatctccatccatcacccctcgagccagcggcgccggccgacggcgtgcttccggtcctcccctgccaaagtgttgggtgttgatttgaagcctcaaggattcgagcgaaatgacttcttccatgagcaaatccgacaagaagaaggtgctagattttgcggcatggagtttcaacatcaccacatccgttggaatcatcatggtcaacaaggctctgatggctacacatggattcagtttcgccacaacattaac

SEQ ID NO: 21422 - DNA, 315 bp, Oryza sativa
  Clone ID: uC-osflM202027d05b1
ttcgtttttctcgcatctccactcgccatgggcaagattaagatcggaatcaacggtttcggaaggatcgggaggctcgtggccagggtggccctccagagcgaggatgtcgagctcgtcgccgtcaacgaccccttcatcaccaccgactacatgacctacatgttcaagtacgataccgtgcacggccaatggaagcacagcgacatcaagatcaaggactccaagactctgctcttgggcgagaagccggtcaccgttttcggcatcaggaaccctgacgagattccgtgggctgaggctggtgctgagtat

SEQ ID NO: 21423 - DNA, 468 bp, Oryza sativa
  unsure (1)..(468): unsure at all n locations
  Clone ID: uC-osflM202027d06b1
ttgatttcagtgatgaactattttttccttctaccacaagtagtttattgtttgagagattcaagaaagttaggtttttcagttttgagaatgaggtgagttccaccgtgccagcaaaattgtttgaatggagcaggagagtttgcagccgtgtcaaatttaagatctgtggaggaaccgtccctgaaaagttgcagttgtacaatgctaatgtggtcaattcccttaagtttcctattgaagaaggcacttgtccagacaatccacagttagagaaccggagaacagtaagagaacttagatttgagatccacgatggaatggttcctactagctgtaatccagacaattgtagcatatccaagtatttgagactacctaacgaagnagggcagcgatccagagaagccacttgcaccaaggtccaacttcttaacagatatgagattgatgatggaactaggaatc

SEQ ID NO: 21424 - DNA, 485 bp, Oryza sativa
  unsure (1)..(485): unsure at all n locations
  Clone ID: uC-osflM202027d07b1
tcgcgaacggctataattaggcggttccaaaacgcgcccccacgcttttgcgcccacgaccccccgcgactcccccgctaattacacaactcgccaccaccgtaacgggcaacgcccagaagcgtccgcctccccctccctccgagggcgagatcggaacaaggcccccacccaaccaccgccgccgccgccaccggcgatcgccggcgacccccgggccacgggaggcgccccgccctcctcgccattggagaggaccttctctcctgctcggattcgtttgctctgggtggtggtggngtntttncctggcgccgaggcncgcgcctgccatgccggagaccgggccctacggccacaagaagaccgacggcatctgcgacggtgtgtgcggagagcctgcgtcaaaggcagttctgaccatgtcgaggctgaaatgtgcacttcggggatttgatttcagagcactattggccctattgata

SEQ ID NO: 21425 - DNA, 437 bp, Oryza sativa
  Clone ID: uC-osflM202027d08b1
ttttccttctggcgttcgggggctgctccgccgtgccaagaaccgggccaaggatgcgttccgtggacgtgagggtcagcagcgagcaggaggcggcgcctgcggtcagggcgccgtcggggaggaccatcgaggagtgcgaggtcgacgccgtggtcgggagattcccggttcccccgccgttggtcagacccaaggctcccgaaggaacacctcagatcaggcctcttgacttgacaaagcgccctcgtcgcaaccgcaggtcgcctgctcttagggccgcattccaggagaccaccatctcacctgccaatttggtgctcccgctgttcatccatgaaggggaaggatgatgctcctattggagctatgcctgggtgctataggcttggatggaggcatgggcttcttgatgaggactacacgtctcgtgatgt

SEQ ID NO: 21426 - DNA, 478 bp, Oryza sativa
  unsure (1)..(478): unsure at all n locations
  Clone ID: uC-osflM202027d09b1
ttgagttcgagggggctgtcattgcattgttccatctgttgattactagaaccgacaaagtccgtgccttgcgcgaggctttctaccgccagaatcttccaaatgtgaccaacttgcttgctactgttttagtcttcctcatagttatctacttccaaggcttccgtgttgtgctaccagtgagatccaagaatgcccgcggtcaacaaggctcatacccaattaagctgttctacacttcaaacatgcccatcattctgcattctgcactgattaccaacctctatttcatatcccagcttctctacangaggtacagtggaaatttcctagtcaaccttattgggaaatggaaggaatctgagtactctggccattctgttcctgttgggtggtcttgcttactatgtaactgctccatcaagtttagctgatgttctcgcaatccattcatgcactgtctatgtggcttcatgct

SEQ ID NO: 21427 - DNA, 520 bp, Oryza sativa
  unsure (1)..(520): unsure at all n locations
  Clone ID: uC-osflM202027e05b1
tttcaccttcagcgcgagccgcgagcgagagaggaaaagggaagcgacgatctctgcccttctagaaggttcgcctcgtcggtccccttccccccctctcctctcaagcttcagagccctctctctcccttacacgaggcgagatctgctccccttctcccgattcaaccaaccaccacctcatctccgattccccctcttcttcttcttcttcttcctcttcttcttgggggggtttggggatttcttgactggacgacctcgtgcgatttcgggaggcaggagccatgaacggcaataagcagtccctgatatacagcttcgtggccaagggctccgtcgtgctggccgagcacaccgccttctccggcaacttcagcaccatcgccgtccagtgcctccagaagcttccccccaacacctncaagtccacctactcctgcgatggccacaccttcaacttcctcgtcgaccgcggcttcgtgtttctcgtcgttgccgatgaggcccgtggaaggag

SEQ ID NO: 21428 - DNA, 434 bp, Oryza sativa
  Clone ID: uC-osflM202027e07b1
tgccactggctctggatatgggcagcatgggtaagggtcaaatatggataaatgggcaaagcattggacggtactggacagcatatgcggaaggtgactgcaaaggttgccattacactgggtcatacagggcacccaagtgtcaggcaggttgtggtcagcctacacagcgctggtatcatgtgccaagatcctggttgcaaccaactagaaatctgctagtggtttttgaggaacttggcggtgattcttcaaagattgcccttgcgaagcggacagtctcaggtgtctgtgctgatgtatctgaatatcatccaaatatcaagaactggcagatcgagagctatggggaaccagagttccacacggcaaaggtgcatttaaaatgtgcacctgggcagaccatttttgcaatcaaatttgctagctttggg

SEQ ID NO: 21429 - DNA, 514 bp, Oryza sativa
  unsure (1)..(514): unsure at all n locations
  Clone ID: uC-osflM202027e09b1
ttctgattcgttctaggttggtctggggaagatggcgatcacggtgaggcggtcgacgatggtgcggccggcgtgggagacgccgcgggtgcggctgtggaactcgaacctcgacctcgtggtgccgcggttccacaccccaagcgtctacttctaccgccggggccccgagggagggggcgcgccggaggggttcttcgacggggagcggatgcggcgcgcgctggcggaggcgctcgtgccgttctacccgatggccgggcggctcgcgcgcgacgaggacgggangggtcgagatcgactgcaacggggaaaggggtgctcttcgtcgaggccgacgcgcccgacgccttcgtcgatgactacggcgacttcgcgcccaccatggagctcaagcgcctcatccctgccgttgattacaccgacgacatctnctccttctcgctcctcgtgctccaggtgacctacttcaagtgcggaggtgtcttcctggagttggtatgcaacaccatgt

SEQ ID NO: 21430 - DNA, 451 bp, Oryza sativa
  Clone ID: uC-osflM202027e10b1
cccagcttacttcaatggagctcatcgtcctaccttcatacagctgaaaaaattccctcatatacaagataaaggtaggaggagggccgggagctcgacggatttcgatcaattgtggtttttttttttgtggtaaccgtataagagaggagattttgtttaacgtagctagatcatatctgagttgagttttagcaatggaggtgctgatccggtggagcaaactgccggcgggcggctccttggtgctgtacgccgacttcttgctgtcggcggcggccacatcggaggccaacatcggcgagtacgactagtactggcagaagcgcaagctcatggctgatgccgccgccgaggctacctacaagcgtgaccccttcgaggtcaccaacagctataaccgcgccgttcacagatcggaggaagagagcgggaggagggagctggcgat

SEQ ID NO: 21431 - DNA, 418 bp, Oryza sativa
  Clone ID: uC-osflM202027e11b1
ttccatcttcccatcacagatgccgcgttccttccacggtgacaaggtgttctcgttcggaggccacgcgttctgggccgacctcgcaaagggcgtcctcttctgtaggtgcgacgacgctctctccggccgcaatgatgatgccgtgcaattccgctacatcccgctgcctgtagagtgccatcttaacatcagtttcgccatgaggggtgacctccagctatgccgcacaatgagctgtgtcgacggcggcggtgactctatcaagttcgtctgcatcagtgacggccgatccagctctgcgcacaccggcgatcgtgcgataacgatgtggacactgaccctcgcaaccggggagtggctgaaagatgcacaactcatggtggcagatctgtgggagctggagggcttcgacaag

SEQ ID NO: 21432 - DNA, 520 bp, Oryza sativa
  Clone ID: uC-osflM202027f03b1
tgtagaaatttcctaaatctgcacagcctaaagaaggaatgtcagctgtctttcaggagattagttcaggcaaagctgtgaccacaggattgcgaaaggttactgatgacatgaagactaaaaaccggtctgatagaagtggtgttgttagcagcagcactgctgctccggctgctgctcctgagaagacctctcgtgcagggtctttctccttcaagtctgggcctccaaaattggagcttcagatggggcgcaaatgggtggtcgaaaatcaagttggtaaaaagaaccttgcaatcgatgattgtgatgctagacaatctgtatatgtgtatggatgcaaggattctgtccttcaagtaaatggtaaagtgaacaatatcactgttgacaaatgcaccaaagttggaatcggtttcagcatgttgtagcaactttgaagttgtcaattgaatggtgttgaggtgcaatgcagggtacagcacccacaatatcaatcgcaacacatctggatgtcaat

SEQ ID NO: 21433 - DNA, 334 bp, Oryza sativa
  unsure (1)..(334): unsure at all n locations
  Clone ID: uC-osflM202027f07b1
ttcggatctaattaatttacctcctccacctcctcctcctccccccgatcggatcggcccggctcctcctcctccgccgccgacaccgncgacgcagataggagaagatggccgcacttgataccttcctctttacctcggagtctgtgaacgagggccaccctgacaagctctgcgaccaagtctcagatgctgtgcttgatgcctgcctcgccgaggaccctgacagcaaggtcgcttgtgagacctgcaccaagacaaacatggtcatggtctttggtgagatcaccaccaaggctaacgttgactatgagaagattggcagggagacatg

SEQ ID NO: 21434 - DNA, 247 bp, Oryza sativa
  Clone ID: uC-osflM202027f08b1
tgtactctctgagctctatctatctactagatagattaggtcgctcgagggtaaatagagctttgagcgcggctttgaggggaggacatcggcatgaggatccagtgcgacacgtgcgaggccgcggcggtcacagtggtgtgcttagcagacgaagcggtgctgcgcgcgcgctgcgacataaagatccacgcggccgacaagcttgctaggaagcaccagctcctaccgttggacgccacactgc

SEQ ID NO: 21435 - DNA, 441 bp, Oryza sativa
  Clone ID: uC-osflM202027f09b1
tgaaagtctgctccagtgaaccgcctttcaccagaaactgaaaaggagaaacaactattcgcagagagggaagcaagggacaagctgagaaaaagaaagagagaagaacagaagggggtgtttgaaaatgggataaataagcttcatgttgaggctgagcgactaaatagtttactagcagagggccgtgttttctctgatttgcctgctttagctgatagagatagcatcttgctgaaagacactcgcctggagaactctcttatctgtcagcctcaacaacggaacttgcatggacgaatatttggaggtttcttgatgcaccgagcatttgagcttgccttctcaactgcatatgccttttgttgggcaaagaccttgcttttttgaagttgatcatgttgacttcttaaaaccagtggatgtaggagactttcttcg

SEQ ID NO: 21436 - DNA, 524 bp, Oryza sativa
  Clone ID: uC-osflM202027f11b1
tgtactttttgcagctgctcacgctcagcaaccaccatgaaccgatcctgtagaagtggtgccgctggaggcgatcctggggagatggaacaagaccaattcgcccttgtggagcatgagccgagagccatgccgtggcgtacccgtagacggagtaaccgtgctcgacggcaaccacgagaacaacccctgcatcaagtgctactgctcctacatgaacggaacccggtgccatatcacccagctgaaggtatacgccttgaacgttgacggtcagatacctgcagaattacagaacctgacctacctaaattacctggacctggatcaaaattacttgtcaggccccataccatcattcatagggcaattgactgccttgacagaattgcatgtgggattcaatgcactctcagggccaattccgaaggaacttgggaatctcacgaacctcaacttgctaggcatcagtttgaccaattttactggtcaacttcctgaagatttgggcaacctgaccaaac

SEQ ID NO: 21437 - DNA, 208 bp, Oryza sativa
  Clone ID: uC-osflM202027g01b1
ttgttcgtaaggagccacaaaaccaaggagcagtttggggtatggttacgacgcatgggggggcatgcgcaaatagcattaacgttggcaaaggtgctggttcggcgcgaccgatacataatggagcccggcccggacgaggcactgcggtgctcctagagggaagacctgacgaacgcgcgagaagccattgctggttccaagaggg

SEQ ID NO: 21438 - DNA, 329 bp, Oryza sativa
  unsure (1)..(329): unsure at all n locations
  Clone ID: uC-osflM202027g07b1
ttcacagccggagtcttactttccggtcccgtgcatgcccaggacgccatgggccacaaccgagaatagcatcaaccttgccaccgctgctgcttcgccggcgccaatgccgatgtgagcccggcccggccgccgcacccccctccccctacggcgacgacgtcacgcgcgcgcgagatgccattgttgcttctgtgaggggggctcaccggaacgcgtcggcattgacgacgacccggacgaacgcgcggcagcatgatgccgngcgtcctcatggcgtctacggaggacacggncacggcccctgccggtgggccgccggagccccc

SEQ ID NO: 21439 - DNA, 333 bp, Oryza sativa
  Clone ID: uC-osflM202027g08b1
ttctcctgtgccgctgcacatatatatagctcccaccaccacgagtaatctaacagaataaatcatgggaccagcccacggccacctcgtcctcctcgtcgccgcggtggcgttgctgtcagctggcttcctcccgcacgctgtggcgaagaagggcggcgccgtgccaccggcggttgctgacatatgctctcgcactccattcccagacacgtgcaagagcaccgccgggcggcacgcgtccaagtacccggtgatcgacgtcgtggctgtgctcaacatgcaggtggacgcgttctccaagcgcacggcgcatgcgagggagcggcgtga

SEQ ID NO: 21440 - DNA, 350 bp, Oryza sativa
  Clone ID: uC-osflM202027g09b1
tccgggtgccgagggtggccaggcggtggcgctccgcctgttcggcaccaaggcagccatctacaactgcaccatcgacggcgggcaggacaccctatacgatcacaagggactccactacatcaaggatagcctcatcatgggcagcgtcgacttcatctttggattcgggagatcactctacgagggctgcaccatcgtctccgtcaccaaggaggtgtccgtgctgacggcgcagcagaggaccaagaccatcgagggcgccatagaaagtggcttctccttcaagaactgcagcatcaaaggacaagggcagatctacctcggccgggcatggggggaatttcgcg

SEQ ID NO: 21441 - DNA, 401 bp, Oryza sativa
  unsure (1)..(401): unsure at all n locations
  Clone ID: uC-osflM202027g10b1
tttccgtcccattcccttttccgccctttttacttgccctttttcctcctccccagattcgccccgcaccgcaccgcccttggctcgccccgccgctcgtccaccaccacgcagggagagaattttgacggcagaggcgtcgtcgttgattagggcgattggattagtcgcgtcgccgttgagacccacgcgggcctcttgtcccgtaaccaactacctccttccccattggctgccttggtttgggattgggaggccattcgtttcgttgcgttgcgggatacaataatagcagcagcagcagcgccacccctcggcaaagccatcgggggcgcgcgcttgtagccatcggaggaggaggaggagggagntggccctncggccccctagggcggatcggc

SEQ ID NO: 21442 - DNA, 504 bp, Oryza sativa
  Clone ID: uC-osflM202027g11b1
taggggtagcaaagccagccaggcgagggaggaaggaaggaagaagagcaggaggagcccaacgcccgcgaaaccctagccctcgcgctcgcccaccgccttcctctccccccctaccctaccccgagctcgccacccgatccgatcgaagatgcataagctggggagaggaagccgcgacaaggtgcagcagttcatgaccataactggtgcgagtgagaaggtcgcccttcaggccctgaaagctagtgattggcacttggaaggagcttttgattttttctacagccaaccacaaatttctctgacgaactctcggcatcttgaagatctgtacaacagatacaaagaacctgatgttgatatgatcatggtggaaggtgtatctcagttttgcactgatcttcaggtggatccccaggatattgttatgcttgtcatatcatggcacatgacagctgccacaatgtgtgaatttactcgccaggaattcattggtggact

SEQ ID NO: 21443 - DNA, 518 bp, Oryza sativa
  Clone ID: uC-osflM202027g12b1
ttgcgtttccagggactggaattaatggcatgtctggggctccttgacagaatggagcaccatgctacatcccttcacaggcttctcatattcgcagctccaacaaatctacagccctctgagtcaaccttcccctcacaaactgccatggcagcttcacaggcaacatcaatttctcgaggggcatctgagccttttgcagtgccaaattcaatgccttctggcgtgaactttgcattacaatcaagttcatcagctccccctgaaacaatcctttcagccttgcaagttagtcagtctgagccagggaagaaattcgagtccaaatctacagattgggctgatacattgagccgaggcttagtcaatctggacatctctggaccaaaggctaatccgcacgctgatattggagttgacttccattcaatcaatcgcaaggagaaaaggcaagaaaagaaagtctctcaagctctgtggtatctacgatcactatgggcaagccatgggaactggct

SEQ ID NO: 21444 - DNA, 367 bp, Oryza sativa
  Clone ID: uC-osflM202027h01b1
ttacggccacctcactctccctctctctatctctctcttcacatttccattccaactcaacctcctcctctcttctcctctcctcttctcacacgaagccaagaaagccaagaaatccatccatccatagcaagggagctagctcgccggcggcgatgggcaaggactgcggcaaccacggcgacgacgacatccggcaggcgtgccggcggctgctgacgatcctcttcggcctcgccctgatcgtggccatcatcgcgctcatcgtgtacctcgtgctccggcccacccaccctcgtttattcctccgggacgccacgcttcggccgcttgaccttctccaattcctccacctccggggtccttt

SEQ ID NO: 21445 - DNA, 339 bp, Oryza sativa
  Clone ID: uC-osflM202027h02b1
tgttcgtacgccggcaaagccacagccacggcgatctgttccccctcacggcggagatggcgctatcgacctcccggcctcaccacctcctgcgccatatgctgcgcggattgcacgccacttctaaggccatggcgaggcctgagccccacgagttctccaagccgagcgactacctggggagactgggagccacgacatgacccacgggaggcgtgggcgcggatggagccgcttcgcaagggctacacgcgcgacatgcgggagctgatgaggcagcactcgttcgagatgcacctgctggaggtctagctggcaagacaaggcgctgcgcccgct

SEQ ID NO: 21446 - DNA, 85 bp, Oryza sativa
  Clone ID: uC-osflM202027h03b1
tattgttcaacggatacaaggccggggatgggctggagttcatggagatgatgggcctagcgcacagggaccttaagcccgagaa

SEQ ID NO: 21447 - DNA, 432 bp, Oryza sativa
  Clone ID: uC-osflM202027h05b1
acgtttaatttcaaataaggaggctccgcagcacagagaggtattcaagagtaccttgacgtaagctgctgcaaccgcaacgagcattcaacttgatcagtatttacaagagaagcagttggtgctgtgcccgcaggccaagaactctgtcagcagcaactgtagggactgatgttactgaagaggatccgaatgcaccaccttgcggagaaacttctgaagaaagctctgaggatacagcacctgacactgctgaagcaagtgagcaagctgaggcaagcacttcttccattcccaaagcaggactaaacataagaaagagtgagatgccgacactgaatgatgaggatctagatgctggtgcatgttttactgcgaaggataggtctatcaaaccatttggtgtatttgatgatattggagcattcactg

SEQ ID NO: 21448 - DNA, 252 bp, Oryza sativa
  unsure (1)..(252): unsure at all n locations
  Clone ID: uC-osflM202027h06b1
ttgggtgttggtggtggnggaacccacacattagttgttgaaagaagaggaaaggaccttgacgattgaacactgtacgtttaaacgataaacgcaatcataagatattatcagaataaagatataaccattattgcacaattttaaaatataaaaatacaattactatgggacagaggtagtacatgtatttatctgacactggtataaatatactatggaatatctcaccattaatggcggcaaagtata

SEQ ID NO: 21449 - DNA, 354 bp, Oryza sativa
  Clone ID: uC-osflM202027h07b1
tatacggccacctcactctccctctctctatctctctcttcacatttccattccaactcaatttcctcctctcttctcctctcctcttctcacacgaagccaagaaagccaagaaatccatccatccatagcaagggagctagctcgccggcggcgatgggcaaggactgcggcaaccacggcgacgacgacatccggcaggcgtgccggcggctgctgacgatcctcttcggcctcgccctgatcgtggccatcatcgcgctcatcgtctacctcgtgctccgccccacccaccctcgcttcttcctccaggacgccacgctccgccagctcgacctctccaattcctccacc

SEQ ID NO: 21450 - DNA, 245 bp, Oryza sativa
  unsure (1)..(245): unsure at all n locations
  Clone ID: uC-osflM202027h08b1
ttcgccggcaaagccacagccacggcgatctgctccccctcacgggggcgatggcgctctcgacctgccggactcaccaccttctgcgccctctacttcgcggnttccacgccacttctcaggccatggcgaggcctgagccccacgagttctccaagccgagcgactacctcgggagctgggagcccgcgggcgacccacgggaggcgtgggcgcggctggagcggcttcgcaagggctacccg

SEQ ID NO: 21451 - DNA, 404 bp, Oryza sativa
  Clone ID: uC-osflM202027h10b1
tttcgtttctccatcaggggcacaatagaagaaactgagattctcaaagtgatggcggggatcaccggatctcgagcactcatggcggaggcgctcctctgcgctgacgaggccatgactgctgcacaagaagcatccaacgtgcgagccacgtatcattattacaacccacaacagaacaactggcacctgaacaaagtgagcgcatattgtgccacatgggatgccaacaaaccgttgtcttggcgccagaagtatggatggaccgccttctgtggacctgctggtcctaggggccgagactcgtgtggcaagtgtatccaggtgaagaaccggtgaacaggtgcgacaataattgcgaggattgtcgaccaatgcaacaatggtgggctggatctggacta

SEQ ID NO: 21452 - DNA, 412 bp, Oryza sativa
  Clone ID: uC-osflM202027h11b1
tgccgtgtgcaattggggagaagccaagccaaggttggggaagggagaggagaggggctcgccgatcgatccctctccggctccgccgtcgaaccgccgcgtcgagtcgagtcgaatcgaagatcgagccgctcctccacatctcccactcgcggtcgccatcctccagcgtcgccgcgcgcggctgctccgcttcccgacgccgctcgccgctcctccagctcagctccccctcgcgcgcgtctccttctatctctctctccagcgaccagcggtggtggccgtctctagcgccggctgtcgttaggggagaagccgggtactcgtagtaggttctggcgtgacgttttgaaggactgtgatgtgtgatccccactggcatgttgcatcctaagttcctggttgcttgctc

SEQ ID NO: 21453 - DNA, 398 bp, Oryza sativa
  Clone ID: uC-osflM202027h12b1
tctcttctcacgcgttcggtcctttgttaaatggtgtatatgtaagagtgtgagggtagttgagggtaaaataaggagaaatttaaatgagaagtgattaatgaaaccattattattctattgtgataactattttgggacaaattcaaatcctaaaaatacaattattatgggacagaggtagaacatgtattaatattccactggtataaataagtatggaatttcctacccataatgcttgcaaagtatatttattgcattatgattgctagatgcaggttttcatgcccttatccaatatcagtcactccaagaagctatggatgcattcggagctttgcatggaaggaacatatattactgatgatggcatctatacattcaatcttcaaatt

SEQ ID NO: 21454 - DNA, 307 bp, Oryza sativa
  Clone ID: uC-osflM202028a02b1
ttctttatccccaacccccaaccccaactcctttttttttcaaatcccccagatcccgcacgccgccggtggccgtagtgccgccgccgcccaaaccctagccggcgggcgggcgcagtagcggagatctggtaccgtgccgcgatgggggacttcaacgtggcgctggtgatcgtggtggcggtggcgagcgtcctcgtcctgctcgtcagcgtctacctgctcatcaactaccagcaccccgacgacgccaaccaggtctacttccccaagcttgtcgtcgttcttcggatcaccggcgcccttc

SEQ ID NO: 21455 - DNA, 278 bp, Oryza sativa
  Clone ID: uC-osflM202028a06b1
tttatgtttgctcttgcccaccgctgccgcctccggttccggctccggcgatccccatccatcccgcgagcgagcagggcgccgtcattcatcctgctgcatcctgattatttggggccaatggaagaggaggagtacaatacggaatcgtctaatgaggaagacatgcaagaagatgatggtgagaaacaaggaaatgttgccgagggtgatatcttcagccggctgatatagaatcccgcgttggaccaaaaggtgggatggtgtttgagtcggag

SEQ ID NO: 21456 - DNA, 475 bp, Oryza sativa
  Clone ID: uC-osflM202028a07b1
tcgtgtagagggtacgtgcaggagccaaggtccaacaaagcgatacctccttctcctcctcctcctcatcctcgtcatcagattcgccgcacgcgcacgatgcaggaagaattcgattggccaaccttagtgttatcaacatcaccagaaacagaaaatgttacctccagctctgtgagaagcacaaccaagaatgacgtggttattcagcaaggttccatctcttcatactggccatgggatgtcatgaaacttgaaaacgacacccattttctgtctcattcttcaggagatgggatgaaatgcacaaaggctgcccattttctatctcatgcaaacaggggttcattgaacttggattatcaagaacaaccttcaaagtccaattttgctactgaccttggatcacatgcatattctaaggaagccaggacacttggaagagtatatcatgggcagcaggcctactttttcc

SEQ ID NO: 21457 - DNA, 425 bp, Oryza sativa
  Clone ID: uC-osflM202028a11b1
ttcgggcgcccgcttcgctccggcgactccacccggccgcgccgccgggatccgcccccccgcaggccgcccctcgtcgtcgtcctcgctggttccccgccggccccggcgccttttccttctgatccagccagccgcgtcgcgcgcggcgccggggggcatcgaattcgaatccgcgccctcgccgtcgtcgtcgccgccgccgccgccggacaatccggcgcctgccccctccgtgctccccccggccagagggattgcgggactgatacggccgggatcttgctggaaatggggggttacgagtacgcgaccaatggttatcatcggggaatggaggatgactatgaagacgagtactacagtgaagatccatatgatgaggaaggggagggtgctggtcaagagtatgccgaggaggatga

SEQ ID NO: 21458 - DNA, 389 bp, Oryza sativa
  Clone ID: uC-osflM202028b01b1
cgttatttttttttttttttttttttttttttgtgtgtggttatttattttttttgtttttgttccccccttccttcctttcggggggggggggcaaaaaagaacacaaaaagggagcccccaaaaaaacccacccggaaaaaaaagggcggcaaggccccaccggaaggaaaaaaaaaaaacagatcccaaacaaagccccccaaggatccacagggcacaaagcggcaaacaagggactcaggcgccccccgggcaaaaccccccacaaaaaggaaaaaaacccggggaaaaaccccccaacaaagaggaccgaggccccaaaaaaaaaaacggggggcccagccacaaacccgggaacccaccagaaaaacaggggggggggcccc

SEQ ID NO: 21459 - DNA, 446 bp, Oryza sativa
  Clone ID: uC-osflM202028b03b1
ttagatcttcgacttcaggcctggcatgatcatcatcaaccttgacctcaagaaaggcggcaacggacgctacctcaagacggcggcttacggtcacttcggaagggacgacccagacttcacctgggaggtggtgaagcccctcaagtgggagaagccttctgcctaaaagctccctttcggaggcttttgctctgtcccattatggtgttttgtttcctcgctgctcagcattgtgattcttaacctgccccccgctgccatttatgcccatgcacgctactttcctaataataagtacttataagggtattgtgtttgaatattttacctagaggaggaggaaggatttgttatctgttattgcttaagcttatgtaatggtgaaagaaggaaagatgctacactactttgagaagaagaaatgaaacctcctatgttttggt

SEQ ID NO: 21460 - DNA, 505 bp, Oryza sativa
  unsure (1)..(505): unsure at all n locations
  Clone ID: uC-osflM202028b07b1
tcgttcgcgtgctggtcgagatcgcgtgcgcgcgcggccccgcgcagctgttcgcggtcaggcaggcctaccacgagcgcttcaagcgctcgctcgaggaggacgtcgcggcgcacgccactggtgacttccgcaagctcttggtgccacttataagtgcttaccgctatgaggggccggaagtcaacacaaagttggcacattcagaagccaaaattctgcatgagaagatccagcataaggcatatggtgatgatgagatcatcagaattctcactactaggagcaaggctcagttgattgcgacattcaatcgttacaatgatgaatatggtcacccaatcaacaaggatctcaaggctgatcccaaggacgagttcctttccacgctgcgtgcaatcatccgctgcttctgttgccctgacaggtacttcgagaaagtcatcangttggccatcgcaggcatgggaacagacgagaactccctcactaggatcattaccac

SEQ ID NO: 21461 - DNA, 534 bp, Oryza sativa
  Clone ID: uC-osflM202028b08b1
tcgtacaattcgagcaattagttcagatcgtggtaaaattgtttctggagctgatgatcaatctgtcatagtctgggataagcaaacttttaaacttttggaggaacttaagggtcatgatgcaccggttagttctgtccggatgctctcaggagaacgtgttcttactgcatctcatgatggcactgtcaagatgtgggatgtacgtaccgatacttgtgttgctactgtgggtcgttgtcaaagtgcagttctctgtatggaatatgatgactcaactggaattctagcagctgctggaagagatgtggtggcacatgtctgggatattcgttccagtaagcagatgttcaagctccaagggcacacaaagtggataagatcaatgaggatgacgggtgaaaccataataactgggagtgatgattggacggctagggtgtggtctcttacccgaggaacatgtgacgctgtgttagcatgccatgctggcccaatactctgtgttgagtactcaccctcagataaaggaat

SEQ ID NO: 21462 - DNA, 438 bp, Oryza sativa
  Clone ID: uC-osflM202028b11b1
tctgtggacgcgtggggggtgaagaccccttcgttgctcacctcgtcaccaaccaaccccaccccccaaccctctctctccctctcggcctctccgcttctccgcccacctcacctcgccgccgccgccgccgtcgccgccgcggcgcaggcagcggagctcggcgcgcctcggccgcgccgtcgtctaccgtgcgggcgccgctcccgcgtcgcgcctcgcgcgcgcgcgcgagcgcgagctaccctcctctctgtgcatctggcgacgactcggtaaggttaggggttgtgcgccgcccatgcgcgcggctccctcgtcgccactgcctcccgctcgccgggtcctctgccacgggcgcgggtaccctcccatccggcggagttgggagtcgggcctaggggggatctcagctgtcgggccaccgatctaccctca

SEQ ID NO: 21463 - DNA, 535 bp, Oryza sativa
  Clone ID: uC-osflM202028c01b1
tgtcttaaggatcccgacgagggcgaacctcgccctcgccgccctcctcatcctcctcaccatcgccgccaccaccctcgcatcggcgaagtgcatcgcgaagaacaaacccgaaggcgaggagggggaacccggtggtgcgggcgcggctgcggcccacgcttcaccggagaagaaacccggctccaacggcagcttaaccaccatgtccgttggtgagagcgtaccggagatcaagaaggactcctccgatgatggcgccgccgtgaatgagagcaagaaacctaaatccagtggcggcttgactaccctctccgtcgatgatagtcaagcagaacccgcggacagtatagcagaacccgtggaagatggcactgacgacggcgaggatgattcggagaaaaagaagaagaagaagaagaagaaatccaaagccagagcttcgatgatgatgatgatgatgccgaagaagaaatccaagaagaaatcgaagaactcggacgacgatgaagatgacaggaagaaatccaagaag

SEQ ID NO: 21464 - DNA, 388 bp, Oryza sativa
  Clone ID: uC-osflM202028c02b1
tcactctcggcggcgggggcctcatcgatggcgtcgaggatggcgctccggcccaacgacgtcacgctccgcctcaccccgcccctcgccgccgccgcgcggcgcaaccgccgcgccgccgccggcggtgtcagggtctacgccgtcgcgtccggggccgtctccaccaaggttgagaacaagaagccatttgctcctccacgagaggtgcacgtccaggttacacattccatgccaccccagaagattgaaatattcaagtctcttgatgattgggccagagataatattttggcccaccttaagcctgtcgagaaaatgttggcaaccacaggattttcttcctgatccagcctcagatgggtttcatgattgaagtcaaagaact

SEQ ID NO: 21465 - DNA, 462 bp, Oryza sativa
  unsure (1)..(462): unsure at all n locations
  Clone ID: uC-osflM202028c03b1
tcgttctccgtccatccaccgagtcaccgacaggaggcgcgtctcctccctcctcacctccatctccataaacacagcaggctcacgcacacgcctncgccccggaggaaggaaggaaggaaggcaaggaagccaagcccgcgaccccgacctacccccaccaattcaaccctccctcctcagatccaccaccaccgagcgcccgcgatgacggccaagggcgggcgccgcgccgtcgccgggcggcgcggggcggcctcccgaacggccgcttcttcaccgtggggctcgtcaccgactggtactcctccaacatcggcgtcctcctcctcaacaagtacctcctcagcaactacggcttcaagtacccaatcttcctcaccatgtgccacatgtccggctgcgccctgctctcctacgccgccatcgcctggcttcgcgtcgtccccatgcagctcgtcc

SEQ ID NO: 21466 - DNA, 411 bp, Oryza sativa
  unsure (1)..(411): unsure at all n locations
  Clone ID: uC-osflM202028c04b1
ttcatttctctccccgtctcgattccccaccagcggcgaaaccctaaccctagagcggccaccgccatggagaagcgcgcgaccaccaccagggcggtggtgctccgcctcgacgacctctcccttccgccgcgccgcctcaccgtgccgtcccgcctcccggtctcccacctcctccgcgcgctgccgcagccgctgctcgagtcgtcgtcgttctacctcaccgccgatggccgcccgctcctgctgtccgcgcccgtggcgtcgcttccgccgtcgggnttcggtccagctccgcctccgcgcgctcgnggnggtggcgagnccggcnggggccacgggcgccgagttccgcgactgctaccttttcatgtacctcgcgaagaagcccgacaaggccgaccccaacga

SEQ ID NO: 21467 - DNA, 332 bp, Oryza sativa
  Clone ID: uC-osflM202028c06b1
ttcctccgttccacgactcgcgtttgctttcccttgttcccacttcgatctcctcgaatcacgcggtgcggaagtacgtggtgcgagtgggaggtgaggtcgctcgggaagtagcagtatatcaggggggaggggcgaggcttgactggagaatggctgggagacagagagactgaactgagctcaagccgctccgggatctccatcttgagctatccaagaactgagagtgctcccggctcctacatttgccctgtttgggcaccaataattggaggagcacgctgaggattcttgatttcttggtggctggaatcctttcaattacagac

SEQ ID NO: 21468 - DNA, 522 bp, Oryza sativa
  Clone ID: uC-osflM202028c08b1
tcgttggaatctcagttgcaagtggaggaatctgaggagaaaaccgaacctgatcaggatgtcgaagaatcgaaaccagaagaggaggaagatgaagatgaatgggatgcaaagagctgggatgatatagatgtcaatttgcctaagacaagtgcctttgaggaggaagaggcaaaccctgtcgccaagaaggttgctgaacctgttcagaagcaggaaaattctaaagcacaatctacagtggctactgtaaaaaaggttgcaaactccaataaaggtgaaacggaagatggcgaatccagtagtgcaaatgctaggaggaatagaggcgcttcaaagaaaggacctattaaagaggatgagactaagaatggcagtgaccttcgttcaccaatttgttgcatccttggtcatgtcgatactggtaagacaaaactgctagactgtattagacggaccaatgtacaagaaggagaagctggaggtattacccacaaatgggagctacgtacttccaactga

SEQ ID NO: 21469 - DNA, 544 bp, Oryza sativa
  unsure (1)..(544): unsure at all n locations
  Clone ID: uC-osflM202028c09b1
tcgttcctcggagctatgagatcagagtatgtgggcgaagctcggaaatatggaagagatggctgtcttacagaccttggtgcatgcagttatcatttggatatgttctgttgcttgtaagacaactggccagctggcatttcattacctgtatacattctttcctatggatttgcaagatatacacatgatatttctcttcattttgctcaacagtgtgctgaattctgtccgaaaatctaggttatatctataaatgtttttgtactggaggtggtttttccaccagggttaacctactctagggatcaaacccaggtcagctgggcacccccacccctagtgccttactgcctgaacacattgangggttgtctattctatgtattactaataatttagtgcgtatattcataaatcttcacgtgcttgattttcttacgaattgggcacaattttcttttggtcttctttcaaatactgtcatgtttatgttgcctgctttgtatgctcagcatcaggcatttactcatctggatatgcg

SEQ ID NO: 21470 - DNA, 494 bp, Oryza sativa
  Clone ID: uC-osflM202028c10b1
tgttcaagattcttggtctttgggatgttagtacaatggctttcacctgtgttgtggtgactgtgaatctccgacttctaatgtcatgcaactctataacaagatggcactatatcagtgtagctggcagtataacagcctggtttatgttcatcttcatctactctgcaataatgacatcattcgacagacaggaaaatgtatattttgtgatttatgttttgatgagcacgtttttcttctacctcacactattgcttgttccaatcatcgctctctttggcgacttcttatatttatcaattcaaaggtggttcttcccctatgactaccaagtaatccaggagatgcacagggatgaaccccacgagtacagcaggatacaacttccagagacaagccatctaagccagaagaacaaggagctatgcgatctccatgcttccccgagagagctcgaagcacaccgggttcgccttcgactccccgggata

SEQ ID NO: 21471 - DNA, 355 bp, Oryza sativa
  Clone ID: uC-osflM202028c12b1
tgtcagcacctcctcctccgccgccgacgccgactcctccctccaagctttccccaccatggcgtcgtcgtccgtcttcgctggcctcgcgcaggcgccggaggaccccatcctcggggtgacggtcgcgtacaacaaggatcccagccccgtgaaggtcaatctcggcgtcggcgcctaccggaccgaggaagggaagcccctggtgctgaatgtggtcaggcgcgctgagcagatgctgatcaacaacccgtcacgtgttaaggagtatttgccgatcactggactggccgatttcaataagctgagtgctaagcttatttttggtgctgacagtcctgccattcaagagaat

SEQ ID NO: 21472 - DNA, 562 bp, Oryza sativa
  Clone ID: uC-osflM202028d01b1
ttcatagtgaacctttgatcaaaatcaccacaatgcttgttattcctcattgatatgatcctactgtacccttgcttgtaccttttgaaacagtgtctctattggttaatttgcatgcgatctttgattatgctatacctttttttagtgtttaagcagtctaaaacaattcttcatgaaaatatgtgaactctgaaaagaccatatctaacctggatatgtatggtgtatcatgagcatgatttgtgttattctgtaggcagaccaggcttccaagtaccagcgcttcattacctagaaaacatctccccagatttgctacttttaaataaagagtatgcttggcatattggagggtgggttttcacaacaggaggtgcaagaatggaggcttctatatcacagttctcttcatggacaaagctttaacactttcttaggcaatgtaacgtgagtactcttaaatattggtgattccaactactctgtttgattaataatacccatttcaagactatctaattctaaataaaactacacctacaaactaaatgtcatgata

SEQ ID NO: 21473 - DNA, 382 bp, Oryza sativa
  unsure (1)..(382): unsure at all n locations
  Clone ID: uC-osflM202028d03b1
ttccttctctctctcgccatgcaggtggcgcggccgacgaagaggggctgggagcgggcgccgccgccgccacggcctctgggagcgggagtgggcgccgggacgacctcgccaccgacttcgcagccgcgggcgtccacgcctcctccctcgccgccgcgggcgaccatgccgacgtcgacggcgacgttgacggcgggagcggcagtggctggctcgggagagaccgggacactcggatccggccgtgagcgggcgccgccgccgccatggcctctgggagcgggagcgggcgcggggacaacctcgccgccgnggacgacgccgcgggcgttctcggcgccgncttcgcagccgtggggcgtacacgcctcctccctcg

SEQ ID NO: 21474 - DNA, 468 bp, Oryza sativa
  Clone ID: uC-osflM202028d05b1
ttctttctctcgccgtcgccgagctagttgagccgcggatggatagccccggtggtgcggcggcggcggcggcggcggcggagtccagcaatcgcgcgggagaagatgctaaaagtgatggtgtatcttgtcagaattcgcgacggccaaacctttcattacaaataccaaacagggcatttgatgacactctgccaacgtcaactagaatcaaaatatcacccagcccaaattctgcaagaagtggtttaccaccaaggccgaattcaactagaacaaaatcatccatcaggggcatcattccacaaaggagcttcaaagcaaagagttcattacaggatggtgaccagacaattcttctaattcctgacacaccatcatcatcaggacagcaggtgaaggcaactacatcaagatcattttctttacaaaggtcatcaactccttatcagcgaagcgaacccactc

SEQ ID NO: 21475 - DNA, 371 bp, Oryza sativa
  Clone ID: uC-osflM202028d06b1
ttagtgccttccctctcctcctcctccacatccaccggagagagtgtgtttattggttcttggaggagagatgtccaagatggcggaggagaaggtgctggcggcgccggccaccgtcgacggcgggatgcagtcctccggggacctgcaggcttcgtcggcggacggcggcgcgtgtgcggcccgtcgagacgctcctccgcgccgcgccgctggggctctgcgtcgccgccatggccatcatgctccgcaactcgggcaccaacgagtacgggaccgtctcctactccgacctcggcggcttcaagtacctggtgtacgcgaacggcctctgcgctcgctactcgctggcgtcggcgttctacatcgcc

SEQ ID NO: 21476 - DNA, 361 bp, Oryza sativa
  Clone ID: uC-osflM202028d08b1
tcgttggaggtgcccccataccggcgccatcttgacgtggtggtggcttgtgaggacgatgatgacaacgacgttgacatcccactggtatcaatctacttccggtgaagtaggggctgtcactccgttgacatggcgttggatttggtcttttcagagagacgatgtataagttgcaccggtgcctgtaaactaagtgggggtttaagccacattactgattttattttgctaccatcttgatagagctcgttcagatgggtggtttgttaccatccccgaaacttgatacgataccatcatattgataattgatgcatgatgataccgtacgactgaattagatatggcaaaatagaaa

SEQ ID NO: 21477 - DNA, 422 bp, Oryza sativa
  Clone ID: uC-osflM202028d09b1
tccccctccaattccattccatcttcatctccatatcttctcctcctcgcgtcggcagttatctcctcgttgataatggcgtcgtcgtcgtcgtggtgggtggtgatgttgttgatggtggtggcggcggcggggtggtgcggggtatctacttccaaggcttccgtgttgtgctaccagggagatccaagaatgcccgctgtcaacaaggctcatacccaattaagctgttctacactttaaacatgcccatcattctgcattctgcactgattaccaacctctatttcatatcccagcttatctacaggaggtacactggaaatttcctagtcaaccttatagggaaatggaaggaatctgagtactctggccatcctgtccctgtcggtggccttgcttactatgaaactgctccatca

SEQ ID NO: 21478 - DNA, 426 bp, Oryza sativa
  unsure (1)..(426): unsure at all n locations
  Clone ID: uC-osflM202028d10b1
ttcctccccctcctcctcctcctcgccggcgtcgtcgccgccgcggcgccactgctcgccaccgcccagctctccgccgacttctactcctccacctgccccaacgtcgagaaggtcgtctccaccgtcatcgagcgcaagttcaaggaggaccctaccacctccgccctcctcctccgcctcctcttccacgactgcttcgccaatggatgcgacgcgtcgatcttgatcgacccgctgtcgaaccagagcgcggagaaggaggcggngccgaacatctcggtgaagggctacgacatcatcgacgagatcaagacggagctggagaaggagtgcccgcaggtggtgtcgtgcgcggacatcgtggcgctcagcacgcgcgacagcgtgcgcctcgccgggggccccaactacgacgtgcccacc

SEQ ID NO: 21479 - DNA, 500 bp, Oryza sativa
  Clone ID: uC-osflM202028d12b1
tgttaggagggcaagaagataaaggtagcttctttcagccactctatgtccagggacttggattgtcctgttcagacacagatggccgttgcagtactggatcggagcttcagcagtgaatatcctgcaagcagcagaactgaggggagatcatgtagttggaaaagagtctttgtccaaactgaaaatggttatgtcctgggcattgaactggagaggggagaaaatgcacacactgtgaaaaagaagctccaggtagccctcaaggtacccacagaggagagctcactgacctttggtgatctggttctgaataatgatctcagcagtattcgcaatgactcaccactgctcctcagaaagaatcaaatgcaccggagcagctcaactccttgcctctctcctactgctcatgatgtgcaggagcaagatcacagcgaacccattgaatccttggatgtttgagcccctcttctcgatgaagcacttgctaggatgtt

SEQ ID NO: 21480 - DNA, 338 bp, Oryza sativa
  unsure (1)..(338): unsure at all n locations
  Clone ID: uC-osflM202028e01b1
ttcattgtgtgactcatggtgcttcactgatttgccatccgcattggtctgtgaagtgcttgaacacctcgatccaaaggaacttggcattgtatcttgcgtctccaccctactgcataccctagccacagatcatcaggggtggaagaagttctactgtgaaaggtgggggattcctactcctccagtcaccctcaatgggcccttggttccaggaggaacttcagattggaagtcttggaaaacattatttgtggagcgggagtttcgaagtaaatcattcatgggaagattcagtgtgngatgttctccgtgaccacagtgagngatgtacgcac

SEQ ID NO: 21481 - DNA, 413 bp, Oryza sativa
  unsure (1)..(413): unsure at all n locations
  Clone ID: uC-osflM202028e02b1
tttttcacaaagccccaaacaaccgcgtccgcgtccgcctccgcctcctcctcctcctccgccgccgccgcatccgcatccgccggcggcggaatcgcctcgcatccgtttcctcctccgctcccactcttctccagctgccccccaatcatcgccgcccccgaacaatccgttcatccaccaggcaggcagtccagtccacgcgcaatctcggacgagcacccacatctttgactcgggtgattgattccgccatcagatctaggcgagagccatgaacggcggcgacgcggcggcggcggcggcgacgccgagccaccggcggctgccggacttcctccagagcgtgaacctaaggtacgtgaagctggggtaccactacctcattacccacctnctcacgctcttgctgc

SEQ ID NO: 21482 - DNA, 513 bp, Oryza sativa
  Clone ID: uC-osflM202028e03b1
ttcgttaacaagctgcagcgggcctgcaccgccctcggcgaccacggcgaggagagcgccctccccaccctctgggactcgctgccggccatcgccgtcgtcggaggccagagttcgggtaaatcctcggtgctggagagcgttgttgggaaggatttcctaccaagaggctcaggcattgtcacccgtcgtcccttggtgctgcagcttcataggatcgacggagacagagaatatgcagagttcatgcaccttcccaggaagagattcactgatttcgctcttgtgaggaaggagatagctgatgaaactgacagagaaactggtcgttcaaagcaaatatcatcggtccctattcatttaagcatatattctccaaatgttgtgaacctgactcttatcgatcttcctgggcttactaaagttgctgttgagggtcagcctgacagtattgttcaggacattgaaaacatggttcgctcgttcatagaaaagcccaattgtatcattctg

SEQ ID NO: 21483 - DNA, 544 bp, Oryza sativa
  Clone ID: uC-osflM202028e05b1
ttctttcctccccccctcctcccgatccacccctcccgccgccgccaccgccaccgccgccgccgccggccggcgagagagacaggatgtacgggtgggagatgctctcgttcaacatccacgacggcttcctggaggccatcgtgcgggggaaccggtcgggcctcctcaccgccgccgactacaacaacctctgccagtgcgagaacctcgacgacgtcaagatgcacctcaccgccaccgagtacggcccctacctccagaacgaaccttcacccctgcacacaactacaattgtggagaagtgcacccttaaactggttgatgagtacaaacacatgatgtgccaggcgactgaaccactatccacattcttacagtatataacgtatggccacatgatcgacaatgttgtacttattgttaccggaacattgcatgagagagatgttaatgaactattggagaaatgccatccattgggaatgtttgacagcattgcatcttttgcagttgctcaaaatatgcgcgagctttacagatt

SEQ ID NO: 21484 - DNA, 446 bp, Oryza sativa
  Clone ID: uC-osflM202028e08b1
tcgtatccctccgccgctgccatcgccgccttcccccctccgaatcgatcgccggccggccgcccgcccgccaccgatcctcctccggtgtcccgtgccccggccagatccgcgggattcggggggtgtagcggtagccttcctcccgggtcggatgccgcgcgacctgtcgcggtcgccgccgccgcgccggcggcggcggcgctcgccgtcaccgccgcggtaccaccggggagtacgcagggcgtgcagggaccgcagccccagccgcggcagcaggtccccgtatcgatcctcctataggtgatgaattctcattattacctgcccccttgccacacagtacacacgcgccaaccgtcgtgcgcgatctggcgcggcgttcccccccaaaaccccctcccccgtgatttaattttggtattctcctcttcgtatacttcctt

SEQ ID NO: 21485 - DNA, 155 bp, Oryza sativa
  Clone ID: uC-osflM202028e09b1
tcgttctctctctctctcgccccacccggatgcctcgcgctgccggaggctgacctcgccgccggcgactccgctcggccgccggagcagccagcgcgcgcggattcagtggccgaagaagcaaggatgatgcactgaggtgggggggggggggg

SEQ ID NO: 21486 - DNA, 413 bp, Oryza sativa
  unsure (1)..(413): unsure at all n locations
  Clone ID: uC-osflM202028e10b1
ttcctccacctcagatctccggcgagccgatcgaatcggcggctgcggcggcggcggcggcgcgatgtcggggcagacgcagcgcctgaacgtggtgccgacggtgacgatgctcggggtcatgaaggcccggctcgtcggcgccacccgcggccacgcgctcctcaagaagaagtcggacgcgctcaccgtgcagttccgcgccatcctaagaagatcgtcgccgccaaggagtccatgggggaggccatgagggcgtcctccttctccctcgccgaggccaagtacgtcgccggcgacnggcgtcgccacgtcgtccttcagtccgtccgctccgnctcctttcgngtncgctccaccaggagaacgtcgccggtgtcaagctccccaagttcacccacttcgtcgaccct

SEQ ID NO: 21487 - DNA, 503 bp, Oryza sativa
  Clone ID: uC-osflM202028e12b1
ttggaagatgcctttgaactacttcatgagatcaatgaacgcatccgaactggcctatgggttggcgattgttttatctacaacaattcttcgtcacgacttaattactgtgtaggaggagaggtcacaaccttatttcacttggatcggcaaatgtatttactgggatatcttgctaaccaaagccgtgtctaccttattgacaagcaatttaatgttgtggggtatactttactccttactatgattgagtataaaacacttgtaatgcgtggagacttcgatcgtgcaaacgctcttttaccatctataccaaaagaacaacatgacagtgtggcacgtttcttggaatcacggggcatgttggaagaagcccttgagatagcaacagactttaattacagatttgacttggccgtgcagcttggtcggcttgaagttgcaaaggcaattgccattgaggcacacagtgagtccaagtggaagcagttaggagagttagc

SEQ ID NO: 21488 - DNA, 445 bp, Oryza sativa
  Clone ID: uC-osflM202028f01b1
tccgttgagaggcggagagggaggggagctagggtttttcggggcggggatggcgcggagggggagagtgcagctgaggcggatcgaggacaaggcgagccggcaggtgcggttctccaagaggagggcggggctgttcaagaaggcgttcgagctcgccctgctctgcgacgtggaggtggcgctcctcgtcttctcccccgtcggcaagctctacgagtactcctcctccagcattgaaggtacctatgatcgctatcagcaattcgctggagccaggagagacctgaacgaaggaagtacaagcatcaacagtgatgaaaatgcaagtatacactccaggcttagggacattaacggcctggtctcttcaaacaatgctgacgagtccgatgcttatcagctagagaaactggagaaactgctgacaaatgctttgagggat

SEQ ID NO: 21489 - DNA, 470 bp, Oryza sativa
  Clone ID: uC-osflM202028f03b1
ttcgtcggtcgatcggtcgagcgagccggcgaacgcttgttgcctctcctccgttcgcgcttagctgggcagaggacgggggtgccaatgccgcttcggcggcggtgggcggcgcttttgttaggcgtcgccgtcgtccttgccgtcgccgccgccggcgcgcgtgcgcaggactacaacaatggcggcggcggagacggcgaggatgaggaggaggaggagaagccgtcgttcaaggcgcaggaggcgtgcaacggcgcgttcctgacgtacacgttcacggagcgcgagaaggagtacccgcggaccaagaacgcgacggcgcaggcgttcgcgttcaaggcgacggcgacggtgctcaacaccatgaccgaggacctcaaggcgtggcagatgttcgtcgggttccagcacaggagatcctcgtgaccgtcggcggcgccgtgctcctcgacggcaccgacctcccc

SEQ ID NO: 21490 - DNA, 500 bp, Oryza sativa
  Clone ID: uC-osflM202028f04b1
ttcacttcctcctttctcaagctctctctcctctcctcgcagtcgcagcgcagtagtctctagggttttagcgggcggttgtcctccacccgctcgccgcgtggccgccgccttctccccgcgccaccgccgatggacgtcgactccgacccagccgccgcgggcaagcccacccagatggacctcgaggaccagactgacgcgaaggggaaggggaagagcgaggagctcgcggactccatcgggagcctctccatcggcccggagcgcaccaatttcaagaagaagccgggtgatcatcatcgtcatcggcatggccgggacggggaagacaacttttatgcaccgactggtatgccacacccaggcttcaaacatgagggggttatgtgctcaaccttgaccctgcggtgatgacgctgccgtttggggccaacatagatatccgtgataccgttcggtccaggaggtgatgaaggagtatggtctggccccaatgg

SEQ ID NO: 21491 - DNA, 545 bp, Oryza sativa
  unsure (1)..(545): unsure at all n locations
  Clone ID: uC-osflM202028f05b1
gttcattatggcaaggttctgaaagtttcagtttctcggccgactggggctccttcccagcaggcaccaacaaacaacagtatcagcgtatatattacatatgccaaagaagaagaggccatcaggtgtattcaagctgtacacaattttgttttggaagggaaagtgttaagagcgtgctttggtactacaaagtattgccatgcatggctgcggaacatgacctgtggaaatccagattgtctctatttacatgatgtaggaagccaggaagatagtttcactaaagatgagataatctcagcatatacaaggagtacgggttccccaaatggcgtctagtgtttctcaaagacgcgcagggactgtattacctcctccagcagaagatttctcatatagtgcaggtggttgcagctaaacatccaatcaagaatggaataactaatactgcaaatcaatccaggctttcgcctacaaacagtagttctgggagatccacactttcaccagctgcttcatggnggcatcgcgatttgaataca

SEQ ID NO: 21492 - DNA, 512 bp, Oryza sativa
  Clone ID: uC-osflM202028f06b1
tctccttctcctcctcctcccccaaccctttcacccgcccaaactcatccatccatcgatcgccctacctagctactctcgatcgatcgaccgcccgcccgccatggacgtggagtacgacgtgatcgtgctcgggacgggcctcaaggagtgcatcctcagcggcctcctctccgtcgatcgcctcaaggtgctgcacatggacaggaatgactactacggtggagactccacatcgctcaacctgaatcagctatggaaaaggttcaaaggtgaaggtactcccccggcgcaaattggggctagcagagactacaatgtagatatggttccaaagtttatgatggcaaatggtacattggtcccgtgtacttattcatactggggtaccaagtacttatcattaaagctgttgatggaagctatgtcttaataagggaaagatccacaagggtccctctactgatatggaagctctcaagtctccgttgatgggatgttcgagaagcgca

SEQ ID NO: 21493 - DNA, 357 bp, Oryza sativa
  Clone ID: uC-osflM202028f07b1
tcgtgaaaaaaaaagggaaggaatttttgtctttttttttttgtacgcctccgcttcttcctcacgcagctctcgcctcgcctcgccgcccgccactagagaggagagggagaaggaggaggaggcaaatcccagcaaaagaagatgcagatcttcgtgaagaccctgacggggaagaccatcaccctcgaggtggagagcagcgacaccatcgacaacgtcaaggccaaaatccaggacaaggaagggatccctccagatcaacagcgtttgatattcgccggcaagcagctggaagatgggcgcacactggccgactacaacattcagaaggagtcaactcttcacttggtcctc

SEQ ID NO: 21494 - DNA, 520 bp, Oryza sativa
  unsure (1)..(520): unsure at all n locations
  Clone ID: uC-osflM202028f08b1
tcgtacccgcgagaagtcggcgctcccctcttcctcctcctccctcctcctcggtgagccagtcatccaagctctgtcaagatgtctgacagccatgaaactgataggaacattgagatctggaagattaagaagctaatcaaggctctggagtcagctagaggaaatggcacaagcatgatctctcttattatgcctccacgtgaccagattgcgcgagtggctaagatgttgggtgatgaatatggtaccgcctcaaacatcaagagtagagtcaatcgtcagtctgttttggctgccattacctcagctcagcagaggctgaagctctatacaaagttcctccaaatgaattggttctctacactggaaccattgntactgaagatgggaaggaaaagaaggttaccattgattttgaacccttcaagcctatcaatgtatcactgtatctttgtgataacaagttccacactgaagctttgaatgagctcttgggatctgatgacaaggttggggt

SEQ ID NO: 21495 - DNA, 535 bp, Oryza sativa
  Clone ID: uC-osflM202028f10b1
tcgtctgcaaatacagagatgatcttcgaagatttattaagggtgaccctggtatgaagggggtgtttgcgactcgtgtgtctggatctgctgatctctatcaggtgaacgagcggaagccttaccatggtgtaaattttgtgattgcacatgatggatttactttatgtgaccttgtttcttacaacttaaagcacaatgatgctaatggagaaggtggctgtgatggatgcaatgacaactttagctggaactgtggtgttgaaggagaaacaaatgatctgaatgtgttaagtctgcgttcaagacaaatgaaaaacttccatgtagctttaatgatttctcagggcaccccaatgatgttgatgggcgatgaatatggtcatacacgttatgggaacaacaatagctatggacatgatacttgcattaataatttccaatgggaacagttggaacaaagaagagatggccatttcaggtttttctcagagatgataaagtttcgtcacagcaacccaatattagacgagac

SEQ ID NO: 21496 - DNA, 538 bp, Oryza sativa
  Clone ID: uC-osflM202028f11b1
tcgttgattgggaagaagaagaagcaggggagcatgggcagcaagtcgtacccgacggtgagcgatgagtacctggcggccgtgggcaaggcgaagcgcaggctccgcggcctcatcgccgagaagaactgcgccccactcatgctccgcctcgcgtggcactctgctggcaccttcgatgtgtcgtcgaggaccggcgggcccttcggcaccatgaagaaccccggcgagcagtcccacgccgccaacgccggcctcgacatcgccgtcaggcttctcgaccccatcaaggaccaacttcccatcctctcctacgccgacttctaccagcttgctggcgttgtggccgtcgaggtcaccggcggacctgaagtccccttccatccgggcaggcaggacaagcctgagccttctcctgaaggccgtcttcctgatgccacacaaggttctgaccacctaaggcaggtcttttttgcgcagatgggtttgagtgacagggacatagttgctctttctggtggtcacaccctgggagatg

SEQ ID NO: 21497 - DNA, 374 bp, Oryza sativa
  unsure (1)..(374): unsure at all n locations
  Clone ID: uC-osflM202028f12b1
tcgagtgagcgcgcggctattgcgtgccacggcgtgccgttgagcgatggctggaggtgggttccccgtggccggcggcgccccgccgggcgactatggcggcggcataaccttctccgtcgtcgtcacctgcctcatggccgcctccggcggcctcatcttcggctacgacatcggcatctccgggggagtgacggcgatggagtcgttcctggcggccttcttcccgggggtgctccggcggatggcggcggcgcggcgggacgagtactgcgtctacgacagccacgtgctgacggcgttcacgtcgtcgctgtacctggccgggctggccgcgtcgctggcggccggccgcgtcaccantgcggtcggga

SEQ ID NO: 21498 - DNA, 384 bp, Oryza sativa
  Clone ID: uC-osflM202028g01b1
gtcctttttttttttttttacaaataaaatcctctgttaccaatctaattgccaacaatattaaggaaacaatgtcgtattgcgaatacattagtataggctgaaaccgaagaactgcccaactagaagagctattcccatgcatattgctacaagtgaagccgcccaggtcagtttctctgttatcctagggaccttttctttcaaggcctcactacaagaacctacaaaagcagtgtaactccccatcgaaaatacagtccccatcaaaaacatgccaagaaatgctgcaccagcgaagcgtgagggaagggccaatgaaggcaacaccatcagtagagcatctggttggagaccatgaacaactccagtggcaaatgttgc

SEQ ID NO: 21499 - DNA, 260 bp, Oryza sativa
  Clone ID: uC-osflM202028g02b1
ttggttaccaccgcaggaggagggagcagacttgggttttattgacatggggcagatcctggcgccgctggagaacgactacgcgcgtgtgcccaagattcaagctgctttgaccgctcggcccgggctcccgctacggacccatgctcgagaagctgttccgcgccgggatgaacgtggcgcgctttaactgctcccacggcacccacgagtaccaccaggagaccctcgacaacccttcgccaggccatgcacaacac

SEQ ID NO: 21500 - DNA, 456 bp, Oryza sativa
  unsure (1)..(456): unsure at all n locations
  Clone ID: uC-osflM202028g03b1
ttgctacttcttgacgggtcccctcaacttcaccgggccatgcaagggcgacatcgtcatccagctcgacggaaacctgctcggctccaccgacctcgccttattcaagtcgaactggatcgagatcatgcgcctcgaaagcctcgaaatcagcggcaagggcaagctcgacggccagggcgccgccgtctggagcaagaactcctgcgccaagaaatacgactgcaagatcctccccaacacttttggtgctggacttcgtgaacaacggtctcatcagcggcatctctctggtgaaccccaagttcttccaatgaaacgtgttcaagagtaagaacatcaccataagggacgtgaccatcaccgcgccgggggacagcccgaacacggatggcatccacatgggcgactnnctcaagatcagcatcattgacacgttcatcgcaccggcgatga

SEQ ID NO: 21501 - DNA, 504 bp, Oryza sativa
  unsure (1)..(504): unsure at all n locations
  Clone ID: uC-osflM202028g04b1
ttagttgctcccctgatccggttcagataggctcttcttgacaggatcaccatgtctgcctttgtgggaaaatacgcagatgagctgatcaagacggccaagtacatcgcgacgccggggaagggcatcctcgccgccgacgagtcgacgggcaccatcggcaagcgcctggccagcatcaacgtggagaacgtggagcccaaccgccaggcgctccgggagctcctcttcacgacgcccggcgcgttccagtacctctcccggcgtcatcctcttcgaggagacgctctaccagagcacgggncgccggcacgccgttcgtcgacgtgctcaaggccggcggcgtcgtgccggggatcaaggtggacaagggcaccgtggacatcgccggcaccaacggcgagaccaccacccagggcctcgactccctgggcgcgcgctgcgccaagtactacgaggccggcgcccgctttgccaagtggcgggccgtgctcaagatcggcg

SEQ ID NO: 21502 - DNA, 422 bp, Oryza sativa
  Clone ID: uC-osflM202028g05b1
ttctctgcgagccctccgacgaccccaatgctgcttggaacataacgttgcgggcgtgcatgcactggatgcctacggaccgatcggtgcgggggtcgcggtggccggagcggtggccggagaggatggagaagacgccctactggctgaacagcagccaggtcggggtgtacggcaagccggcgccggaggacttcgtggcggaccaggagcactggcggaaggtggtccggaactcgtacctcaccggcatgggcatcgactggaagacggtgaggaacgtcatggacatgagagccgtctacggagggttcgcggcggcgctgcgggacatgagcgtgtgggtgatgaacgtggtgacgatcaactcgccggacaaattgcggtgatctacgagggggggttgttcggcatctaccatg

SEQ ID NO: 21503 - DNA, 511 bp, Oryza sativa
  unsure (1)..(511): unsure at all n locations
  Clone ID: uC-osflM202028g07b1
tcgttgcttgcgagcttgtcaaccgcgcaaaggttcatatatacaccgatcgaaatcgatcggtgtagagccacactcttggagtcgatcgttcgctggttagctaactaagctaagctgagctgccttgctctcttcgacgatcaggttgcttggtttgacgagctgacgatcgaggagaagaggacggcgaacgtttttttgcaggatcagtactagggttcatcttggagaaccaatttgattcgatagaacgagcgagtcgaagaagatggtgctcgcgagcacgccgaaggtggtgctgggatgcgtggcgttcacgatcttctgggtgctggccgtgttcccgtcggtgccgttatgccggtgggtcgcacggcggngtccctcctgggcgccatgctgatggtgctcttccgcgtgatgacacccgaggaggcgtacgccgncatcgacctccccatcctcggcctcctcttcggcaccatggtcgtctccatctttctggagc

SEQ ID NO: 21504 - DNA, 445 bp, Oryza sativa
  Clone ID: uC-osflM202028g09b1
tcgtttcaatttcttcctagctcagctttcccctcttctccttctcctcctactacccaatacgactactactagttttctttcttggccatcatcatttgttcctcatcttactctagcttctccattccaaaattcaccaccgccggcgccgccatctccattccaaaatttgctctgcgtcgagtcgtgtgatcgatcgatcgatcgatcgaggtgtacgtgtgcgctgctggggaaaagggaaatggatccgtcgggcgccttcttccacgcggctccccggagcggctcgaatgtgtcgctggcgtcgctggcgaggacggccggagggaggaggatgatgcacagggtcttccgcggcgtcatcaccttcatcttcgccatagctggactgtttcttggagcggtgactggcgggctgatcgggctggccaccgagagc

SEQ ID NO: 21505 - DNA, 520 bp, Oryza sativa
  unsure (1)..(520): unsure at all n locations
  Clone ID: uC-osflM202028g10b1
tcgttcccccactctctctccggttcatgtcctgctgctccccatgtcgcccccactcgagctcgactacataggcctctcgccgccggtgcccgccgccgccgatgccgccgccgacaacgacctgaagggcaccgagctccgcctcggcctgcccggctcccactcgccggaccgctccccgcccgccgccacgctcgaccttctccccgctgccaagggcgccaagcgcgggttctccgacgaggcgcgtccgctgccggcgtccgccgccgncgccgccgncgncgggaagggcaagaaggcggcggccggcgaggaggatgaggatgcggaggaagaggacaagaaggtcgccgcccgnccgcaagcgcctgctgccaaggctcaggtggttggatggccaccaattcgcagctaccgcaagaacacgatggctactaaccagctgaagagcagcaaggaggatgctgaagcgaagcagggccaggggttcctgtacgtcaaggcagcatggatg

SEQ ID NO: 21506 - DNA, 345 bp, Oryza sativa
  Clone ID: uC-osflM202028g12b1
tctatcgtttcggtctctatcgcctacagaggcaatactggccaggataggaagcgatcgatccgtacaatggcggccctgaagatgaacaggatgtccgtggcggatatgttcctcgccgacgtggaggtggctgatggccgtgtccctagcgcccacgttggggtaggagatggggctgtggccgacaccgacggcgatggagacgttggtgctggcgctgacgccggccatggtgttggcgacggcgccggcgcggccggacgagttctagttgtagctgagataggagccgacggcaacgacgacgggtctgtaaccggcagcgctgaaggcgtcgttggc

SEQ ID NO: 21507 - DNA, 220 bp, Oryza sativa
  Clone ID: uC-osflM202028h01b1
gtagttgaagaggaatcctcctcagtcctcaccttcagatttcagaacacaggcaatcggccctagctgcaatccaacaagatgggcatgcctctgctgctgctgctgctgatcctcgtcgctgctggcccccaggcaggcagagctgcaaagccaatcccaaatctccagctcatgaccaaggagggcggcagttcaagaatcatccaggacgacatca

SEQ ID NO: 21508 - DNA, 385 bp, Oryza sativa
  Clone ID: uC-osflM202028h02b1
ttaattcaaagcaaagccgccattactgctcctcttccattccactggggacgtacgagctccgcgcatcccttccattccattactgaccttggctgctgcggctgcagtgcagagggggtttggtggtgcggttgatttgagcaataaattctctaggggggagggaggtatcggtcatggctgccgctgctgcaaggaggggctcatcgctgctctctcgctgcctgctgtccaggcccgccgccgccgcctcgcctgctgtcccctctgcgctccgcagggcagatgggacacaaggattgttgccgggaatccttcagaggttcagcactgcagcagtagcagaggagcccatattacccccagtccaagtgaactacac

SEQ ID NO: 21509 - DNA, 500 bp, Oryza sativa
  Clone ID: uC-osflM202028h03b1
ctcttactgatataatcaagctagctagcttaatcacctagctatccgtcagtttagctagatatggctgcagttaactgcaaggtggtggtcgccgtgattgtggtggcgatggtggttgcggcgccgggggcgtcggcggcgataacgtgcgggcaggtgggatcggcgatcgcgccgtgcatctcgtacgtgacggggaggagcggcctcacgcagggatgctgcaaccgagtggaagggcttgacaacggcggccggaacaaccgcgaacggcaaggcggcctgccgttgcctaagaagcttggccggaagaataaagtggttaaaccttggcaccgtcgccggcgtccccggcagtgcggcgtcaacgtcggcttccccatagcctctccaccgactgcaacaaggtcagctagatcaattaatcctgcttggatcgatcgatcgagcttaacacgctagctcgatcggagttgatcagctagtaattaagcacg

SEQ ID NO: 21510 - DNA, 544 bp, Oryza sativa
  unsure (1)..(544): unsure at all n locations
  Clone ID: uC-osflM202028h04b1
tttgtttctgttaatgctgaagcttttattaacaaagcttcatttttggtaacaaacagtcaccaagaacttctgaacttacagtacaaggtatgctacgctagaattttggatctgaagagaagattcttggaagctgcacttcgatactatgacatctctcagattgaacaacgccaaattggtgacgaagagatcgatgaaaatgctttggagcaagctcttagtgctgctgtgacatgcacaatattggctggtgctggtccgcaacgatctcgtgttcttgctacattgtacaaggatgagagatgctcaaagttgaagatatacccaatactgcagaaggtctttcttgaaaggattttgaggaaaccagaaattgaagcatttgcagaggagctgagaccgcatcaaaaagctctgttaccagataagtctactgtgcttgaccgggcaatgattgagcataacctccttagtgccagtaaactttacactaatatcagctntgatgagcttggagcattattgggcattgacccta

SEQ ID NO: 21511 - DNA, 275 bp, Oryza sativa
  Clone ID: uC-osflM202028h07b1
tcggtccgcccttttttttttttttttttttttttttaactgcaaactgtgcctctcggccctttgggtatgaaaaatgaagagcgcgtattcaggtttcagatcagcttacatcgatcggggaacgcttacagcctcccagaattgggtgaaataaataaatagagtaaattatacagtacatgccaccaacaaaagtttcaggaccaaattcgtgtgactctagttttttccattccagagcttattgctatgtatctttcaactgtcagaac

SEQ ID NO: 21512 - DNA, 350 bp, Oryza sativa
  Clone ID: uC-osflM202028h08b1
atcgttaacccgagccccccaagcgcagccatggtgttcgacgcgggcaccggcagcagtggcggcggctcgccggcggcgccctccccgccgccgtcgtggcagaaccctctccgcgtgatcctgacggcggagttcgcgcggcaggtggcggtggggcggtggttcacggtgttcgcgagcctgctgatcctgacggcgtcgggcgcgacgtacatcttcggcatctactcgccggggctcaaggcgtcgctcggctacgaccagcacacgctcaacaccgagtacttcttcaaggacctcggcgccaacctcggcgtgctctccggcctatcaacgaggtcacgccg

SEQ ID NO: 21513 - DNA, 435 bp, Oryza sativa
  Clone ID: uC-osflM202028h10b1
tcgtctgcgtactcccgctgcatcagaggtctatctggtggtcgcttgaatcgggaggtttttgttggattggattgtattcggagagatggaggatgtggagaacaagctaaaggactatgacattgtgagggaaggcgaggcggagatcatcatcaacacgaaaatagcaacaaatgaagtgttctacaatcccgtgcaggtccacaatagagatatgtcagctgctcttttaaggactttcattgccaagcgtgaggaagaacataaggcaatgatggataagacggacaaggcgcataacaaagtgagccagagtaaatcatctggtccaaatggagagactgggtcaacaggacagcatgatgaaatggatgttgatgctgaaaaggaaacaaattaagttgcggttgaaactgacgatctgtcaacaga

SEQ ID NO: 21514 - DNA, 440 bp, Oryza sativa
  Clone ID: uC-osflM202028h11b1
tcgtgcctgggccgatccccatacatcccgcgagcgcgagcgagccgacgcgccgccgttcgtcctgctgcttccgccgcgtcgtggtgagcacatcatccgccgccgccgccgatccccatccatccttgcgagcgatcaggggcgccgtcgtgttcgtcctgctgcttccgccgcatcctggttcgacagcattgtttgaggttcttttaaaagtgttctcaccatggatcttcgccattcacaaactccatccagtgatgacgagacaagggcacttaatgcattgcttgatgctttcagttctgccttttcgcttgatgatatagctacggcatattgcagagcaaatggtgatgtcaacagagctggtgatctattgactgaacttgaacatcctatggccaagagcaatgaagttgactcaagtgttgggacta

SEQ ID NO: 21515 - DNA, 488 bp, Oryza sativa
  Clone ID: uC-osflM202035a01b1
aaaagcaatgcataattctccgaaagagtgggcataggtggaaatcggcgggcatcactgagccctttgccctgaggcctgatgggcatcctggtccatatagaagtactgacccaaacaagaagacgcaaagaggtccagatggaaggcctccacctcaggattgcctacattggtgcatgccaggacctgtagatacatggaatgagatgttgctagagaccatacgaagagagttcgagggagtgagaagctgaataaaaacactcattggctgctcgatttctatcatgggatacgacctgcaaaaactaattaagcttctagcattggtgtatacctcattacatatcgtgttgttggtctaccacagatctgatggaaatatagcttaaggagggacaaaaaaacaaattgtaggcatgtatgtcaacagtcgggatagaagtacagaggggtagacagttagagagagaggttatgatgga

SEQ ID NO: 21516 - DNA, 436 bp, Oryza sativa
  unsure (1)..(436): unsure at all n locations
  Clone ID: uC-osflM202035a02b1
gtagccatctcgcactaaaatggcgatcccgaccgtcgggctgctgccaacctggggcaccggccacctcatgtccctgctcgacgccggcaagcggctgctcggctgccgcggcggcggaggcctctcgctcacggtgctcgtcatgcagccgccgaggaaggagtatgcgtccgccgtcgccgccaccgtgcgccgggaggaggcatcgggcctcgacatccgcttccgccacctccccgccgtcgagcccccgaccggctgcgcgggcgtcgagggagttcgtctcccgcttcgtgcagctccacgcggaccactggggggcggccgtctccggcctggactggcccggtggccggcctcgtcatcgacttcttttgcacgacgctgtncgacgtggcccgggagtccgccgtcccgcgctacgtgtacttca

SEQ ID NO: 21517 - DNA, 515 bp, Oryza sativa
  unsure (1)..(515): unsure at all n locations
  Clone ID: uC-osflM202035a04b1
atatatccttcttatatataggggaattgtgaaagcgggaggggtagttaactagctgtgacttggaaggggatttctccagagattatgcatgagacttcacatggcaaattccattatcagttcttgtttctgtgtaaaaagatttttcatattgatgatcggtggtccttttgcataggtgtcagagaagttctcagtgtcctatgtgttggcagcctatcagtttgaaggatcctaccagtcaagagctgctccaggcagtggcgcgtgaaaggaatgtaaggaccaatcaaactcgaaatacaactatatttcatcatcctgctcttggagattttgaggttcagcatttacctgatgttggtaatgatgctgaacttgaagagcgtatattacagcacctagcagcagccgctgcaatgggaaggtcacaccaccttggtagaagagaaggacacaggngtcgttccggctctcatggtcgtccacagttcttagttgtttcttcgcat

SEQ ID NO: 21518 - DNA, 516 bp, Oryza sativa
  unsure (1)..(516): unsure at all n locations
  Clone ID: uC-osflM202035a06b1
ggcttaaccctaggattgtctccggcggcggcgggggaaggatcatggagcgggcgggaggcggcgtgtcgtaccagcggttcccgcgggtgcggatccgcgagctgaaggacgactacgccaagttcgagctccgcgacaccgacgccagcatgggcaacgccctccgccgcgtcatgatcgccgaggtccccaccgtcgccatcgacctcgtcgagatcgaggtcaactcctccgtcctcaacgacgagttcatcgcccaccgcctcggcctcatccccctcacctccgccgccgccatggccatgcgcttctcccgcgactgcgacgcctgcgacggcgacggctcctgcgagtactgctccgncgagttccacctcgccgnccgcgccaccgactccgaccagaccctcgaggtcacctccaacgacctccgctccaccgaccncaaggtctgccccgtcgaccaggctagggcctaccagcacgccctcggcgggactgaacccttcgaca

SEQ ID NO: 21519 - DNA, 500 bp, Oryza sativa
  unsure (1)..(500): unsure at all n locations
  Clone ID: uC-osflM202035a07b1
ctcatagaaaaacagcgctaatggcccagaacaagaccattgcggtggccctgctccttgccacccttgtggcggtcatgggaaaggagccagagacgctagaagaggcagtgagagctgggtgcaaagaggaatgcagtgagcagaaaaagaaagcccccatcgacgagaaacaatgtgaagacttctgcttcatcaagaccaagtctatatttgaggcccataagggagtgaaggatctaaaggcgggtagattcatagatttttgcaacaatgagtgtaatgcagtatataagggaggatcccgccacaagcaagaagtgtgcanaaagttgcgaagctgatgctaaggaggccgaggtattccttgataaagtcgtcgcttatattcaaacaacgaacaagcatgattatattatgtagtacctccccatctgttccttcatcatgaccgagcgacgnacatataatggttctcacccaacggccagccctgcatt

SEQ ID NO: 21520 - DNA, 482 bp, Oryza sativa
  Clone ID: uC-osflM202035a08b1
tcgacgcccggttgctctgcctcgggggcgacgcgggcggcgaaacaagccgcgccgcccccgtccctctcctcccctcccacgccgagccgccgccggcaaagccgggcggctgcaaggacagcggcggcggggctctctctctctctctccaccgctcgcagtggagctggacggggcgccggcaagacggagcggcaaggcgccgacgacgacgaccagatccagcgccaggatgcacggatccggtacccctatggccggatctgctgcttccgggcggcggcgacccgggtcggcaagtcgcggcgtcggcggcgtggaggtggcggtgtcagcggccggagggcggcgtcgacaactggagggcggcctcggcggcgtggagttggcagcgaggcggaggacacggcggcatgaccgtggctgcggtgacaaacggggagcgtgaccagttctggccggacggctagcggcggtgc

SEQ ID NO: 21521 - DNA, 492 bp, Oryza sativa
  unsure (1)..(492): unsure at all n locations
  Clone ID: uC-osflM202035a09b1
tcgctgccgccgccgccgcagcctcctcaagggtggtgcccatcctctccttcgagttagcttcctccttattcaaccatgggtaaggagaagacgcacatcaacattgtggtcattggccacgtcgactccggcaagtcgaccaccacgggccatctgatctacaagcttggaggtatcgacaagcgtgtgattgagaggttcgagaaggaagccgctgagatgaacaagaggtccttcaagtacgcgtgggtgcttgacaagctcaaggccgagcgtgagagaggtatcaccatcgatatcgccctgtggaagttcgagaccaccaagtactactgcacggtcatcgatgcccctggtcaccgtgacttcatcaagaacatgatcacgggtacctcccaggctgactgtgccgtgctcatcattgactccacactggtggttttgaggctggtatctncaaggatggccagacccgtgagcacgctcttc

SEQ ID NO: 21522 - DNA, 484 bp, Oryza sativa
  Clone ID: uC-osflM202035a10b1
taacgtgtgtgtgtttggagcctgtagcatgggggggagtagtctttttttccgtaagtatgaccttcttctgttgtaattctatacataatacttttcatgctatatcaatatgaatcttcttgtgttgtcttgagcgggtcattcagaaaaaaacactattagtaagtgggaaactagaggccgaccggaggtttctttctatcgttgggagcctatctgccttccgacctccatcgaattgggtgcagaccagcagcagccaataattaaggtcgtcggccgtatatatgatgatggagaatagcagggagcagcagccggagtcgtcgccggcgaacaacaatagcaagaagaagaagaagaagaagacggcgtcgcggttccggcgtgtgtgcgtgttctgcggcagcagcccctggaagaaggccgcctaccaggtggacgacgtgcagctagggcaacagctggtggagcgcggcat

SEQ ID NO: 21523 - DNA, 468 bp, Oryza sativa
  Clone ID: uC-osflM202035b01b1
gtcttcgtactcgcctctctccgcgccctcctccggcggcgctcgccgccgttcgtgtccgccgccaccgccgccgccatgagggagtgcatctcgatccacatcgggcaggccggtatccaggtcgggaacgcgtgctgggagctctattgcctcgagcatggcatccagcctgatggacagatgcccggtgacaagaccgttgggggaggtgatgatgcttttaacaccttcttcagtgagactggtgctgggaagcatgtcccccgtgctgtcttcgtcgatcttgagcctaccgtgattgatgaggtgaggactggtgactaccgccagctcttccaccctgagcagctcatcagtggcaaggaggatgcagccaacaactttgcccgtggtcactacaccattggcaaggagattggtgatctgcgccttgaccgcatcaggaagcttgccgacaactgcact

SEQ ID NO: 21524 - DNA, 500 bp, Oryza sativa
  Clone ID: uC-osflM202035b02b1
gtctcattagatcagcgtgaagcagcggcaagaacacaaaaatggcggacgagaagctcgccaagctgcgtgaagccgtcgccggcctctcgcagatcagtgacaacgagaagtccgggttcatcagcctcgtcgcccgctacctcagtggcgaggaggagcatgtggaatgggcaaagatccacacgccgacggacgaggtggtggtgccgtacgacaccctggcggcgccgccggaggacttggaggagaccaagaagctgctcaacaagctcgccgtgctcaagctcaacggcggcctcggcaccaccatgggatgcaccggaccaaaatcggtcatcgaagtgcgcaacggattcacattcctcgacttgattgtgatccagatcgagtccctcacaagaagtatggcagcaatgtcccactgcttctgatgaactcattcaacacccatgaagacaccttgaagattgttgagaaatacaccaattcgaacattg

SEQ ID NO: 21525 - DNA, 489 bp, Oryza sativa
  Clone ID: uC-osflM202035b03b1
cactagctcaaaagacacacattccaaaagcatcgggggccatctcctcctagtcctaggctcgcgtcaatggcggcgtccaccatggcactctcctcccctgccgccctcgccggcaaggcggtcgccaatgccaaggtgttcggcgagggccgcgtcacgatgcgcaagtcggcggccaagcccaagcccgccgcggcgtcggggagcccgtggtacggcgccgaccgcgtgctctacctcggcccgctctccggcgagccgccgtcctacctcaccggcgagttccccggcgactacggctgggacaccgccgggctgtcggccgacccggagacgttcgccaagaaccgggagcctggaggtgatccactgccggtgggccatgctgggcgcgctcggctgcgtcttcccggagctcctcgcccgcacggcgtgaagttcggcgggccgtgtggttaaggcggggtcccagatctcagcgggggg

SEQ ID NO: 21526 - DNA, 495 bp, Oryza sativa
  Clone ID: uC-osflM202035b04b1
aaatagttatatcattcaaatgagacatttcaaatggcaggctatataccattagaggagctcttacagacaatgcacagacaatatagtatttcaagcatcaggtaggctttcagtcatttacgaattagcatttttctttgtgtgtttgctctcagtacccacttggttcttcatgtagattctagacgatttaggtttggcactaatagaactagactttcagttaaatggatgatttatatgcaggaagatccaatttgcttgataccctattatctgtgtaccattttcagtacttttgttgtacgactgttatacctatcctgacaatgttatacatcattggatcaaatggactagatccttctttacacttttaattctcttagctggtagatcattgaatggttaatatggtcaattataggttgcatgctaacatggtgtatatttgtctgcaggattttttttcttccctttacccatcatcat

SEQ ID NO: 21527 - DNA, 417 bp, Oryza sativa
  Clone ID: uC-osflM202035b06b1
gtttggtgaaagaaaccacctgatcgagcccgtgtctgtgcagccgcaggagaggaggacgagtcgttcgttgtgcagcaggaggcggcggctaaaatgtcgtggcagacgtacgtcgaccagcacctgatgtgcgagatcgagggccaccacctcaccttcgccgtcatcgttggacacgacggcaccgtctgggcacagagcgccgtcttcccgcagtttaaaccggaggagatgaccaacatcatgaaggactttgacgagccggggttcctcgccccgaccggactgtttcttggaccaaccaagtacatggtcatccaaggtgaacctggcgctgtcattcgtggcaagaagggatcaggaggcatcacggtgaagaagaccgggcaggcgctggtggtcggcatctactac

SEQ ID NO: 21528 - DNA, 495 bp, Oryza sativa
  unsure (1)..(495): unsure at all n locations
  Clone ID: uC-osflM202035b07b1
aatcgatctcctctctctctctctctctccgtctctatcccattcgcgaggcggcgtctcctcctcctccccgtctctctcgcttcccccccaaatccggcggcgaatccagggccccgcgccgcgccgacgaccaccgccgatcgcgaccaggagggaggatgctgggcgccgcgaggaggcagctcggatccggccccatgctggggcaggtgctgcggaggctccggccggcgacggcggctgcagcggatgcggcgagggcgtactccgcggcggcgaaggagatgactgtccgtgaagcgctgaactctgcactcgatgaagaaatgtctgctgatccttctgtttttctgatgggtgaagaggggnnagagtatcaaggtgcatacaagatttcaaagggcttgcttgacaagtatggtcctgagagggttctggatacaccaatcacagaggctgggtttactggcattgctgttggtgcaacgtatc

SEQ ID NO: 21529 - DNA, 498 bp, Oryza sativa
  Clone ID: uC-osflM202035b08b1
gttctccttctccctccccggcccctagccggcgcacccccaccctcgcccgcctctcgccgtcgccggaacggaaaatcatgggcgcggaggcagagcaccgcatgtctccctcccccgctcccgctcccgctccccctacccctgttgggaggaccgacggcgacgcccctcccatggtgctgggcctgcagctgtcggcgctcatcgaccacgtcgcgcgcgtcgactggtccctcctcaaccgcatccccggcgaccgcggcggttcacagcaggtctgtattgaggagttgaatcatattctggctgaagtgaatgctcaaatcctcccttgccgtgatgacctttcttcaataaggactatagccggtggtagtgtcgccaacacaattcgaggtctctcagcaggttttgggatatcaactggaataattggagcttgtggagatgacagccagggcgttttgtttgtcagcaacatgagctttagtggag

SEQ ID NO: 21530 - DNA, 477 bp, Oryza sativa
  Clone ID: uC-osflM202035b11b1
ttgctttccaccgctgtcgccgcaccatcatagggggggcgccatcctcctctgggtgcggtcgatgcatccgccaacgaggagggcgggaccgtcagatccggtgaccccggcctcattggcggtggatccggccgcccggaggcgaggggagaccggctatcaccctctctactcttctccttctacgtccggcaccgctacaacgacggccgcgcggatcgcgtgaggcaacgggtggctgctcccttctcttctcccttctatctccactattcctttgcagatcggcggaggcctgcaacaacaacgggcgcgcgggcgagcaatcgaggaggccgggaatcaccagatccggaaggacggcggcccgattcggagagggagcaacccgatctgtgtcattgaggctcattgtaagggtctaccgcggccgttccttcacagtgatccagggtcgttgggtctggtgagctc

SEQ ID NO: 21531 - DNA, 472 bp, Oryza sativa
  Clone ID: uC-osflM202035b12b1
gaagggcaaccaatagaattcaaggcattgtgtgccaaatctagaaaggaaatgctcaacataagtccagcggcaaaaccctgtagaagcccaagcatcttaagattaggcacacaatgcattgaattctattggtttcttgaagggcaacctttggttttttgctggagttcttttctttggtttggttgtcaagtttattccagagccaactgttgtgccaacagctgatgcaggcaagaagcagactgacgatgatggttcgggtaaagatatgatgaaaaaacatcgtcggcaagtattattcagtgggatcattactgctgttggaatcagcttgcataactttccggaggggatggcagtatttttgggatccatgaagggccttcgtgtgggactgaacttggctattgctattgctttacacaatataccagagggggttgctgtagctctaccactctatttt

SEQ ID NO: 21532 - DNA, 502 bp, Oryza sativa
  Clone ID: uC-osflM202035c01b1
gcgactgtggcggtgccgcgggtgaagctgggctgtcaggggatggaggtctcggcgcaggggctcggctgcatgggcatgtgcccggccttcgagccgcccaagccggaggccgacatggtggcgctcatccgccacgccatcgccgccggcgtcacgttcttcgacacctccgacctctacggcccccacaccaacgaggtcctcctcggcaaggcgctgcagggcggcggcgtgcgcgacagggttgagctggccaccaagttcggcaagttcttcgccggcggcaagccggggatccgcggcgacccggcttacgtgcgcgccgcgtgcgagggcagcctccggcggctcggcgtcgattgcatcgacctttactaccagcaccgcgtcgacagaaggtgcccatcgaggtcacgattggtgaactcaagaaactagttgaagaaggaaagataagatatattgccttatgtgaagcatcggcatcaacaatcagaag

SEQ ID NO: 21533 - DNA, 488 bp, Oryza sativa
  Clone ID: uC-osflM202035c02b1
gattgttttagaaaaatttgagaacataattgccggcagtttattcatcttggggcaggtgaaaaggcaaccacagggtccatctggagatcctgaaaaggacaagatcattagcgaactggggaaattcatgaatgctagggtacaatgggcgaaggctatgcctcactggataactcaaagttctaattatcaagcaccaaccacagaaactgggttatctttcattgatggactaagagacctatttgagcatgaaaacgagtatattccacaaaaggttaaacaatcccaatcgaaaatccaattagttggtcgggatccagatctggaatgtcagcttcgtttaaatttggaaaagatttttctccaagctcaaaattttgttcttgaactggatattgaatattgagagcgcattgcagtgcaaggaggctaagcagtcacggttatggcgagcttgatgttttggctagggactaatgcaa

SEQ ID NO: 21534 - DNA, 505 bp, Oryza sativa
  unsure (1)..(505): unsure at all n locations
  Clone ID: uC-osflM202035c03b1
cacaccataagttcagaggcgagggtttcccacccgcgagaagtcggcgctcccctcttcctcctcctccctcctcctcggtgagccagtcatccaagctctgtcaagatgtctgacagccatgaaactgataggaacattgagatctggaagattaagaagctaatcaaggctctggagtcagctagaggaaatggcacaagcatgatctctcttattatgcctccacgtgaccagattgcgcgagtggctaagatgttgggtgatgaatatggtaccgcctcaaacatcaagagtagagtcaatcgtcagtctgttttggctgccattacctcagctcagcagaggctgaagctctataacaaagttcctccaaatggattggttctctacactggaaccattgttactgaagatgggaaggaaaagnaaggttaccattgattttgaacccttcaagcctatcaatgtatcactgtatctttgtgataacaagttccacact

SEQ ID NO: 21535 - DNA, 503 bp, Oryza sativa
  Clone ID: uC-osflM202035c04b1
ctgtgcgtggtgatcctggtgctccttttcctcgggcagcgattcggcaccagcagggtcagcttcaccttctccccaatcatgctgctgtggtttgcttcgattgcagggatcggtgtttacaacattgtgatgcactacccacctgttctgaaagccgtctcgcctcactacatatattactacttcgcgaagaacaaacgggttgggtgggagcaactcggcgcggttattctctgcataacaggtgctgaagctatgtttgctgatatgggacacttcaacaagtcatcaattcaggtggcattctcaacggcggtgttcccatccctgatcctggcgtactcaggccaggcggcatacctgatcaagaacccgggtgacctgagcacggcgttctacagcagcgtcccggcgccgctgttctgggcgatggtcgtcgtctccaccttggccggcattgttgccagccagtcgctcatctctgcaagctactccatcat

SEQ ID NO: 21536 - DNA, 498 bp, Oryza sativa
  Clone ID: uC-osflM202035c05b1
cattgatttcaacatggtttcctccacgagaagggcgaggtcgtctctatccgccaccaccgccgccgccatcgcggcggcggcggcggcgctgatggtgtccgtggcgttcgccacagcgcagtacacgccggccacgccggcagcgccgggggctgcagcggcgggtgcggcggcgggggcgacgccggcggcgccgtacacgccggccacgccgggggcggcgggggcggcgccgtcggtgccggcggggccgctggacatcgcgcagctgggggcgaagggcgacgggacgagcgacagcacggcgttcgtgctgcaggcgtggaagaacgcgtgcaacgcgacggggacgcagaagatcgtgatcccgccggggaactacctcaccggcgcgctcaacctcaaggggccgtgcaccagcagcatcatcctccgcctcgacggcaacctcctcggcaccggcgacctcaacgcctacaagaccaactggatcga

SEQ ID NO: 21537 - DNA, 497 bp, Oryza sativa
  Clone ID: uC-osflM202035c08b1
ttattattgcagtaataatccaagctcaataaacgagccaatccgtcgaagaaggaagcagcggcgatggcggcgaggtccggcgaggtgcgggcgacggtgctgggcatggcggtgctggcgctgcttctgctgctcggccaccacgcggcggccatcgaggccaacgtcggcgtcacccgccaggccagcttcagcctgaacggcggcgccggcgccggcgccggtgctcgcgctggcgctggtgctggcgctggcgctggcgtcggcgctggcatcggagctaacgtcggcgttggcgctcgcgccggcgtcggtgctggcgtcggcgctggcgtaggtgcgaaggtcggtgctggcgtcggtgcgaaggtcggtgctggcgccggcgttggagcacgcgctggcgttggtgcgaacgtcggtgctggcgtcggtgcgaaggttggtggtggcgtcggcgttggcgctggtgctggcgtcggtgcgaaggtcgg

SEQ ID NO: 21538 - DNA, 503 bp, Oryza sativa
  Clone ID: uC-osflM202035c11b1
gctgattgtggcttatggatcacgtattctgttggttccaaacggcactgatatttatggaagtaaatacaaaggcatatggatatcacttgctgttctttcaagagctttatgtggaaactatgtcaattttggtgtatttgagctgtatggtgacagagcacttgctgatgcccttgatatatctttaaagatgagcctctcagttccattgtctgacatattggcattcaaaaagctgtcaaaagcattctatggatatattgaagttctgttcagcagccatatcacttttgttctcaatttggatacaaacaccttcgtgcatattgtcagcactcttgaatctggcttaaaaggtctagatacagggatatcaacacagtgtgcctctgccattgatagcttggcggccttttatttcaacaatatcacagctgctgatggccctccttcaccagctgcactaaatcttgctcggcatattggagagttccccactt

SEQ ID NO: 21539 - DNA, 469 bp, Oryza sativa
  unsure (1)..(469): unsure at all n locations
  Clone ID: uC-osflM202035c12b1
caatccctcgcgccgctccccttcccccactcacgaatggccgccgccgccgccgccgcgtcaacgtcgcgcctcctcctcctccgccaccaccaccacgccgncgccgacgggtcgaagcagcagcagcagctcaggtattcctccaagccgtcttctctcgctctgccccggctgcgccttttgccggcggccggggcgctgctgcccgaccgggtcaccccgttctcctacgaggaggacgacgagtccgacgaccacccgcgcgaggagtgcgggctggttcgggtcgtgggggaccccgacgcgtcgtcgctctgctacctcgggctgcagaagctgcagcaccgcggggaggagggtgccgggattgtcgccgtcgggggtgacgggaagctcaagtcggtcaccgggctcggcctcgtcgccgacgtgttcggtgaccccgcacggtggcatcgctccccgg

SEQ ID NO: 21540 - DNA, 502 bp, Oryza sativa
  Clone ID: uC-osflM202035d02b1
gcttaatttcggaagagcggcagagcccactccacacgcggagaggagaccacgccgccgccggaagccatggccgccgccaccgccgccgccttcgcggagcccaagaccaagtacgatcgccagctcaggatatggggtgatcaaggacaggctgcactggagaaggctagcatatgcttgcttacctgtggccctacaggaactgaagcgatgaagaaccttgtgcttggaggagtgggagtgttactgttgttgatggttccaaagttgaacaatctgacatgggaaacaatttcctgttggatgcagaatgcttggggcaatcaagagcaaaatctgtatgttcgttcctgcaagagctgaatgatgctgtaaatgccaagtttgtcgaggagtctcctctggctctcatagacacaaacccttcattcttttcccaattaccgtagtcattgctactcagcttcagagagatctttactgaaactagatgatatct

SEQ ID NO: 21541 - DNA, 472 bp, Oryza sativa
  unsure (1)..(472): unsure at all n locations
  Clone ID: uC-osflM202035d03b1
ggttgctgtgcggttgccgcggcgtgctgctcgagccgcgttacgactgatccgagcggctttttccggcgatcatggcggacgcgcccgccaccggcggcggattccccgcgcaggactaccccaccatcgaccccacctcgttcgacgtggtcctctgcggcaccggcctcccggagtccgtcctcgccgccgcctgcgccgccgccgggaagacggtcctccacgtcgaccccaaccctttctacggctccctcttctcctccctcccttctcccttccctcccctctncctttccccccctcccccttcggacgaccccgncccctccccttccccctcctccgccgccgccgtcgatctccgccgccgcagcccgtacttcgcaggtggagacctcgggggcggtgcccgagccgtccaggcgcttcaccgacgacctggtgggccccaggctgctctactgcgccg

SEQ ID NO: 21542 - DNA, 348 bp, Oryza sativa
  Clone ID: uC-osflM202035d04b1
gactacttttactgggtggcgcacaaggagatatggaaggagctatttaaggtgctgcaggcacaaacccagtggcagataagacaagagggcattcctttgacttcattcggcccaccaaatggggctcataaacctggggtgcacctatatgcgtatgatttacctcgtatggctttccattcatttgctggtggtaattctcaaccctatgctattacaacccggggatcattgcactgaccggtgggagctgttccacctgtgcctcaacctgtaatcagacactttggaccttgtggacatactggcggccctattggtgggcacctttatcaccaacagagt

SEQ ID NO: 21543 - DNA, 499 bp, Oryza sativa
  Clone ID: uC-osflM202035d05b1
gactacttttcctgggtggcggtcaaggtgttatgcaaggagctagttttggtgctgcaggcacaaacccagtggcagataagagaagtgggcattcctttgttccatttggcccaccaaatggggctcataaacctggtgtgcacccatctggctatcctttacctcgtatgcctttccctccatttgctggggctcattctcaaccctatgctattccaacccggggatcattgcacggaccgattggagctgttccacctgtgcctcaacctggaaacagaaactttggacctcgtggaaatactggtggccctattggtgggcaccttgctcaccaacagagttctcagcaagctatgggaggcatggggtcagcttttaactttcctggcctggagaatccgagcagtcagccttctggtggaggtccaatgtcccagactggattgatgacacagatgcctgtccaaggtctcagtcaaacattccgcgatgg

SEQ ID NO: 21544 - DNA, 480 bp, Oryza sativa
  unsure (1)..(480): unsure at all n locations
  Clone ID: uC-osflM202035d06b1
gcgcttgcaagtttgggttttatgagttctttaagggggactactcagatattgctgggcctgagtatgctcagaagtacaagaccctaatttacctcgctggatcagcttctgctgaggtgattgcagatgtggctctctgcccatttgaagctgtgaaggttcgtgtgcaaacccaacctggattcgctcgtggactgagtgatgggctccccaagttcgtcagatctgaaggcgctcttgggctttacaagggaattgttcctctgtggggtcgccaaatcccttatactatgatgaagtttgcctcctttgagaccattgttgaaatgatctacaagcacgctgttcctgttncgaagtctgagtgcagcaagtctttccaattgggtatcagtttcgctggtggttacattgctggagtcttctgtgccattgtctctcatccagctgacaacttggtctctttcttgaacaacg

SEQ ID NO: 21545 - DNA, 491 bp, Oryza sativa
  unsure (1)..(491): unsure at all n locations
  Clone ID: uC-osflM202035d08b1
ctttgttatcccgtcgccacctcgccccatcaccctctccctccaccacactacaccccgctccactctcaggcaggcaatcagcggcgaggcaccagcccaccggccggcaatggcgtccacctcctgcttcctccaccagtccacggcccgcgtcgccgcgcgcgtcgcctccccgtccccggcgacacggacccacctactcgtctgccgcgcccagaagcaggacgacgccgacgtctcccgccgcgcggcgctcgcgctgctggccggagcgacggcggcgctgggggtggaaggtggcgcccgccgacgcggcctacggcgaggcggctaacgtgttcgggaagcccaagacgaacacggagttcatcgcctacagcggcgaggggttcaagctgctgatcccgtccaagtggaaccccagcaaggagggcgagttccccggacagggcctncgctacgaggacaacttcgacgccaacagcaac

SEQ ID NO: 21546 - DNA, 494 bp, Oryza sativa
  unsure (1)..(494): unsure at all n locations
  Clone ID: uC-osflM202035d11b1
tctggtgtggcctcggcctcggcccctctagggtggtggtccacctcctcctcctcgagtccctcttatagcccaccgccaccggccgccgcgcgcccatggccgccgtgttcttccaccatgttgtcggcgacctcaccgtcgggaagcccgaggtcgtggagctgcacgacaccgacacgctcgacgccgccgcgcgggccatcgcggccagccccgagggcgccgtgcccgtgtggcggccgggtccggcgcccgacgagccgccgtcgngcgccaggttcctcgggatgatctccgcgctcgacatcgccacgttcgtggccgcttccggcgtcggtgaccgggccatggccgccgtggtcggggaggtcgtgcagcccaaccctggcctgctccgggaggtcgatccacgcacgaggttgatcgacgcacttgatttgatgaagcaaggggtgaagcgctttcttgttcgaaaaaatggcgcctggaga

SEQ ID NO: 21547 - DNA, 500 bp, Oryza sativa
  unsure (1)..(500): unsure at all n locations
  Clone ID: uC-osflM202035e02b1
gattttgtctcatatatgactttttttctcaccatcaaggtcgttggacatgtggagcctgtggccgttgatgatggaggctctaaatgattgggcaatagacttctttgagaatattcttgttccattggacaactatgtttcccggggatcggaccattttcttgcctgcaaaaacccagattatcagcaaagcttgtggagtgcactatcatctattatgatggatcaaaacatggaagattcagatattgagcctgctcccaagctcattgaggtggtttttcaaaactgcaaaggcaatgtggatcaatgggttgagccttacctcagtcttacaattgatcgattgcgtcgagcacacaaaccatatttgaaatgtctccttgttcaagtgattgctaatgcgttctactacaacccttctttgacacttgcaaccctacataaacttggngctgtgactgaaatttttaacatttggtttggtatgttagaac

SEQ ID NO: 21548 - DNA, 494 bp, Oryza sativa
  unsure (1)..(494): unsure at all n locations
  Clone ID: uC-osflM202035e03b1
gcattttaaacaaatccatgatctccaagaacatctgcgagaaaaggaaagccaaatgcttgcattagaggaacagcatagggctgctcaagataacattatttacaaagatgaacaattgagggaagctcatgcttggatggcacgagttcaagaaatggatactttacagtctcagacaatgcaagctgagttacgtgatcgtactgagcaattcaatcaatattggattagtttccaacaacagtatgttgagatgcaaaggggttttctgcataccatacaacaacttcagctagaactaaatgaattaagagaccgaactggagcaccaaaagatggttcacaaactgcacagnagagttcggccgagtcaacacttggtcagaacaaagggaacaacatggctgcaaatggtagtggaacaacagatagtagtcagtcagtgaaaagtaatggagttccagattgttccacaagggaaacagtaatgc

SEQ ID NO: 21549 - DNA, 500 bp, Oryza sativa
  Clone ID: uC-osflM202035e04b1
gattctgttacaatagaacactgcgcatagaacgggggggagagcaagatgtttggtttcgggcaccacgggcaccatgggcacgaccagacaggccagcaccactggtggtggcgcttggcggctcgcaccacgctatctggatgatcttctggcgagagagagagggggactgagagagcgagggcgagaggaacgtcgtcctcgccccgaccaacccgggcgacgagcaccagcactggtacaaggacatgcgcttcagcgccaagatcaaggacgaggagggcaacccggcgttcgcgctcgtcaacaaggccaccggcctcgccatcaagcactccctcggccagggcccccggtgaaagctgggcgccgttcaacccggagtactcggcgaggtcggtgctgtggacggagagcgtctaacgtgagcaagagcttccgctgcatccgcatgctgaacaacatccggctcacttcgacgcgttccacggcgacag

SEQ ID NO: 21550 - DNA, 499 bp, Oryza sativa
  Clone ID: uC-osflM202035e06b1
gtgtgcgagcactgagtagcaagggcccggcacaaacaggacgcagccggcaacgtgtacgtcgaaccaaacagagaacagctagctaatcgatcggtcgccatgaccaaggacgacgccgtcccggtggccgtggcgccggcgaagcgcccgcccatcaacaagtacgccttcggctgcgctctcctcgcctccatgaactccgtcctcctcggctatgatatctcggtgatgagcggcgcgcagatattcatgaaggaggatttgaagatcaccgacacgcagatcgagatcctcgccggcgtcatcaacatctactcgctgttcggctcgctggcggcgggcatgacgtccgactggctgggccgggcggtacaccatggtgctcgccgccgccatcttcttcacgggcgcgctcctcatgggcctcgccccgaactacgcgttcttatggccggccgctttgtggccggcatcggcgtcggctacgcgctcatga

SEQ ID NO: 21551 - DNA, 378 bp, Oryza sativa
  Clone ID: uC-osflM202035e07b1
aactaggtcaactcatacacctgagacgaggccgggcaaccttggtggaactggaggcaatgattaggaaacattagtattccggaaactttaagaggctcagaaaaggaagctaagcggctagttaggcggttagttgaagcgtaagcaggacgtttgctgcttaagaacaactgagaatagctgggagacttacgtcagaaatttgaacaattttgtagttgggggcgatcttgttgataatatttctcatgctgatggtgatgccagttttcaggcattcactaccatgtatgttattccaatagactatgacgtaagatttttaactgtatacttcaatatttggtttgggataaaagtgatatactaacatgt

SEQ ID NO: 21552 - DNA, 456 bp, Oryza sativa
  Clone ID: uC-osflM202035e08b1
tattttaattacgcaagctacatgagaccagacgagggacagtaggagaagatggggcctgctcccggcctacctgtgtttctccccctctctatctcctctactatgctctcgatctccatacttccttccatccattcctccccacacccttcgcattgctctggtcgtctcgattcggtcgaggatctccatcacaccaggactgaagcgctatgttttgcttttcatgctgctgagcgcttcatttcatcaagactaagaagctcgacgattcttacgtcccgatccctgatccaggtggtaactattgacttagcacgcccgggcccccaaccccttcgcgttctccccccaccagccaaaatctgccattgcactgccggcaattacccttgatgaaataacgggaataaccaagaacttcagcagtgatgctctcatcggagaaggctc

SEQ ID NO: 21553 - DNA, 476 bp, Oryza sativa
  Clone ID: uC-osflM202035e10b1
tctcactagcaaacctagcctcgaagcgattgtgatgagttttagaggtggtgcgggttcgatcacgtggagttctattggtgttcagtgactcttggcaaaagttctcttgtaaaatcgacgacgatggaaaggtacaaagtgataagggagataggcgatggcacctgtgggaatgtttttagggcttataacactgaaacaaatgaaattgttgcagttaaaaaaatgaagaggaagtttttccaatgggaagagtgcattagtctgcgagaggtgaaggcacttcaaaaactgaatcatcccaacattgtgaagttaaaggaggtgactatggaaaatacgagttgttcttcatttttgaaaacatggaatgcaatttgtatgatgtcataagagaaaggcaagctgctttctcagaagaggagatacggaactttatggtgcagatactgcaaggtcttgcatatatgcat

SEQ ID NO: 21554 - DNA, 500 bp, Oryza sativa
  Clone ID: uC-osflM202035e11b1
ttcttatgcacaccgctgtggatcttgtaaatgggggcattctcgatagcgagggtacgtcatggctcgcttttgccagccagaaggtggttgaggtgaatgccctttgctacgcattggctggacagaacgatgaggctgactttggaccgaacatctagacaggtcaggcctccaggagggcatcacctcgtgtgacaaacgaggaagtccaaaaggctgctgctgctctgaaggggtctgaccaccgccgtgctaccaatgttagcgctagactggacgcacagcagaagaagctcaaccttccagtccttcctacaaccacaattggttcattcccacagactgtggagctcaggagagtccgccgtgagtacaaggcaaaaaagatctctgaggaggagtacatcagtgccatcaaggaggaaatcagcaaggtttgtaagatccaggaagagcttgacatccatgtccttggtcacggcgagcctgagagaaac

SEQ ID NO: 21555 - DNA, 501 bp, Oryza sativa
  unsure (1)..(501): unsure at all n locations
  Clone ID: uC-osflM202035e12b1
tttgatgcatcaattcaaaatcttaacaactctgattggtgtggcaggcaattgcatgttgctacatttattaagaagagtgaacgatctacaaacaatgatgacaaatatactaacctatacatgaagaaccttgatgatgatataacagaggaacttattaagttaaagttctctcagtatggtttagtaattagtgtaaagataatgaaaagagatgatgggacatctaagggctttgggtttgtaagttttcaaaacccagaaagtgccaaaagagcaaaagaatccatgaacgggatgctacttggatcaaaaaccttgtatgtagcaagagctcaaaagaaagctgaaaggaaacaatatttgcaacgcttacacgnagagaagagaaatgaaataatcaccaagagcaatgggtcgaatgtctatataaaaaatattaatgatgaagttggcgacgatgctctccgtgaaacgttcaatgaattttgaaacatt

SEQ ID NO: 21556 - DNA, 427 bp, Oryza sativa
  Clone ID: uC-osflM202035f02b1
gcgtaagttgctgctgctgctcgtcctcgcgttcggcgagtcagatctggagccgatctgacctcttagaggtccggttggggcatgctccgtacgagctggcgtggatgaagcggcggggcgagggaggaggctggtcgtcgcctggatcctctccatcggggcctcgcgcgatgatgtctctttgtattgataattattcgatgaactttcgataattattagatctaagagatgttgttcgagggagccgtgtgctgagatgaaggcggcaaggtaagagaacatgtaacaagcgaggtgcttgtgtctgagggtcaaaagaaaaagagacgaaaaaaaaacgagagatgtgacatcgcaagattggcctttgccatgttgggtgcgctcgcatggcaggccaccgtaataagatgatcttttt

SEQ ID NO: 21557 - DNA, 438 bp, Oryza sativa
  unsure (1)..(438): unsure at all n locations
  Clone ID: uC-osflM202035f03b1
ggttctgtgtggtggatgggaaggcgagctgcatgatgggtgcctacaccctcatcaatggcgtcccggcgtgtgctagttctgacctcctcaccaagaccgtcaggggagaatggaagttagatggttacacggcgtcggactgcgacgcggtcgccatccttcacaaatcggaacacttcacgaggacggcggaggaagccgtggccgtcgccctcaaggccgggttggacataaactgcggcgtgtacatgcagcagaacgcggcgtcggcgctgcagcaggggaagatgacggagaaggacgtggacaaggccctcaagaacctcttcgccatccggatgcggctgggccacttcgacggcgacccaaggggcaacaagctgtacggccgcctcagcgccgncgacgtctgcacgccggtgcacaaggccctcg

SEQ ID NO: 21558 - DNA, 475 bp, Oryza sativa
  Clone ID: uC-osflM202035f04b1
cttttcctcctctcttccatcgccgctgctcgcttgctccccctctcccacgaaagatggcgtctcacattgttgggtacccccgcatgggccccaagagggagctcaagtttgccctggagtctttctgggatgggaagagcagcgctgaggatttggagaaggttgcgaccgacctcagggccagcatctggaagcaaatggctgacgctgggatcaagtacatccccagcaacaccttctcgtactatgatcaggttcttgacacggctgccatgcttggtgctgtcccagagcgctactcatggactggtggagaggattgggttcagcacctacttctcgatggctaggggcaatgccactgtccctgccatggagataccaagtggtttgacaccaactaccactttatcgtccctgaacttggtcccacaccaagttctcctactcttcccacaggctgtgaatgaat

SEQ ID NO: 21559 - DNA, 428 bp, Oryza sativa
  Clone ID: uC-osflM202035f05b1
gttttaatctctccaattttacactgggggtttggctggggtactttaacgctgaccttgctatgttatcctgggcttatccttcccttggcggaatggagtatgttcttcaccacttgctgtcaattatttctttagtctatgctatttattctgaagaaggacagttgtacacatacatggttctcatctctgaaacaaccacacctggaatcaacctccgatggtttcttgatactgttggaatgaaaagatcgaaagcctatcttgtcaatggtgttacaatgtttgttgcatggctggttaagcagatgcgcacctttagctgcattctgatattcgctgtgcccacaatactattagtgatgaacacagcgtggtttgtcaaaatcttgagaggtcttaagaagactctagcaattcaccac

SEQ ID NO: 21560 - DNA, 357 bp, Oryza sativa
  Clone ID: uC-osflM202035f06b1
gatttcttttgcagaagttttgactcagatataccaaactgtcagcaagaagacggttgaggcatcagatgatggatcaaatgctccaatcaaaggagagaagattaatgtgaaagatgacgtgtctgcgctgaagagaattggctgttgctcaaattagagtagagatgcatttcttgttgattttttccactaggtgtacggctgtatgttgcttctattgaaagaggtccattaattttcattttgttgtggtgatattgagagttagattgttccaactttcagttataccatttcttgaaagtcttaactcaagacagctcctttcgtcagattggttactgtgttcgacat

SEQ ID NO: 21561 - DNA, 503 bp, Oryza sativa
  Clone ID: uC-osflM202035f07b1
ccatcgcctcctcctcctcctccgccttccgcctgtcaccaccacggcttccagctctggccgtagcagcagcagcgcgcgcgcgggtgcctgtgcccgccgctgctcacggctcctcgccgccggcttgtgcctccgatacgtgagctccccacgggggtgcgagggggtctggaaaccggcggatctcggccgctcgccgccggagtccggcacgggtggaggagtacggcgacccgcttttttcttagcgattttctttcctcttctctcaggctgagctccccaagcgccgtgaattggtaggacttttgtgggaggcgctggtttctgctctactcacagcaagtttctaaagactcggaagcaattgatgtgaagtattcttttcagttcggcttgaagtagtcctctcagaccattgccgcatataagagtagcttattaccttgtataggaaaaagtagaaagcttattcgagcatgtctggttcataatagact

SEQ ID NO: 21562 - DNA, 208 bp, Oryza sativa
  Clone ID: uC-osflM202035f08b1
tgcgtgatctctccattcttcccaacccaacggttggagctagctagctatctagttcatcatccccatccaccgagctcgatatccctggccatggccatctccatggactctaccctggcttcttgggctggggcattcttaggctcatacaagtatttgctgaacgggccggtggaggggaaggtgttgcacgagtggaggcagc

SEQ ID NO: 21563 - DNA, 88 bp, Oryza sativa
  Clone ID: uC-osflM202035f10b1
ttgcttagagatcttctcatcaatatcccggcattggtgggtatcaatcacctgcgtggtggttcaatccgcggaggtgatgggtacc

SEQ ID NO: 21564 - DNA, 485 bp, Oryza sativa
  Clone ID: uC-osflM202035g02b1
gtttttgttcttgcatgctgttcttgttgatcgagtgagagagggggaaggaagaaaggagggaggcacatgcttataccgttcgtgctggagttcctgatcgatgtcgcctgtgatcagtgagatcctcctctcggggtttatgatcaactccacactccggcgccgcacccatctcgtccagtctttctccgtcgtcttcctctactggttctatgtcttctcataagctactcgccatccatttccctctcctcctctctctctagcttccttctacaataatcgatctcgtgttcgtcgtcgtcgttcttgtcgatctctgtgtgtgttcttcgtcgtcgtcgtggttcgttttggattttggtttcagtttagtatatgcacttcttgttcttcactgctgctgctgctgctaagcttgtagcattctagtggtgcttggtgttcttcttttccgaaatctttgcgatcgattgattgat

SEQ ID NO: 21565 - DNA, 515 bp, Oryza sativa
  Clone ID: uC-osflM202035g03b1
agctaattcagcagcagaagcagcagcagcagctcagccgccgccgatggcgtccacgatcatggccccaacctcccgcgtcctcgccgccaagacccccttcctcggccatccccgcccctccaatgcccccgtccgcgacatcgccgccgccgccaccggccgcatcaccatgagcaaggagctgtggtacgggccggatagggtgaagtacctggggccattctcggcgcagacgccgtcgtacctgaggggcgagttcccgggcgactacgggtgggacacggcggggctctccgcggacccggaggcgttcgcgaggaacagggcgctggaggtgatccacggccggtgggcgatgctcggcgcgctgggctgcatcacgccggaagtgctcgagaagtgggtgcgcgtcgacttcaggagcccgtgtggttcaaggccggcgcccagatcttctccgacggcggcctcgactacctcggcaaccccagcctggtgcacgcccagagcat

SEQ ID NO: 21566 - DNA, 497 bp, Oryza sativa
  Clone ID: uC-osflM202035g04b1
gcgtcacctcctcgcgtgctcagcgccgccgccgggcagctgcttcttccgccgcatcctcgccgccgggttagggttttggggatgtccgaccggcagcagtcggaggagccggaggagcaggtggacctggagggggacgacgacaacgacgtcatggacgacgacgaggacgggtaccgccgccgccgccgccgcgaggactccgacgagccggacgacgacgaggaggatcccgaggtcgagggcgatggccacggagacgcggggaccgcggcgggcgaaggaggagcgcatgagatggacaaggccgccggcggcggcggcgatgggcctgaggacgatgacgagaagcggaagtgggatgagctgctcgctctgccgcctcagggtccgaggtgttcatcggcggtctcccccgcgacaccaccgaagaggacctccgtgagctctgcgactcgttcggcgaaatctattgagtgaggttgatgaaagat

SEQ ID NO: 21567 - DNA, 498 bp, Oryza sativa
  unsure (1)..(498): unsure at all n locations
  Clone ID: uC-osflM202035g06b1
cttttcgtcgccgctgccatggcgctctccgtggagaagacctcgtcggggagggagtacaaggtgaaggacctctcccaggcggacttcggccgcctcgagatcgagctcgccgaggtcgagatgccggggctcatggcgtgccgcgccgagttcggcccctcccagccgttcaagggcgcccggatctccgggtccctccacatgaccatccagaccgccgtcctcatcgagaccctcaccgcccttggcgccgaggtccgctggtgctcctgcaacatcttctccacgcaggaccacgccgccgccgccatcgccagggactccgccgccgtgttcgcctggaagggggagaccctcgaggagtactnggtggtgcaccgagcgctgcctcgatggggcgtcggcggcggccccgacctcatcgtcgacgacggcggcgacgccacgctgctcatccacgagggcgtcaaggccgaggaggagttcgagaagtca

SEQ ID NO: 21568 - DNA, 495 bp, Oryza sativa
  unsure (1)..(495): unsure at all n locations
  Clone ID: uC-osflM202035g10b1
gttttgttggcccccattcctcccccacccgggtgtcctcccctccgccgctcgcgtcgccgcctttttcccctatggcgctgccgaatcaggggaccgtggattaccccagcttcaagctggtcatcgtcggcgatggcgggactggtaaaactacatttgtgaagaggcatctcactggagagtttgaaaagaaatatgagccaaccattggtgtcgaagttcaccctctagattttaccaccaactgtggtaagatccgcttctactgctgggacactgctggacaagagaagtttggtggacttagggatggatactatatccatggtcaatgtgcgataattatgtttgatgtcacttcaaggctgacttacaagaatgttccaacatggcatagggacttgtgcagggtgtgtgaaaacatccncattgtcctgtgtggtaacaaggttgatgtgaagaacaggcaggttaaagccaagcaggtcacat

SEQ ID NO: 21569 - DNA, 493 bp, Oryza sativa
  Clone ID: uC-osflM202035g11b1
ccgccgccgccgccgccgcagtcgcgggtggggctccccaaccgaggaatccggtgccaccgccgccgctgcgggcgcccgcgcgcgcgacgtcccgctgcctacgacgtcgcccacggctccatgactatgatgactcctccccccatcgagcagcagcaggaggacgaggagatgctcgtgccgcaccaggagctccccgccgccgccgccgctgtcgtcgccgacgccgtgcagccgatggaagttgtggcgcagacagagcctgccaacgcggcagagagccagccgccggaggacccgcagacgtcgcggttcacgtggacgatcgagaacttcaccaggatcaacgggaagaagcactactcggagccgtttgttgttggaggattcaaatggcgtgtgctgattttccctaaggggaacaatgtggaccatttctctatgtatttggatgtcgcggactcggtgaatctcccttatggatggaacc

SEQ ID NO: 21570 - DNA, 488 bp, Oryza sativa
  Clone ID: uC-osflM202035g12b1
ggtattcccatacactttgtttgtcttccccgtctcgtgggcgagagaaaccgacaggagagagagggagaggagcgctgccgattttccggagggggagatctttttcttctccctgaagggtcgagatcgatctgcgacgaggaggagcggggaatcgtaactttatttccgaggaaatttcaacaaattgatgcactaatggagtccaagggtggcaaaaagaagtctagcagtagtcgttcctccctgatgtacgaagctcccctcggctacagcattgaggacctccgacctgccggcggcatcaagaagttccgctctgctgcttactccaactgcgcgaggaagccctcttgatagcccccttggctaccttgacctagtagtttagttactcctctgaattctcgttttgggctttcttacatctctctggctagctgctgcccagtgaccgggaaggtcatcagtcctgctttctttct

SEQ ID NO: 21571 - DNA, 461 bp, Oryza sativa
  Clone ID: uC-osflM202035h03b1
ggttaatttgcaacaattaagaaccatgacatcatgctgagtaacaaggtgcatgctcttgttgaatatgaaacagcagaggcagctgagaaagctgctatcaccttaaacgatgggagcaattggaggactggaatgaaagtcaggctggctaagcgaaccgtaggatcaggaaagcataaccagtcttcaaaagaaaatcaggccatccagggccagccttcaaaagtagagcagcagatggtatcagaaaagaatggtggtactgattcagtggagagtgctttcgacaatgagaatgtgaactctaatatttcccatgaggacatgcaccaacaccaaaaagtaaatgctaaaggaggacgaaaaggtcgatataaatctcaagaagaggtcagattcagaaaatacaagtgggcaggccatgtctcatcccctgccacttctggttctgatcatgt

SEQ ID NO: 21572 - DNA, 501 bp, Oryza sativa
  Clone ID: uC-osflM202035h04b1
cgatcgcttccacgcacgcccgatcccggccgcgagatgagcttccgcggcgaggagagcggcggcgaggatggggggcggacggcgtcggcgtcggacctgcggaagccgttcctccacacggggagctggtacaagatgtcgtcggcgggcggcggcggcgggatggggtcgcgcctcggctcctccgcctactccctccgcgactcctccgtctccgccgtcctctgcaccctcatcgtcgccctcggccccatccagttcggcttcacctgcggcttctcctcgcccacccaggacgccatcatctccgacctcggcctcaccctctccgagttctcgctgttcgggtcgctgtcgaacgtctgggcaatggtgggcgccatcgccagcggccagatcgccgagtacatcggccgcaaggggtctctcatgatcgcggcaattcctaacattattgggtggctcgcaatatctgttgcaaggactcatcctttttgt

SEQ ID NO: 21573 - DNA, 503 bp, Oryza sativa
  unsure (1)..(503): unsure at all n locations
  Clone ID: uC-osflM202035h05b1
gcgttggtggcgcccgctcacctcctcgccggccggacggcgcgaggaggaatctctccacccccacactcctcgcgccggtgcccctccctccccctccatcctcctcgcgtttcgcttcccctcttcgcactactccgactcccagccggaagcgccggtgtcgatggcggacgatgccggtgccggtcgcactcgcagtcgcagggatccttccgatcgccctacgcgttcaggccaatttctaatcagggctttgctacgaggcgaattggaggagcgcactgcagacgcaaggtttatcccacttacaccaataatggaggatctatttgtcagcggcattgaagagattcccgaagacacttctgtgcatcaccagcaaactgatgagccaccaccatcctacaacaccattaggagngggtgaaggcacattaatggctgagctgcgtgaggctaccgagcaactacgtttgtctttctatgccaacacagatgaa

SEQ ID NO: 21574 - DNA, 430 bp, Oryza sativa
  Clone ID: uC-osflM202035h06b1
agtttattgatctgcttgtagagaacgtcccacgggtggggatagttaggggatacagaagagatgttgtcacattcttcacatgattagagatgtataccttctggcggctctactgccatatgattgttgtaacatcatcatagcaaagtgggcaagcagattttgtgcagattttacagctgaaagtcagaagccatcaccttgaaggctacctaccctgagataggagatctgctgggcctttcgctggcatattgggtacgtcaactacagtatgtccattctttttctcggattcacatagcaagtttcaatacagttaattgtcacaaattttgtagccctggtgttccccatacgtgtaacaatcttagaaacgcaacgcttccttttgcactgaaacagtagcaatggtatcacatttttt

SEQ ID NO: 21575 - DNA, 346 bp, Oryza sativa
  Clone ID: uC-osflM202035h07b1
cgtcgcggcgcttccgttcttccgggccggcggccatggaggacgcagcagcaaggcggatggagaggctcgcctcccacctccggccgcccgcttctcagatggaggaatcacccctcctgaggggctccaattcccggtcaaaaggtgccgctccgggtttcaaggtcgccatcttgggagcgtctggtgggattggccagcctcttgcattgctcatgaagataaaccctcttgtgtctgtgctccatctgtacgatgttgtcaacactcccggtgtcacagctgacattagccacatgaacactggtgcttgtgtgcgtggtttcttgggccagccacagtt

SEQ ID NO: 21576 - DNA, 248 bp, Oryza sativa
  Clone ID: uC-osflM202035h08b1
ttttcatattacccaaggagaacccatctatggggacggctcatataaagtggggggcacccaagccacaactcaaattggctccctacgtgctaactaccgcatggaaatatcagaaaactgctactccatgaacatcaattacctcctcataacttaatcctgcacatacattactttgctacagataactcacaaaaatgaaatcttcttggaaatcttgcaatatttaacaacaacaacagtcg

SEQ ID NO: 21577 - DNA, 365 bp, Oryza sativa
  Clone ID: uC-osflM202035h10b1
tgtttttgtgggtgctggtggttcttgggaaggcagggcaactaatgatgagagagcggataaacattctaaagacgaaattgaggaaagtagagatactatggacactgatgcgacagctgatgatgacatagatcatgtaaatgaagacaatgatagtgatgtgccaaaatgcatacctatgcataatatgagagtgaagactatcttgaattgtcaggatctatctaaggcatactatcttaccgatttgcctattaacacagaatctgaagctagaagaactatatccaggcacaagcaagctcgtgaaaacaatggaacttggaaatgcacacttcaacttctgggcaaaattcatcact

SEQ ID NO: 21578 - DNA, 337 bp, Oryza sativa
  Clone ID: uC-osflM202035h11b1
tatttttttttttttttttttttagaaaaccagggggattttgtgccccaggggttggtctatcggaaagggaaaaaattctgaaatttcgatccgaaattgtgaattcctgttagagcctctagatatcaaaaccgaattaagtaacggccccagaatgggcaatcgatcaggtagccaagccatagcaggccagcgcctgatgcagatcagtacttgtagtccttgacgtgcaggctttcagtatcgccctcgccgaggacagcatcacccttgtaagtacccagggtagcctcggagttggccttgcacctgacaaggaaggccgccctggcct

SEQ ID NO: 21579 - DNA, 484 bp, Oryza sativa
  unsure (1)..(484): unsure at all n locations
  Clone ID: uC-osflM202035h12b1
ctgttggagtggatgtgtctgcaagtgagaaaatgtggagaacttttcagtcacttggtgacattgcctttgcatactcctactccaatgtcctcatagaaattcaggacacgctgcggtcgagcccggcggagaacgaggtgatgaagaaggcgtcgttcatcggagtctcgacgacgacgacgttctacatgctgtgcggcgtgctcggctacgcggcgttcggcaaccgcgcgccggggaacttcctcaccggcttcggcttctacgagcccttctggctcgtcgacgtcggcaacgtctgcatcgtcgtccacctcgtcggcgcctaccaggtcttctgccagcccatctaccagttcgccgaggcctgggcgccgtcgcggtggccggacagcgccttcgtcaacggcaggcgcgtgctccggctgccgctcggcgccggcgacttccccgtcagcgcgctccgnctcgtctggcgcac

SEQ ID NO: 21580 - DNA, 519 bp, Oryza sativa
  Clone ID: uC-osflM202036a02b1
ctttttcaaactccaaagttctcatcgctgcgcgggggactgtggactctccactgtgcacgcccctactccgaggatacaccgttcttgagtttgagttgggcaaggaggttgtgaacgtagcctgaacctgacctgagattgtgaacgtaattttggggggaaaggttgttctgtactgtctcttcaatctgtgagttcgtgacaggttcttgcaaaaaccaaaacatcatcagtgaaaaattgttcgtagcattttagctctagtatagatcgatcaatcgatcgttcgttcgttcgatcgttcgaggacgagagatttgctaacatggcgttggcagggacctccaaagtagtgctgggatgtgtcgcgtttgggatattctgggtgctggccgtcttccccaccgtcccgttcatgcccgtcggccgtaccgacggcttcctccttggcgccatgctcatggacctcttccgtgtcatctcgacggaggacgcctatgccggcatcgaccttcc

SEQ ID NO: 21581 - DNA, 535 bp, Oryza sativa
  Clone ID: uC-osflM202036a03b1
cgttttcctccgcctcgtaaaagtcaaaaccgtggggggccctagaaagccggacggggtgcaaaaccctcctcgtctacccttccctctctgctcgccgccgccgccgccgccgcacgccttcgaagatgctcgacatcaacctcttccgcacggagaagggcggcgacccggagctgatccgcaggtcgcagcgcaaccgctccgcctccgtcgagctcgtcgacgaggtcatcgccctcgacgaccagtggcgccagaggcaattcgagctcgacaaaatccggcaggagctcaacaaaaccagcaaggaaatcggcaagctcaaggctaaaaaggaggacgcgtcggctctgattcagagcacggaagagattaagaagaggttggctgccaaggagactgaagtgcacgaggccaagggcacgctcgatgccaagctcgtgacgattggaaacattgtgcatgaatccgtccctgtcagcgatgacgaggctaacaatttaatttgtactgacatggggagagaggaggc

SEQ ID NO: 21582 - DNA, 441 bp, Oryza sativa
  Clone ID: uC-osflM202036a04b1
agtttgcaaaattctttatgaatggaaccgtgcggggtgacgtacttttcttgagcacatccagcagtagcatcttggaatcagtgaagaactgtgtatacgtttcatacctcagtgtgcaccacaccccaagaatggccgctcccatctgggtagtgctaatcttgctctgcctgcctgagatgataccatccaggcagttcatgcattgctccgatggcatgccctgcatgcactgcactagcccatacaccgactgtcctgtctcctcaaacctctgattgcctactgcatacctctctggtcgactcactgcagcatcagtaagtgcacgcagcaccttggtgacaagatcctcaaattgttagccacaagagctgtacagcattcagttagtattcacagtgcacttccgcacatttgtgaagctggagataaaat

SEQ ID NO: 21583 - DNA, 412 bp, Oryza sativa
  Clone ID: uC-osflM202036a05b1
ggttttcccaatcccacactcatatatacacactggggggccttgccgtcctagggggctgctgctgcattcttcttgatctgatcgtcggacatggcgtcgcccatgctctccgccgccaccgtgccactccagggaggcggcttgtcggagttctccggcctgaggagctcgtcgtcgctgccgctgcggcggaatgccacctccgacgacttcatgaacgcggtctccttcacgacccacgcggatggcacgagcggcggggcgcggcgggcgccgacggaggcgaagctgaaggtggcgatcaacgggttcggccgcatcgggcgcaacttcctgcggggctggcacgggcgcggcgacagctcgcccctcgacgtcatcgccattaacgacaccggaggcgtgaagc

SEQ ID NO: 21584 - DNA, 474 bp, Oryza sativa
  Clone ID: uC-osflM202036a07b1
gctctctctactacgcgtgggacatgagggagacgggcgcgacggatgaggggcacgcgtgcgaagttgtagtagccggaggtgacggcaaggccgcggcggcacgccggcgccgacgtctcgagctccggcggctcgggctggcggcggaggatgatgcggcggcgaagagaatccggtcggtgaaggacgggtcgtcgtctgatgactcgtcgacggaggttgttccccggagctggccggcgtgcgtgtcgcacggctcggtgtcagtgatcgggcggcggatggagatggaggacgcggtggccatctagcggacgttcatggctttgacgggggatggtgcgggcgctatcaggtgcggttgtgagggcgaggaggacttcttcgcggtgtacgacggtcactgcgggtcccggttggctgaggcgtgcatgaagcggatgcacgttgtgctcgcggaggaggtgagcc

SEQ ID NO: 21585 - DNA, 531 bp, Oryza sativa
  unsure (1)..(531): unsure at all n locations
  Clone ID: uC-osflM202036a08b1
gtttcaatagtgattaatttggtgatttttatggggatggatgcataatattttggggtgcattgattatagatgcacgtaattattacaatactgtctgctaaagtaagttgaaattcaaaagaaaaccaaaatctaaaaaaaaaatgttcactaacatattgccatggaatgtatggctagctgaaaggctaaactaaatgacaaacatctttatatgcatggaatgcctctaaataaaccaaaagacattataatctatccactaccaggttcaattgcgaaatggcacgtagactagtggctgcagtgacctgactagcatcccaagttccttaattcaaatcttcatagaagcaaataccagattaggttatttgaggggctaagttcctaatttaaaaaggttgcatacatccaaatacctttctctctaaaaagaaataccggggtcaatcatatatacttnctctgtttcaaattagttgtcactgtaggtttgttctaagtgaaacatatctacctttgatc

SEQ ID NO: 21586 - DNA, 530 bp, Oryza sativa
  Clone ID: uC-osflM202036a09b1
gtttgaacgcgtcgccgatgatctacaaccaggggggcgcgctggacaagaacgcggtcctcttcatgaacgagttcaacacgctggagcagcccggtgaccccaacccggtgcccagcaagtacgtcgccaagatgaagcagatccagagctaccccggcaacagcgccctcaagctcggcgtcggcctcgagagccacttctccaccccaaacatcccttacatgaggagcgccctcgacacgttggcgcagctcaagcttcccatgtggctcaccgaggtcgatgtcgtcaaaggacccaaccaggtgaagttcttggagcaggtgctgagggaagggtacgcgcacccgtcggtgaacgggatgataatgtgggcggcgtggcacgccaagggttgctacgtgatgtgcctgacggacaacagcttcaagaacctgcccgttgggaccctcgtcgacaagctgatcgtcgagtggaagacgcacaagacggcggcgacgaccggcgccgacggcgccgtcgagctc

SEQ ID NO: 21587 - DNA, 367 bp, Oryza sativa
  Clone ID: uC-osflM202036a10b1
tatctgactcacctcccacactcagaatgtttagatgctttaaccaataaaaggggcttccatcagaaagggtcatcagtggttgttactgtgaattcattccgaggcagcaagagaatacaaggcttaaggattggtggcgatgaaaattctatgtctgggaacagcttgatccaggaagaactcagagatgacaaatcactaaaaacacctggatatgttaatttggttggttctacaaaccaacatagtttgagtgatggaagcaccactgaagaaatctcattacccaaagtttctaatagttgtttcagtgatgcagatatgagactggaattatgtcatactgaagaagcaatatctgttg

SEQ ID NO: 21588 - DNA, 489 bp, Oryza sativa
  unsure (1)..(489): unsure at all n locations
  Clone ID: uC-osflM202036a12b1
atttcttcccccctccacccgtctcctccgtcgggggcgccggcgccggcgagctcgccccccgcgattcgtgccctccgatcagaggcgaggcgggagaagagatggggctcacgttcaccaagctgttcagccggctcttcgccaagaaggagatgcggatcctgatggtgggtcttgacgcggccggaaagaccacaatcctctacaagctcaagctcggcgagatcgtcaccaccatccccaccatcggattcaatgttgaaaccgtggagtacaagaacatcagcttcaccgtctgggatgtggggggtcaggacaagatcaggcctctgtggaggcattattttcagaacacccagggtctcatctttgttgtggacagcaatgataggaaccgtgttgtcgaagccagggatgagcttcacaggatgctgaacgaggatgagcttcntgatgctgtgcttgttggctttgctacaagcaaga

SEQ ID NO: 21589 - DNA, 525 bp, Oryza sativa
  Clone ID: uC-osflM202036b01b1
gttttatcaggctttgcttctcctaggatcgggtggaggtccccaggtgggactgtgtcttcaaggcagaatttggttggtggatctaactttctgaattacaatggaattggaagtccaaatgcagcaacttctcttcaaacagccattgatccgtcatatattcagtaccttcaggcagctgagattgctgcccaactcgcagctagctgtgatgatcctctcatggccagtggccatctgggaagttcttatatggatttacttggtcctcagaaagcttatgctagtccattgcttcagtcacagaagaactgtggctactatggaaaccttggatttggccttggttattctggaagtcctttgatgagtcctgttcttccctcttcccctgctgcacctgatagtccacttaggcatggtgaacgcagcatgcgcatgcaatcaggtataagaaactttggtgggttctttggttcatggaatcctgacctaggtggaaagatgaacatcaatatgatg

SEQ ID NO: 21590 - DNA, 366 bp, Oryza sativa
  Clone ID: uC-osflM202036b04b1
atgctgatgagaagagcaaaaagagcgggggcccatgtagcatacgcgagctgttgcattctttcagcttcaatgacaaaatgcagcagctgacctgtggaacttcagcaaataagaagtcaacagtcattagactatcatacaagagaacatcatgtgatgactatgaagatgacagtgaactgggcgaatcagaaaaatatgtgggccgccccaagggagggacaacaattctgtataggggagaaaagcccacatcatgatggtgctcacggattgatccatccctctttaagctcaagagtgaaacctttctaaagacaagaagaaatgtgctggttcaaactatgctggttaatatcctat

SEQ ID NO: 21591 - DNA, 332 bp, Oryza sativa
  Clone ID: uC-osflM202036b06b1
agtatttatatgttacatatgctcacggtactatcgggctcctgagctcatattcggtgcaactgcgtacacagcataaattgatctatggtctgctggatgtgttattgctgagctggatcttggtcaacctctgtttcctgatgaaagcgcagtggaccagcttgttgagataattaacggtttgggtactctaacgccagacgagatcccctgcctgaatcccattatcaccgcgctcaaagtttcgcagataaaagcatgcccatggaacaccagctaccacaggcgaatgcctcccgaagcagaacatcttgcgtcccgtctgcttc

SEQ ID NO: 21592 - DNA, 496 bp, Oryza sativa
  Clone ID: uC-osflM202036b09b1
attatcacacctcattcagcagccgtcttgcctggtcccatgctattgcacattagagtcgactattgattacagtgcagctgtagcacatttcttcgagcatggtgcatctcatcctcttgcatccttccggtagtttttgttgtggcactgatcagccagcaaaagttaccatcggaacttctttggacaatcggatctgacattagatcttcattgtcaggcttaatctctaggttctggttttctttacttccgtttgctctcttctcccctacactgcttgctttttgtttgatcatcccaagatttggtgcatactacgcagttctttgtcaggctttgtgtttgatggcgtaacaaaccgagtgaaggtgttcaagtttttttgtcagagtatgggtattgcttatagagtttttccagaagcgttgagtggctttgctgatctacccttcaaggcatttcagaatacacatatgagtcttgttcacac

SEQ ID NO: 21593 - DNA, 318 bp, Oryza sativa
  Clone ID: uC-osflM202036b10b1
tttcttttcaccactgctagcttgggaagaggagggggagcttgagcttggagagagacaacaatggcggctcaggctcttctctctgggaggcagctgctggggaggccattgcaatcttcagtctccaggtcttcttcctccaggaaggcacccttcatggtcagggcagaggccactccccctgccaagcaaggagctcactgtcaaatgtggttcgcatccaagcagtccctgagctacctggatggcacgcttccgggagacttcgggttcgacccgctggggctatcggacccggaggggaccggggggttc

SEQ ID NO: 21594 - DNA, 390 bp, Oryza sativa
  Clone ID: uC-osflM202036b12b1
tttttcactgagagtaagtgcgatggcgggcagggggttagcttgctggacgctgagctcgagctctactggaacaccttcgccgtcatcaaggccatggctctcaaggcggcgctagacctccgcatcgccgacgcagttcacctccacggcggcgccgccaccttggccgagatagccagcgaggtggccctccacccgtccaagatcccctgcctccgccgcctcatgcgcgcgctcaccgtctccggcgtcttcgccgccgccgtcaagcccggagacggcggtggtggtgagcccgtgtacgagctcacgccggcgtcgcggctcctcgacagcttctcgaacctgtccggcatcatgttcatgatccttcacccgacgctcgtc

SEQ ID NO: 21595 - DNA, 520 bp, Oryza sativa
  Clone ID: uC-osflM202036c01b1
gttttctctctctgtatgaagccacggagaaaaaggttgggtgatttcttggaagcgaagagtgaggggagaagaagaagaagaagacgaagaagaggggggaggaggaggagcaccatggctgagcacaaggaggagcagacggtgatggagaagctctccgagaagctgcacggcgactcctcgtcgtcttcctcggactcggacgacgacaagaagggttcctcctcgtcgtcggctggcggcggccatgaaggccaagatctaccgcctcttcggccgcgagaggcccgtccactccgtcctcggcggcggcaagcctgctgatctcgtgctatggaggaacaagaagatctccggtggggtgctcgccggagccacggccatctggctactcttcgagatcatggagtaccaccttctcaccttggtgtgccactgcctcattctctacctggctgacctcttcctctggtccaatgccttcactttcatccacaagtccgctccaaacattcct

SEQ ID NO: 21596 - DNA, 350 bp, Oryza sativa
  Clone ID: uC-osflM202036c02b1
gattatgtcaagattgccttaggatgtagggcagggagatcttgaaccgagcgggactgacactacctcatctcctgagagggactgatttcgaagtgaatatgaaatcgatgatgacaaataaatattacattttttttgcatttggatgttatgtaataaataaacaagtaagggttatttcatgaattgccaatgtattgcttacaataatgttatttttacttggttcctctatgattttttaatgatgtatcagtaaatgatcagcaataacggtattttcttcaattctatgtatcaacgtgccttacgtgcacgctcactagtattttaaaaatattattgat

SEQ ID NO: 21597 - DNA, 518 bp, Oryza sativa
  Clone ID: uC-osflM202036c03b1
tgtttaaccagaagaatcgttgatagtagaagagggtccagtaactgcaagtagggagtctgaggataaagaacctgctgcggtacctgaagaagtagcagcctcaagtgagaaaactgcagatgttgctgttgcaggagctgaagcaagcacggccacagcaactatttctcctgctcttgtcaagcaattgcgtgaagcaactggagcaggcatgatggactgtaagaaggctcttgcagaatcagggggtgacattgagaaagcacaagaattcctccgcaaaaaaggtttggcggctgctgacaagagggctggcagggccactgcagagggaagaattggttcttacatacatgacagcagaatcggtgttcttattgaagtgaattgcgagactgactttgtatcccgaggtgacatcttcaaagagttggtagacgatctagccatgcaagtcgccgcttgccctcaagtacagtacatttctcttgatgacgtccctgaggaggttatga

SEQ ID NO: 21598 - DNA, 399 bp, Oryza sativa
  Clone ID: uC-osflM202036c05b1
gtttatactctgttcttccttcctcctgctgctccgcggcatcgtccgcactagcgccggtgataatagaacgacaccgaacggggcggcggcggcagtaatggcggcagccacggtgggtgtgctgctgcggctgctgctcctccccgtggtggtggtggtaagcctcctcgtcggcgcgtcgcgggcggcgaacgtgacgtacgaccaccgcgcgggggtcatcgacggcgtgcgacgcgtgctcgtctccgggtccatccactacccgcggagcacccccgacatgtggccggggctgatccaaaagtccaaggacggcggcctggacgtcatcgagacgtacgtcttctgggacattcacgaggccgttcggggacagtacgacttcgagggcag

SEQ ID NO: 21599 - DNA, 504 bp, Oryza sativa
  Clone ID: uC-osflM202036c06b1
cttattttcgcacaagggagaagagaagagaagcttggagagagaggtggaggaggagacgagcgcgtggtggtggtggtgttggcggcgatggatcgggttcgcggatgcgcgttcctgctcggcgtcctgctcgcaggatccctgtttgcattttctgttgcgaaggaggagaccaagaagctcggtaccgtgatcggtattgatcttggtacaacctactcgtgtgtcggtgtgtacaagaatggtcatgtcgagattatcgccaatgaccagggtaaccgtatcacaccctcatgggttgcattcaccgatagcgagaggctcatcggtgaggctgccaagaaccaggcagctgtgaacccagagaggaccatcttcgatgtcaaacgtcttattggaagaaagtttgaagacagtgaagttcagagggacatgaaacttgttccctacaagattgtgaacaaggactgtaagctctacattaggtcaagatcaaggatg

SEQ ID NO: 21600 - DNA, 524 bp, Oryza sativa
  unsure (1)..(524): unsure at all n locations
  Clone ID: uC-osflM202036c07b1
tttgatttgacctaccttgccggtggtggtgctgttcaagtctgaattaggctgtagcattgtagatctttttttagtagtagtacagatattaagcattgtaagtatggtatcaaccacggagttcaaaggtgaatattcgttgccaagcaagaaatctcctcttgatcaatttgaaggtgtgaagacacatctttaccgtctcggtgcagaacatgaaaatggtaccctcaaaagctttgcatatactgatcagggcagcccaagtttgcttgatacaatcattctttctcagtgggaggattatgcttggaagggccattttggatatgacgtaactgcttgcaatctcaaggttgttgaaggtggatggagttttgttgttcagctgaatgataagtggaattcatgtgtcctcaaggaacatgacaagttccttgaacctgttggatgcctgaagccaaactgtatgaatagttatgatgaattgcttctgtgcattgctcaaggtgacanggatatac

SEQ ID NO: 21601 - DNA, 523 bp, Oryza sativa
  unsure (1)..(523): unsure at all n locations
  Clone ID: uC-osflM202036c09b1
tttttcttcttcttcttcccagccgccatggcggctcctcctccttcctcctgcggtgctcttcgacgattcaacccagccgccatggagagcggagggaggtagctgactagctggggctggggatttccggcgaacggaggtgaggttggtgccgctccggccgctacttccgcgacccaaagaatcggcaagtccatagataccggacctccgcgaatgccccgcggccatagacgccgccgccgctgcgcatgcgccaccaccacctcgccgtcgccgccgcgaggtcccacgcctccctcctcaagtccggcttcgccgcccccacgccctggaaccagctcctcaccgcctactcccgctcctcccccgatggcctcgccgccgcgcgccgggtgttcgacgaggtgccccgccgcgacgaggtctcctggaacgcgctcctcgccgcacacgccgcgtncggcgcgcacccggaagcatggcgcctnctccgggccatgcacgcgcaggggctcgc

SEQ ID NO: 21602 - DNA, 500 bp, Oryza sativa
  Clone ID: uC-osflM202036c10b1
tttttctaaggcgtacaggctcgattggttggggggagggaagcataccagccactctgctctgtcaaggacaggagtgccctcagaatgattgaagatgcagaggagaaagggttgatcacacctggtgttaccacgctgattgagccaacgagtggtaatctcggtatcggtttggtgctggttgctgttcagaaaggctacaggtttattgctgtcatgcctgctaaatattcgcttgacaagcagatgctactgaggtttttgggtgctgaattgatattgacagatcctgcaattgggtttaatggtatgatggacaaggtggaagagctcatgaagagcataccaaattctcattgtctcaatcaagtaacaaacccagcaaattcagaggcacactttatgtggactggacctgaaatatggaaagacacagccggcaaagtggatgtgtttgggcctctgttggttcaggtggcacattacaggtgtaggga

SEQ ID NO: 21603 - DNA, 464 bp, Oryza sativa
  unsure (1)..(464): unsure at all n locations
  Clone ID: uC-osflM202036c11b1
ttttctactccgcgcgagcatcgccaccagccgacgaccgcaccagtagtagtgagtgctcagtgcgttccactccactccgagctaagcagcgaacagctcgccgccgacgctctctctctctctctctgtagatatggagctgctgctgcggcggctggcggtggtggtggcggaggtggcgttgacggcggcgacggcggcggaggggtacaacatcaccaagatcctcggggaccacccggagtactcgcagttcaacaagctgctgacagagacgcggctggccggcgacatcaaccgccgtcgcaccatcacggtgctggtggtggccaacggcgacatgggcgcgctctccggcggccactacacccttcccacgctccggcacatnctcgagatgcacatcctcgtcgactactacggcgccaagaagcttcaccagctcgcccgcggcgacaccg

SEQ ID NO: 21604 - DNA, 468 bp, Oryza sativa
  Clone ID: uC-osflM202036d02b1
gtatgtaaacttgtcggttatgcccacacaaactgggcatgcttaagagctgccacggggaatcaactccttcgtgctgccttcagttgggtctactccacttgccaccccaacccctggagccgtaccaaattctgttggtattccacaacagccacttcaattattccgccagcatttaggtgttttacctcaatacccaccaaattatttcccatacagtcagtatccactctatgttccaccacaaccccttcatttcatggttcctcaacccccttcaaccggaggcatgtatccacctgtaagtgcagctgttgcaccaccaggtaaatacccaaccaatacatacaagcctggtgctaacaatggaacccagacacatgttggaaaccatggtgcatatggaacatatgaatctagtccggcaatctatactaataacactatggtggcaagtggaacttt

SEQ ID NO: 21605 - DNA, 279 bp, Oryza sativa
  Clone ID: uC-osflM202036d03b1
ctttatagtaccaccctattcgttagaagggctggtggtgtcgtcacaagcattgggaaacttgtttcagagcgagaattgtgatatttgagctgagcttcaagtagttttgatgggtcatctatgtcatgcttctgatgtggaagaggtttttttgtcctctcctgacccatttttctgggctttatatttcttgagaccagaatattatcagatgatttatactttgttctgcctaacaaaacttaccgttgggagttaattacatcagtaacttat

SEQ ID NO: 21606 - DNA, 507 bp, Oryza sativa
  Clone ID: uC-osflM202036d04b1
cggctgctcgcctcttcgggtcttccgtggggggcgccaccggcggcgagcgagcatcccccccgcgcgcgcgcgcgcgccatgggggtaccgccgctccatgcccctccccggcgcttccttccgcgcgcgtggctcgccataggactaggagagaaacaatggtggaagtactacacttcgagattttacacgaggggtaatgtcatcatctcagtcaaaaattaggtcgcctgtggcgtaggtgttgtagaagacggtggcgctgaagtaaagcaccgccgtgagggtgaggaaggcctggaaggatcctagccactgcacgaagtagcctgttcctatggtgctaactatggcggccactgtcccgatgccgttcgtcagtcctgttcaagcagaagaagatatgtcagatttcaggatccaaggagtgcgttcatttggtgtgggtcttgtgtacagctgatcgagttttgggactcaccgtgcagagatccagcgtatttg

SEQ ID NO: 21607 - DNA, 329 bp, Oryza sativa
  Clone ID: uC-osflM202036d05b1
cttattcaacacaccactgaaaagcaagattttggtggagaaataagcatcttgccatgatcgcagcaagggctgcaaacctgcaggtggccatgaaggccctggcgctggccgtgctggccctcgcctacgccgcggcgacggcgcgcgccgagcagtgcggcaggcaggccggcggcgcccggtgccccaacaggctctgctgcagcaggtgggggtggtgcggcctcaccgacgactactgcaagggcggctgccagagccagtgccgcgtctcccgcgacggcggcgacgacgacgtcgccgcggtgctgctcacggcgccgggc

SEQ ID NO: 21608 - DNA, 472 bp, Oryza sativa
  Clone ID: uC-osflM202036d07b1
tctgtatgggtgaagctgggtttatattcatgtgcagtgctaagacaaagccggagggcttccagaatggtgtgtttggcttgcctaaggggaagatcgatgtggtggagaagatccagccaggggcaaaactgttcctctatgacttcgacctgaagctgctctatgggatatacaaggccaagacaaagggagggttagatcttgtgcgaggcgcgttccatggaaaattccctgcacaggtcaaatttaaggttgacaaagattgccttcctcttccggagagtagtttcaagcatgccattaaggagaactacaattcaaagggaaagttcacccaggaactcagccttaaacaagttcataggttgttagaactattcaagcctattagcttgcctcaatcatctattcaatatgttaaagaaaggcatcgacgattggatgtctttgagggtcccctaccacacta

SEQ ID NO: 21609 - DNA, 441 bp, Oryza sativa
  Clone ID: uC-osflM202036d10b1
tagtcacggctctagcggtgactggcggatgcgggggtgattgcggcgttggcatcgaccggcaatggcagttggtgggcagtggcatcgtcggctgccgttggcggaggaggacatggcggcggcgtcggggcgggtgctggctgcgtggtggcggagggtgacggcgcaacggcggtctgcgaaggcggtgtcggtggcagcgacgacggcggccgtgattgtggaggcggtggtgatgtcggcggcggggatggagttggggatgaggtcgaggatggcgacagtgaggtggctgggtgttcggcaacagcggctgtggtggtggtgaccgtgtctgcggtcatcagaggcgtgacggtctcggacggctagccgagggcgtgggagatggcgacatctgaccggtgtggcatcttttggtgaaggggtcggagactg

SEQ ID NO: 21610 - DNA, 459 bp, Oryza sativa
  Clone ID: uC-osflM202036d11b1
ttttcctctctctatctctctcttcacatttgcattccaactcaatttcctcctctcttctcctctcctcttctcacacgaagccaagaaagccaagaaatccatccatccatagcaagggagctagctcgccggcggcgatgggcaaggactgcggcaaccacggcgacgacgacatccggcaggcgtgccggcggctgctgacgatcctcttcggcctcgccctgatcgtggccatcatcgcgctcatcgtctacctcgtgctccgccccacccaccctcgcttcttcctccaggacgccacgctccgccagctcgacctctccaattcctccacctccggcgtcctctccaccgccctccaggtcaccgtcgcctcccgcaaccccaatgaccgcgtcggcgtctactacgaccgcctcgacgtctacgcctcctacaagtaccagcagatcacgc

SEQ ID NO: 21611 - DNA, 513 bp, Oryza sativa
  Clone ID: uC-osflM202036d12b1
tttgttgcctgtgcgttcgtctcgcgatttcggctcctcctcctgggatcatggcgatgtggagggcggcggcggggcatcttctcggccgcgcgctcggctccagggccgcgcacacatcagcaggcagcaagaagatcgtgggtgtgttctacaagggcggcgagtacgccgacaagaatcccaacttcgtcggctgcgtggagggcgctctcggcatccgcgaatggcttgagtccaaggggcatcactacattgtcaccgacgacaaggaggggctaaacagcgagctggagaagcacattgaggatatgcatgtcttgatcaccacccctttccacccagcctatgttagcgcacaaaggatcaagaaggcaaagaacctcgagctgcttctcacagctgggattgggtcagatcatattgatctgccagcagctgctgcagcaggtttaactgtggcagaagttaccggcaagtacactgagtcggtggcagaagatgagctcatgc

SEQ ID NO: 21612 - DNA, 371 bp, Oryza sativa
  Clone ID: uC-osflM202036e01b1
gggggacccacgcggccgcttttttgcggacatgggcagaaggatccaaggggcgggcaccgaggggcagcagggccatgtccccaacctgccctgttctggcgggctagactcgcttccttggtcatacgtggccatggagtgcggccgtgacacacatgcccgccgccggaacacgtcctatcagcatgaccacagacgtgaggtacccaacaagtgcggcgaagcccctaaggtcatcgtctgcgcacacgccatcttacctgtggtggtattgggcgcgagactacagggggtgcacaggagggttatcttcggccagagtggcagttagaaggacacaggaggctaaaggaaacgcaccggcgaac

SEQ ID NO: 21613 - DNA, 492 bp, Oryza sativa
  unsure (1)..(492): unsure at all n locations
  Clone ID: uC-osflM202036e08b1
ttttagtcggccggggcgttgatggcggcgggggcggcgcagcagcagcgcagggttcttccgccccatggccttgtctttcccggggatgtgcagagcagggcggtgggttgcggcgccgcgtccaccagcgggagggctggcaatgccgccggcctctcgcaggggctcctgtctcagctctatcatcagggtgtcgagatcgacgcgctcgtgcgactcgagagcgagcggatgcgtgcggggctcgaggaggctcgccggcgtcacgtacgggcggtggtgtccaccgtcgagcgcgccgcggcagggcgtctccgtgccgcggaggccgagctcgagcgcgcgcggtgccgcaacatggagctcgaggagaggctgcgccagatgaccgccgaggggcaggcgtggctcagcgtcgccaagagccacgaggccgtcgccgcggggctccgcgccaccctggatcagctnctncagtcaccctgcgcc

SEQ ID NO: 21614 - DNA, 496 bp, Oryza sativa
  Clone ID: uC-osflM202036e09b1
ttatttttcttgctgaactgaaattcagttactggcttttagtgaacagctatgcatacatttctacttggttaattattggtgctatttgactatgtcgctgtgacagaaaccggtaattactgcacggcttgagatcatcttgtacctggtggcgcatgcagatggtgcagcattgctgcatggaggatctttggatttttatttttttcccttcagttcttagttttctgctcctgcttctatctgtgctgtcaaattgctttctaaagaatacatttcagcactaagattcacaggtagttgggtccatgacagagtatcctaacacatcctattctcccctatcggtttttataaccaattatgcctcttctacactgtaatgagtggtagaccataaattaaagatctgagttaagactgaagattgctaacaccctaatcaaaatggaggagatgttctgttaattggtgcttgcatcttcttctatcg

SEQ ID NO: 21615 - DNA, 515 bp, Oryza sativa
  Clone ID: uC-osflM202036e11b1
tgtgtataaaggaaaaaaaaacagccaagccgccgggcgcgcttagcacagcggctggggcgtcagcaagcgagcggcggcgcgcccccctcgtcacgcacgccgcactcggctgctacggtcctcacgccgcttcggcttcgcgagcggacgccggcgcgcgcgcgcgttcggcgagacgcggcggcccttctccccctcttgcacaccccccagaccatgcgcgtttccgaccacgctgctctcccgtcgcgctcctcccagcagcagcagcgcctgtccccgcatggcgagccccgacaaggtcggctgctcaccggagccgctgcccctcgaccgcctcctggccgagctcgccgccaacgccgagcggctctggaggaggtgggaggcggcgctccgcatacggggaagggagggagccagagcggcgggcgtggggttggaggagggtaggaaggcggattctgcggcgatgcagctgcacacgccgctgttctacgccacctgcgccc

SEQ ID NO: 21616 - DNA, 501 bp, Oryza sativa
  Clone ID: uC-osflM202036f02b1
ctccttcctccattcctccgccgctggaggcttctagaagctctcctcgggcgaccatggcggcgacgatcgtgtccgtcaaggcgcgccagatctttcacagcaggggcaaccccaccggcgagggcgctcagggctgctcagatggaacctttgcaagggctgcagttcccagtggtgcatcaactggtgtctatgaagctctccactagatggacggtggatctgattactcgggaaagggtgtttccaaggctgtccacaatgtgaactcgggtattgccccagctctgattggcaaggaccctacgtcacaggctgagcttgataacttcatggttcagcagcttgatggaaccaaaaatgagtggggggggtgcaagcacaaacttggtgctaatgcaatcctggctgtgtcactggccatttgcaaagctggagctatcatcaagaagattcctctggaccagcacattgccaaccttgcttgaaacaaacaac

SEQ ID NO: 21617 - DNA, 494 bp, Oryza sativa
  Clone ID: uC-osflM202036f03b1
cttttagctccggccaccaactttgacccgtccgggtgctccgcatcccccatgggggtcctccccggcggcggcggcggcgcggaggcggcggcacgggagcggctagtggtttcgtcagcggaggcggaggcggcgccaatatgttcgggcgcgcgccgaagaagagcgacaacaccaagtactacgagatcctgggggtccccaagaccgcctcccaggacgacctcaagaaggcgtaccgcaaggccgccatcaagaaccaccccgacaagggcggcgaccccgagaagttcaaggagcttgcacaagcttatgaggtattgagtgacccggagaaacgtgaaatctatgaccaatatggtgaagatgccctcaaggaaggaatgggtggaggcggatcccatgttgatccatttgacatcttttcatcattctttggaccttctttggggggggtggcagcagcaggggcagaaggcaatgaggggaga

SEQ ID NO: 21618 - DNA, 521 bp, Oryza sativa
  Clone ID: uC-osflM202036f04b1
ctttttacgttccgtgtgatagctgagcttcccgctggcaattttggggcctatatcatttccatggcgacagctccgtcagacgtgcttgctgttgagctcctccaacgtgaatgccatgtgaagacgccacttagagttgtcccgctgtttgagaagttggctgatcttgaatctgccccagcagcagtggccagactgttctctatagattggtacagagaaaggataaatggcaaacaggaggtcatgattggctattcggactcgggtaaggacgccggtcgtctctcagcagcttggcagctgtacaagtctcaggaggagctcatcaacgttgccaaggagtttggggtgaagttgacaatgttccatgggcgcggtgggactgtccgaagaggcggaggtcccactcatcttgccatcttgtctcagccaccagacacgatccatggatctttcccggtcactgtccagggtgaagtcattgagcagtcctttggtgaggagcacctttgctt

SEQ ID NO: 21619 - DNA, 455 bp, Oryza sativa
  unsure (1)..(455): unsure at all n locations
  Clone ID: uC-osflM202036f07b1
ttgtacgcgtgggcggacgcgtgggtctctctgtgggccgccgccgccgccgccgactcttgcctttcccacgccctcgatcttggcggctggagagccatggcgatgcagtccggcaggcgagcctcgtagccaggaggggtcagttccccagtcacccaccccacacacgaagatagcgagcttgtagcgtgattttttttgtaggccgtcgaactcgcacctatggcgaccgcgaacccctttgacctcctcggcggcgacgacaacgacgaccccgcgcagctgctggccaaggcggccgtcgcggcgcagaaggccgaggcgaagaaggccgcgcggcgcngccggctccggccgcgggaagggcggcgcgcagccggccggctccaattccccaccaagccggctcccccttcacaggccgtgagggagtctcgagagggagtgcaccc

SEQ ID NO: 21620 - DNA, 522 bp, Oryza sativa
  Clone ID: uC-osflM202036f10b1
tcttgccgtcccgccgcggctggatgagggctggtcgatcccttgccggccgccgcgaccgcggtgcgtccatggagcttgcgcgccttggcctctcttctgtcaccgcgatgtctcgccgtggagcttgaaggccgccgttggttcggtcactgctagatgaactccatgtcatacaacaagctgtccataacgaatgacagaatggatttcaatacccgtggaaatgcagtccccaatggcaaattagatcggaatcagtcaggtgtttcagccaatcgatcctcagcctccaaaccaacagcacgctccaagaagaaaccggatcaagctgacaaaacaaccccaaatccagcgcagaattcagcatcatcagcaacaagatccgaagcagcgaccgtcacgacgaccacgaaatcgccggcgatcagcgtggacagaagcagcatcgcgagaagcaacagcctggacagcttcagctacggccaggcgaagcggcacaccggcggcgacagccggtgg

SEQ ID NO: 21621 - DNA, 494 bp, Oryza sativa
  Clone ID: uC-osflM202036f11b1
atattccctctcttcctccgcttattaaaaggcggcctccttccccgtggtgctcgccgccgtagtcaagcggaggaagagagagagagaatcaaggcagtagtcgtcttcctctcctctcgccgccgcatccgaccggagaaagatcccttctttccctcctccaagcccgcctcgccaggatggagtcctcggcggcggcggcggcggcggcggcggccaatggcggcgcggcggcggcggagcagcagcagcggcgtcggctgccggacttccagcagtcggtgaggctcaagtacgtgaagctggggtaccactacctcatctcccacggcatgtacctgctgctgtcgccgctgatggcgctggtggccgtgcagctcttcaccgtgtccccaggcgacatcgccgacctgtgggagcagcttcgctttaaccttctctccgcgtcgcctgcttcaccctccttgtttttcttttcaccctttacttct

SEQ ID NO: 21622 - DNA, 511 bp, Oryza sativa
  Clone ID: uC-osflM202036f12b1
tgtctacgcgggcacacgacgatccttgcgggctggactgtatacctctgaagcgccgccgcagtcgtgttgcctcctgatcatccgccgccagatcgccgtctttgctgtcctcttaggtgcagccgctgcgcacacccacggtacctttgccgccaggagatcgccctcatgtcacctcactgccgggtcaccagatcatctacgcaccgtcttgacataccggttcggcgttgactctgcacacgcttgaggtctaccacgacaactctttcaagttaatttcaacagagtaaaacggaaggagtgatggattctctacgccttgcaaagttgcaagtgcaatatgaaatgctggggatacgacatttcagattcatgcttcaagtgatcaccatatgctgataagctgagagtatgctcaaatgatcagccagaccttcttttagaggtttcactttgatgaggaatgagtttatagatgtgtagagaatctgaaaaagatatttgg

SEQ ID NO: 21623 - DNA, 528 bp, Oryza sativa
  Clone ID: uC-osflM202036g04b1
aatttttgcagccgccatggaggagaagaagctgggggtctccatcccctccaagggccggccgcccaggccggcctcccgccccgccgccaccggcgccgccgccgccgcatccgacgacggcgagtactccgcgcgcgccccggccccgcagttcgtcaccgagttcgaccccacccaaaccctagccaccggggccgcgccgtccgtcatcgcgccgctccagaactccggccacttcctcaaccaccgctcccgcaagccctcctcgctccccaccccggaggaggaggccgccctcgccgcgtccgccgccggcggcccctccttcgtgctcgacacgtccaccgcccccgacaacccctccttccacatcgcctatggcctcaccgttcgcaacgccgcggcggagttggagaaggccgcggagccggagaagacgcccccgcctccttctgcagctggtgcccccagcggcgaccttatgcttgggaggtacaaggaggacatggccagtctccccgatca

SEQ ID NO: 21624 - DNA, 525 bp, Oryza sativa
  Clone ID: uC-osflM202036g05b1
atttttattaccgcgcaaaggaggaagaagaagaagaactcactcgcaggagcaccaatggcgaattctgcgtcagggctggcggtgaacgacgagtgcaagttcaagttccaggagctgaagacgaggagggggttcaggttcatcgtgttcaagatcgacgacaaggccatggagatcaaggtggagaggctcgggcagactgccgagggctacgaggacttcgccgccaccctccccgccgacgagtgccgctacgccgtctacgacctcgacttcgtcaccgacgagaactgccagaagagcaagatcttcttcttctcctggtcgcctgacacggcgaggacaaggagcaagatgctgtacgcgagctccaaggacaggttcaggagggagctggacggaatccagtgcgagattcaggccacagaccccagcgagatgagcctcgacatcatcagagccagagctcactgatgatcatatcatttcatcatccaacaccaccagattaataattcattc

SEQ ID NO: 21625 - DNA, 503 bp, Oryza sativa
  Clone ID: uC-osflM202036g06b1
gtcatgtgcggcggagcaatcatctccgggttcatcccgccgtcggccgctgcggcggcggcggctgcggcggccaagaagcagcagggcaggagggtcacggccgacgtgctgtggccggggatgctgcggaaggggaaggcggcggcggcggaggaggactttgaggccgacttccgcgagttcgagcgtggcatgagcgacgacgaggcggaggggggcggcggcgaggaggaggaggacgacgacgacgtggtcgtggtggtccccccgccggcggcggcgaggttcgtcgtccgtgccgcggccaaggcggcgcccccaactgcagatgggatgttgactacaaagcttgtccaacatgatggacctactgctagatcagcaaagcacaagaggaagaatcagtacagggggatccgccagcgttcctggggcaaatgggcagctgaaatccgagaccccagcagggtgtccgtgtttggcttggaacatataacact

SEQ ID NO: 21626 - DNA, 496 bp, Oryza sativa
  Clone ID: uC-osflM202036g07b1
ttttatcgccaagaaggtgaacgagatggaccggctgctgaagccgaagcaggacaggtacgcgctccgcacgtcgccgcagtggctcggcccgcagatcgaggtcatccgcgccgccaccaagtccatcgagcgcgaggtcaactccgtgaacgacaacccggtgatcgacgtccaccgcggcaaggcgctccacggcggcaacttccagggcacccccatcggtgtgtccatggacaacgcccgtctcgccatcgccaacatcggcaagctcatgttcgcgcagttctccgagctcgtgaacgagttctacaacaacgggctgacctccaacctggccggcagccgcaacccgagcttggactacgggttcaagggcaccgagatcgccatggcctcctactgctctgagctccagtacctcgccaaccccatcaccaaccatgtccagagcgcggagcagcacaaccaggacgtgaactcgctgggtctcgtc

SEQ ID NO: 21627 - DNA, 519 bp, Oryza sativa
  Clone ID: uC-osflM202036g08b1
ttgtcagcatgcacgtaccatagctgggaagggtcaattcttcgtaaactcatttgctaaagccctcgaggttattccaagacaactttgtgacaatgctggatttgatgcaactgatgtactcaataagctccgacagaaacatgcatctggtgaaggtgctaattttggtgtggacatcaacactggtggaattgctgattcctttgctaactttgtctgggaacctgctgttgtgaagatcaatgctataaatgctgcaactgaagctgcttgccttattctcagcgtggatgagacagttaaaaatcccaagtctgaaagtgcgcaaggtgatgcggctgctagcgcgatggctggccgtggcggaggagcgatgcggggccgtggtggaaggggcatgaagaggcggtaatcaatctacgccacgtttgtttagcttcgtcgctcgtgtggtttaaatttaggagtaggttatttgcagtctgctctttatcgaagtttttcgtgacgctacat

SEQ ID NO: 21628 - DNA, 517 bp, Oryza sativa
  Clone ID: uC-osflM202036g09b1
tgtacgcgtgggctcgctctcgccgcggagcttggaggtttgggtgagatcggagcagcgaagcggaggcagccgcagccatggcgttggccgctcgcctcgtctcccgctcccggcagctatactctgctcaagctgccttggcaaatggaggtgccactcaagtccgcttgtatgccaaggaggcagatcgtactcccgtcaatggtgatgacctattgaagggcatattttttgaggtaaagaagaaatttgagactgcccttggtgtacttaagaaggaaaagatcactattgatccagatgatcctgcagcagtttctcgttatgcccaagtcatgaagactgtaagacaaaaggcagatcttctatccgactctgagaggattaaatataccatcgacacctttacaaagggcatccctgatgcacggacttacttgaatactcttcaggagatcaggataaagagtggccttatagatgatatgggtgctgaggctatgatgatggaagc

SEQ ID NO: 21629 - DNA, 522 bp, Oryza sativa
  Clone ID: uC-osflM202036g10b1
ttcgccgtcgcagatccgatccaggaagagctcgccgccgccgctgccatggcgctctccgtggagaagacctcgtcggggagggagtacaaggtgaaggacctctcccaggcggacttcggccgcctcgagatcgagctcgccgaggtcgagatgccggggctcatggcgtgccgcgccgagttcggcccctcccagccgttcaagggcgcccggatctccgggtccctccacatgaccatccagaccgccgtcctcatcgagaccctcaccgcccttggcgccgaggtccgctggtgctcctgcaacatcttctccacgcaggaccacgccgccgccgccatcgccagggactccgccgccgtgttcgcctggaagggggagaccctcgaggagtactggtggtgcaccgagcgctgcctcgactggggcgtcggcggcggccccgacctcatcgtcgacgacggcggcgacgccacgctgctcatccacgagggcgtcaaggccgaggaggagttcgag

SEQ ID NO: 21630 - DNA, 460 bp, Oryza sativa
  Clone ID: uC-osflM202036g11b1
tttttgatcgcagcagcatacctagaggcacagcagacaaaagcaagagagcatcagcagcagatgcaaatgcaacagttgcagctaatacaacaaagacatgctcaactgcagcgaactaatgccactcatccttcacttaatggtccaataagtggcctaaactctgatggcattctgggaccatctacggctagtgttttagctgccaagatgtatgaagagcgcttaaagcactctcatcccatggactctgatgggtcacagcttcttgatgctagtaggttggctcttctcaagtcggcgtcaacaaatcactcagggcaatcagtacctgggactcctggaagtgtgtctacgacgcttcaacaaatccaagctcggaatcagcaaaatattgatataaaaagtgaaggtaacatgagtgtagcacaaagatctatgcccatggacccatcat

SEQ ID NO: 21631 - DNA, 524 bp, Oryza sativa
  unsure (1)..(524): unsure at all n locations
  Clone ID: uC-osflM202036g12b1
tttagcaatagctacacagagctaagctagggtgagctcagcaatggcaggtgctcctcgaggactagttctcctcggcgtttgtgccgtcttgatggcggtcgccgtcggcggagaggcggcgtcggtcgtcgtcggcacggccaagtgcgccgactgcaccaggaagaacatgaaagctgaggatgctttcaagaacctccaggtggcgatcaagtgcaagaacggcaatggtgagtacgagagcaaggccaccggaaagctcgacggtactcggcgtcttcagcatccccctcgacgccgacctccacagctccgactgcgtcgcacagctccatggcgcgaccaacgagccatgccccggacaagagccatcctaagatcgtgccaatgtcagagggcacctttatcgccgtcgccggccagacccactacccatcagcgttgtgcgcatcggcgaccatctgcggtcccatcaagaagaagatcatagaccacttncacaagaagccggtgccacccaa

SEQ ID NO: 21632 - DNA, 277 bp, Oryza sativa
  Clone ID: uC-osflM202036h01b1
ctttatacacaacccagctggtgaaagagaggaggtggagagttagctagcatggcggcagcattgtccttcccgatcatcgacatgagtctgctcgaccgggcaaaaaggcccgcggccatggggctgcttcgcgacgcatgcgagagctggggcttatttgagatcctgaaccacggcatctctacggagctgatggacgaggtggacaagatgaccaaggaccactacaagcgtgtgcgccagcagaggatcctcgagttcgcgagcaagacgc

SEQ ID NO: 21633 - DNA, 308 bp, Oryza sativa
  Clone ID: uC-osflM202036h03b1
ctttatagtaccaccctattcgttagaagggctggttgtgtcgttacaagcattgcagggaacttgtttcatagcgagaattgtgatatttgagctgagcttcaagtagttttgatgggtcatctatgtcatgcttctgatgtggaagaggtttttttgtcctctcctgacccatttttctgggctatatatttcttgagaccagaatattatcagatgatttatactttgttctgcctaacaaaacttaccgttgggagttaattacatcagtaacttataatttactaataagagaaggggaccat

SEQ ID NO: 21634 - DNA, 493 bp, Oryza sativa
  Clone ID: uC-osflM202036h04b1
gattgtcggagacgtacaccaagaagcggcctcggggccctgacgcttggttctgcgaggctcgccgccctcacagccggccaccaccgcgcctgggacgccggctgcggcaccggccaggcctacatcagcatcgcggagcactacgacagcgtggtcgcgacggacgcgagcgaggggcagatccgccacgccgtcgcgcaccccaaggtgcggtacctgcacaccccggtggacctctccgaggacgacctcgtcgccatggtcggaggcgagggctcgctggacctcgtcgaggtggcgacctccatccactggttcgacatcccgctcttctacgccgaggccaaccgagttctcaagaggcccggcggcgtcctcgcggtgtggggctacaactacgagatccacccgttcgaggacaagctgcacggtcagctgtacccggccatgcgcccgtatatggaccccgggacgaggctggtcatggaca

SEQ ID NO: 21635 - DNA, 507 bp, Oryza sativa
  Clone ID: uC-osflM202036h05b1
ctttactccgctcgctccccgtcgtagacgtcgcgtgcgccgtcgctctcctcggggcccttttctgctccatgttttcatcatcatcttcttcttcttcttccacccgttgctgattccctcactgctgctcgtttctcgccattgcggccgttcttggctactgacagaagaggaatgacgaatttgtccgggaagaaatctctgaatacagtgaccttggtcttcaaattaccctactacacacaatgggggcagagtcttctcatcgccggctcagagccagcacttggatcttggaatgttaagcaaggattgtctctcagtccagttcatcagggaaatgagctaatctggtccggcagagtttccgtcgctactggttttacctgccagtacaattactatgtagtggacgacaacaagaatgttttgagatctgagtcctgggagaaaaggagattagtacttccagagggtgttcaggatggagatgtagttgagata

SEQ ID NO: 21636 - DNA, 520 bp, Oryza sativa
  Clone ID: uC-osflM202036h06b1
atttttcacaagtacaagaagctatcacaaatcgggggcgctagctagcagtagggagcaaacaatgaggtcgtccccgatcatcttcctgctcctggccgccgccgacgccatcgccgctccgtggcaggttgcgcacgccgcgggcaagtgcggcaagacgccggcggagaaggtggcgctgaagctggcgccgtgcgcgaaggctgcgcaggaccccggggcccggccgccggccgcgtgctgcgcggccgtgcgcgacatcggcacgcaccagagccacgcgtgcctgtgcgccgtgctgctgtccagcaccgtgaggcgctccggcgtcaagccggaggtggccatcaccatccccaagcgctgcaaactcgccaaccgccccgtcggctacaagtgcggagcttacacgctgcccagtctgcagggctgatgacgacgtacgacggccttgattaggctctggcgccctaaaagctacctacagatcgcttacagcatactactcctatatact

SEQ ID NO: 21637 - DNA, 436 bp, Oryza sativa
  Clone ID: uC-osflM202036h09b1
tttttaaggcctgagcaccaatggcacggtagggggtccgtcctgccaccgccgcggccgccgccgctgccgccgcctcttcacaccgcaggaatggcacaacctcgccgcggggaccggttcttggcctccgggcgcttgcctccagggccggcaaagctcgccccgtgatggcggtggcgtcggagcagcccgccgcgaggggcaagtgccccaaggtggccgcccccaccaccggcccgattccggccgcggagctcctcggcgtcatccaggacgcagccagggccggagccgaggttataatggaagctgttaataagccacgcaatattcactacaagggagttgcagacctggtcacagacacagacaaattgagtgagtcggtcattctggaagttgtgaggaagaccttcccagaccacctcatact

SEQ ID NO: 21638 - DNA, 512 bp, Oryza sativa
  Clone ID: uC-osflM202036h10b1
ttttacatggctgaaatgaatcgtgtatttgggggaagtcaaaaactcaacagggagggcataattgattttgtaaaggctctctgtaaagtttccatggaggaattgcgatctgcttctgatccacgggtttttagtctgacaaagattgttgagattgcgcactacaatatgaatcgcatcaggcttgtctggtcaagcatatggcatgtcttgtctgatttttttgttacaattggctgctcagagaatctctcaattgcaatatttgctatggattcattgaggcagctggcaatgaagttcctggaacgagaagagctggctaactacaatttccagaatgaatttatgaagccttttgttgttgtaatgaggaagagccgagctgttgagataagagaactaatcatcagatgtgtctctcaaatggtcttggcacgtgttagtcatgtgaaatcagggtggaagagtatgtttatggtctttgcaacagcttcatatgatgacca

SEQ ID NO: 21639 - DNA, 528 bp, Oryza sativa
  Clone ID: uC-osflM202036h11b1
ttatcttccacaaccaaaatatgaatggaatgggaggtgatgtatggacattgcgcgatattcgttagtgctacgacataccattgaagaagttaatgccgcatgtattgaggcaattgatccagaacggatggaattaacatcccgtttacgtgaccaagtaatgaatgaacttggacagtcattaagcaaatatgattggtttgcgggctttgacattgccgataagcaacctatcaaatactctcttcaacaatggatcaatcatgttaaggaagctcaagccgtagtgtttatagcagtgcatggtggtattggagaagatggtactattcaatcgctgttgggatctgcaggagttccttacacagggcctggacaaatagcttctaggacatgcatggacaaagttgcaactttacttgccgttagccatctggctagctatggagttcacaccataccaaaggatctgagagcaacagaagagatactaaagtcgtcttctgacgatatctggaatgacct

SEQ ID NO: 21640 - DNA, 524 bp, Oryza sativa
  Clone ID: uC-osflM202036h12b1
gtaacagccacagaacacaccatcagaaccacggggatattgagagggacgagtgctggcacccgatcaccgagaaattgtactggcagctggagacacgcaccaagaaactgcgctttacattaccatttacattgcttgccttccctgtctacctctggtacagaagtccgggcaagaccggatctcactttctgccgagcagcgatctgttcagccccaaggaaaagagtgacgtgattgtctccaccacctgctggtgcatcatgatttcgttgctcgtcgccttggcgtgcgtgtttggccctgttccggtgctcatgctatacggtgtcccatatcttgtattcgtgatgtggcttgatttggtgacttatctgcaccaccacggtcacaatgaccttccctggtatcgtggagaggaatggagctaccttcgcggtggcctgacacggtggatcgggactaccggtggatcaacaacattcaccatgacatttgcacccatgttatccaccaccttt

SEQ ID NO: 21641 - DNA, 211 bp, Oryza sativa
  Clone ID: uC-osflM202037a01b1
ccggagaggccgggcagcttctcaccgggggggttccctaaggacaggcggggccgcaacctctctctccgagcaatgaggatcagcctgcctgcgcccgttgtgcgcggccaggatgccgccgacgatggtcatagctgcgatcccaatgcctcgctccagctggggctacggtgctgacgcctagtagtctggccacgccgaggaggcc

SEQ ID NO: 21642 - DNA, 384 bp, Oryza sativa
  Clone ID: uC-osflM202037a02b1
gtctttttttctgcagcggcggcatcatcttcttcgggggggtagcttcacacacgcgggaggcccctccgcggctgcgcctactaagagagatctgccctttggaacttgataaaagacatagaacctttggatctaagcataatccaaaaagatgttccttctgaaactgtggatgcaatgaagaggactgtttcaggcatgttgggccttcttccatccgatcagttccatgtggtcatagagtccctttggaatcctttcttcaagctggtggcatcttcaataatgacagggtatactttattcaatgctcagtacagactctcccttgaaagaacgctggagttttctgaagaagaaactgaatgcaagaaaagagat

SEQ ID NO: 21643 - DNA, 198 bp, Oryza sativa
  Clone ID: uC-osflM202037a03b1
ccgcaagcaaacccatggcctcctcggggtggtagttctaacccgcggggggggcgacaacagtgcggtcgtatgcagtgacaccaacgctgcgggccttgatgaaagacagcctagctatgtccgtcatgctacgtaacaaagacgactgtattgaaattggcaagataacccacagcaccgccagacgcctccgtg

SEQ ID NO: 21644 - DNA, 262 bp, Oryza sativa
  Clone ID: uC-osflM202037a04b1
gctctattgctttgctctgatctggttgatcgatcggggggtctgcaatggagaaggggctttcctcctccagcgccgccgccgccgtggcgtcacagggccagctcccggactgcttcgtgttcccggccgaccggcgcccaccggcctccaccgcgggcgtgtcgctccccgtcatcgacctctcctgcccccgcgacgccgtccgccgcgccgtgctcgacgccggcaaggagctcggcttcttccacgtggtgaacca

SEQ ID NO: 21645 - DNA, 291 bp, Oryza sativa
  Clone ID: uC-osflM202037a05b1
cttttcctttggctggctaactaactacgtggctagtggggcctccatgatggacgcgtgggtgctcctctacagtctactgcaagggctcaggtccaccagacgggctccacgatagacgccgttccagcaacattgacttcggccacgccaggactggcggcaggatcatgagcactgcttgtgtgggcaattgagggcatcaagacttcctagaccctatcgtacctggcaccactcaccgttgaggatcttttgaagcaaatcgagtacctgcttcgatccaagtgg

SEQ ID NO: 21646 - DNA, 303 bp, Oryza sativa
  Clone ID: uC-osflM202037a06b1
cagtgatgagctagctagcgaaataggcgtgttcggggcgtggctggcaacgcaggtgcgaccatttccgtagcggcgggagctactgggcgagatcaaccctggcctccaggtggacgccaccaccggtgacgtcgttggccgcgccgactggcataacgggcgccggtcgcccctgggcaatgctgtgaacgacaggcgcgagccctacgatgacgtgcgggtggccggccaccaaaactacgtgtgctgggcccgcagggggcatggcgcctcccgtactcccctggtcccgacgtacaa

SEQ ID NO: 21647 - DNA, 336 bp, Oryza sativa
  Clone ID: uC-osflM202037a07b1
cgcgggttgggaagagcgagctcgtgaggggagcataaggaaagcgcgagggggaaggaggaggaaaggtgcacaaggtcagactaagtttgcgttgaagaacaaaggagaggaaaaatgtcgcctgctgtggcatcgcgtgaggagaatgtgtacatggcaaagcttgccgagcatgctgagcgttacgaggaaatggtcgaattcatggagaaggtggcaaagaccactgatgttggtgagctcaccgttgaggagctgaacctgctttctgtggcttacaagatcgttattggtgctctgagggcatcgtggaggatcatctcttctattgag

SEQ ID NO: 21648 - DNA, 472 bp, Oryza sativa
  Clone ID: uC-osflM202037a08b1
ataatatcacaagagaggaggagaaaaaaaaagggggggagcaaaccctcctcctccgcgatccgccgccttccctcctcccccacgatctccggcggcggcggcggcgatggcccggaagaggaagacggacgcggcgccgcggctggacgaggccgaccggacgctctactccaccttctgcggcgccgccaactccctctcccagctctacacccaggccatggcccagcagaagctctccttccaggccggcgagcgccactccctcgaaaaactccaccagtggatattgagaaagcatgaggaagagtcgaggctcacggcggctgatataatgtctcatatccagcatgagttggattatggagggaatgatccacatgtttcccccagagtacatcagcatagtgcatatccgtttgcaaactcaagcatccaaccctcagctggttcctatggtcaagcaaca

SEQ ID NO: 21649 - DNA, 378 bp, Oryza sativa
  Clone ID: uC-osflM202037a10b1
tttctttcctcccagtgtctctcaagagcggggcggggttcacaaggcaggagaaagggggggagatcaccaatgtcatggagtaccaggccatcgcgaagcagaagcttccgaagatgatctacgactactacgcctctggagctgaggatgagtggactctcaaggagaacagggaggcattctccaggatcttgtttcgtccccgcatcctgatcgatgtctcaaagatcgacatgtccgcaactgttcttgggttcaagatatcaatgcccataatgattgctcccagtgccatgcagaagatggctcaccctgacggagagtatgcaacagccatggcagcttcagcagcaggaactataatgacactgtcat

SEQ ID NO: 21650 - DNA, 340 bp, Oryza sativa
  Clone ID: uC-osflM202037a12b1
tagctaccgaaatcggcgtcgtcggggcgtgtatggcaacccaagcgcgaccactcccctacgtaaggccctactgggcgacataaccactgctcagctggacccaccatggcgacgtgttgcacgcgccgaccggcacaacgtgctccggtctccccacagcatgctgttgaacaacaagcgccagccctacgacgatttccggctggccggccaccaaaactacgtggagtcgtggggcacggggcgcgccgcgtcacgtataccccgtgtccccggcggcgggacgcaccgcgccgttcagggagccttctgcaacatgagccgcggcgggcgcatg

SEQ ID NO: 21651 - DNA, 122 bp, Oryza sativa
  Clone ID: uC-osflM202037b01b1
ggattctgccgcagaagtcaagcagcttctcaccgggggcgttcccgaaagacaggctgggccggaacctctccctccgcgccatgaagatcagccagcctgcccccgctgtgcgcgtcaag

SEQ ID NO: 21652 - DNA, 349 bp, Oryza sativa
  Clone ID: uC-osflM202037b03b1
gtccttgcttctacttgggctctcctggtcacctgggggaggctctacctactcacgggggcccacatacgatgcgccttgcatgtactgtgtgccaatcaccgggcatatatacagggatgtgcctgtgccgacgacctatgacggatcgagagacatggtagcggcggacgtgcgagcttacaggcaggacccggaccacgcccccacctaggaggtggatccgcagcgcaaggtgggctcctcccgcgggtgctaagccaagatccggctgtctcacagatgtgctgggctacccgatcttgcgcactcgcaactcgccaggctacctcatgctgggagcggtgac

SEQ ID NO: 21653 - DNA, 329 bp, Oryza sativa
  Clone ID: uC-osflM202037b04b1
accatcttgaaggtcttgagctccatctccggcggggggggcgactacgacgacgacggcgaggaagatctagtagctagctgagccagacagcatggggttcgcggtggtgaggacgaaccgggtgttcatgcggccgatcgcggcgacgccgccgtcgttctgcgagctgctggagctgtccatcatcgaccgcgtggtggggctccaccacctggtgcggtcgctgcacatcttctccgtcgtcgtcccgagcggcggcgacgccaagccgtcgccggcgctggtgatcaaggaggcgctggggaaggcgctggtggactactacc

SEQ ID NO: 21654 - DNA, 350 bp, Oryza sativa
  Clone ID: uC-osflM202037b05b1
gcagagagagattatcctctttcccgggggaccgccactgcgccgcaggggcgccttcgctgcgggcatctgcagcagcagaatcatgggctgaaatcgaaccactgcgcgacaagggtgccaaggataactttattgtgctgctgaaggaagacatcttattgacctgctagttctgtagatgatttttggagtgctataaatatcgaggcgcgagttcggactgcaagatacaacacaagagtgagaaaagaaaggctttagctgagttacaggatggaacacggtcagggagatagatactggtgccaccactgcgaggaagtgatcgaacctgtggagcctgatat

SEQ ID NO: 21655 - DNA, 404 bp, Oryza sativa
  Clone ID: uC-osflM202037b06b1
ggctctttctccggtttccggcgagcggcggcgcggtcgggggcggcgaaggagggggaggccatgagggagatcctccacatccagggcgggcagtgcgggaaccagatcggggccaagttctgggaggtgatctgcgacgagcatggcgtggacgcgactgggcggtacgcgtaggactccaacctgcagctgtagcggatcaacgtctactacaactaggcgagcggcgggaggtacgtgccccgcgccgtgctcatggacctcgagcccgggaccatggactccgtgcgctccggccccttcggacatatcttccgtcccgacaacttcgtattcgggcagtccggcgccagatacaactgggccaaggggcactacaccgagggcgccgagctcatcga

SEQ ID NO: 21656 - DNA, 470 bp, Oryza sativa
  Clone ID: uC-osflM202037b07b1
aatctttcatgtacactgctacttggcctaaggaagtccgacgaattgcagaggatcttcttgttcaccctgtccaggtgaccattggaagtgttgatgagcttgttgctaatagtgctattactcagaatgtggagctgatcacaccgtccgaaaagcttcgccgtctggagcaaattttgcgatcccaggattcaggttcgaaggtactaatattctgtaccactaagagaatgtgcgaccaacttgcaaggacacttactaggcaatttggagcttctgccattcatggtgataagtcccaaagtgaaagagagaaggtcctgagccattttagatctgggcgatctcctattttggttgcaacagatgttgctgcacgaggcttagacatcaaagatatcagggttgtgatcaattatgatttccccactggcattgaagattatgttcaccggattggcaagact

SEQ ID NO: 21657 - DNA, 528 bp, Oryza sativa
  Clone ID: uC-osflM202037b08b1
acaggtatcatagagtgctgcaaatagtttacctacactccatgtatgttctgcagagggttgataatgtgccgatgcttcagctagatatagtttggtgctatttcgtgcttcgtgatgtatcacgcttagaagttgcaggaactcgcttagaaagggctcgctcaggatttgaacgttctcatggtaaagactctgctcgtttcagattactccaagctggccgtcatgcagatcttgcaatatatgtaaggctggagcttttggaaggagtggtagcatatcacaatggaaatactgtaaaggcgcgtgaatcccttacttctgcccaagcaaaatacatgcagcttcaagtaccagatgaagctatatcaatcttaatgagcatgggctatggagcacaagctgcaaaaagagcattaaagatgactggctatgatatccaatcctcagttgatctcttatgtgaagagcgtgaaaagaaattcgagagtacaggaagatattgagatgcaaaaagagatcatg

SEQ ID NO: 21658 - DNA, 344 bp, Oryza sativa
  Clone ID: uC-osflM202037b09b1
gttgtttaggattcatgctatgtctctgatgatggtgctgctatgctgacatttgaagcattatccgaaacatctgaatttgcaaagaaatgggttcctttctgcaaaaagtacagtattgaaccacgtgctccagagtggtacttccaacagaagatagactacctgaaggataaggtggcaccatactttgttagggagaggagagcaatgaacatagagtttgaagaattcaaggtgagaatcaatgcattggttgctaaagctcagaaagctcccgaggaaggttggacaacgcacgatggaactccctggcctggaaactatgttcgcgatcacccttg

SEQ ID NO: 21659 - DNA, 463 bp, Oryza sativa
  unsure (1)..(463): unsure at all n locations
  Clone ID: uC-osflM202037b10b1
gccagagacgctagatgaggcactgggagctggttgcaaagaggaatggggtgagcacaaaaagaaagcccccatcgacgagaaacaatgtgaagacttctgcttcatcaagaccaagtctatatttgaggcccataagggagtgaaggatctaaaggcggatagattcatagatttttgcaacaatgagtgtaatgcagtatataaggaggatcccgccacaagcaagaagtgtgcacaaagttgcgaagctgatgctaaggaggccgaggtattccttgataaagtcgtcgcttatattcaaacaacgtaacaagcatgattatattatgtagtacctccccatctgttccttcatcatgaccgagcgacgacattatttatggttctcacccaacggncagccctgcattacattgtcatgtttattccttttaccttttaagctgttccttttgttgag

SEQ ID NO: 21660 - DNA, 266 bp, Oryza sativa
  Clone ID: uC-osflM202037b11b1
ctctttccgagtaccatcaacgcagtggcaaggtgacaggtgtctgctgttggtgcatgtgccctctcacttgtgcaattgcaatgtctctgttcacacttaactctaggattggtacttgtaactttcataatcttaattaggcagctgaaacttatgtgatgatcaaatacaaaaaagataaaagaaaaaaaaaataaaaaaaacaataatatgaactacagaaatatggctaaaataaaacaaaataagctcaaacactgggc

SEQ ID NO: 21661 - DNA, 432 bp, Oryza sativa
  Clone ID: uC-osflM202037c02b1
ctgttcgttatcgcactccacctagggtgaaagcgggggggttttggatcacccctggggtgcgatcgaccgggtctctgctgaggtctccacgccgccgacaggtagcgcgagctagagagatggccgagacagtgttcactccctcgttggagggtatgaagcatgttaagtcagagagcagtgtcatactcaccaagccctttcttgatgtctgcaagcaaatcttgcctgttttggataaatttggagctgctatggcacttgtgaagagtgacattggtggtaatatcacgaggctggaaaataaatattcttcagacccatcaaaatatgagcaattgtacagcatggttcaggaagaggttcaaaacaagactgcaaaaggttcgtcaagctgcacaaatggacttctgtggctcacgagggcta

SEQ ID NO: 21662 - DNA, 431 bp, Oryza sativa
  Clone ID: uC-osflM202037c04b1
gttgtcttctcctccccctctttaccttttcctccgggggtcggttccgtggttcgtgtagggtttagtgggttgagatggcggcgccggatgtcgagtaccgctgcttcgtcggcggactcgcctgggccaccgacgaccgctccctcgaggccgccttctccacctacggcgagatcctcgactccaagatcatcaacgacagggagacggggaggtcacgtgggtttggcttcgtcaccttctcctccgagcagtcgatgcgcgacgccatcgagggcatgaacggcaaggagctcgactgccgcaacatcaccgtcaatgaggcccagtcccgccgctcctgcggcggaggcggtggctaccgcggcagcggtggcggctaccgcggcggtcgtggaggcggcggctaccgaggaggtggcggcggc

SEQ ID NO: 21663 - DNA, 385 bp, Oryza sativa
  Clone ID: uC-osflM202037c05b1
ggtctgatctaattaatttacctcctccacctcctgggggtccccccgatcggatcgggccgggtcctcctcctccgccgccggcaccgccgccgcagataggagaagatggccgcacttgataccttcctctttacctcggagtctgggaacgagggccaccctgacaagctctgcgaccaagtctcagatgctgtgcttgatgcctacctctccgaggaccctgacagcaagggcgcttgtgagacctgcaccaagacaaacatgggcatgggctttggggagatcaccaccaagggtaacgttgactatgagaagattgtcagggagacatgccgtaacatcggttttgtgtcagctgatgtcggtctcgatgctgaccact

SEQ ID NO: 21664 - DNA, 522 bp, Oryza sativa
  unsure (1)..(522): unsure at all n locations
  Clone ID: uC-osflM202037c06b1
gcccgtgtcgagcacgttcgtcaacctggtgaacgggtggtacacggtgaagcagcgcggcctgcgcatcaccgaggagcgggtctcccacgagagccccgccgcggaggcgccgctggagtccatccaggtgaggctctcacacgtccagtccaagttcgccggcgccatcagcgacggcggcgacatcgtcctcgaggggagggtcaagtacggcgtgccgcacctcaccgtcgtcgggccctacgaggtggacgtcagcctggagggcaacctgatcctgtgccggcagatcgaccagcccggcatgatcggcaaggtcggcaacatcctcggccagacgaacgtcaacatcagcttcatgagcgtcggccggaccttccgcggcaagcaggccatcatggccatcggcgtcgacgaggagcccgacaaggagaccctcgagcacatctgccacatnccggcgatcgaggagttcgtcttcctcgagctatgatgaacagcagcagcagcagcagcagc

SEQ ID NO: 21665 - DNA, 448 bp, Oryza sativa
  Clone ID: uC-osflM202037c07b1
gctgctgctcctcccgttttccgatcgcagccatgggaacccgcagcgtggccttggtgctcctcgcggccgtgctgctccaagccctcctccccgcttcggcggcggagggtttggtgcggatcgcgctgaagaagcgcccgatcgacgagaacagccgcgtcgccgcgcgactctccggcgaggaaggggcgcgccggctgggcctccgcggcgccaactcccttggcggcggcgggggtgagggcgacatcgtggcgctgaagaactacatgaacgcgcagtacttcggggagattgggcgtcggcactccgccgcagaaattcaccgtcatcttcgacactggcagctccaacctctgggtgccgtcggccaagtgctacttctcgattgcgtgcttcttccactctcgctacatgttcggacagtcgagcacttatcagaaga

SEQ ID NO: 21666 - DNA, 440 bp, Oryza sativa
  Clone ID: uC-osflM202037c10b1
ttatttcccaaaaacaaaaaataataaaaaaaggagggagagagacatttcgcatgtgctgccctgcctcctctcccatcacctgcccattttttcacattgaggcccctctgaaaatattatatttacaactaggtccctggccgggccggccggccaccggaaggagcacctcgccggagaaggctttgtctcttctttttcttctcctcctcctcctccatcggcggcggcatggggttctcgctgtaccccatgaagacgtcgacgcgcatgctgtggagcaccagcttcttccgccataaggtcgcctcctccttctaagcccacgccctctcgggcggcggcggcgagccggcggctgatcgccgcgttggtaagtgcgcgtgcgtgcgtgaacgggagagcagcttcgagatcgggttttcttgggttcttgg

SEQ ID NO: 21667 - DNA, 462 bp, Oryza sativa
  Clone ID: uC-osflM202037c12b1
gtattttttagtgtcttactgccctctcgaatggggcagcagaatgcttaaactggaccttttagaacatttactctgaaaaatcttctttttttttccaggaaatgcgctctctcagtttggaccattgctagcaaagttctttagtaggtcttgtgcttcccatggttcacatgatgaacaggcagttctacttgatctcagtccactacaggaagagagactgaggttcttgagacaaagattaaatgtgccatttgacagttcctctgtcaagcatcaggttccgcttctgtacctaactacctataggcctttggtattcttgttctattgctctcaccaatgggacaccaattttcttgctcagaagaaatgataaactgaacaattcatatactaacattcatgatagtaaaatattgcattttttctatgacaggatgctctgaaagaactttg

SEQ ID NO: 21668 - DNA, 394 bp, Oryza sativa
  Clone ID: uC-osflM202037d04b1
agtgcatgtattataacaacttaaagggtggaaatcatcataaagtgagggcctgtagaggcccatgtcatacaaaattaccgaattgtccccatctgggctcagaaatatgtcaccctggtcagtgcccatcagttgatcagtgcatgaaaaaggtcaatgtccgttgtgcatgcaacaaccttaaaaaagagtggatatgtcaagatgttctgaaggaataccgtcagtctggtcttgacccaaaacaaatacctaaaaatcaatatgcagttagcctacttgcctgtggtgaagattgtgtcaaaaaggttaaagctgcagattctgagttgcatctccggaaaattcaggagatcaatgacccctgctgtggaagctgaaaatgtgccca

SEQ ID NO: 21669 - DNA, 509 bp, Oryza sativa
  Clone ID: uC-osflM202037d05b1
gagagattttcccacgcagcagcaagcaatccaatgggagagcgcgcgtttgcgatgattcgctttcgattccgcgaggtttttggagagggaggagaaggaggaggagatgtcgaagggggaagggccggcgatcgggatcgacctggggacgacctactcgtgcgtgggcgtgtggcagcacgaccgcgtggagatcatcgccaacgaccaggggaaccggaccacgccgtcgtacgtcgccttcaccgacaccgagcggctcatcggcgacgccgccaagaaccaggtcgccatgaacccaaccaacaccgtcttcgatgcgaagcggttgattggtaggaggttctccgacccgtccgtgcagagtgacatgaagctatggcccgtcaaggtggtgcctggccccggcgacaagccgatgatcgtcgtccagtacaagggcgaggagaagcagttcgccgcggaggagatctcgtccatggtgctgatcaagatgagggagatcg

SEQ ID NO: 21670 - DNA, 392 bp, Oryza sativa
  Clone ID: uC-osflM202037d06b1
gtcttctttactcctcatccataacccctacgcttgcggagccttatagaagcttccgttgcgctcgcattccgctacaatggctgagggaacctgatgcgcgtgctagtcatcgcagcctcaggacaaaatggatatgcacttgtccccatgatcgctaggggtgggatgttgggcgctgaccagcctgtgattctacacatgctcgacattccaccagctactgaatctgttaatggccttacaatggagctggttgatgctgcattccctctttagaagggaatagacagaacaactgatgtcgctgaggcccgcactggggtgaatgagaccattatgtgcagggggttccccaggaaggagggaatggaaaggaaggatgttatcgt

SEQ ID NO: 21671 - DNA, 356 bp, Oryza sativa
  Clone ID: uC-osflM202037d07b1
gttcttcagcagttgatttgcctgaaattgttggaggtgctccacttcagccacctagtttgtcatggagcctatacttgccattgttgaaagtatttgagtatttacctcgtgggagtccatctgaagcatgccttatgagaatttttgtggcaacagttgaagctatactgagaagaacttttccatcagaaacctctgaacaatccaggaaaccaagaagtcaatctaagaaccttgctgttgctgaactccgaacaatgatacattcactctttgtggagtcctgtgcttcaatggaccttgcgtccagattactatttgtagtattaactgtttgcgtcagtcatcaagct

SEQ ID NO: 21672 - DNA, 415 bp, Oryza sativa
  Clone ID: uC-osflM202037d08b1
tctcatcctacctgaagaaggtcggctacaatggtggcaagattcccttcgttcccatctctgggtttgagggtgacaacatgattgagaggtccaccaaccttgactggtacaagggccccaccttgcttgaggctcttgaccagatcaacgagcccaagaggccatcagacaagcccctgcgtcttccccttcaggacgtgtacaagatcggtggtattggcaccgtgcctgtgggtcgtgttgagactggagtcctcaagcctggtatggtggtgacctttggtcccagtggcctgaccactgaggtcaagtcggttgagatgcaccacgaggctctccaggaggctcttcctggtgacaacgtcgggttcaacgtgaagaacgttgcggtgaaagatctgaagcgtgggta

SEQ ID NO: 21673 - DNA, 272 bp, Oryza sativa
  Clone ID: uC-osflM202037d09b1
attccatcctttcttctcttcaccatcttattggtgttattcacatttggctcagcgagggatccattacatatatgatgacaaatcatcgagctctatatatactccattaatctaagctggacgatccatggacagtaccaaattaaaacgcgactgtaaataactctatctatagagcggtacatatagactagttccacattaccgccacactcatgcttgtcatagctttacctactcgtatatcacgataccatagatgccacaat

SEQ ID NO: 21674 - DNA, 353 bp, Oryza sativa
  Clone ID: uC-osflM202037d10b1
gatctcccactccattattcgcctcgcccattgccccgtggccacgggcgaagccggagggaggggagagacgcggttcctcggtcgccatggacgggctcatcaaggggctgatcaacgtggcgatcgacgccgtcgaaggcgccggacgaggtgagcggggcggcgaggacgacgcgccgaggaggcaccgccccgcgcgggaggaggaggagggccgcggcgacgagcggtcgcggtcgacgtgggccgaggtggtctccgatcacaagggcggcgaggcggaggagcgcccggaccatcggaattcgaggcgggatgggaggcaagagaggagggaggatggggattgg

SEQ ID NO: 21675 - DNA, 454 bp, Oryza sativa
  Clone ID: uC-osflM202037e01b1
gcggacttttctctcctcctctaatctcaagtctctggggggtcgtcctcacatctccactggccatgggcaatattaagatcggaatcaacggtttcggaaggatcgggaggctcgtggccagggtggccctccagagcgaggatgtcgagctcgtcgccgtcaacgaccccttcatcaccaccgactacatgacctacatgttcaagtacgataccgtgcacggccaatggaagcacagcgacatcaagatcaaggactccaagactctgctcttgggcgagaagccggtcaccgttttcggcatcaggaaccctgacgagattccgtgggctgaggctggtgctgagtatgtcgtggagtccaccggtgtcttcactgacaaggagaaggctggtgctcacttgaagggtggtgccaagaaggttgtcatctcagccccgagcaaagatgc

SEQ ID NO: 21676 - DNA, 407 bp, Oryza sativa
  Clone ID: uC-osflM202037e02b1
ccacccgtcgctcgccgctcgcccaccatggccatgggggcggcgctccacaagctctggggcgacaccctccgccgccagccgctctcccgcatcaccccgctctactacatggcgtccctgccggcgacggaggagagatccggagtcacctggccgaagcagctgaacgcgccgctggaggaggtggatcccgagatcgccgacatcatcgagcacgagaaggcccgccaatggaagggtctggagctcatcccgtcggagaacttcacctcggtgtcagtgatgcaggcggggggatccgtcatgaccaacaagtacagcgaggggtaccccggcgcgagatactacggtggaaacgaatacattgatatggccgagtcattgtgccagaaacgtgctttgga

SEQ ID NO: 21677 - DNA, 478 bp, Oryza sativa
  Clone ID: uC-osflM202037e04b1
ggattgctccccacgctgtcggcgatggccactatcacggtgaagccgccggcgacgggggcggcggcgggaggggaggtgtccgaggtggagctctcggaggcgggatcgccggatgtcggcagccagagcatcgggagcggtgggagcgggcggagcacggcggggtcctccgggtgggtgtaccacctcggcgtgaactccatcggccacgagtaccgccacctccggttcctcgtcatccgcggcaagacggtggccatgtacaagcgcgacccgagcaagaaccccggaatccaacctatccgaaagggtgttggaagtcacactcttatggtggaggagcttggtcgccggattactagccatggggaactgtatgtcttgcggttttacaatcggttggatcaaacaaagaaaggagagattgcatgtggggacccccgggaagctaggaaatgggttgaagcatttgagc

SEQ ID NO: 21678 - DNA, 469 bp, Oryza sativa
  Clone ID: uC-osflM202037e05b1
gatgcgaggccacgccacgggtcccgaggggggaacccccccttccacgccccccccggcaatgtcggcgcaccacccgccgcacggcatcgccgccggggacgccaggaaggcccaccacctcggcggcgaccccaagaacctgtcgtggtgcggcgtcggcgtcggcgaccaccatttcctccccaggaagctcgtcgggggcggcggcccctccgcggcgaagctcgcgctcgtgtccttcctcgctgtcatcctcgtcctcgccgtcgacctgtccctcaccggcgccggggcgaaccggcggctgcggctccaatacctgcattacatcggcgacggcggcgggggtggcggtggtggcggtgttggtggcggtggcgaagaggccaagaacaacgagcttccttggctctcagtgccggacccgtccaacttcacggaggagctcatcgaccggtggctgacg

SEQ ID NO: 21679 - DNA, 431 bp, Oryza sativa
  Clone ID: uC-osflM202037e06b1
cgctgttcttcgtcaccatggtggtggcgggcggggccggctctatcgcccacgtgggggttggggctggggccagggccgactcctgcgtctgtgcctccgtctgggccggcgctgacgccgccctctgggttggcgccaacgccgccggcgccgccagggctggagttggggctggaattggagccgccgccaacgtctccgggtctctcaccggcgccgccgagggcgccgccggcgtggcacccaaggtgcatgtgtgagatcgatcgatcgatcgagcggcgcggggtacatcttcacgactccatccggccgtagcggcgccgggcatcgatccacgaccattcgccgtcgattggttttggtggtaataattaaagtttgggtaatttaacccgcaagtgtttggggggttattttatactcta

SEQ ID NO: 21680 - DNA, 319 bp, Oryza sativa
  Clone ID: uC-osflM202037e07b1
cttgttcagctcctcctcttcatccagtcctcgggagtctctctgatctctctctggggctgaaaattctccgcacactccggtgggcttaagcggtggcggcgtctcgcctgggtgggcgagatccctctcttgctcgtccgcaaggtcgctccccctgcgagtccaatctactgacgagctgggaggagcaaaggagggggcaattggagctccgctcggttccaattcagccccaattttgagccccccggctgcggggttcggccagttgagacgccatgtatcgggtgaagagcgagagcgactgcgagatgat

SEQ ID NO: 21681 - DNA, 388 bp, Oryza sativa
  Clone ID: uC-osflM202037e09b1
ttttgaaagaaaaaaaaagaaaaaacaaaggaaatggcgtggtcgaggaggagggaggagagagagccgcttccgcttgattcgattcgaagcaaaaccaacccaacccaacccaactcaaccgaatcgatggccggcgacgagcccctccccggcgacgggcagcggcggcgctacctcatcggctacgccctggcgccgaagaagcagcagagcttcatccagccgtcgctggtgtcgcgcgcggcggggcgcggcatggacctcgtccccgtcgacccctcgcggcccctccccgagcaggggcccttccacctcctcatccacaagctctacggcgaggagtggcgcggtcagctggacgccttctccgccgcgcacccagccg

SEQ ID NO: 21682 - DNA, 408 bp, Oryza sativa
  unsure (1)..(408): unsure at all n locations
  Clone ID: uC-osflM202037e10b1
ttcttttcgaagatttctttgatgcgtactgggggtggcatttggatcttggtggggccatgagtccaccggggaggaaggcccctgccggtgcgggcgggatccgtcggtggctctccaccgtcgtcatgtcggtggtggctcttgtgctaaccctagtagtgatatcgctatcggtgggctcgtctctgaccggggcatctctacacgagtacctctttgtcagacctagtgattcatccaagcttactgatgggaacatgaatggtactgccgttggtgttccattacatgaagaattgttgcagggtggcaaggaagtacccgttgtgcacggtgttcanagtggccgcgtgaattcgagcgagacaggtgaaatctataccaaagtacaagatccagttgtta

SEQ ID NO: 21683 - DNA, 420 bp, Oryza sativa
  Clone ID: uC-osflM202037e11b1
gtgtccactgacgccaatgatgttactgtcctcaatgcgctattcaccagcctcaattcgccggggcagctgcgcggttggcaggtgaatggcggtgacccatgtggcgcctcatggcagggcatcacctgctctggatcatcagtcacagcaattaaattgccgagcttggggctttcggggaatctggcctacaatatgaacaccatggagtccctagttgagcttgacatgagccaaaataatcttgggggtggccaaaatattcaatacaatcttccaaataagaagcttgagaggctcaatcttgctgggaaccagtttgctggaaatgtgccatactcaatttccacaatgcctaaacttaagtatctaaaccttaatcataaccaattacaaggaaatatgacagatgtcttt

SEQ ID NO: 21684 - DNA, 450 bp, Oryza sativa
  Clone ID: uC-osflM202037e12b1
gttgttcatctcaggttcgagatcgatatgggggcggattctatgtgttactttggtggtggaaaagatgaggaagaggaattagagatgtatcgtcaaattcactttccagccttgacagaactaaggaagacgacaaagttgccctcagctgctttcttgcgatctgaaggaaaatgcccccttgcacctgaagaggctgtgcttatgcttgctgctattggtttcaagcacagcacaaatgtatacattgcaggtgctgaaatttatggtgggagacataggatggcagccataagccgtctataccctgctttagtatttaaagaaactcttttgtcttcctcggaactcgaaccattcagaaacttttcatcccaggtaatattttttaagatatatcgtttggccccttgcatgtaatatacgtataaaagatgcatagagaca

SEQ ID NO: 21685 - DNA, 400 bp, Oryza sativa
  unsure (1)..(400): unsure at all n locations
  Clone ID: uC-osflM202037f01b1
gcgaacggcctaaatcttctccttggagggcctcccatggattccctgggggccttcgccatacccatggctctcatggcggttcaacctggcccgcaaatgactgccttagctgctgcgacgtcaacggcgatggctgcctaagcgccctggcctaccgacatgcccggatcttctataccagacgccatctgaaatctcctacaccatgagcacagtgttgctagcgccaccttcaaagccaacagtggaagagtactgtctccgncgacaatgaacttcaactactacgactacaggaccctgactcgaatcgacgccccttccctggatgcatttaaccgcttgacccccgcacagaacgccctcaaaaacagaatgctctctccgacttcaacgg

SEQ ID NO: 21686 - DNA, 413 bp, Oryza sativa
  Clone ID: uC-osflM202037f04b1
aatttttctgcacaatgaaaagaatagccctggtaagttgcccttggctattgttttgggcccaacaagagaactcgcgaaacaagttgagagggaattttctgattcttccaatgtggaaacgatctgtgtatatggtggaactccaattagccagcaaataagacaactcaattatggagttgatgttgttattgggacaccaggacgagtaattgacctgcttaaaagaggtgctctgaatctgtcagaggtccggtttgttgttcttgatgaagcataccagatgttgtcagtgggttttgatgaagatgttgagacaattttggatagagtacctccaaaacgtcaaaccttgatgttctctgcgactatgccaacttggattcagagactcacccagaaatacctta

SEQ ID NO: 21687 - DNA, 548 bp, Oryza sativa
  unsure (1)..(548): unsure at all n locations
  Clone ID: uC-osflM202037f06b1
cggttggttggtgaaacattagatgcatttttccaagtgggcattccaatgcatccagtgcttcttcctgacctgatgtttggacttgatagaagcctacagctttttgtgtctaaagcaaaatctggctgtggaacaaggaattcttttatgccccaactacctccgttgacacgatgcgaggtaggatcgaatatattgttcaagaaaaaggaaaagccacagaatccacagtaccgaggatcacaaaatggaacaaccaatggcgctgatcccttagcccttcctcaactctgtgtacgcttgaatacgcttcaattcgtgcgaggtgaacttgagaacttagagaagaagataaaaacaggcttgcggaatgtcgagtcagctcaggcagatgttaccgatggattggacatcaaatttgagctttgtcagacagcctgtcaagagggcattcagcagttatgtgagacaactgcatataaggtgacattctatgatttcgngcacgttctctgggatatcccttatattggtgacattgcatc

SEQ ID NO: 21688 - DNA, 418 bp, Oryza sativa
  unsure (1)..(418): unsure at all n locations
  Clone ID: uC-osflM202037f07b1
gattttggcagtgcgattcagggtgttgacacagggggtgccttttgttctgatacgtgggtgtaaactagtgtagtagtgttctaatataatgtggattatgtgtacaatgctttgtaggtgcagcagaaaactagctaaatacccatgcacagattttctaataaatatatcatcagttcgaaactcaaaaagtgagcatatttatcctgagaatcatatgtaatttgcaagacgcataaccataaagaagtggcggtgggatttcagactcaccataaccaccattcctaggttcttttgtattagtagaaataaacatgacattaaccttcatgactagtgcaatatnccgtcttaattgtattttatatgcaaattttgggatgggaacttccacacgcccgtatgggacact

SEQ ID NO: 21689 - DNA, 385 bp, Oryza sativa
  Clone ID: uC-osflM202037f08b1
ttattccaacccaaccgccgccgcatcgccctcgttagaacgatggccgcgtcggcgctgcaccagaccaccagcttcctcggcaccgcccctcgccgggatgagctcgtccgccgcgtcggcgactccggtggccgcatcaccatgcgccgcaccgtcaagagcgcgccccagagcatctggtatggacctgaccgtcccaagtacctgggcccgttctcggagcagacgccatcgtacctgaccggagagttcccgggagacttcgggtgggacacggcggggctatcggccgacccggagacgttcgcgaggaacaaggagctggagggtgatccactcgcggtgggcgatgctgggggcgctgggctgcgtcttccggaga

SEQ ID NO: 21690 - DNA, 373 bp, Oryza sativa
  Clone ID: uC-osflM202037f10b1
gtcttctgccggtgcggcggccacggcgacctgggggggatctggtgacgggcgaggggagggacaaggcggtctcgccgcggtcggaaaccctaaccctagctgctgcggcggcggcggcggcggtggcgtcggagacggagtcgagcagcagctgcgaggcgtccacgtgctcgtcgtcgtcgtcggctttcaaccccgggtcgtcgggggcggcctcgacctactacctctccgccttctcgtcgtaggcctccaccgcgtcgtcgtctgccgccggcgactagcggcgcgacatggcgtggctgctggacgccttctgcaccgtcacgatcgaccaggtggactccgcctaccgcgaggccggcggcga

SEQ ID NO: 21691 - DNA, 400 bp, Oryza sativa
  Clone ID: uC-osflM202037f11b1
tcctgttgcacttggtgatcggatcttcctcctcaactccgtcatgtgcagatccagcgcacggtgcgtcaccgttgtgaatgtcaaaccggttcaccttgcgatcatccaccggcttactcgacgttgtccttgaaagcgaccctgtgcaggcatacatctttcgctgaaaacttcagcagaggagcagttgaagaataagtgattgccgtattcgtcttgatgcacgcagattgcgcatgcacaatgttcttcatgagcaaatttgtcattgttggtagccgatctttgaagataagccaggcaaaaattgttgcactcagaggggggctgaattgttctacacaaattcccagactggacaatgggcaaaagcagaagtattgatctgatcatatag

SEQ ID NO: 21692 - DNA, 427 bp, Oryza sativa
  Clone ID: uC-osflM202037f12b1
ttcttttcatcggcagctgcagctaacttcacggagggctacaaaatcagtggttgaattgctgacagagagggtcaatcagttgtctattaaaacagataatgacttggattttcttttggatgaaaatcataacctcactgagatggacactcacactgctgagtctcatttagaggataaatctcacaggcaaaatgaggagtgctgctcatacacaagttcaaaccgagagagctggggaagatgttcttccttgggggcagcgagtgatggatcatccctaggcgagcgccctgaaattcctagtcataagcataagagcatgacgctacgggccttggcaacaccactgagacggatacgaaggaaaccgctcgctataccaaaggagaagaagaatcgatctctatggaagaggctcaaa

SEQ ID NO: 21693 - DNA, 401 bp, Oryza sativa
  Clone ID: uC-osflM202037g01b1
gaattttgcccccaatcgccgggaacgcccgcgccaagtgcggccaaataccatgggcgggggccgcctataccgccgccgttccgacctcccccgtggccggctccctctcctctcctataaaatggaaccccctcgccccgttctctcgttttagccccctcccgcgatctcccgtggtccctagccacctccccgccgtcgcccttctctttcccccgcgccgggcgcttccagccgcctctccctcctcgaccgtgcgccggccggccgtgccgtcgccttccccggcgtcgcagccgcctactctcccccggcctgccctccgtttcgcgcggtgaccgccggaggcgcgttcccgccgtcgtccagtggcgttgccgccactgtaccacctacag

SEQ ID NO: 21694 - DNA, 369 bp, Oryza sativa
  Clone ID: uC-osflM202037g02b1
cgactttctctctctcctctctgtccctcttccgccggggcgcttggggaaggaaggagaaagcaagccatcggcccccgcctccgcctacgaagggacattgttgctagtcggtgatggctgaacaggctaatcaaccgactgtccttcagaagttcggtggccagttccaccttggctccagcttttctgaaggtgtacgggctcgcaacatctgcccatctgtctcatcctatgacaggcgctttaccacaaggagctacatgacccatggccttgtcaatggtggcatgaacgtcccaatgatgtggtcctgtccaatttttgctaatgctccagctgagaaaggtggcaaaaacttcatgattg

SEQ ID NO: 21695 - DNA, 319 bp, Oryza sativa
  Clone ID: uC-osflM202037g03b1
atcatttgttgctactcctgacctggctggtgacatgaagcaactttttatcaagcgggggctcccgcctgctaaaaaattagggtgggaccctaaagatggggaaagccacctgaatgcaatgctcagaccaatgcttttgggtggccttggtcagcttgggcatgataagactataaatgagggattcagggcgttccaaatcttctttgatgatccgaacacttcccttcttactccagatactagaaaagggtgcatacctctctgtgatgcataatggtaggagcacaaacagatctgggtatgatgctcttct

SEQ ID NO: 21696 - DNA, 419 bp, Oryza sativa
  Clone ID: uC-osflM202037g05b1
gcggtgactccgtccgcgtcaccgagacgctgcagggcggctccagtgtcaagttcaggggggaggtgcctccttccatatgccagcaatgctatgaaactactctacaagagtacgcaaagcgcttcaagattcctggatttcgtcccgggaaagtagttccagagaacgtacttataaactatgtaggaccaaaacacgtacaggatgctacagttgaagctatcttgaggcatacacttcctcaagcattgtcctcggtagaggacagggcattagaagattctgtacgcattctaacaaagtttgaagatatggcaaattcattctctcttgataatgtgtttagatatgatgtttctgtggatgttgcccctgaagtgagatggttatctgaagataaatataagaacctcaaa

SEQ ID NO: 21697 - DNA, 374 bp, Oryza sativa
  Clone ID: uC-osflM202037g06b1
ctactttctcctccggctcttcttcagtatcgaatcgtctcttctcctcgtgcccaccaccaccaccgtagcaatggcgggcaacgggccgatcaacaaggaggacccgctcaactggggcgcggcggctgccgagatggccggcagccacctcgacgaggtgaagcgcatggtggcgcagttccgcgagccgctggtcaagatccagggcgccaccctccgcgtcggccaggtggccgccgtcgcccaggccaaggacgccgccggcgtcgccgtcgagctcgacgaggaggcccgcccccgcgtcaaggccagcagcgagtggatcctcaactgcatcgcccacggcggcgacatctacggcgtcaccaccg

SEQ ID NO: 21698 - DNA, 274 bp, Oryza sativa
  Clone ID: uC-osflM202037g07b1
ctcgacccacccatccagaattttttctccaaacgtcaacaacacccatcccaaggggggaccatatataaaataacacggcagcgcacctcacaccaccaccgttccgacctcccccagagaccggatccctttcctgtcattataaaatgaaacccacctcacaccgtactttcgttaaagacaactcccaaaatctaccttagcccctaaacaccttcccaccgtcgcccttctttttcccccacaccggtcgcttcaaaaccaacttccc

SEQ ID NO: 21699 - DNA, 399 bp, Oryza sativa
  Clone ID: uC-osflM202037g09b1
gtctcttcacgtgccccacccccctccccaccggggcggcttgtcacccacccatgggcaaatccatggcccccctccccgccgccgtcaccgccaccgcctcctccgccgtcacccccgccgacgacgaggcccactccctcctcccttccaccccctccaacgaggaggatgacgacgacctcgaggagcgcgcctacgaggcgaccgagaaggtcatcgcctcgatctcggacttccccgacgccgacgacgacgaggaggagtccgggctcgccacctccaccgccgcctcggggatcccgcccttctcgtggaggaagctgtggctgctcacggggccggggttcctcatgagcatcgcgttcctcgacccggggaacctcgagggggacctgc

SEQ ID NO: 21700 - DNA, 433 bp, Oryza sativa
  Clone ID: uC-osflM202037g12b1
tactcatttacctagtaatggaaatctctctgtggagatatctttagacagagggggtcaaaaaataaatcttcctcctactattgttccttggcgatactctccttctgttcctgcgctgactctctgtttctccggttctgttcatcccgcgcacacgggtgatctgaacgagcaagtgcctccgaaactccgtacgcttgagaacctgcacaggcaggcaaacgaacaagtttttgggtagcgcttcaagcgcgactgctttgcatcatcttcaccaacatgtcgacaaccgatgacaacaacaacaccggagacaaggagatggagcctctcgtcaacaccaacgaaggcaatactgtctcaaactccatcggagggtcattctcggggtataacgattcactattaccgttcgttcttcatttactac

SEQ ID NO: 21701 - DNA, 347 bp, Oryza sativa
  unsure (1)..(347): unsure at all n locations
  Clone ID: uC-osflM202037h02b1
ccctactttttccccctcccctccgtccatgtatcgggtggtccctgggaggagcgggggtttagcctcagatgttgatcggaggcgactgcttgctgcccacgatcgacctcaacttatggagcggagcacactgcaagcagctgctggaccatgaggacgtggacaaggtcccccaggcggacagcgaccggggcatcacgctggaggagttgcgcctcgtcaagatccacatgtgcttccatatctggcgattgggacaacaggtgaaagttagacacagggtgatagctactggttgtacttatttcangcgtgtatacacaagaaagagcatgactgaatat

SEQ ID NO: 21702 - DNA, 353 bp, Oryza sativa
  Clone ID: uC-osflM202037h03b1
atcgttttttctctcagctctcacagctcactgcatgaagggccgctgtcaccatgggggggggctccccagtgatggcccgcgcggggccgtcgacctcctccgggctcttcagcgaggcgcggatcaccatgcgcaagaccgccgcgaagcccaagccggcggcgtcgtcggggagcccgtggtacggtgccgaccgcgtcctctacctcggcccgctctccggggagccgccgagctacctcaccggcgagttccctggcgactaccggtgggacaccgcggggctctccgccgacccggagacgttcgccaagaaccgggagctggagggtgatccactcccggtgggc

SEQ ID NO: 21703 - DNA, 430 bp, Oryza sativa
  Clone ID: uC-osflM202037h04b1
caacttctcaacaaccgggagccatgcaacccagccagcgtgctgtaacccagatgcagtgaggctttgcgaaccaattcggttcgatgccaccacactccatgccaggaatgcaattccccgggatgcaaccttcgccgatgccaggagcgcatccagtcatgatgtatgcgcaaccgatgatgatgccgggtatgcagtttgcagccatgccgcaaccacgaatgtatggcccccagatgtcccagtaccggcttgtgcagcagcaagcggcacaatactacagcaacagccaagggaggccaacatactacgctggtatgaatgacctctcccagaaaatgtatggcctctccatgcaagacagctcttacatggggatgaacagctcgccctactctacaacaccttcatcatcatcttccatggg

SEQ ID NO: 21704 - DNA, 517 bp, Oryza sativa
  unsure (1)..(517): unsure at all n locations
  Clone ID: uC-osflM202037h05b1
ctactctcctcttcgcttcctcccctctctaagccggggaggctaagccatggcgtccgggaccgcccgcaccccggtcgcagccctccgctcgtcggcgtcgctcaagtctaccttcctagggcaatcctccacccgcctcgcccgcgcaccgactacgaggcgtaatgttcgggcggaggccaagggagagtggctccccggcctcccttctcccacctacctcaacggcagcttgccaggcgataacgggttcgacccgttgggtctggcggaggacccggagaacctgcggtggttcgtgcaggcggagctggtgaacgggcggtgggcgatgctgggggtggccgggatgctgctgcctgaggtgctgacgaagatcgggttgatcgacgcgccgcagtggtacgacgccggcaaggccacctacttcgcgtcgtcgtcgacgctggtcgtcatcgagttcatcctgttccactacgtggagatcccgcngggcaggacatcaagaccctgg

SEQ ID NO: 21705 - DNA, 418 bp, Oryza sativa
  Clone ID: uC-osflM202037h06b1
ctactcctagagaatgttatattctagggggaggtagaaaagaatgatggtgagtttgccaagaagcttgcagctgtcgctgacctctatgtaaatgatgcttttggcactgcacacagagctcatgcttcaactgagggagtgaccaaatttttgaagcctgctcgtgctggcttcctgatgcagaaggaacttgactatcttagtagagctgttgcaaacccaaagaagccatttgcgggcatcgttggtggatccaaggtctcaactaagattggggtgatcgagtctctggtggcaaacgttgatgtcctcatacttggtggcgagatgatcttcacattctacaaagaccatggatatgctgctggaaaatcttttgtggaggaagacaaacttgagctttgcacttcactta

SEQ ID NO: 21706 - DNA, 499 bp, Oryza sativa
  Clone ID: uC-osflM202037h10b1
ctttctggagctgcaggagactgtccaatatcggggggagcatcctgagaaattggagaggtttggcatgtctccgtccaaaggtgttctgttctatggccctcctggctgtggtaagactttgttggccaaggcaattgctaacgagtgccaggctaacttcattagtgtcaagggacctgagctgcttaccatgtggtttggtgagagtgaggccaatgtgcgtgagatttttgacaaggctaggcagtcagctccttgtgtcctcttctttgatgagcttgactcaattgctacccagagaggaagcagtgttggtgatgccggaggtgctgctgatagagtgctgaaccagttgttgactgagatggacggcatgaacgcgaaaaaaccgtgttcattattggtgctactaacaagccagatatcattgaccctgccttgctaaagccagggcgtcttgatcagcttatctacattcctctgcctgatgatcaat

SEQ ID NO: 21707 - DNA, 471 bp, Oryza sativa
  Clone ID: uC-osflM202037h11b1
ctcatgtggtgcgggatgccttctttgatatatgtggccgcttggactccgtcttgagaaaggacagtgtccggtgcttcttccgtttgttcgcggaatgtactgcggccatggcatttaagtgtaacatcacctcagaaaccttatcctgcattgtcaggcataatgccttgcgatgtgcgaaaactgtattggagggcaaggcacctcagctcagttgtatgcatgccaatccaaactgcattaacccatatggaatttttccactccatgaagctgctgaacggttctctgttgacatgatcaagttgctgttctgccatggtgcttcagccaatttacacacagtcaatgatgctggcattcccggactactcccgctccatgttgcagttggaaatacttgcttgcataaatatctggaggacaatctatctcctgtgcagtatcatgaggattatatctacaagc

SEQ ID NO: 21708 - DNA, 352 bp, Oryza sativa
  unsure (1)..(352): unsure at all n locations
  Clone ID: uC-osflM202037h12b1
cccacccactcctctctnctcttttacttccactattcattttcttctnttggttcccttttactatccctggggtttttaaaaaaacataatttttattaaattccccctaccattgtttcttgctattctctactctaacactctaaanataaacataacactatacttctgctaattataacacacttccttctgacaaattcatatccattttaaccactctctccccatatattcttcacaatcatctatacttcttacatattacatatactttgataatatcccaaaatattcctatattctctattcaaacttcattatgcttcatttcacatttgaataacct

SEQ ID NO: 21709 - DNA, 316 bp, Oryza sativa
  unsure (1)..(316): unsure at all n locations
  Clone ID: uC-osflM202038a01b1
gtcgctgagactcgtgaaacaccgcgaccaggagatagtttcagcaggagcaggcgatggcgagcccgcagtgctgcgcgaacccaccgacgctgaacccggccggcggggaggggaaggacctactcagcccgttcaccccgttcttgttcaacaccctgttcttttaaggcactgaccgcgctggtgaaaagcatttctgggaaagctatcttgggaagaacttttatgcgaaaacggtattaccctgaaaattgtttgatttcttccgcggnccgtgagttaaaagtgctaatacttgagtaaaaacaaaaca

SEQ ID NO: 21710 - DNA, 451 bp, Oryza sativa
  unsure (1)..(451): unsure at all n locations
  Clone ID: uC-osflM202038a03b1
gttgtgtgtacacgcagacgccgacaccgatgatatggtcgctccaataccggtgggggaaagcaaggagcacacgcggctgcataagcacgagcccaataaggaaaagccagccaaggagcactagccaccgggctacacgggggccaagccgacgggcaccccacccacgtacaccccgacacccaagcctacgccaccgtcatacacgcccaagccgacgccgtcggctcacacccctactcccccgacgtacacgccgacccccactccacccaagccgacgcctcccacctacaagccacagcccaagccgacgcctgcgccttacactcccactcccacaccgncaacatacaagccacagccgaagccgacccctgcgccttacactcccaattccacaccgtcaacatacaagccgcagcccaagccgaccccggcaccgacg

SEQ ID NO: 21711 - DNA, 437 bp, Oryza sativa
  Clone ID: uC-osflM202038a04b1
aactattggtgacttatgacagacgctccatccatctaagcatcactatcgatcggagagaatgagagcaacacgccgcctggcttacgggaccggcactatgagggcaatgacgtgcgccgtggatcgctatattgcctcgaccaacaagagaggaaaggctgaggatgcaggtactccaaggctggagttcctcatggccgagcatggtgcttgcgaatgacagcgccaatcaacagagagggagcatgccatcaggtattcagaatggtgctcttgagttcctgaatgagcaaaaccgtgggccacgtgctagcaataccaaagaaacaagacacagagaactcttcaatagatgacaaaaatgagatagatgctcctccggtggatagtgaactgtataatcgccctgattttgccactgaatacaaggatgc

SEQ ID NO: 21712 - DNA, 360 bp, Oryza sativa
  Clone ID: uC-osflM202038a05b1
cgcgcactattcggatcttttgacagaccattcacccaaccatgcagtacttctgttttgtctggtcaagggaacacaccgctggctttcggaatgcatcatgggtcaatgtatgcccctggatcctataagccacgccaacaaggtggtaagttcggaggcactactccaagttggagttctggtcgcagatctggtacttttgacttacgcgccaatcaacagaaagggagcatgccatttggcactcagaatggtgctcttgagttcccgaatgagcaaaaccgggggccacgtgctacaaagccatagaaacaagacacagagatctcttccatagatgacaaacatgagaaaaac

SEQ ID NO: 21713 - DNA, 256 bp, Oryza sativa
  Clone ID: uC-osflM202038a08b1
actgtttcctataacagggcaagagcagatcgatcgtttccttttgatttctgaggagaagaggatcgatcgtttcgctcgatcgtttggttttgaattttgaggagaagagaagagatgaggatcggacgatatggccggtggcagtgttcaggatacgtacggcgaggacagggccaccgaggatcagctcatcagcccatggtacttctgcgtcgcacagcggatgcacgctgctgatagacccacgatacaa

SEQ ID NO: 21714 - DNA, 474 bp, Oryza sativa
  Clone ID: uC-osflM202038a10b1
ttcctcctcctctcttccatcgccgctgctcgcttcctccccctctcccacgaaagatggcgtctcacattgttgggtacccccgcatgggccccaagagggagctcaagtttgccctggagtctttctgggatgggaagagcagcgctgaggatttggagaaggttgcgaccgacctcagggccagcatctggaagcaaatggctgacgctgggatcaagtacatccccagcaacaccttctcgtactatgatcaggttcttgacacggctgccatgcttggtgctgtcccagagcgctactcatggactggtggagagatttgggttcagcacctacttctcgatggctaggggcaatgccactgtccctgccatggagatgacctagtggtttgacaccaactaccactttatcgtccctgaacttggtcccaacaccaagttctcctactctttccacaggctgtgaatg

SEQ ID NO: 21715 - DNA, 453 bp, Oryza sativa
  unsure (1)..(453): unsure at all n locations
  Clone ID: uC-osflM202038a11b1
tttagaggatcccaaccccaccacctctcctggtgctcctctctctctctccgatctgcctcgccgccgccgcggctgctcttctcctctcgcctcgcctcgtgcgcgcggcgagttcgacctcctcctcctcctctccgagcccccgcctcccctggctgcgggcggggggtttcgagggggtggacgcggcctccgtgtcggcttcggctcggatcgaattcaaagaagaggttggaaaccttggcggcgtagttagtgccaccgcccctgtctggagtggcatgtagctttcgcaaggctttgtttatgattttgacgatggcgaggagatgaaggcatcgcaggcgtggcaacggggcagcaaggacatgacagccatgcccnctccgcgccaacgaggcgccgccaagaagcccatgtggataatcgtgctgctgtcgctggtgtgcg

SEQ ID NO: 21716 - DNA, 216 bp, Oryza sativa
  Clone ID: uC-osflM202038b01b1
cggtaagagctagcaggaggagctttgatcgccaggcgccatggacgcgtcgatcggggatccgaggctgacgtcggtagaggcggcgttcgagaagaacccgctgccgggcttcagctggctggtgacgccgatgtccatggccgtcgcggtgctactggggatcgtcttctgtttcctcagcgtgtcatctttgctggcaagcagcttgaggat

SEQ ID NO: 21717 - DNA, 469 bp, Oryza sativa
  Clone ID: uC-osflM202038b02b1
tgcttttctacaagaaggacgccaatttctatggtggccacggtatcgtcggcgcccaggttccccttggatgcggtctcgccttcgcgcagaagtataggaaagaggaaactgctacgtttgccctctatggtgatggtgccgcgaaccagggccagctctttgaggccctcaatatatcggctctttggaagctgccagctatattggtctgcgaaaacaaccattatgggatgggaaccgctgagtggagggcagcaaagagccctgcctactacaagcgtggtgattatgtgcctggattgaaggttgatggaagggatgttcttgctgtgaagcaggcatgcaaattcgcaaaagagcatgctattgcaaatggcccaatcgttcttgaaatggatacctacaggtaccatggccattctatgtcagatcccggaagcacttaccgtaccagggatgagatctc

SEQ ID NO: 21718 - DNA, 380 bp, Oryza sativa
  Clone ID: uC-osflM202038b04b1
gcgtactttccttcaatttcgtttccaaagagttggatcacagtacgtgtgtttagctagaggaagctggtggtggcgagaccatggtgggcaagggcaacgagtgcgccgcagctcgccgccgcttcagcctccgggcggcggcggcgtcgtcgtcgtcgtcgtccttcctcccctgtctcttgctggcggcggcgctctccgccggctgctgccgcgcgcacgcggcgacggcccgggccccgcgcagtctcttggcccgctttccgacgacgaagatgacatcggagttggagaaggaggccggccggtacgtcaacgacagttcgcaggcggcgaggacgatcaacaagatcacctacctgcaggtgtcgttcgtc

SEQ ID NO: 21719 - DNA, 336 bp, Oryza sativa
  unsure (1)..(336): unsure at all n locations
  Clone ID: uC-osflM202038b05b1
ctgtcttctctctttagtagtgacagctcaactcctacgcatggtacgactaggccggtggcgacgtcgtcgcttaagttgacgatgcccatacaccatctgttattgtgcgtgattgggccttttaaaaaaggagaaaaaatctagctaggcgagccgattgaaggagctgagcatgccgagcagcggcggcgccatgcctgcccttccaccaggcttccgcttccaccccaccgacgaggagctcatcgttcactacctcatgaaccaggccgcctccatcaagtgccccgtgccaatcatcgncgaggtcaacatctacaagtgcaacccatg

SEQ ID NO: 21720 - DNA, 465 bp, Oryza sativa
  Clone ID: uC-osflM202038b08b1
ccctgcatcgtctcctcctcctccacttgttgttcaattccccccccccctctctctctctctctctctccgtcgcagatctcggcaagggggcaacaaggtaggaggcggcgatgggttcggcgagccgcgcggtgccgtgcctgtgctgcccgtgcaagtgcctggcgtgcggcctcttcagctgcctctgcagcatcctcatctccctcctcgtcaccctcggcgtcctcgccctcatcttctacctcatcttccgcccccacatgatcgccgccaccgtcgactccgccgccctcacccagttcaccctctccaccaactccgccctcgcctacagcctcaccgtcgacctcaccgtccgcaaccccaacaagcgcgtcggcctctactacgacaacgtcgagtccctcgccctcttcgacggccagcgcttcggctacgcccccctcgactccttctacc

SEQ ID NO: 21721 - DNA, 244 bp, Oryza sativa
  Clone ID: uC-osflM202038b09b1
ttcttctcgcgccgccccctcgcgccgcaccctggcctactcgccccccgccccgccgccgccggcatggggaggatgggcggcggcggtggcggcggaggattcggtgggccaaggaggtgggaccgggagccgaacccgttcgggaacgacggtgacgccgtggaggtggcggtggacgagactgaggtgtttgatatagcaatataactccgggatcaaaatttaaacttaatatgaaatt

SEQ ID NO: 21722 - DNA, 250 bp, Oryza sativa
  Clone ID: uC-osflM202038c01b1
gcctcttcctctctcttctctcgcctcttccatccacattcttgtctctctctcgatggcttcgcactgggaatggcgatagaccatgcgtcccctttctcgctgaagaacagaggcgacatgggaggaagggggcatgaggaggcagaggcggagctactcgcgatcgtctgctgcttcgaaagacgaggatccataagacgaccgggctcgcgccggccctcaagactgcccgtcactgtcctcagcg

SEQ ID NO: 21723 - DNA, 482 bp, Oryza sativa
  Clone ID: uC-osflM202038c02b1
atattgcttgcgaccggtactggtattgccccgttccgctcattcttgtggaaaatgttttttgagaagtatgatgactacaagttcaatggtctggcttggctcttcttgggagtcccaactagcagttctttactctacaaggaggagtttgacaaaatgaaggcgaaagcgccagagaacttccgggtcgattatgctgtgagcagggagcagaccaatgctcaaggagagaatgatgtacattcagaccaggatggcagagtacatggaagagctgtgggagctcctgaagaaggaccacacctatgtgtacatgtgtggactgaaaggcatggagaagggtatttgatgacattatggtgtcattggctgcaaaagatggaatcgactgggctgattacaagaagcaactgaagaagggcgagcaatggaacctgaaagtctactaatttttccaattttcctcacatctgtttctt

SEQ ID NO: 21724 - DNA, 420 bp, Oryza sativa
  unsure (1)..(420): unsure at all n locations
  Clone ID: uC-osflM202038c03b1
atcgttgccggcaacttccccgagtggaagctgttcgtccaggtgatcgacccggaggaggaggagaggttcgacttcgacccgctggatgacaccaagacatggccggaggacgaggtgccgctccggcccgtggggcgcctcgttctcaaccgcaacgtcgacaacttcttcaacgagaacgagcagctggcgttcgggccggggctggtggtgccggggatctactactccgacgacaagatgctgcagtgcagggtgttcgcgtacgccgacacgcagcgctacaggctggggccaaactacctgatgctgccggtgaacgcgcccaagtgcgcccaccacaacaaccactacgacggcgccatgaacttcatgcaccgggacgaggaggtggactactacccatcgngccacgcg

SEQ ID NO: 21725 - DNA, 393 bp, Oryza sativa
  Clone ID: uC-osflM202038c04b1
gctagctcgatctcgccgcgcgcgctcagctcgtcgacaaggcagcgtgcacccaccaagatagcgggatgatccagtgagcgcgtggaggcggtgtttgattctagattgttctagaaccgaacgagcgagcttagctagctagctagctgctgctgcttcgatcgatcggtcgttgcctcatgcaggagttccagtccatcccggggctcgccgggcggctgttcggcggcgcggcggcggctgacatccggcgcgcgcaggcgcagcaggcccggcgccccggtgcggcgggataccgtagccaggaggctgggaagtgcccgcggtgcgagtcgaccaacaccaagttctgctactacaacaactacaacctctcgcagccgcgccact

SEQ ID NO: 21726 - DNA, 211 bp, Oryza sativa
  unsure (1)..(211): unsure at all n locations
  Clone ID: uC-osflM202038c06b1
gcgatctcatccctaggcattcggtcctggggttcctctttcacaggtgcgaggatggactgcatcgactagatgccagacctccgatcttggaatcctgacgatgaggaggaggtggtttttnntttttttttttttttcctttttttttttttttttttctttttttttttcttctctttcttcttttttttttctcttcattttcatt

SEQ ID NO: 21727 - DNA, 495 bp, Oryza sativa
  Clone ID: uC-osflM202038c07b1
tctgatttcatcatcaccagtacattccaagaaattgctggaagcaaggacactgtggggcagtatgaatcacacattgcattcacccttcctgggctttaccgagttgtgcatggcatagatgtttttgatcccaagttcaacattgtctctcctggagctgacatgagtgtctacttcccgtacaccgaggctgacaagaggctcactgctttccaccctgaaattgaggagcttctctacagtgaagtcgagaacgatgaacacaagtttgcattgaaggacaagaacaagccaatcatcttctccatggctcgtcttgaccgagtgaagaacatgacaggtctggttgagatgtatggtaagaatgcacatctcagggatttggcaaaccttgtgattgcttgtggtgaccacggcaatcagtccaaggacagggaggagcaggctgagttcaagaagatgtacggtctcattgaccagtacaagttgaag

SEQ ID NO: 21728 - DNA, 564 bp, Oryza sativa
  unsure (1)..(564): unsure at all n locations
  Clone ID: uC-osflM202038c08b1
ggtgaggagaggagatcagggggaggaagggtggtcttttttttatcnttcctggtgttttctcttcctttgtctttgcttttctcgtttctggtttgtttttttttttgtttttgcttttttttttttttttttcttttctccttgtttgtctttctttttgttttcctttgttctctctttcttttttccttttttttttttttttttttttttttttcccttttttttttttgtttcttttttctttctttccttgtttttttttttccttttttttttctttctgttttttttttcttttttctttttcttttttttctttttttttctttttcttttttttcttttcttttttcttttttgtttttttttttcgtttttttttttctttttttttttgtcttttttncttttttttctctttcttcttttttttcctttccttttcttttttttttttttcttttttcttttttttttttttttttttctcttttcttttttctttttgttttctttttttttttttttttcttgnttttttttttttctctctttttc

SEQ ID NO: 21729 - DNA, 141 bp, Oryza sativa
  Clone ID: uC-osflM202038c11b1
cgtcagctccggccaccaactttgacccgtcctgctcctccgcatcccccatcccctcctccccggcggcggcggcggcgcggaggcggcggcacgggagcggctagcggcttcgacggcagaggcggaagcggcaacaag

SEQ ID NO: 21730 - DNA, 178 bp, Oryza sativa
  Clone ID: uC-osflM202038d03b1
gatccgagacgacggcagcgacgcggatctggcctgcggtggtggcggggctcggatgcgacctgcggcggcgacaggggctcggatgcagcctgtggcggaggcggagactcggcctcggccggctggcgcagaatcatgacgactccgactctttccgacgaacgactctctttat

SEQ ID NO: 21731 - DNA, 333 bp, Oryza sativa
  Clone ID: uC-osflM202038d04b1
actgctctcaccccgttgtcatattgtcaagctgtgatggataacagctttgtggatatcccaaatcaacctccaatgaataacccgtttgtgctaatggaaccctcagttcagagctacatggtgaaccttggcaaaagcacaccccacatggactgcctgtgatctgcactgggtcattacggccctactaatgaaaatatacagtgcattgatagcgccacaacctgcgacgatggtctgtgagttcttattccaattggctcccagagctcaaagtttaccatgaagactctattacttgtcaaatgcctatccataccaacctctgga

SEQ ID NO: 21732 - DNA, 391 bp, Oryza sativa
  Clone ID: uC-osflM202038d05b1
cagttaacgggttgatctgaattccagtcgaattagctacaacagtaaaccacagtctgttcagagttcagcaaatttacaagaagaggaaaaggttacaaaagtttctcctcctcggagaaaggcctatagggatgacaaacctgaaaggcagagcaactatgcgaagaaggatagtggacctgagacaagtaggcctgggtataaggtgcagcaggcaatgcagttgcaacagcaacaacggccgacatctgcttcagcttctcagaattcatcaaggcaatctgaaaaggaaaggtcttgtgatgatgtggaaatagatgcttttctttgggaagaggaggctctcatagcagcacacaggaaggatatcgtgaacactatggagatt

SEQ ID NO: 21733 - DNA, 497 bp, Oryza sativa
  unsure (1)..(497): unsure at all n locations
  Clone ID: uC-osflM202038d06b1
cgatgtcgncgcgccgcggcggccgcccgacccgaaggcgacggcgacggcgacagcacggctctctcatccggccgccaccttctttccggtgagcacgctgcctttcctcctctcccctcctcttccaaatctagggttagggtttccttctcttctccctttcctgtcgtcgccgccatcccgtcgaacaccgctcccggtcgcagcatagncgtcggcgcatccactctgccgccgccgccgcccatcgccctcgcccactgcgccaccgccgtggcgccctcggagaagaagaggcggaggagagcacaaggcgattctttgactattcttgctgttcttgctgttcttgtaaactccacctcgtcgatagcgtccttgagctgcagcgaccagttcatcatgctggggtcgttgatccgctgcttcttcactaaactcactacgctgatcatctcctccaggaaatatggcccgctgtaagcctcccctgg

SEQ ID NO: 21734 - DNA, 208 bp, Oryza sativa
  Clone ID: uC-osflM202038d07b1
ctagacacggagtttaattagcttattgccttctacaatggataggatcttcgcccgtttcttttgcttcctactgattgcggcagtaagccatgcagctgatctgacccccgcgcactactggcgatccatcctccctaacacccccaagccaagctccatctcccaacttcttaactacgcccactcgcctgctgttagattacct

SEQ ID NO: 21735 - DNA, 398 bp, Oryza sativa
  Clone ID: uC-osflM202038d10b1
catagaaggaaggatccaatactagaaaagggaaaaaaaaataaatcaaaatccattccccttctccttccccaaacacggtgtggtctgcacgcgactcctcccccctccgccgccgccgccgccgcagcgagaccccggcgaatggcgtcccgcatcgcctctcgcctcctccgccgctccaacgcgactctaggcctcatcaggagttattcacatgccaggaactacagcagtcaactttcagctcttattccaattggttcccagagctcaaagcttacaagaagacgctattacttgccaaatgcctctccgtaccaactctggagtaggtcatttgcatctgacaatggagaccaggttggagctggtgtccctttatgggtgaatccgta

SEQ ID NO: 21736 - DNA, 385 bp, Oryza sativa
  Clone ID: uC-osflM202038d12b1
gagcggacatggcagcatcgctccaagccgcgggcaccctgatgcagccggccaagctcggcggccgggcctcctccgccgcgctggcatcgcgcccgtcttcgcacgtcgccagggcgttcggcgtcgacaccggtgccgccggcaggatcacgtgctccctgcagtccgacatccgggaggtcgccaacaagtgcgccgatgccgccaagctcgccggcttcgccctcgccacctcagctctgctcgtctcgggcgccagcgcggagggcgtgccgaggaggcttaccttcgacgagattcagagtaagacgtacaggaggtgaagggaaccggcacggcgaaccagtgcccgacggtggagggcggcgtcgactccttcgcc

SEQ ID NO: 21737 - DNA, 339 bp, Oryza sativa
  Clone ID: uC-osflM202038e01b1
agaatccctaagaacggatgaggatcacactggatggggatatatctcggctccgggaggtggcacaagaaatcgaagtgctcctatgggtggtcatacaaggcgtatcctcaatctcctcctgcaactgtaccggctgctggtgaggagaaccaagtgtcccttcattgccgcaagccgtaatagactcttcatgagcaagaccaagcgcgcgccggtctccctgcgccggctcgccaagttcatggaaggcaaggaggagaacaccattgctgtgattgttgatacaagtactgatgacaagaggatccaagagattccgataatgtaagttactgc

SEQ ID NO: 21738 - DNA, 194 bp, Oryza sativa
  Clone ID: uC-osflM202038e02b1
ccaataccggggcaggaatggcgggcactccggacaccgccaccttgccgcacctcggcctccgccccaagcccctcctcaggcgccggctgcgccgcatcgccgtctccgtctccccctccggccccgacgagacccccgcggatgacccgccggtgaccccctcgatcctcgtcaagaacaccgagcccgtg

SEQ ID NO: 21739 - DNA, 286 bp, Oryza sativa
  Clone ID: uC-osflM202038e03b1
ccgactcgacggcggcggcgacgcggaggcgaggcatcgccggcgagcgcgcggaaggaggaggaggaggaggcacaccctgtcgcctgaccctagatccgtgacccacccgctgggagaccctatgcgcccttgcccgctcggtgagagggcggcgcggccggggacggtgatggcgagacccgggcgcatagacgcgatgcatcgtctgagagttgactacatggccatcagctcgaccaccatctactacgacgaccactgcgtgtccatgggcccctgcacc

SEQ ID NO: 21740 - DNA, 409 bp, Oryza sativa
  Clone ID: uC-osflM202038e04b1
gcttgcttagcttagcttagctttgctgctgctccttctcattcataagccagcagctagctagcaagcagcacacacatatatcacaggccatctctctatccctaattaagctatatactccatatagctagctaaacacaggaggagcggaggaaggagaggctagctgatctagctatctgcagtgattagtcaaaacgacggcttctgataggttggatgcagaaaggatcatagagtacttcaagggcaagagcatcctcatcactggagcaactggctttcttggcaagattcttgtggagaagataccgagggtgcagcccgatgtcaagaagacctacctgcttgttcgcgccattgaccaagcatctgcataccaacgcgttcatatctgggtgacggc

SEQ ID NO: 21741 - DNA, 467 bp, Oryza sativa
  Clone ID: uC-osflM202038e05b1
gctttagcgaacaaatcccgcgcgggttgggaagagcgagctcgtgaggagagcagagggaaagcgcgagggggaaggaggaggaaaggtgcacaaggtcagactaagtttgcgttgaagaacaaaggagaggaaaaatgtcgcctgctgaggcatcgcgtgaggagaatgtgtacatggcaaagcttgccgagcaggctgagcgttacgaggaaatggtcgaattcatggagaaggtggcaaagaccactgatgttggtgagctcaccgttgaggagcggaacctgctttctgtggcttacaagaacgtgattggtgctcggagggcatcgtggaggatcatctcttctattgagcagaaggaggagagccgtgggaatgaggcatatgttgcatcaattaaggagtaccgtagcaggattgaaactgagctcagcaagatctgtgatggtatccttaagcttctg

SEQ ID NO: 21742 - DNA, 479 bp, Oryza sativa
  Clone ID: uC-osflM202038e06b1
cttctcgtgggcaaaattctctcccttcctcctggaccacctccactccgacgatcctcctcctgatcctgtgccggccggcgatggcgtaccggttgctggagctcacgctggtctccgcgagcgacctcaagaaggtcactctcttctcgcgcatgcatgtctacgccgtcgcctccatctccgggagcaacgtccccatgcccatgcacggcacccacgccgaccgcaacggcggcagcaaccccgcgtggaacaccgtgctccacttccccgtccccgcccgcttcgacacccgcggcctcgccctccacgtccagctccgcgcccggcgctccttcggcggccaccgggacgtcggggacgtgttcgtgcccctcgacgacctcctcgccggcgcgcacgacggcggcgagccgaggccggctagctaccaggtgcgccggcccatgttccgccgcgcgcacgggacgctctac

SEQ ID NO: 21743 - DNA, 329 bp, Oryza sativa
  Clone ID: uC-osflM202038f03b1
ccctcttccagggcaacaagaactacaactgcaagatcctccccaatagcttggtgatcgactactcgacgaacgtgacagtgagggggataacgctgaagaacagcaagttcttccacctcaacatatacgagagcaagaacgtggtgatcgacaaggtgaccatcacgtcgccgggggacagcccaaacacggacggcatccacgtcggcgactccaccaacatcaccatcagctccaccaccatcgccgccggcgacgactgcatctccatcggccccggcaccaagatggtccgcgtcaacggcgtccgctgtggcccccggcac

SEQ ID NO: 21744 - DNA, 101 bp, Oryza sativa
  Clone ID: uC-osflM202038f04b1
gggcgtgcgagccgacgccatggcgcgggcagtggtgcttctgggatactcggcgaggaacacccacgacgatatctgcttacacgagcaatgactgacat

SEQ ID NO: 21745 - DNA, 138 bp, Oryza sativa
  Clone ID: uC-osflM202038f05b1
ccctctcgtccggttctagctccgcacctttgctgcgcgcgcggatttggttcagggtttggaaatggcaatagacgatgaatcgccgctcagaatcaataccaccagaggcggcgccatgggaggaggaggggagtg

SEQ ID NO: 21746 - DNA, 204 bp, Oryza sativa
  Clone ID: uC-osflM202038f10b1
gtatggctagtcccatccttctactcttactcctcggcggagcctcacatggggggctataccaccctatgacccaaagcctagcgcgtcatgagctatgcctggccatggtacgaacctacaacatacatgccttaagacaaatgcaaaccgaattagcttataagcagtaacctcaatttcaaaagacagaaagcatgctga

SEQ ID NO: 21747 - DNA, 401 bp, Oryza sativa
  Clone ID: uC-osflM202038f11b1
atatattgatcgatgatctcactttctgttgtggggcactagatagacagcacgcggtgcaccacctagttaatgtaatggcatcagctaacctgcatgactgcgacgggcacgtccaattgccaattgatttgccggctcatttttaggtggctccctcccctttacttgcaccagcaggttttcccccaaaacattttgctggaattccaccaactagcttaattggggctccatggtccaatatgcatttgatccatggatatgtttcaccacccatggcccattatgtccaaaaccatactttcgcaccaaacatcgaagaaggtaacgagagtgagaaacctattacaccagatgcgagtcgtgatgatggcaacaactgtcatgagtatggtgtt

SEQ ID NO: 21748 - DNA, 409 bp, Oryza sativa
  Clone ID: uC-osflM202038f12b1
gtctacttcatcgcctttaacactatctgtgatgccacactggacagacactacgcattgtcccacctagtgaaggagaaagacgatgttatcctgcctggcggaggatggaactccagtaacacctctcatttgcaagaaattggagaactcagtggaattccgtcttactggattgacagtgaacaaaggattggacctggaaacaagatcagctacaagttaaatcatggcgagcttgtcgagaaagagaactggttaccagaaggccctatcacaatcggagttacttctggcgcctcaactccggacaaggttgttgaggatgcgttacagaaggtgtttgagatcaagcgccaggaagttttgcaggccgtgtaaattttcatcaggtttggccacggctgct

SEQ ID NO: 21749 - DNA, 275 bp, Oryza sativa
  Clone ID: uC-osflM202038g01b1
aaatatttttccttcgatttctctcgcctccgcttgtccactctccggtagatcccaccctccaccgccgccgccgccgccgtgctccggtgagccgccggtgagccggagactacagcgacgtcgcgcagagccgttgggcgggtaggcggttgggggctttgcccgagatggcgacgatggggagcctgatcgggctggtgaaccggatccagcgggcgtgcaccgtcctcggcgaccacgggggcgggggcgaggggggttccctctgggag

SEQ ID NO: 21750 - DNA, 177 bp, Oryza sativa
  Clone ID: uC-osflM202038g02b1
gtaggtgaaggcggcgcaacaggctcagccgcaggcgggcgtcttttactggacccgagagttcctcgacgagacagccaaagaggatcggccggcaaggtgcacgctcacgaacactgctagccacagccaccctgcattagaagcaacggcaagaccaacatgaagaagaggaac

SEQ ID NO: 21751 - DNA, 270 bp, Oryza sativa
  Clone ID: uC-osflM202038g03b1
gcctttttgacatctacaacgagtacacgagcccgacggctggcatactgtgcaccgacgcgttccagtccatgtacacacagatgctgagcggactcgtggagcgcgcgtaggtactacgcatatacatcgaatcgatcaacggaggacacatcgagataaaggtaatagggagaccatgtagggagataacagaggacatgaagaccggaacgatgtacgtcaaagcaagtggatcatccataagaagcggctggagggattgaagag

SEQ ID NO: 21752 - DNA, 453 bp, Oryza sativa
  Clone ID: uC-osflM202038g04b1
gcattacagccttgggagtaggaggaggaggaggcagcggatgatgatccctagggaaggggcggtgccggagcccgcggcggcgtcctgatccccgaccgacgatcgcggctgctgctgttgctattttttcagaggatggagaatcctcagattgagatgggggccttcaaggcgaacggtccgcaattgcagaatggtgggctacgttccagcatggttcagtcctggaacctgcagagattcgttgagagcgcgctgcggagcatcaggattgtcatattcacttctaagctcaatctgctcttgccgtttgggcctgcgtcgatcattctacactatactaccagcagacatggattggtcttcctattcagcatgctaggaataacacctttagctgagcgcttgggttatgcaactgagcagctcgcaatatacactggtccaaca

SEQ ID NO: 21753 - DNA, 134 bp, Oryza sativa
  Clone ID: uC-osflM202038g05b1
ggctaaggacacgcacgattgccgctgcaccgggtgcgccttcgcctccgtctcggcctgcacctgggattggacccgatggacccgtcacttcgccgacgttcaccaggtcgagagctacgccaccctcctca

SEQ ID NO: 21754 - DNA, 291 bp, Oryza sativa
  Clone ID: uC-osflM202038g07b1
gctgaagcagcagcagcaccggtagttgcagtcgaccaatctcatttatgtcgctaaatcccgcccgcgccgaccgtcgcgtatcggaagatggattggaacaataaataacactgctatccacagagagcggttggggaagactatagcaagaccaaacagatatgaagcgaaggcactttgctacagatgcggataaggagaaactttaatgcctcacctgagagaacctcgagaaacaaactactgataaacaggatcggataatgaatgtgttaaagcacttgcaac

SEQ ID NO: 21755 - DNA, 574 bp, Oryza sativa
  Clone ID: uC-osflM202038g10b1
gctaggactactcccatccttctactataactcctcggcggaaacatacaccggcggcgacacgaccacaagaccaaaaccatacaaacacacgagacatgactgagcacggaaaagaacgacaaaaaaaagaacaaaaaaagaacacaaaaaaaaaaataaaaaagccactaaataaaaaatacaaaaacaaaaaaaaaaaaaaaaaaacaaaaaataaaaaaacaaaaaaaaaaaaaatcaaaacaaaaaaaaaaaaaaaaaaaaaaaaaaaaaaaaaaataaaaattaaaaaaaaaaaaaaaaaaaataataaaaataaaacaaatataacaaaaaaaaaatcaaacaataaaaaaaaaaaacacaaaaaaaagtatataatcaaaaaaaaaaaaataaaacaattagaaaaaattaaagaaaaaatataaaccaaaaataaataaatatataacatacacataaaacacttaaaaaaaaaataaaaacaaaaaaaaacaacaaaaaaaatatatcataaaaaaaaaaaatataatataaacaaaaaaaataacacaacaacataaataaa

SEQ ID NO: 21756 - DNA, 347 bp, Oryza sativa
  Clone ID: uC-osflM202038g11b1
cctaggtgatgagatgactcgagttatttggaaagggatcaaagataagcttatattccctttcttggacttggacataaaatactatgacttaggtctacctaatcgtgacgctactggggacaaagttacaatagagagtgcagaagcgaccctaaagtaagcctgtaagcctcagttgtttgacgtcacagttctggtccattatttcttctattacttttttccatctaagttatgcttttgttatataattggtgctttaagctgaacctgtttaccctgtaggctcaggtagaatacataacgtccacttttttgggattctattataaccgtttacatta

SEQ ID NO: 21757 - DNA, 246 bp, Oryza sativa
  Clone ID: uC-osflM202038h08b1
tgttttacttacagcagcccgggacacatgggtcggcatatctcgctacagtcctcgaggacccatctaccccactatagtggatatcaccatatactagcacagtaactgaagctgatcgaataggtgactgatttgggatgacgacgccgagctctgacaggaaccaggtgaagggacagatcgagagcatctgtgtgaggagacaaggcaattccacaccttctgaaccttgagagacaaact

SEQ ID NO: 21758 - DNA, 233 bp, Oryza sativa
  Clone ID: uC-osflM202039a01b1
ccgtcgagctcgcgcaccccaaggtctcccctgagctccgcgccatctgggtcaactacctctcccagtgtgatgagtcgttgggggtgaagattgcgaataggctcaacgtgaagccaagcatgtgaagaaactaaggcacaagaatgcatcatctcttgtgaattaattggagttctaccaaccaaataaggtcagacaatgtcagatgcacgcattttctgttgtcgctg

SEQ ID NO: 21759 - DNA, 86 bp, Oryza sativa
  Clone ID: uC-osflM202039a02b1
cgctacttcttcctccaaaaaacccaacagtggggtgtgagttcagaggaaagggcatagaaacctagggagaaaaagactgcgat

SEQ ID NO: 21760 - DNA, 352 bp, Oryza sativa
  Clone ID: uC-osflM202039a04b1
gtgtcctgctgattctgaggatgcatcaatgggtgaggaagatgatgaggattctgaagcaaaagataatgctgggagtgatgaagaacctgatgagcctccagcaaagaaaaaggcaacagatgataaacaaacaaaaaaggcaaaagaaaaggatgcgactgccaagaaggcttctacaagacctgcaaaaggtgtgtctacgccttctcaagacactgaagaagatgatgagccagaagttgagttagaaagcaaaaaggttgtcaaaaaaagtctcatagagttcaaaggagagcgatgttactgtagattaaaccacccagaaggcttctaaattccaaaaaggatg

SEQ ID NO: 21761 - DNA, 183 bp, Oryza sativa
  Clone ID: uC-osflM202039a05b1
ggttctggcccgcgagctgatatctgcagtttggagccgagtagagaaaaaaaacgaaccgggtttttttttaggtcggcgggcggctcaagaaagaagggagctttttgggtaaaaatttagtcttgtttttttttccttcgctggttggggttggggttttcagggatggggggaacggag

SEQ ID NO: 21762 - DNA, 251 bp, Oryza sativa
  Clone ID: uC-osflM202039a06b1
ggtttaggtcacgcgagcttgtctccacaacctggtgcccctataagaaaatactgcgaactccgaacatctcttcaagtggacggccacttacagtccgcaacacgactaatgatatactctacacccaccattcctgtggctaccatcggcaattgaggttgagtcctcggataccatagccattatcccggccaagatccattacaggagctcctctccaccggacccagatcgttccagtacctctc

SEQ ID NO: 21763 - DNA, 375 bp, Oryza sativa
  Clone ID: uC-osflM202039a09b1
ctttatctgtctctgctccgcatcaccaccacgggggtccttgagctccggtcgccgtcggctagaggcgccgcgcgatccgggagatgccgccgttcacggggcccaagtccggggacgctgttttcggcagcgacgagcgcgttaacgcggcgctggtcacgctcacgtatggggccatcgtgaggcaggtgctcacggatctggaggaggtcgaggaggtcaacaagcagcttgatcagatgggctacaacattggaactcggttggttgatgagttcctggccaaatcatatgaatcaaggtgtgttgactccgaggagactgccgatgtcattgtaaagcttggatccaaaatgctcttgggtgtgactg

SEQ ID NO: 21764 - DNA, 383 bp, Oryza sativa
  Clone ID: uC-osflM202039a10b1
ggatatcgtttgaaacagcaaaaacaagtgtctttgacagtatcctacaagagataaactcagcaatagaggctcaacatgatacgagaagcctggcctattggttatccaacctgtcaacattgtcagttctcctgcaactctcatttaaaaccaccagggcagcaatctcaaccccacatagacggagattttcctacgagaggatttttcaagctagtcaaacttcaaatagcggacttgcttatttcagtgctcaaccggtggatgggcctagtggattgcaacaaattgatgcaaaatatccagctttgctcttcaagcagcagcttgtggatctgattgagaaggtgtatggaatgataagcgacatggtgaagaag

SEQ ID NO: 21765 - DNA, 447 bp, Oryza sativa
  Clone ID: uC-osflM202039b03b1
gtttccggaaaatcatttccagtgctacctcaactaatggaactatgttggcctattcagattgtgtgaaaccctgcctttttgcactaagacataagggtggaaaaaagtttactctagacaaactagagctgccaaagggattgctgaattctcagtgtatgctgttttctattgactcatccagtttgattctagctggccgtgatggaaagatttatgttgtagacattgccacacgggaaatttcaaatgtctttcaacctatgagaaaaatggatggagcttccaaagaaccacctgttacaaaaatgttcctcagtgcggatggacagtggttggctgcagttaactgttctggggatatttacatatttaacctctaggtgcaaaggcatcactggttcatacctagactgaatgatgggtctgttacattggctggct

SEQ ID NO: 21766 - DNA, 401 bp, Oryza sativa
  Clone ID: uC-osflM202039b05b1
gtgtagagcgagagagggtactacaccgctgtgtctcactgggggagggaatgatgtgacgaaggcgaggagcacggctcgctgctggagaagatcatcgacaagatccatgagctcaagacgggatcgtctccatccttgccctgggactccaacgacgacaggaagcaccacctcaagtacaggcacaagaagaagcggttcttcttccggacgaacccgcttcatgacgggctagcgatgaagtaaaagtggtgcccttgggctgtggaggaacaagcctgcgaactggagcatcttgaatttagtgagcaaaacatgcttggcattagaagggtacactgctgaatctcacgctcctgaagatggtttcctctgaaataagctatgttacaacaacc

SEQ ID NO: 21767 - DNA, 238 bp, Oryza sativa
  Clone ID: uC-osflM202039b06b1
gagtggacaaccaccagaaagggcctgagatggagaatgagaacaagcattgaagaatctagggctgaacctcggctagtgaggccgaaagatgcaacatactggcaggcattctaagctagcaagctttacattgagcagatcgggaagaggattaactgcatgaaagcaagctgtaattgaaaagagtgaaaccctaacagccaaaaagaaagtggtggcatacaatttatataac

SEQ ID NO: 21768 - DNA, 436 bp, Oryza sativa
  Clone ID: uC-osflM202039b08b1
ctctcattcctccctcttctttgccgcggcgccgacatcgatccatccctaacaaataacacgatgtcgcgcgccacggtcgccatcctcttctacatcctcacagccgccgccgccatcagcgcggcggcgcaggccccagcggagtcgccatcgccaaagccatcgaagagcacggcagctgccacccctgcaaaggcacccaccgtcgcatcggcaccgaggaaggccggaccagctgccgcgccgacgaccaccgtggctacctccgcgcctgctggtggcgacgaggtgtccatcccccctacgccgttcgccaccgtggtgtctcccgtcgccgatggacctgccgatgcggctgacgccgatttctccggtgccggagcttttaagaggcgcgcttgtcgctgccggtgtcttctgctccctttggcac

SEQ ID NO: 21769 - DNA, 434 bp, Oryza sativa
  Clone ID: uC-osflM202039b12b1
gagtgtatagcaacaatagggtgctcctccttgctactcgcctgtatcagtggaaggcggctatggctgacgccgtctcctgcgggccacccaaggagccaccgtgcccagaattctaagctaggcagcttaacattgagatgatcggcaaggccacctgtgaaggagcgcacaacggtgctggccccaaggacaacggcggcgcctgcgggtacaaggatgtcgacaaggctcccttcctcggcatgaactcctgcggcaacgaccccatcttcaaggacggcaagggctgcggctcatgcttcgagatcaagtgctccaagccggaggcctgctccgacaagcccgcccttatccacgtcaccgacatgaacgacgaggccatcgctgcctaccactttgacctcttccggccttgccttccgccccatggc

SEQ ID NO: 21770 - DNA, 320 bp, Oryza sativa
  unsure (1)..(320): unsure at all n locations
  Clone ID: uC-osflM202039c01b1
gctccatctccctccccctcgcgccccccaaccgcatctcaatctctctcctctctctctctctccagctcgcctccccctcgccggcgacgagctctcccccggctagggttagaccaggtgcccctcttgtctgcggcggaggaggtgggaggaaggatggaggagtcctgtnccccccacgaccacggcaaccattatacgcaagcagggaacgagcaggtcatagcgggcaccccgatcgaccggccccctatgaagtactgctcgcaagaccgccacttgcgtgcttaatgtgcaacagctacggtgtgcacacc

SEQ ID NO: 21771 - DNA, 331 bp, Oryza sativa
  Clone ID: uC-osflM202039c07b1
cattcgattggcgcacccatgcggagtgagcaaagaggattcgtcccatccatccctgcagcagccactgcccgtcctctcccagcagaaagtccttgtgatggtacttgttcacctcgtccctgattgtatcaacgatatctggtctcagtttcagctgctgcatgcctgcacggtggctcctggcctgccactgtttgtacttctcagggcgctccaccaggtctgcaccctcacaggcgatggcgttgagggcgtaaggccccagaacgttctgctccagcgccagccgcagcccactatcccttggggtggtcgtgttcagcatgtc

SEQ ID NO: 21772 - DNA, 471 bp, Oryza sativa
  Clone ID: uC-osflM202039c12b1
ctttacaatcggcagattactgatgttggcttagcagcacttacaagtctcactgggttgactcatctggacctttttggtgctaggataacggactatggcacaagctgcttcagattttttaagaatcttgaatctcttgaagtctgcggtgggttaattactgatgctggagtgaagaatatcaaggatctcaaagctctgaagcaactcaatctttctcagaacgttaacctgacagacaaaaccctggagctgatttctggcttaactgctttagtctcgctgaacgtctccaacactcgtgtatccaatgccggcctccgccacctgaaggatctgcagaacctgcgctcgctgtcgcttgattcctgcagggtcacgacaagtgaggtgaagaagctgcaggcgacggtgcttcccaacctgataagcgttcgacccgagtagctggacactacatgatcacct

SEQ ID NO: 21773 - DNA, 452 bp, Oryza sativa
  Clone ID: uC-osflM202039d01b1
gcttagctaaagttcagtttcatatgcattccacctcaagctttgctacatacttccaacagttaatccacctcaagacaataatgttgaacataccattaacccagataaaaatagtccgacaaggcaacatagtatttggaaataataacattaacctagcatctaacaagcacccccaatcaacgatggtaactagtagtagcaaatgtcacaagggatatctatatagctcaaacatgcagagaggtggcttaggcagcaacctcctcgtcctcctcttcctcctcatagtcctcttcctcagcggtggcatcctggtactgctggtattcagctaccaggtcgttcatgttgctctcagcctcggtgaactccatctcgtccattccctcaccagtgtaccagtgcaagaaagccctccttctgaacatggcggtgaactgctcact

SEQ ID NO: 21774 - DNA, 321 bp, Oryza sativa
  Clone ID: uC-osflM202039d03b1
gatcatcttccagaggatgaagaactataccatttatgcagtttccatcaccatccgtatagtgcttggatttttgcttattgctctgatctggaaatacgacttctcacccttcatggtgcttatcattgccatcctgaatgacagtactatcatgactatctctaaggacagagtttagcctacttccttgtcagacagttggaagctaaaagtatatttctctaccggatttgtgctatgaagctaccttgcttcgtttaccttttatcctttgttttttctattctcaactttcttctttcccattctctttttctc

SEQ ID NO: 21775 - DNA, 265 bp, Oryza sativa
  Clone ID: uC-osflM202039d06b1
gttcctgtgatatgtatgatctgacccaattatgaaccaggaattgatttcaaagcggttggtggaaattaagagattacatgaagagagaattgaaattttgaacaaaatagcaacttttcagaatatcttgatggatttcaagagcattcgttcttcaaaagcttttcagcttgttaatgatcgacttcagaagtctcaagcagaattggatcactaccagacattattagagaaattacaggttgataaggataagtctgtg

SEQ ID NO: 21776 - DNA, 357 bp, Oryza sativa
  Clone ID: uC-osflM202039e01b1
cgttcttttttttttcagttcaaagctcttcagggactgcaagtgccagcaaccaatctaccttagcacttcctgcttcagaatcaggcagaggaccaaaagctcctgcagaaccagatccggctatcgaccttcttagtggagatgatgacatcaaacctgaacctgcaaactcccttggacttgctaactggacagaaaacgcagcagctgaacagaatgtgctagctcttgcagacatgtcagaggtaataaacgacaacggaatgcacaataacccgtactaactgttttaatacatcggcaccaaattcaaatatccttgcataacaagcatatcctgctccagtgcaacct

SEQ ID NO: 21777 - DNA, 460 bp, Oryza sativa
  Clone ID: uC-osflM202039e03b1
ccctcgcgtccgcccgattccccaatctgcggtgtggtgtggtgcggtgcgagccggacgcaggcgtcgcctcgcctcgtcgcgcgcgcggctgtagagagagaagcctcgtagacaccctagcctcctccaccggccttgccctcctcgcgcgcacggcctcctccaccggccttggcctcctcgcgcgcacggcgggcggggcgtgcaggtttgggggagtagcgacggcgacgcgcccgacctccgtccacctgcctccatatcgggctgcagcatgtatgaggaagacaacattcagggagaattgttactcgttcaggcagaacttgatgacatccaagggcaaattagtgcactgatcgatcgtcaagaggagctggatgagcgtgaatcacagctgaaagctatgctcgaagtatctaaagcatccaacaacacaatcaataataccccttta

SEQ ID NO: 21778 - DNA, 207 bp, Oryza sativa
  Clone ID: uC-osflM202039e04b1
cattactcctcctcccctgcacagaccactcgtttcctccacaaagagggagggaacaagggaagggtgtcgcccgccccccaccccgatctgcctccgccgctccgctcctccgcgcctgcgaaatctaccaacactaactcagcaagatgggtgccggcggcaggatgacggagaaggagcgggaggagcagcagaagctgctcg

SEQ ID NO: 21779 - DNA, 481 bp, Oryza sativa
  Clone ID: uC-osflM202039e05b1
ctcactgggtatacagatggataaatcctccatgcaatgggaggcttcctccgggctcaatgggcttccctattgttggtgagaccttccaatttttcagaacaagtccatcaatagacatgccaatttactacaagcgaagactggagaggtatggacctatattcaaaactaacataggaggccagcacgtggtcatatcccttgatcccgaggtgaaccagttcatatttaacaagagggaagttgttccaatcctggtttccagaaaccacactaaacatctttggaaagaagacactcaccacgtataatagaactgctcacaagttgatccggagcttcgtatgcaagctctatggccctgaaaacgtgaaaaaatcactcctgccagaactagagaactccatgagggaaagctcggcgtcatggataggaaaacctagtgtcgaggtgaatgatggcgtgtcaaatatgatct

SEQ ID NO: 21780 - DNA, 243 bp, Oryza sativa
  Clone ID: uC-osflM202039e06b1
gcgtagttaagattagttaatccaagctctagctcgatcgcgcggtcgccggagctgaggtagacgaaggagtgcgacgagctaagatgggtagtggaagcgcggcgaacggcggcggaggaggggcgggggcggcgagggtgccgatgccggcggccaagccgttcctggagacgctgggggggaacatgaaggagacattcctgccggacgacccgttcagggcggagcggcgctagcgcg

SEQ ID NO: 21781 - DNA, 144 bp, Oryza sativa
  Clone ID: uC-osflM202039e08b1
gctgcagctgctgtgctgcgcgggttaaaaagagagagatctattaactggccctcctctcccacagcaaacacactcgtgtcgtactgagcatctgagctcggtggttgccgaggaggattcgccggcggcggcggcgggggg

SEQ ID NO: 21782 - DNA, 494 bp, Oryza sativa
  Clone ID: uC-osflM202039e11b1
catctactaagcaaagcacaaccaaagcttaagcgtcctccaaatcctcacacaagaactcgctcttcttaaccctcccggattttctccgacgagatcgatggctcctccccagcttgccggcaagatgaccgccaaggccgccgcggcggtgaagcccgcgacgagggcgtacgtgacgttcctcgcgggcgacggtgactactggaagggcgttgtcgggctggccaagggccttcgcaaggtgggctcggcctacccgctggtggtcgccgtcctccccgacgtgccggagtcccaccgccgcatcctcatctcccagggctgcatcgtccgggagatcgagccggtgtacccgccggagaaccagacgcagttcgccatggcctactacgtcatcaactactccaagctccgcatctgggagttcgtggagtaccagaggatggtgctccttgacgccgacattcaggtgttcgacaccatcgacgagc

SEQ ID NO: 21783 - DNA, 567 bp, Oryza sativa
  Clone ID: uC-osflM202039f02b1
cgttctgagtctccgactgagcgcctccaatctcaacagccacctcccacctgttccggctccggctagacctcgccgccggcgatccccagcctcagcgcatccaaccgacggaagaacacaaggcgccgcaccgcaccgcagcgatgacgctgatcaccctcatccgcgactacatcgatcgcatgctccacgacatccccgggatgaaggtcctcgtcctcgaccccgataccgtggggatggtaagcgtggtgtacagccagtcagatctcctccggaaggaggtgttcctcgtggagacggtcgacaacgcctccagctccagggagtccatggcgcacctcaaggccgtctacttcctccgcccctcctccgataacgtccagaagctccgccggcatctcgccgccccgcgtttcgccgagtaccacctcttcttctccaatgtattgaagattccacagattcaggtgctcgcagattccgatgagcaggaggttgtgcagcaagttcaggagttctatgctgatttttgtgccatcgacccttaccatttcacgctgg

SEQ ID NO: 21784 - DNA, 408 bp, Oryza sativa
  Clone ID: uC-osflM202039f03b1
gaattttcctcctcccttcccttcccttcctctcgccgaaccaacgcggaagaaggagctcgcccgccggctagggtttgccgcacacccgccgccgagcagctagcaccggagtgttgggaggggaggctcgcccgacgccagcgacatgcctcagccggtgcttgcggaactgccgacaagcgatgcgctcatcggtcccgactgtgcctttaacctctagatctgcgatatccttaaccacgacccctcccatgccaaagatgtagtgatgtttatcaagatacgcattgagcacaagaactcaaagatccagcttctcgcactaacattgctggagaccctgattaaaaattgtggagacttttgttcatatgcacgttgctgagagggttttactctatgaaa

SEQ ID NO: 21785 - DNA, 100 bp, Oryza sativa
  Clone ID: uC-osflM202039f04b1
gcctatcaaagatagaaaggcatccaatgcacatgagttcatatcgagccttacccaaggatatcataccaccgtgggggagagagatactactctatac

SEQ ID NO: 21786 - DNA, 354 bp, Oryza sativa
  Clone ID: uC-osflM202039f07b1
atctatcttgaattcttgatcagttgagttgcattgcatgcagaaagctcatcacaagttcacaaccaatagcaatcaccaagttttttttttttttttgacactgtgacagcatccaccatgcaagccatgcagagacttgtgctgtgtcttgttgtgtccatggccatcgcggcgtcggctcagggcccgacgtcggcgccggccgcgccggcgccggcgacaccggcggcaccggcgacgccagcagcgcccgcgccggcgtcgacgaagacgacgaacatcacgggggtggtcgccaaggccgggcagttcaacacgctcataaggctgatgcggttcaccggcgcggcg

SEQ ID NO: 21787 - DNA, 259 bp, Oryza sativa
  Clone ID: uC-osflM202039f12b1
aagtattcggacgccagtctgatgcaccatctggtgttgttggggcaatggacatggatgtcttcggctttcagtagctatcttctagtacacgaactgtcgtcgcaccatcgcggaggagacgatgatgtacttaaatcacttaagtagttctgggtcacgcttttgttcagactaatcaatgatggctgaaaccagtcttctgtgatccacccttccagcctaattggggctcctcggtccaatatccattagattc

SEQ ID NO: 21788 - DNA, 394 bp, Oryza sativa
  Clone ID: uC-osflM202039g02b1
cgctggcaagcagctggaggatggcaggaccctggctgactacaacatccagaaggagtcgacccttcaccttgtcctccgcctccgtggtggcatgcagatctttgtcaagactctgaccggcaagactatcacccttgaggtggagtcttctgacaccatcgacaacgtcaaggccaagatccaggacaaagagggcatccgctcagagcaggagcatcttatgttgcaccagctgcgtctcctgcggtggtacgtttcgttccattgatcggtgctgaatgcgttgaggagggggggattgattcgtgaaatgggatgggattgatgctttgatatgattgcgttcgtgaagctcctgattctgaatccaatgcgttgggggatttgggat

SEQ ID NO: 21789 - DNA, 392 bp, Oryza sativa
  Clone ID: uC-osflM202039g03b1
cagttgttacaaaacccacacacctccgcgcagcgcagcctcccacacacgcgcactcgattccccactcctctcgcgggtcgcggccacttcgccgccggcgctcgcatcggtcaactcgacgccacggccacacacgcaccggccatggccgcggcggcggagcagcagcagcagcagcagcagcagggcttccgcccgctcgacgaggcgtccctggtggcctacatcaaggccacgcccgccctcgccgcgcgcctcggcggcagcctcgacgccctcaccatcaaggaggtcggcgacggcaacctcaacttcgtctacatcgtcctctccgacgccggctccgacgtcattaagcaggcgctgccgtacatccgctgcgtggggga

SEQ ID NO: 21790 - DNA, 431 bp, Oryza sativa
  Clone ID: uC-osflM202039g07b1
cactcagcaacaggcctaccatatcgcgagaaggcccccagcgtcgcggagccgaaggatcaggattcactccgccctcgccgacctcgtcgccggccgccgcatcaccaccgacacctccccccatcgccgccggcgagagttgggtggtggagcgagcgtggccgcgaggggacgcggaggggcggcggcggcggcgattgttcgcgggatgagcagcttcggcggcaccagctccgtcgcctccggtggtacgtttcgttccattgatcggtgttgaatgcgttgaggagggggggattgattcgcgaaatgggatgggattgatgctgtgatttgattgcgttcgtgatgctcctgattttgattcgaatgcgttgggggatttgggatcgaatcgtaaaatgggggtgggattggatggttggatg

SEQ ID NO: 21791 - DNA, 260 bp, Oryza sativa
  unsure (1)..(260): unsure at all n locations
  Clone ID: uC-osflM202039g09b1
atctagcacacgcacgcacgcacacgcgcgcgccgaccgagcggatagccatgtcgacggaggcgctcctcgccggcggaggcggcggtggcggtagaggcaaggtgaatatgacaagtgagcactgatgactacggtcangttgagacgtcgacacatttttagctgagatactcagaagatacaataagagtgcccagataagagttttggtgatcatctggtacaaaatatataggacattaatcatggggaaacat

SEQ ID NO: 21792 - DNA, 196 bp, Oryza sativa
  Clone ID: uC-osflM202039g12b1
cgataccgcccccaaattcctccgcttcccgcgcggatttcgccgccgggcggcgagatccgcacgattcgcgccccgatctgctctgacccggcgctcgcctcgccggattcggcccccgttttgcagggtttccgccgccggggtcgcgcgggcgttcgagcggagcggaaggggaggagacaggatagggatg

SEQ ID NO: 21793 - DNA, 265 bp, Oryza sativa
  Clone ID: uC-osflM202039h03b1
ccatcagcagcagcagcagcagctgagcttgaagcagcagagcgaggtagacatggccgccgccaccatggccctctcgtccccggcgctggccggcaaggccgccgcgaaggtgttcggcgaggggcgcatcaccatgcgcaagtcggcggcgaagcccaagcccgccgcgtcggggagcccgtggtacggcgccgaccgcgtgctctacctcggcccgttctccggcgagccgccgagctacctgaccggcgagttccccggc

SEQ ID NO: 21794 - DNA, 357 bp, Oryza sativa
  Clone ID: uC-osflM202039h04b1
aattaagaaggaaacaagattcataccgctccatggcaacttaaggcgacaatgggatcgctccaccaccatagcatcggtgctcgccggcgccgaggtggcagcgctggtctggtgggggaccgtgcttacctccaagggtgacgagggctctagcgaaactggcctggtactcatcaccaagggtcccatctgtgaggcggagatcagggagacggtcggctgcggctgcaccgacattggtggctcgtgcggtatcacgagcgcgaacctgagtggctacaacggcatgggctcctgcggcaacggcctactcttcaaggacggcaggggctgcggctcatgctacgaggtgaa

SEQ ID NO: 21795 - DNA, 208 bp, Oryza sativa
  unsure (1)..(208): unsure at all n locations
  Clone ID: uC-osflM202039h05b1
gngtaatgtgacacttctaccaatggagttgatactacaggtcctgccaaggactgagtaacacaactgctctggatcactaacccccaaatcccaaatcataacttttgcgacgcggtttccatttcccagttttccgccctttttcccccaactttggtttttttggtattgacccccaatctgtatttattaacttccatgaatg

SEQ ID NO: 21796 - DNA, 156 bp, Oryza sativa
  Clone ID: uC-osflM202039h07b1
cacgcaccgaccctgcagctgcagcgccagcagggcatctttgtatggaccccgacggtgcatgactcactccgccctcgccgacctcgtcgccggccgccgcatcaccaccgacacctccccccatcgccgccggctagagttgcccggcttacc

SEQ ID NO: 21797 - DNA, 102 bp, Oryza sativa
  Clone ID: uC-osflM202039h12b1
cgtaaaatttctccccaatctcgcgaggctctgggggtcttttagaatcctctcgcgttctcaagacgcagatctttgtgaagacattgacccgcaagacta

SEQ ID NO: 21798 - DNA, 299 bp, Oryza sativa
  Clone ID: uC-osflM202040a05b1
gtgatggaggaggatgtccggctgggagccaacaagtggtctgagaggcagccgatcggcacggcgaggcatgtctccgactacattggctccagggcgccaccgtcggcgccgttgttcgagccagagtaacctatgtcatggtgtttctaccgcgcagggatcgcctaggtcatggcctactttctgttccttaacatcaacgttttcacggttatgtgagttaacaattaatcaattgagtgctactccgttactcttctttgacttgcactgttccctgaagattttaaaacgtt

SEQ ID NO: 21799 - DNA, 304 bp, Oryza sativa
  Clone ID: uC-osflM202040a07b1
ggctaccggggttcctgtggaccaacagcggttgatttttagaggaagagtcttaaaggacgatcacctgctatcagaatatcatttggaagatgggtacacattgcatttggttgctcggcgtgcagctgctgaaggccaacattcttctggtacttctgatgaaaacacccatgctaatgttaatgttgctggaaatggactgttaggagatatctccaggagtgttcggtatatccttgtctccctaggtcttgtgacgcctggaggcatgtaccacactacattttcggtgccttttacc

SEQ ID NO: 21800 - DNA, 535 bp, Oryza sativa
  Clone ID: uC-osflM202040a08b1
agccattcttaaagtgctgaaccttgatagctttgctcgggggccaaagttggatgaatgggtcgcaagagctacgttatttgatgcacttcaggatactgcgaggattgctatggctgggaagtatactggtctatctgattcatacctctctgtgttgaaggcactcttgcatgcttctgttgattgccgcaggaagcttcttgttgattgggttgcttctactgatctcgaagactccactgccattgaggcgcctgatgcttataaagcagcatgggatttactgaagggtgccaatggtgttttagtacctggtggctttggagataggaggtattcaagggaagacttttggctgccaagtatgcccgtgaaaacaatgtaccatatcttggcatatgccttggaatgcaacttgctgtggttgaattagctcgaatgtcatgaatctccctgaagctacagcacatacttgatcccaatccaagaccccatgtgttattttatgcctggggttccaaacacatatggt

SEQ ID NO: 21801 - DNA, 328 bp, Oryza sativa
  Clone ID: uC-osflM202040a09b1
tgctaaaagtggttggatattccaaagttataatggctacaaatggagtgctctctattctattaggatgaagtctaattttgatgacctttgaagatctgtgaggatatgctatggacgctaggactcggttaaacactttacataatacaacagatgtgatgtgggctttcttgcggaacaatcatgtcgtattaggctgtatagaaaacatattgaaattacggtgctagaataacgggctttcattgaggcgcctgatgcctattaagcagcatgggatttactgaagggtgccaatggtgttttagtacctggtggcttcgga

SEQ ID NO: 21802 - DNA, 359 bp, Oryza sativa
  Clone ID: uC-osflM202040a10b1
cccccacactccttcggcgcgcgcgtccgtcctcgatcgcgcgcgcgtcgacgagctaagccggcccgggaaacccaaggcccctctcccttcctcaagcgcgccggcgggcctcgccggcgcgcgacattgagctcaacccccccgtcgcagtcgcacgtagagcgccaccaccaccgccagcgcgtggcatcgtacgtcctccacgcgcggagccgtgctaggcaacctactatgctgagcgcccgcctcctcatgagcgtgagacctgctgccgaatggtgcggcggcacctgctgcgcggacacagcctggacaggttcctgccgatcaggagcctcatcatgtagtacagctct

SEQ ID NO: 21803 - DNA, 376 bp, Oryza sativa
  Clone ID: uC-osflM202040a11b1
ataaagtgacggtagatgatgtgtcaatttttagagctagctatttgactatactattaaacttgctctttggctgagttcatttgtgcaagtgcaaaactttctctcgtttttgttgacttttctcaaactattaaatggtgtttttttcgtaaaaaaaatctatagaaaagttgtttgaaaaaaaatcacattaaccgattttccaagtttttcttagttaatacttaattaattgcgtgttaatctgttactccttttttacgtgcatgcttcccgaagtattttaaaacgttgtgttttctatactcctttaaaagaagataatggttgttgtagccattttaccatctccacctattgttttgtttatttt

SEQ ID NO: 21804 - DNA, 383 bp, Oryza sativa
  Clone ID: uC-osflM202040a12b1
ttttgatagaaattcacgatttggctgtgaggtcggcagagcgcaattgctgaggtcacagggaggatctaggatctctgcattctgaagcagccatggctaaagagtatcctgcctcccccaaagctcagcagctgcaagaatccaagaagcagcggctcacctacatcctcgtggtgagcgcgctctgcgtcgccttctacgtcctcggtgcgtggcagaacaccacagtgcccaagccggcggcgagctcggcgatcaccaaggttggctgcgacccggcggcggcagggcagtcctccgccgtgccgtcgttcgggtcggcctcgcaggagtcactcgacttcgaggcgcaccaccagctcaagctcgacgacacggac

SEQ ID NO: 21805 - DNA, 547 bp, Oryza sativa
  Clone ID: uC-osflM202040b02b1
cgccgtcgcaagccgtccgccttgctcctcctcgccgagagcttggtcctccgtctcctctccccacgcgcagatctaagcctagggttagggtttgtgtagctcgcagcgatggcgatcaagaggaccaaggcggagaagaaggtggcgtacgacaagaagctctgccagcttctcgacgagtacaccaaggtgctcatcgccgtcgccgacaacgtcgggtccaaccagctgcaggagatccgcacgggcctcaggggcgactccatcgtcctcatggggaagaacaccctcatccgccgctgcatcaaggtgcacgccgacaacaccggcaacaaggagttcctcgagctcatgcccctcctcgtcggaaacgttggcctcatcttcaccaagggtgacctcaaggaggtccgcgaggaggttgccaagtacaaggttggagctcctgctcgtgttggtcttgctgctcctggtgaatgtgggtcccccctggcaacactggtctggatccatcccaaacctctttcttccaggtgcttaacat

SEQ ID NO: 21806 - DNA, 251 bp, Oryza sativa
  Clone ID: uC-osflM202040b03b1
gtttgattgtgtattcaagaacttggacgatggtacagtgtttgtcgtcgacgagatgggaaaagatgggagtttcaggagcctcagggacaggcgatccaaccggacagttactgcagcggaattcgaacggacctacggctcgtccccattcatctgtgagctgatgcggcgggtggatgattcggatgagtcctctgctgtggagaaggctctggtcaggggaaggagaaggaggaggagatttggtc

SEQ ID NO: 21807 - DNA, 534 bp, Oryza sativa
  unsure (1)..(534): unsure at all n locations
  Clone ID: uC-osflM202040b04b1
gcgtatttttaccatattgcagctaccaaaatatgtgcttgacattgacttgggcagtttgaccaatccactaaagaaatctgtggctgatcactctgctctggacatagggcttggtacacttctgcagcagcttggtccttccgatataacccagtatattgagtttatgattcaatatatacggatggcagaagcagcatttaatcccacacctgttacaaacaagggatctgctcattcctctgaggcaccaaaggcgttatattnggtgatgtccttctgcaagtacatggatatctccatggatttagtcgagtcatgcttaccatcttcctctctggctatcctgcaatcctgacccttctgttgtagttatacataggtttacaaaatcggttaagccttagaactgttagcttttgagctttttttctccattccatgatccagggtttataacttacgaagtcgcaatggtgctagttgacacttgacagtgccctgaccctgaatgctgaagtgcagagctct

SEQ ID NO: 21808 - DNA, 489 bp, Oryza sativa
  Clone ID: uC-osflM202040b05b1
ccgttccccgcaacgacgccccccccaccagcgaagccatagacaagttggtctcatgaattcaggaagcacattggcatccagagtttcctgttcatcgggaaacaacggcatcttcccaccctgccttctcccaggattcctgggattcccagttgtgtttgtaaacttccacttgttcaaggccattgttcgcagccctgcatcttctgttgtgttgggaatctgtggagggcgccttccatagagaggtgccccataagtcttttgtttagttagtctgggaactggcatagctggaatttgtggtgcaaaacatccttggcatcagtagtctacactgctgaatctcaggttcctgaagatggtttcctctgaaataagctctgttacaacaacccatgcacaaggtcccaagctctttagagggaagatacttctgccaatgggcccctcagatgttgtgccttctgagaacgtgagttcgat

SEQ ID NO: 21809 - DNA, 287 bp, Oryza sativa
  Clone ID: uC-osflM202040b08b1
ggtgggagggagtacgattaacttcgacttctcgacagcttggtaataggtgtcggaataatcctccaaaactactttctatgatgcactataggataccgtgacaattactcaagctgctaatgacactggtctatccgatttatacctttttgagttcaaggcactcttgcatgcttctgttgattgccgcaggaagcttcttgataattaggttgcttatactgatctctaagacttcactgtcattgaggctcctaatgcttataaagcatcatgtaatttac

SEQ ID NO: 21810 - DNA, 499 bp, Oryza sativa
  Clone ID: uC-osflM202040b10b1
ggtgaggaggccggttggccggggcaggaatcgtagggatccttgagaagatggagaatgactccagagggcacattttcggacgaagaacagtggtcgcgatggacggtggtctatatgagaagtaccctcagtacaggaggtacatgaaggaggctgtggctgagctactgggacccgagcgatcgaatcgtatcgccatcgagcacacgaaagacggatcagggatcggcgctgcgctgttggcagctgcaaactcaaagtatgctgctgctcaaatctctacaaggtgatcgcaattgttataattgttgagttactgggccgaattaattctctacaaggtgatctcaattgttatcattgttgagctactgggacctgaacaatccaagcatatcatcatatggtggcctcttatctgaagtatggaggggcttcatatatgctattcttctgtactactagtctactatactatataacgcattttgggaaa

SEQ ID NO: 21811 - DNA, 465 bp, Oryza sativa
  Clone ID: uC-osflM202040c01b1
gtctttctctccgcctctctcgccatccgccgcggggccaaccgagtcgatcccccctgccgcccccgccgtcatgggcctcctctcgaacaggattgggaaggagaccctgaaggcggtggatcacatctattcgtggagggccgagtgggtctacgcgcatcacggaatatatgtgggcgatgataaggcgatccattttactagaggaaggggccaggaggtcggaacaggaacttttattgacctgctccttatgagctctggtgctaatacaaacactccatgttcaatatgcaacaatgaaggtgccaccaccaatacggagacaaatggtgtggtatcctcttgcctcaactgcttcctgtcagggggcgccctctaccgtttcgagtatgctgtcaacccagcacttttccttgccaaagcgcgaggagggacgtgcacgctttgcccaactgatcc

SEQ ID NO: 21812 - DNA, 538 bp, Oryza sativa
  unsure (1)..(538): unsure at all n locations
  Clone ID: uC-osflM202040c02b1
gaaggactccggcggcgagagcgaggcggcgccggaggcgaaggcgaagggcgacgacgttggcgccgaacccgccaaagaagccgttcccgcggcggcggtgaaggaggctagcaatgacgacgaaggagcaaaggacgagaagagcaagcccaaggacgccggcgacgccgcgccacccgccgccgccacaacgacggagaggtccctgcacttctcgccgacgccggcggcgcacaagcagcacgaggagcactacccctacccgtactacggcgcgccgcagccggtgatgagctaccacatggcgcagccgacgacgagcgtctcctactacgcgccgcggccggagccggcgtactccatgcagcagcacccaccgccgccggcgtactccgcgccgccgccgcagcagcagcaatacccgccgtcgtcgccgtcgccgcagccgcaggcaatgcagcagcagtggtcgccgtcgtacctgtacatgccgtacccgcactcgtcgtcggacacctactaccgngactactac

SEQ ID NO: 21813 - DNA, 534 bp, Oryza sativa
  Clone ID: uC-osflM202040c03b1
aacagcttgactgcttatggttttgaccttatccgtggagccaagactcttgaccttatcaagagtgctggtttcccctctggaaagtacctctttgccggtgttgtggatggacgcaacatctgggctgatgatctcgctgcatctctcactacccttgagtctcttgaggctattgttggaaaggacaagcttgtggtctcgacttcctgctcactcatgcacaccgctgtggatcttgtaaatgagaccaagctcgatagcgagattaagtcatggctcgcttttgctgcccaaaaggtggttgaggtgaatgcccttgctaaggcattggctggacagaaggatgaggcttactttgcagcaaacgctgctgctcaggcctccaggaggtcatcacctcgtgtgacaaacgaggaagtccaaaaggctgctgctgctctgaaggggtctgaccaccgccgtgctaccaatgttagcgctagactggacgcacagcaaaagaagctcaaccttcagttcttctacaaccac

SEQ ID NO: 21814 - DNA, 514 bp, Oryza sativa
  Clone ID: uC-osflM202040c04b1
agctgattgagagagagttgggaagaattacacaagaaatttagagaaatagtactagctagctagcaagaatatagatatataatgtcgatcaagcactgcgagcaacacaaggattgcgagcggcagcgcctgtaccggcgttgctgcgcggccatcttcggcatacttctcctcctcctcctcatcgtcctcatcgtctggctcatcctccgccccaccaagcctcgcttctacctcaacgacctcaccgtcgtctgcctcaacgtcaccaccggtggttcctacgccggcgccaccgactcctccggctacttctccttcctcaccgtcaccatgcagaccaccctcgccgcccgcaacggcaacgagcgcgtgggcatctactacgaccgcgccgacgtgtacgccgagtacaagggcctccgcatcaccgttgccacgtcgctgcccgcggtgtaccagggccacccggacctcaccgtctggtcccctttcctctccggcaacaacg

SEQ ID NO: 21815 - DNA, 208 bp, Oryza sativa
  Clone ID: uC-osflM202040c06b1
gaagtaagcaaaagggggagagagacaagtctgacagggagatgaaagaaatcagacggcaaccttcttagcctcctcctctccactagcttcttttcccttgccatgagttccctagtagaccaggactagcaggcaagagcaagcagctggaagagtattagcagcatgcagctctagagaccacaggcacagaggaggggagagc

SEQ ID NO: 21816 - DNA, 426 bp, Oryza sativa
  Clone ID: uC-osflM202040c07b1
ttttgctgcacattactatacgactacatcaggtgtgtgactatacacgatgcgatgcacagagcatgcataaacacgtatgtataagacactgagctatattgagggttcttagaggtactggagatgcgcgcctgccatattctcttctatactcgaccttaattcactgtatataagcagcatgagcgtacttcttattaacttctaggatgaagatatttaagatagaaaatagttaataaggactaaactcctcaagggtggacaagctatgcatcgagagcattgaaacaattgtagcccaattgcaggaggttgctatcatgagttgccgatgcttatgttccctggatgacagctttcttgagcagaagcagcccatggtagctctaagaaacttgcacattcacaactttttttatt

SEQ ID NO: 21817 - DNA, 550 bp, Oryza sativa
  Clone ID: uC-osflM202040c09b1
tgcctccgccgccgcagcctcctcctctcgccatctcccgtcctctccttcaagtcagctacctgcttaatcaaccatgggtaaggagaagacgcacatcaacattgtggtcattggccacgtcgactctggcaagtcgaccaccacgggccatctgatctacaagcttggaggtatcgacaagcgtgtgattgagaggttcgagaaggaagccgctgagatgaacaagaggtccttcaagtacgcgtgggtgctcgacaagctcaaggccgagcgtgagagaagtatcaccatcgatattgccctgtggaagttcgagaccaccaagtactactgcacggtcatcgatgcccctggtcaccgtgacttcatcaagaacatgatcacgggtacctcccaggctgactgtgccgtgctcatcattgactccaccactggtggttttgaggctggtatctccaaggatggccagacccgtgagcacgctttttttgctttcactcttggtgtgaagcagatgatctgctgctgcaacacgatggatgccacc

SEQ ID NO: 21818 - DNA, 443 bp, Oryza sativa
  unsure (1)..(443): unsure at all n locations
  Clone ID: uC-osflM202040c10b1
gaaagattaacttgatgttgtaatttactaagcatgagccggaatttccgtaacaaaagattttatgaaattatgctgcaattctgtatgtctgaaataacaatatatctaagctttttgcttctgggcatatgcaggcccaagatttcaggcaggcaggaacacaggtaaggagaaagatgtggctgcaaaacatgaagatcaagctgattgttcttggcataataattgcgctcatccttatcataatcctgtccgtgtgccatggattcaaatgcaagtaggcataaattgactcattcaactgcacttacagtactgcttgcttggggcaaaaagggggggaaattgggaggtgttgnggttctttctagtttgtgctctggctggttacggcgcctgagtgtttacgctgtcgtgtctgttgaatgctggttggtgac

SEQ ID NO: 21819 - DNA, 361 bp, Oryza sativa
  Clone ID: uC-osflM202040c11b1
gctggagcagtagcacaagcagctgagcttgaaggagcatagcgaggtagacatggccgccgccaccatggccctctcgtacccggcgctggccggcaaggccgccgcgaaggtgttcggcgaggggcgcatcaccatgcgcaagtcggcggcgaagcccaagcccgccgcgtcggggagcccgtgttacagacccgaccacgtactctacctctgtcggctctccagcgagccgtctagctacctgaccggtgagtgcctgcgatagttccgattgcacaccggggtaatttgactcattcaagtgccctttcagtactgcttgcttggggcatataagggggggaaattggagaggttg

SEQ ID NO: 21820 - DNA, 367 bp, Oryza sativa
  Clone ID: uC-osflM202040c12b1
gtccaccaagggggcccatggtgtctgcatcctgggcgagtgggacgagttcaagaccttggactaccagaagatctttgacaacatgcagaagcctgcattcgtctttgatgggcgcaatgtgggcgatgccgagaagctcagggagattgggttcatcgtctactccatcggcaagccgcttgatgcctggctcaaggacatgcccgcgggtgcataataattttccatattccacacctgaacctcatagctctctacactctgctggtgctgaagagagtctgcgtcgaacaggaatttggttgaccatcattttttataggttgttggtcatttttacatacaggaggaggtaccatttttg

SEQ ID NO: 21821 - DNA, 583 bp, Oryza sativa
  Clone ID: uC-osflM202040d01b1
gtgatgggttcatgtcgtacctggcgatgaagacggacgctgctttaggggaggcggcgctatactacccttttcgactcctttctatcagtgctggtcgtgttttcttttttttttttcttctttttttttacagttttttttttatatttttttttttttttatttttatcttttttctttattttttatttttattcttttttttttttttcttatttattttccctttcgtttctattattatttttttttttactattttacttttatttttttcttttcttttttaatattattttttttttttttctttctttttttctttttttttttttttcttttcttctttttttttccttttatcctattttaatttttatctttttacttctttttatttttttcttctttattatttttcttttttcatatatttttcttctttttctttttataatcttttttttttttaaatttaatatctttttttcttttaactttatatttttcttatttccctattttttttttctttctttttttacaattttcctttttctttatttttttttctcttttt

SEQ ID NO: 21822 - DNA, 359 bp, Oryza sativa
  Clone ID: uC-osflM202040d04b1
atagtcgttctacacctactacttcttcccccgatcggatcggaccggctcctcctgctgcgccgccgccaccgccgccgcagataggagaagatggccgcacttgataccttcctctttacctcggagtctgtgaacgagggccaccctgacaagctctgcgaccaagtctcagatgctgtgcttgatgcctgcctcgccgaggaccctgacagcaaggtcgcttgtgagacctgcaccaagacaaacatggtcatggtctttggtgagatcaccaccaaggctaacgttgactttgagaagattgtcagggagacatgccgtaacatcggttttgtgtcagctgatgtcggtcttgt

SEQ ID NO: 21823 - DNA, 372 bp, Oryza sativa
  Clone ID: uC-osflM202040d06b1
ccctgattcaaaagttatcgagcaacaggaagctgcgcgcaatggaactcggaaacctgatgcatcaattgctagtaaagggcatctaagtgtatctgatcttcttgattatataaatcccaatgaagaaagcaaaggaagagattctgaatcaagtaaaaggaggtactcaagcataaaggtcctgtcaaattcgaatggaggctccaatgtagcaagtcctgaggtatctccaagagactctacttctgcaaatgcagacgaggacaagcaactcatatagccatcactcgacaactcatgttaactttgttgctgaagctgaaatttagcaaaacctctgagatctatgagcatgttgatatcatggag

SEQ ID NO: 21824 - DNA, 406 bp, Oryza sativa
  Clone ID: uC-osflM202040d08b1
ttttaataattttagtttttttttttttggctttagatatattcccaatccccaacctcccaataatccgatctctcccagttctgttcggatcaaggctgtgtcgatcgcaaaaaagaaaaaaaaaaaacaatttccttttggggtggttcatctgttgatcacttctttgtttcccgcgttttgttggggattcgattttcgggttaagattttctacacgatggccttgaacttggctcagagcgccgcggcggcagcgtgcttcgcgaccgccggtgatgcgcggcgagctgcttcggtggtcgccatgccgtcgtcgtcgtcgtcggccacgacgagcctgaggatgaagaggcaggcggcgtgcgagcctgtggcgtgccggtcggtggccaggcacgtg

SEQ ID NO: 21825 - DNA, 395 bp, Oryza sativa
  Clone ID: uC-osflM202040d09b1
ctttgcctgagtcgagtcgcctcccccaccgtcggccaaccatgctgccgccggccgtccgcctcgcggcccgccgcctcctagggctcgcgacctcctccgcctcggaatcggccgcggcgcgacgcttgtcccgttctccgatctcctacgccgccgcgggctgctcctccaggctgttctccacggcgcttaactaccacctcgattcgccggaaaacaaccccgacatgccgtgggagttcacggaggccaacatgaagaaggttaatgagatattgtctcactatccaagcaactacaagcagtctggtattattccaatgctagatcttgcccagcagcagcatggtggatgggtgccagttgcagcaatgaatgctattggtaagatc

SEQ ID NO: 21826 - DNA, 74 bp, Oryza sativa
  Clone ID: uC-osflM202040d11b1
atagaaaataaaaataaaggcgaggaggtctcgcgagctaccaaaccctagggctcgattcggtggcggtggcg

SEQ ID NO: 21827 - DNA, 530 bp, Oryza sativa
  Clone ID: uC-osflM202040d12b1
caatggcgaggcactactgcatcatcggcctttggcttcttcccaggcattgttcatccccgattacacccaccaaaatatacacaagttgggatgcccagcattgtgaaccccactgatgcatttggaagagtaatccatgctccattaggaactaacagtgcattcaaagaacctaaacatcagatgcccaacaatttgaatggagagttccaggacgtcattgagatgccttttactcatgaccatcatggatcaaatgatcaaccctgagattgattccacaactgaagcaagagatcaatatgtgccatgggctttcagcaaaactgtgatatatgaggcatgttgatatcatggtactagctcacagctgatcactgaagtataagcatccaaaatgcttagttagtgctatttttctcatgttcatagcagcaattgacctcctgtggaagcctctcttggatgttccatttgctgttatagaaagttgggagataaaaaaaaaagatgttcacatgagatct

SEQ ID NO: 21828 - DNA, 488 bp, Oryza sativa
  Clone ID: uC-osflM202040e01b1
cagctgtggccgcgggaccgcgtcctgcaggcgtgtcacgcgttcgcccagaacaactaccacacaaagcatctcgcaaagattttgatccatttggtttggtgcttgcaagagtgcatggcagagtcttctcacgcggcgtataggaaggctatcaatgctgcatatatatcatccatatttctcaaattcattattgaaaatgcaaagactgataattggcaagagctaagtcttgaaattgacaaggatgagaaggggctggaaaattttccttctgaacaaagcgtggaatattttctgatgagaggtgttctgaactacattggtagtgaagatggaagtctggagtcatgctacctgcaccatgaacttctaaacttgatgctagtacttatgtcaactcaattgtgttctggaccatctcctgaaccaaaagatgtgcattctttcattgatgcggctatgcttcaggacagttccatagt

SEQ ID NO: 21829 - DNA, 284 bp, Oryza sativa
  Clone ID: uC-osflM202040e02b1
cgaatcgctacaaaccctatccactgccgctggactcgtcgccgtgattcacctcgtgccgccgctcgcgcagtgccgacccgccccgccccgccccgccccggcgtagtaggagatgaagcggcgaaaaatcgccaaatcgacagcaagccgggggagcaggtccggtgtgaaatccccaaatccacggagcagagcagcgaatccgagccggaccggcggcttcttttctgatgaactccgattgggcagatggacttgttaccacggggaggaggaggagg

SEQ ID NO: 21830 - DNA, 409 bp, Oryza sativa
  Clone ID: uC-osflM202040e03b1
gtggtctcatcgctagctgccatctcctggtgagatccatcgtgacgcccggcacgacgacgatggtgtcgcggaggttcaagcccgtggaggagtgcagctcggatgggaggtcggagcagacggtggccgtcgacttcgacggcacgctggtcagatcgcggagcgccttcccgtactacctcctcgtcgcgctcgaggccggcagcgtgctccgcgccgtcgtgctgctgctgtccgtgccgttcgtctacgtgacctacattttcttctccgagtcgctggccatcatcacgctggtgtacatctccgtggcggggctcaaggtgaggaacatcgagatggtggcgcggtcggtgctgcccaagttctacgcggaggacgtgcacccggagagctggagggtgtt

SEQ ID NO: 21831 - DNA, 468 bp, Oryza sativa
  Clone ID: uC-osflM202040e04b1
cattttgctcatgtgttactgatgagacactgcgtgagatagctaattcatgtccgaatctctctgttcttgatgcatctaactgcccaaacatttcatttgagtcggtaaggcttcctatgttggtagacctgagactactaagttgtgaggggatcacgtctgcttccatggctgcaatagcttacagtcgtctgcttgaggcattacaacttgataactgcagtttgttgacatctgtgtctttggatctgccacatctcaagaacataagtcttgttcacctgcgcaagcttgctgagttgactttgcgaagtcctgttctttcttacattaaagtttccagatgctcagtacttcatcgtgttagcataacatcaaatgctcttcagaaattggtgttgcaaaagccagatagcctatcaaggtttgtacttgcatgcaacacctttatcgatgtctatcctt

SEQ ID NO: 21832 - DNA, 520 bp, Oryza sativa
  Clone ID: uC-osflM202040e05b1
ggggaggggaaagtgcacaaaactatcctcctcctctctgtctcctccactcccccacgccaccgctcgccgccgccgccggctcagcttctcctcctcctccgccgccgccgccgccgtcctcgggtgaagcagcgcagttcggaggagggaggcggagggggtcttgttcgccaacctagctcgctcgctcagctgccgagctcttcttcgctggtctttgagagatgaaattttagtgatatcagctgctagaggatagactgaagtaactttcaacaattatagaatgggctggttgcctgttgttcatcgacaagatctgcatccgtcggagcaccagtctatatctatcatcaacaaaatccggcctctacaattgttgcaatagacaaaaatctggatacatccactcctgacacttaccgagcaccacctacacctttgccttatgatgttggtctagtgttgaaagacaaccctgatttggagaagacaggcatcaagaggaaaattcatg

SEQ ID NO: 21833 - DNA, 341 bp, Oryza sativa
  Clone ID: uC-osflM202040e06b1
catgtttacacacacactcacgctcacgctccactacagacgcactgtacacagttgattattagctagttgggtttctggcccggccgccggcgagatgggcaaggacaagcaccaccgcgactggatcctccggcggtgctgcggctccatcgccgcctgcatcctcacgctcgccgtcctcgtcggcttcatcgtgctcgtcatctacctcgtgattcacccctccaagccttctttctacctccaggacgttcagctccgcaacatcgacctctccgaccctgccatctccctcaacctccaggtgacgatcgcgtcgaggaacccgaacgacaggg

SEQ ID NO: 21834 - DNA, 406 bp, Oryza sativa
  unsure (1)..(406): unsure at all n locations
  Clone ID: uC-osflM202040e07b1
gtctggccggtatccaggtcgggaacgcgtgctgggagctctattgcctcgagcatggcatccagcctgatggacagatgcccggtgacaagaccgttgggggaggtgatgatgctnttaacaccttcttcagtgagactggtgctgggaagcatgtcccccgtgctgtcttcgtcgatcttgagcctaccgtgattgatgaggtgaggactggtgactaccgccagctcttccaccctgagcagctcatcagtggcaaggaggatgcagccaacaactttgcccgtggtcactacaccattggcaaggagattgttgatctgtgccttgaaccgattaggaagcttgccgacatctgcactggtctccagggccttccttgtgttcaacgctgttggaggaggaa

SEQ ID NO: 21835 - DNA, 264 bp, Oryza sativa
  Clone ID: uC-osflM202040e08b1
gtgtccaatcttaatgatattgcaaaccaggcagatgatctcttggagtcaatggaatcaaggcccacaattcctgatcgaaaacttctcgctagactagttatcgtaagagaggaggctcgaaatatgatgggaggtggcctgttagatgaaagaaatgaccgtggtttcacaacgcttcctgaggcagaggtgaacttcttgagcaagctggttgctctcaaacctgggaaagcattggagaggatgatcaaggatgttctg

SEQ ID NO: 21836 - DNA, 150 bp, Oryza sativa
  Clone ID: uC-osflM202040e09b1
gtaaaaccattctccaaatggacactttggtttccagcttgtgtcagcagtaaagcttcatgatggaaagaactacatttctcttttgagtgctaccattggtctaaagaactatggccctttgtttgagaagatgcctgctgtcattgt

SEQ ID NO: 21837 - DNA, 276 bp, Oryza sativa
  Clone ID: uC-osflM202040e10b1
ctgactctcttcgccgcagcgcacaccaccccaactagctcctagccattagagccggattcttttctggacggacaaggcggagagggaagaagaaggattgtgccaaccatatgcatccttctggaattatctagttccttaatctttcgtccagcctggcagatatcaagaggtcaggcacatctcgcacctctaagtgggtgtgggtttgcaactactctgtaaccaacttaacctcgcctctggggaaaagcccgtcttacatctggagac

SEQ ID NO: 21838 - DNA, 157 bp, Oryza sativa
  Clone ID: uC-osflM202040e11b1
atcgagagcgtccgcccttactattttcattgcgggttgctgtcatccattcacggggtacgctattgcaaacggacagagatgacagggcagaagagagcttgaacaaggcatttctctccccttggaattatgtaatagatgaatctttcgtata

SEQ ID NO: 21839 - DNA, 514 bp, Oryza sativa
  Clone ID: uC-osflM202040e12b1
ttttattagcattggccaaagccgtcgccttactggttgttgccatcgcgccatggggcgtgttagtgcaattggaatgcgacgcccccgacaagaagagcttgaccaaggtcctcctctcccctgtagataagcgcttggatgaggcagctcaagccatcaacaagggcgccgactacgatgcggctgctgccccaccagccaaaaaggatgaagaggaacctgacacgattgagctgccaatctctcacatacctgatctatgaatggaccaacgatatgagaggaaagacaactgaacctcactagcctactaggccgcaggctatgctgacctctgtgacatcccagcttacaagtataaggtgactagcgaacacttgaacgcgtgtagtttacaagacatcacgttatgagcgagacgccaaccataaagtaatggctactactacatctccggaattggtcgactatcggacacgtaccgagtatcaacggttatttatgaataaat

SEQ ID NO: 21840 - DNA, 139 bp, Oryza sativa
  Clone ID: uC-osflM202040f04b1
atccctcctaatgtggaggcactactgcatcatctgggttttttttatataccagacaggggtcatccacaattacacccaccaaaatatacacaagttgggatgcccagcattgtgaaccccactgatgcatttgtaa

SEQ ID NO: 21841 - DNA, 487 bp, Oryza sativa
  Clone ID: uC-osflM202040f07b1
tgtatcttgagacatgtacaaagtacaaacgccttttcctcaagcactgtaacaaaatcatcttcaatcaagttgccaagttctaattctaatcatgaactgagctcattgagctctccaactgaacatgtgattgctgatggaagtaaatcacttcagctcgtccctgcaagcaagattaatgaaagcgttctatttcagatttatttctgaacctcccttcattgcaaggattgaaacccagtagcccaaggaagcgaagaagaatatcagaatcaatggagagttggtctcctttgcaagcatattcatcagactcacaatcaagaacaagcctcacctacggaaatattctggctgaaagaaataattgtgtcccagcaactacatatgctttggtgctactacatgtcataagacactgttcattgtccattaaacatgctcaaataactgcccagatggattcttttgccattccatatgt

SEQ ID NO: 21842 - DNA, 312 bp, Oryza sativa
  Clone ID: uC-osflM202040f08b1
ggtagccgtgagccccacaatgcatggacgtggagtgctctttcactgtgaccatgctttctcccgtcaaggagggaagttataattctaatctgaaactgagctgattgaactctccaactgaacatgtaagtgctagtagaagttaaatacttcaacttagcccctgcaaagcaagattaatgaaagcgttctatttaagatttatctctgaacctcccttcattgtaaggattgaaacccatcttcccaaggaagcgaagaagaatatcagaattcaatggagagtcagtcctctttgcatgcttttta

SEQ ID NO: 21843 - DNA, 161 bp, Oryza sativa
  Clone ID: uC-osflM202040f10b1
ctgcttccacgcacgattaaaagctgcccctgtgggtgctgcagactgcagccctggaagaccagcgcctgaagcaagaagcgaagaatcaaacgagagcctagcagcgtagcagatcgatcgatcgatcgatatcatggaggcgcgaggaagcagaggaa

SEQ ID NO: 21844 - DNA, 203 bp, Oryza sativa
  Clone ID: uC-osflM202040f12b1
ctcgattctgatgggccatacccttcgcgatacgggttcttgtccatgtgctagtgcgtcgcgcaatccaatgcgtaatcactagcctcccctacggggcgttcaccaaccactgtccctgcaccctcacctagtggtttggtaattgggctgaccgcttgaacgattccatccaccgatccaccttcccgttgctgcggaga

SEQ ID NO: 21845 - DNA, 345 bp, Oryza sativa
  Clone ID: uC-osflM202040g03b1
ggcaatcagaggtgcaggaaaaaattccaaatccggcaaggttttttccacaatttcttggagctggtcattcaaatctgcgcaagctaatagacaatcctcaatgcattcaagtgatgcctctggatatggttaccatggcaaaacactagagaaactttatgaagaggagcaaaaactctacaagttagtcaaggatgaagaatttgcaaggctccagtacagaaagaacacctcgttgctacaaagactagaatcaggtgaccatgataaattgcatgcagagaaagtgcgagataatatagaggaattgcaagctcggataatctctttggaggaagctgt

SEQ ID NO: 21846 - DNA, 69 bp, Oryza sativa
  Clone ID: uC-osflM202040g04b1
ccgtccagattcccgatcagacccacagcagtccagagcctccatgaccaacaagaaaaaaccgcaaaa

SEQ ID NO: 21847 - DNA, 211 bp, Oryza sativa
  Clone ID: uC-osflM202040g06b1
cggtgcgtgggctagggttttatcatgtgcggttttgcactgcaataatgaataaaggacaccatgtaaataggcagctgtgactttcttcccagtccttagacagcgaaggttgttgtttgagtgactagtgttgtgttaagcaccaaaatgttggttgttacagacttacatagtatatagatctttataagttttctgggttggtcga

SEQ ID NO: 21848 - DNA, 60 bp, Oryza sativa
  Clone ID: uC-osflM202040g07b1
aatctacactccgactgtcacgttcgtatgcgtgattcacagcaacttggtcaccccccc

SEQ ID NO: 21849 - DNA, 94 bp, Oryza sativa
  Clone ID: uC-osflM202040g10b1
gatagtgctacgcagcatacctacctagctgtatcagcagtagtgtcctcggctccagttctagccatcgtctagctagacatcaacctttaca

SEQ ID NO: 21850 - DNA, 493 bp, Oryza sativa
  Clone ID: uC-osflM202040g12b1
ttttgtgctattcaacgcaacgcagaactttgatggtgcaaatttcagcagtggggagattcttgcaattcattggcaatttcctttatctgttcgccacgagcacctttcttggagttgctgctggacttctcagtgcttatatcataaaaaagctgtacttcagcaggcattccactgatcgtgaagtttctattatgatgctcatggcttacttgtcttacatgcttgctgaattgcttgatttgagtggtattcttacagtgttcttctgtggtattgtaatgtcgcactatacctggcataatggaacagagagttccagggtcacaaccaagcacgccttcgccacattgtcatttatcgccgagacatttctatttctttatgttggtatggatgcattggatatggagaagtggaagattgtcggtgaaacattcaacccaatgaaatctattgctgtgagctccactattttgatcttggtgct

SEQ ID NO: 21851 - DNA, 394 bp, Oryza sativa
  Clone ID: uC-osflM202040h03b1
gattcgtggccctgcattaaaaaattccaaatccggggatggttttttacacaatgtggtggagctggtcattcaaatctgcgcaagctaatagacaacactcagtgcattcaagtgatgcctatggatatggttaccatggcaaaacactagagaaactttacgaagaggagcaaaaactctacaagctacccaaggatgaagaatttgcaaggctccagcccagaaagaacacctggttgctacatagactagaatcaggtgaccatgattaatcgcatgcagagatagcgcgagataacatagaggaattgcaagctcggataatctatttggaggaagctgacggcttgacatgtgtggacatatcaaagctcagagatgaggagttata

SEQ ID NO: 21852 - DNA, 71 bp, Oryza sativa
  unsure (1)..(71): unsure at all n locations
  Clone ID: uC-osflM202040h04b1
atngtggtgctctgatctggttgatcgatctcgtcgtcggcgatggagaagttgctttcctgctccggcgc

SEQ ID NO: 21853 - DNA, 116 bp, Oryza sativa
  Clone ID: uC-osflM202040h05b1
gcgctagcggcagcaagtgttcactgcgttcttcttggggatttatctttcttggtgtcgtgatctgtagcttattagcggccatgtgcggcggagcaatcatctccgggttcatc

SEQ ID NO: 21854 - DNA, 136 bp, Oryza sativa
  Clone ID: uC-osflM202040h06b1
cccgtagccatccatggccaccaccgccctctgatccgatcgatactgatcagccagtagctatgctgggttcggaccagctcgagcaccgcccggcgccgtcggctccccgcgccgagccggacgatgtcgccga

SEQ ID NO: 21855 - DNA, 608 bp, Oryza sativa
  unsure (1)..(608): unsure at all n locations
  Clone ID: uC-osflM202040h10b1
ggtagcatctcccacatagctttgttagttagttggatttttttatccttttctggggttttacccattttctctttatttattatctcttttattaattattttttttttttttttttattttttatttttattttttctctatttttcttttttttttatctttttatttctttttttttttttttttttatttttttctttntatttttttattttttttttcttttctattttcttttttcttttttttttttttctttttttattttttttttttattttttttttttttttttttttttttttttttttttttctatttatttatttttttttttttttattttctttttattttttttttctttatttttttctaatttttttatttattttttttttcttatttatttttttctttttattctatttttttctttatttattttattattttttttttttcttttttcttcttttttttatctttttgtattttttcttatttttcttatttcattttttatatttcattttatttttttcatactttcatcttattttttttattattatatttttttttttcttccatttattttttt

SEQ ID NO: 21856 - DNA, 185 bp, Oryza sativa
  Clone ID: uC-osflM202040h12b1
ggtggacctcatatgcggtacatcgacaggtggggtgctttctatgactcttggaggcaagcagataactctggatcaatgtgaagaaatatacacaaaacttggcaaacttgtctttgctgaacctgcccccaaggatgaagcttcaacgtggaaggagaagattgatcatctctctaaaagtt

SEQ ID NO: 21857 - DNA, 177 bp, Oryza sativa
  Clone ID: uC-osflM202041a01b1
gggaatcgaccacgtgctgattccttgcgcggagcatggtttgttgaagttgttcgacctgacccccgacctgctccagcggagatgcctagagatgcggacgtggcgccgcgccttcctgcggaggttagtcaatttaataatatcaggtatcagtggcctacctatgatgcttct

SEQ ID NO: 21858 - DNA, 403 bp, Oryza sativa
  Clone ID: uC-osflM202041a05b1
gatttcctttcctcgtcgcaatccacgcacgcacaggcgcctccgcctcctcacctcctcggtcgcagtcagcagcagcatcagcagcagaagcagatgggtggcctctccgtaatcgcgccgccggcgggcgactcggcgtccccggcgcaccgccgcgcgcgccgcgcgttcctggtgtcgaactacatgatcctcggcgcggcgtccgggtgcggcttcctcacgctctcgctccgcctcgtgccctccgtcgacggcttcctcctcatcctcctccacgcgatcaccgtcgccgccgccgtcgccgggtgcgccgtcatcgcggcgcccgacccgccgagggggcgggtctacaccacccacatggcagggaccgtcttcgtctccatcctccagggcg

SEQ ID NO: 21859 - DNA, 528 bp, Oryza sativa
  Clone ID: uC-osflM202041a09b1
ctttcccaagacaaaatattatatgtggatgatggttcgacagcagtgcctcatgacaaccaggaagctgaacgcagggaggaggaagctcgcaaagctagggagatgactttcagaggcgatgatgtgtcaagttccgtagatcatgatgcccaagtgacaaaacctctcccagaggagcaattgaagagcatggatagcatatttgaaggcaccacaaatttatcaaacggaataacatttcgaggcccaggagtgaatgaatcaactgctgctagggagcttggggctattccagctgatgcatcttcccatccaaacactagcactgtttcagaaagcaatactgatacagctccggtaaatttggatggcaaccatactggatcagatcaagctaattcgacctctttgaaaggtcaacaagagcagcaagcaaattcaacggatgtgttgaacaaccagataaaactcttcattgacctcacatcagctgctgagttgaattatcgaccaaatgggaccctg

SEQ ID NO: 21860 - DNA, 277 bp, Oryza sativa
  Clone ID: uC-osflM202041a10b1
gatgagttgaccaccaccaccaccaccacaccaggacagacgggccaatccacccagccgtatccacttgcctgcccaccgcgccaaattcccacccgctcctccgccgacgccgccgccgcacgtgcgcctccacctcctctccattgccgccgccgcggcacggtcaaccacccccacccttcggcggagtcgcggaggaatgcggggggggcaatagaaaattcgctcgctagcagttggcatggcggattagtttaatcttgaagtccttggt

SEQ ID NO: 21861 - DNA, 177 bp, Oryza sativa
  Clone ID: uC-osflM202041a11b1
cgtgaggatcaccggcgtgcccttcgccgccggcgagtacccgggtgaggagctcgtgttcacctacggccgcgacccgttctggttcgcggagcaccggatgctcagccgcgaggcgctcttcaacaccagctgcggcgctctgttgtccaaggaccagtacatcgaggcaccgac

SEQ ID NO: 21862 - DNA, 304 bp, Oryza sativa
  Clone ID: uC-osflM202041b01b1
cgtagtagacgtcgtcgagccatggtggccatacctgggcgggcagcgctacggggcccgagctgcctagcctgcataacaaagacaggagctccatgttcttctgctgagcagacactaggctgatatgatatggcctgaacttgtggatgatttggtagtcttgattatgtcgtgtttgcttaagtaccagctggggggtggattgcttttgagcagggacggcgcaggtggcgaaagaggactataaagccatattccgtaagttcgagcgtgacatgagccaagactaggctaacggaaa

SEQ ID NO: 21863 - DNA, 401 bp, Oryza sativa
  Clone ID: uC-osflM202041b03b1
cggttgcgtgggctagacctccgaaccaaaccgagggcaagagcatccgattcgccgccgccttcgtcttcctcgcagagatggcggacgtggaggagtaccgttgcttcattgggaatctgtcatggtccacaactgatgaaagcctcaaggatgcctttggcaaatttggcaacctcactgaagcaaaggtggtttttgacaagtattctggccgttctcgtggttttggctttgtgacctttgatgagaagaaagccatggaagatgctattgaaggaatgaatggattggatttggatgggcgggcgatcactgtcgataaagctcagccacaaggacctggtagagaccgtaatggagaccgtgattatgatcgtgaccgtggatctcgttatgac

SEQ ID NO: 21864 - DNA, 463 bp, Oryza sativa
  Clone ID: uC-osflM202041b04b1
gctgtcgcaacggatcctggtggcccggccagatcctcagcgccgacgagctcccggagaactgcgtcgtcccgccgcgctcctccggcacgcccatcaagctcctcggccgccccgacggcagcattgactggcataatcttgagaagtctaagcgtgtgaagccatttcgatgtggagagtatgaggaatgtatagaaaaagcaaaggctcaagctcgccagcataagagggcctacaatgaaggaaagtatgtccgcagggaagatgctatcatgcatgctctagaacttgaaagggctcgctttccaaatgaagatgatactgatgaacatgacactagtggcctattatttgaatcccaaaacagctattgtgcaaagtccaaaaacataaatgagctcaatagaaaatcgtctcgcactgcaagggatctggatgatattgaagaggagtcagctaa

SEQ ID NO: 21865 - DNA, 389 bp, Oryza sativa
  Clone ID: uC-osflM202041b05b1
gtgtgcttctcctccccctctttaccttttcctcctcggttcggttccgtggttcgtctagggtttagtgggttgagatggatccatcggatgtcgagaaccattacttcggcgacgactccctctagggacttgccctaccaccacatactgttcaccatattccacactcaaacccagattaatcttgccatacttatactactcgacaacacgatcatcgtatttcctcgcggcgataaaatcatggataggttcaagataaacaattttttcaagttcccaattgtcatgggaatgcgccctgactgcttgattgagttgatcttaagcagagagagatttataagcttccctatctcgtctggtattattcctgttatttgatt

SEQ ID NO: 21866 - DNA, 403 bp, Oryza sativa
  Clone ID: uC-osflM202041b06b1
ccataccctagccgccgccgccggcgtactcgagagaaacattagcatccatggcgggcaagggcgagggtccggccatcggcatcgaccttggcacgacctactcgtgcgtgggcgtttggcagcacgaccgcgtggagatcatcgccaacgaccagggcaaccgcaccaccccctcctacgtcggcttcaccgactacgagaggctcatcggagatgctgccaagaaccaggtcgccatgaaccccatcaacaccgtcttcgatgccaagcgtctcattggcaggagggttagcgatgcttctgttcagagtgacattaagctctggcccttcaaggtgattgctggacctggtgacaagcctatgattgctgtccagtacaaggttgaggagaagcagtt

SEQ ID NO: 21867 - DNA, 222 bp, Oryza sativa
  Clone ID: uC-osflM202041b09b1
ctatacggaggagtgcacgccgcggtacatcacggtggtacgggaggagctcatggcgcggaggacgctgaacgcagcgaggaggaaactggcgcagctagggagatcactttcaatggcgactatgaggcaagctccgtatacgatgacgacgacgttaaccaatatgacaaagttgagcaatcgtatagcatggattgcatatttgttggcaccaactat

SEQ ID NO: 21868 - DNA, 521 bp, Oryza sativa
  Clone ID: uC-osflM202041b10b1
ctttttgtcaaggaatatattgagagaggaaatgcagcccggagtacagggtcaacaggggccaatgaagaatcatcaaggtcacatgctattctgcagctggctatcaagaaacatatcatagtaactgataccaggcgacaaagagatcgagatgctaatgaatctaaaaacacaaaggctgtgggaaaaatttcatttattgatcttgctggaagcgagcgtggagccgatacaacagacaatgataggcagacgagaattgaaggagctgagataaacaagagcctgctcgctctgaaggaatgcattcgggcccttgataacgatcagatacacattcctttcagaggaagcaagcttacagaagttcttcgtgattcatttgttggtaactctaggacggtgatgatctcttgcatttctccaaatgcaggttcatgtgaacacacattaaataccttgagatatgctgacagggttaaaagtctctcaaggggcagcatacaagaaaagagcag

SEQ ID NO: 21869 - DNA, 353 bp, Oryza sativa
  Clone ID: uC-osflM202041c03b1
gcgccaccaccaccacggccaccggggcgacgacgacgacgacgatcgccgccgccatcccgctcccgctcccgcctacggccacgactcagcctctccgccgggtccctacggccaagcgcctcctccggctgatccctacgctcgccacccgccttcccacgactacgctcatcctcctccggcgtatgggggagggggctacggtaacgtgggccacgtttcccacgaggtctccggccaccagaggcccacgccgcactacggtggatccgagtacatcagccccggccaagagacccggcccttaccacggtgggggaggagccccaccggtgacccacaggatctac

SEQ ID NO: 21870 - DNA, 534 bp, Oryza sativa
  unsure (1)..(534): unsure at all n locations
  Clone ID: uC-osflM202041c05b1
ttgtctttgctcctgaatatatagctggcttctttctttcttcctctctccctgtgtggcacgcgcctccaatcgatctcttcggtgagtagacgcatcgagatcggggggaaatgtcggtccagtttacatcggagcatgtttgctatgtcaactgcaactattgcaacactatccttgtggtgaatgtgccaaacaattgatcctacaacattgtgactgttagatgtgggcattgcacaatggtgctctccatggatcttgctccttttcaccaagcacgcactgttcaagatcaccaggtacagaacagaggatttcaaggtaataactttggaagctatgacatagcttccagaaatcagaggacatcgacagccatgtacccaatgccaaccagtcagcagcaagtgtcacctatacgtccccctgagaaaagacagcgtgtcccatctgcatacaacagattncatcaggaggagatacagaggattaaaacccagcatcctgagattagccacagggaggcattca

SEQ ID NO: 21871 - DNA, 197 bp, Oryza sativa
  Clone ID: uC-osflM202041c07b1
cttcgccccgacgcctcgctagggtttttgcctctccctccgccgccgccgctgccgcgaggagaggagggggggagagcacccagccggcgagccagccatgtcgctgcgcccgagcgagcgggtggaggtgcggcggaaccgctacaaggtggcggtggacgcctaggaggcgaggcggtgcttccaggacaaca

SEQ ID NO: 21872 - DNA, 430 bp, Oryza sativa
  unsure (1)..(430): unsure at all n locations
  Clone ID: uC-osflM202041c09b1
cttttatctccctctcctcgcatggcggctcccaagcccatctgggtgcgccaggccgaggaggccaagctcaagtccgaggccgagaccgccgccgccgccaaggccgccttcgacgccaccttcaaggccctctccgcatccgccgccgacgaccccgaccaggacgacgacctccaccgcccctcttccccggcccaagcctctcgggacgcctactccgacgcagacgacgacgacgacgaccgcccccatgcccctcccggtccagtcgacccctccaagtcctccgccgccggccccggcatcgcttggtggttccgctggtgcccccgccaccttcaccgtcgtctccaaggaccgggactcgcgcagggtcccaaccggcggcgcgcgcgtccgcgtncgcgtctccccggcagctggcgtc

SEQ ID NO: 21873 - DNA, 487 bp, Oryza sativa
  unsure (1)..(487): unsure at all n locations
  Clone ID: uC-osflM202041c10b1
ccaaatcccaaatcccgccgcctcccagatcgccgccggatcgatggccgccgcctcgccgctcgccgccgcggcggcgctcgccctcctcctcctcctcctcctcgccgccccggcggcggcggagatccgggagacggtgatccggagcgacccgcggagcatcatcccgctcgacgagttcgggttctcccactcgggcgtcctcgagctcaacgtctccggcatcgccttcgacccgccggcctcctccgagctcgacctctcccagctgggattcttcctctccacgctcgacgcctgggtgcacgtcctccgccagctgcaggatctcgacgtcacctgcgcgctccaggccgacctcgtcaagctcgcctactccttcgaccgactcaggccgccatccaaccncgccggcgtntaggtcagccgctcatcatccttctccaccgccttccccgtcatcgagccagggcagtacacgctc

SEQ ID NO: 21874 - DNA, 334 bp, Oryza sativa
  Clone ID: uC-osflM202041c11b1
gatacaccatgttggagaggaagaggaacttcagtttctcatcaaacgtcagtgacacagttaataaatcaagaatcagaggcttttgatgctggccaaaagaagagcactagcactgttcagcattgtgaggttctgaccgcatctcaaaatttggacactatcgagaataagcaaaaccaatcccaatctcatgttgaattgtctgtgtctatgaaatctggagacaatggtaaaaaagaggaagaagtttcccacaataaggagcttgagagtgcaaaacaatgtgcagtaaaatgcaccgtagagcagatacacagtttggagctgatag

SEQ ID NO: 21875 - DNA, 304 bp, Oryza sativa
  Clone ID: uC-osflM202041c12b1
cgtacgcgtgggcccgcgcaggctcaggcatccggtgcggctctaccttgggtgatggccgtgacttcgccgccgctgctccggcgaggagggtgggcgatgggcgcgagcgatcacgccgcggtggtgagcgaaacgagcgccgacgataagcttcatgcctttatgtagccctacttctgagaaagagcactcggagcagcgggcgttggactgtggcgaaattcttagagttctaactcactacaacaggccaatctgtgaaagctgatcaccaacatagtgaagcggaatgtagcaccac

SEQ ID NO: 21876 - DNA, 437 bp, Oryza sativa
  Clone ID: uC-osflM202041d01b1
gcgcgcataatactatgaggatgttaggcttgtgcttcttcggattggggttgttctcggcaaggacagcagcgctctacccaagaagatgcccctttttatgatgtttgccggtggacttctggggacggtacggcaatggttttcctggattcaccaggacgacctggtggacctcatctacgagtccctcaagaacccatcatataaaggcgtgataaacggaaccgcacccaacccggttcggctgtcggagatgtgcgagcggctggggcgagtcgtcggccgcccctcctggctgtcggtgccagaaatcgccctcaaagcggtgctcggagaaggtgcatcagtggtcctggaatggcaaaaacgtcttcctgtgaaggccaagcaactgggcttttccttaccatacccctatgtacaggatgcactcc

SEQ ID NO: 21877 - DNA, 227 bp, Oryza sativa
  Clone ID: uC-osflM202041d04b1
gaccaccccgtccgggatggcagggttctggtaaaactactacttgtaccaaatatgcatattatcatcagcgcaagggatttaagccagcacttgtttgtgctgatacatttagggctggtgcttttgatcagttaaaacagaatgcaacaaaggccaagattcctttttacggaagctacatggagtctgatccagtgaaaattgctgttgagggttgtggagag

SEQ ID NO: 21878 - DNA, 465 bp, Oryza sativa
  Clone ID: uC-osflM202041d06b1
ctgtgattggtcatctgacatccttatctccctctcgctccaagtgcctaacccaactcttcccgagcctttttctgatcattggacaaatggccgtctcttcagccgttctcgttgggctactcgtcgtgagttgcgccgcggtggccgcagccacgaggtacaccgtcggcgacggcgagggctggacgaccggcgtcaactacaacaactgggccaacggcaagtttttcagacaaggagacgaactcgtgttcaactaccaggcgagggcgcacaccgtgacggaggtgagccagaccaacttcgacagctgcaacggcaacagcccgctgagcaacgacaacgggggatcgaccaccatcaggctctcctacccgggcatgcactacttcatctgcaccatccccggccactgcagcagcggcatgaagctcgccgtgaacgtcaacggtgacccgtcgt

SEQ ID NO: 21879 - DNA, 291 bp, Oryza sativa
  Clone ID: uC-osflM202041d07b1
ctttactctgctctagcgtgggcggagaacacgaggcgtggccgcgtcgtcgtcggaggagggagcagagatggacggccgcaaggatgtcgggatcctcgccatggatatctacttcccgcccacctgcgtcctccaggaatcgctcgaggctcatgacggcgccagcaaagggaagtacaccattggtctcggccaagattgcatggccttctgcagtgaggcggacgctgtcatcttcgatgtgcatgacatgtgccacatgcttgctgaaaaaatacaacggccatc

SEQ ID NO: 21880 - DNA, 450 bp, Oryza sativa
  Clone ID: uC-osflM202041d08b1
ttagtcactgagctctcctgtcaccacactctgtcttatgtccttacaagatcccaacccctttacttcttcttgtgcggtggaatttgtgaggaacatcaatcacgaactttcaagctcacatccagcactacaaacgctcgcttagagctgagcagaaatctagcatagtgggattattacctcacgtgtttgttgaacgagatctcggataattgctccaatgcgcggaaactgaccaacacacctgctgttgcctctgtacccaactggtttgtgcgcttcgattcatacgaaaatgcacacccgtaccagcgttatctatatcacgagcactcccttgagaaaatagccgattacatcgacgagtccagactgctagaacgttctaccagcaactagatagataaattgtctgacttgcttgctcaatccctgatgaagaaacat

SEQ ID NO: 21881 - DNA, 291 bp, Oryza sativa
  Clone ID: uC-osflM202041d10b1
cgtcgccgccgtctcctcgtgtaaccctagcttagtggattagtttaagtgtttgccggagattatggggtcggtggcggcggaggaggtggtggtgttccggtcgaagctgccggacatcgagatcgacaacagcatgacgctgcaggagtactgcttcgcgaggatggcggaggtcggggcgcggccgtgcctgatcgacgggcagaccggggagtcgtacacgtacgcggaggtggagtccgcgtcgcggcgcgccgcggcggggcttcggcggatgggggtggccaa

SEQ ID NO: 21882 - DNA, 267 bp, Oryza sativa
  Clone ID: uC-osflM202041d11b1
gttgagatgaccgatcgtgtttcatcaggagatgaggcggtatttgccagttgtcatacaggtaagatagctcaagttttcttcgttgatcacatggatctgcagatgtgctaggactacgagctgattatacctgatgccctgtatatgatccatgtgcaagggtttttcttgctctgacggcagccaacacggcattagaatcccagctcttccaatatgggctcaaaagcagaaatgggtgaagcattcgaacagaaagagcat

SEQ ID NO: 21883 - DNA, 468 bp, Oryza sativa
  Clone ID: uC-osflM202041d12b1
ggttggcatcagatgaaaagcgccttggtaatcgggtgttagcaacttttggtggggatcatcctgagcatgggcatgcatctgcgcatgcgattctgtcacgcatcatagatgggacactcagttatgatagaaatggtttcccgttcatgtccttcatctctttatttagccatacttctgagaaagagtactcggagcagtgggccttggcctgtggagaaattcttagagttctaactcactacaacaggccaatcttcaaaggtgatcaccaacatagtgaagcggaatgtagcagcacatctgatcaggcctcatcatgtgagtctatggagaaaagggctaacggttctccaagaaatgaacctgaccggaagccattgaggccactatcttcttggatcacagacatattggttgctgcaccttttgggtatagaaggggctattttagatggggggggg

SEQ ID NO: 21884 - DNA, 169 bp, Oryza sativa
  Clone ID: uC-osflM202041e01b1
attcataattctacttggaaagtcaacggccagaagggccattgttgccagtgccatgggcaacggcgccctgcacaccaatggcgccggcgccgacaccaaagggaagccgatcaaatgcaaagcggcagtggcgcacggtcccggcgaggcgctgctgatggaggag

SEQ ID NO: 21885 - DNA, 304 bp, Oryza sativa
  Clone ID: uC-osflM202041e02b1
atcttgctagctcgcctgagttctttgcttctccagatcgatcgtttcgcgcgcgtctgcgcgttcatctgctgtgtaatttgagttattattagcaacaatggcggttgctaccatggcgctgagctactccttcgccgccgccgccgatggtagcgcgccatggcgtggtgtctgcaaaaggaacacgcatcgagccttattgcccgagaatggaacttccaactgtacgatagactaccctgaatgatgagggggctccaaactattgcagggagaggagagcaacgaagagggaatatga

SEQ ID NO: 21886 - DNA, 407 bp, Oryza sativa
  unsure (1)..(407): unsure at all n locations
  Clone ID: uC-osflM202041e05b1
gcctatgagctcgaagctgatgagagatagcgacggcgaaggggccggcggcggcctcccgcgctcgcacccgtcgaacctgccgctgccggcgccgcactccgacccaaacctccagttctccgggacggacgatgacttctccaaccgtcacagcagctcgtcggcgacgggcggcgcgagccccgggtactactccgactacccgtccagcttcagcggcgagtgctcgccgtacaacatgtcgccctggaaccagactntggcgtcgncgtggtcgcaccacagcgacgcgtccatggccgggctcggcggcgcgcccgccatggcgcccgggaccagcctcatcggctcgctggtgagggaggaagggcacatctactcgcttggcgccaaaccgacaccct

SEQ ID NO: 21887 - DNA, 385 bp, Oryza sativa
  unsure (1)..(385): unsure at all n locations
  Clone ID: uC-osflM202041e06b1
gtcatanccagcaaagctgcttgggttgtactagataggcacttcaggagagatttcaagtacttagaaaagcacattgcctgcaaggtggcagtatttcaggataacttggtggtgcagccattgaagataattaggacaattccaccgagcaaaagcatgggggaagtaaaggctctgcagcacctagcagtatcactcgacctgcgttcggagacattagatactgacactcatagtgtgttgaccaagtcatcacctgtaagttattttgcctctctaagctatcacgagatgcatgaaacatccagtgtggtcgggagcagcatgtcatatttgacaccatcaatgagcgccatgtctttcacaacgattgacggaactg

SEQ ID NO: 21888 - DNA, 70 bp, Oryza sativa
  Clone ID: uC-osflM202041e07b1
cgatagtccacaggaacagagacggagaacacgcggcctagctaccagcgccagggcggaggcagccgag

SEQ ID NO: 21889 - DNA, 166 bp, Oryza sativa
  unsure (1)..(166): unsure at all n locations
  Clone ID: uC-osflM202041e08b1
caatanccaagaacaagaagagcaagaagaggagaggagaggagttggaaggtagagagagacaagccatcattagccaccaaatgcaggcatgcatcatatagctgacaggacaagaatcagaggaagaagaagaggaggaggaggaggaggacgcaacatttcc

SEQ ID NO: 21890 - DNA, 431 bp, Oryza sativa
  Clone ID: uC-osflM202041e09b1
cagtaaggggggtgtttctggtgtgcgccgcgcgcagcatcagcagcagcgtgcacagcagcagagcgcgcgcgcgcggacggacggcgagcgagcgcggcggcggcggcggcggcgacggactccctcctctcctgccctccccgccccacgcagcggcctggacaagctctctttctctgactctgtctctagctctgtctatctggctgtctgactggctcctttcgcctagcatgcttgccggctcgaatcgaattgaaggataaacattgatcttggaatagctgtttgtatgtcatatgttgcaatgaaggattctcaggatattcagagcccaaccgagttgcagtcatcagcacaaggtactaatgaagtgcaaagtaaccagccgaatccaatggacactgatggttctggaggagactctg

SEQ ID NO: 21891 - DNA, 256 bp, Oryza sativa
  Clone ID: uC-osflM202041e10b1
gctgcttgtccctcccattcctcgccgccaccggcgccgtcgcgccgaaaccctagggcggcagcgtagggttcccctcccccccccctcctccgccccgatgacgccggtgcaggcgggggcggcggacgaatcacttttccaaccgttaaaccatttggttggcaacgggcggtgcgagccccgggtactactccgacaaccggtccagtttaagcggtaagtgctcgccgaacaccatgtcgccctggaacca

SEQ ID NO: 21892 - DNA, 347 bp, Oryza sativa
  Clone ID: uC-osflM202041f01b1
atctattttctgatgggaaagtcaaaggcaagaagcagcgatggatgccactgccatcggcaacggcgccctgcactccaatggcgccggcgccgacaccaaagggaagccgatcaaacgcacagcggcagtggcgcacggccccggcgaggcgctcgtgatggaggaggaggtggtggcaccggctagcattgtgctggagggccataaggcgctctgcactccatgaaccgacacctgcaaaggtgctgctgagcagaaagccacctgaagagatagacatctatggtggtacaagctgcctccacaggctggaatcgaaaaccacgtcagagagattgctatcc

SEQ ID NO: 21893 - DNA, 422 bp, Oryza sativa
  Clone ID: uC-osflM202041f02b1
cttccggtcataccccttcaaggagactccatggtaaacaggagatattgttctgactatccttgcgatagattctccgcactacaagagctcttgctatgatactgatgatggggctgccatgctgacatttgaagcactgtctgaaacagctgaatttgtcaagaagtgggttgctttctgcaaaaggtacagtctcgagcctcgtgccccagaatggtacttccaacagaagatagactacctgaaagataagggggcaccaaactttgtcagggagaggagagcaatgaagagggaatatgaggaattcaaggtcagaatcaatgcattggttgctaaagcccaaacagttcctgaggaaggatggacaatgcaggatggaactccctggactggaaacaacgttcgtgatcattctg

SEQ ID NO: 21894 - DNA, 497 bp, Oryza sativa
  Clone ID: uC-osflM202041f06b1
cctgtaacaccattacaatcttttcttccattgggggaagtaaaggttaggtttgcagcatagggagagtctagggcggagagagacagaggaagaagaggaagaagctatcggccacacggtcaataaagagagcggcgagaatggcgagcaggacgcattacgccttcttgctcctctcggccttcatggcctccctcttcgccggctcggccgccggagtttaccacatcatcggcgccggcaaggggtggcggatggctcccaacaagacctactacgcggactgggctcgcaccaggaacatcagcgtcggcgacaagctcatgttcctgtaccggagcggggtgtacaacatcagggaggtgccgaccaaggagctgttcgacgcgtgcagcatgaggaacatcacaaaccggtggcagaacgggccgaccatcatcgagcttacccagcccgggccgagctactacttctgcggcgtctgcaagcactgc

SEQ ID NO: 21895 - DNA, 341 bp, Oryza sativa
  Clone ID: uC-osflM202041f07b1
tgtaaagattattaggggtttgccacttggcattgcgatgacagtttatggcagggaagacgacgctgacaccttgattgaacaaatgacaagggatcaagatcccatattacgatacagaggcatgtatgcattgggtctagcctacagggtaactgcatataacaaagtcatacaccagctgctgcattttgctgtatcagacgtgagtgacgatgttcggaggactgaagtcatggatcttggatttgttctatacaatgaacctgagcagactcctagaattgtgttcctgctctctgaatcatgcagcccacatgtccgtcatggtgctgatttag

SEQ ID NO: 21896 - DNA, 521 bp, Oryza sativa
  Clone ID: uC-osflM202041f09b1
tgataattcacctgcgatccatccgcgcccgcgaggaggagttagccggacgccgcctcgtagagagcaggggagagatggatatggtattggtattgtatataaggaatacacattgctatatgtgtgcattaaccttttaatttatggtagttatttttgttagatactctttgatgttcaacaatatttaaaaatttgatgatatgaattttatttttttcatgttaaatatattcttgtttaatttaatttgtattttttatttttaaattattttattttactttttttttaatttcatttttttattttgtatttttttattttttttttttttttttatttttatatctatttatttatttttccatttttattattttttttttattttctcttatataattatttttttttaatttttttttttttttttttttattttatttatatatttttatttttttttttatatttttattttattaattttttttttattatttttttaaattttt

SEQ ID NO: 21897 - DNA, 490 bp, Oryza sativa
  Clone ID: uC-osflM202041f10b1
tgacaatttatacattttacttaaagaaataggaatgcacggtcaaatggaaatttgtaaacatcctaagcccaacttatgttatgctatgtctattgtatataaagcctccagattgctatatatgtccattagccttttaatttatgctgctcatttttgtttgatactctttgatgttcagtatggcagaaacttgaagaagagaactctgaattctttcgtgcttactatatacggttgaaattgaaaaggcagattatcttgttcaaccatttactgcagcaccaatacaatttgatgaaatatccagcacctccaaatgttccattggctcctatgcaaaacggaatgcatcctatgccagttaataatttgcctatgggatatccggtacttcagcaacctatgatgcctgctcctggccagcctcacattgactcaatggcctgtggtctatccagcgggcatgtagtgaatgggatccctg

SEQ ID NO: 21898 - DNA, 412 bp, Oryza sativa
  Clone ID: uC-osflM202041f11b1
gtgcaacattgattagtggcaggattatttcttcagctgatgctaccacgacaatagatcgaaactgtgttgcaaatctgcttctagctatagacaaattattgaagatggaagaaagtcaaaatacagatgaaactgagagtgcattggaggccttaggcctgattggtacaacatctgctggagcatgtttgatgctcacagattcatcaaatgctgccagacatgtggtagaggcatcctttggtcggcaggctagaggtaaacagctggctgctttgcatgcatttggaagcatatctggtgttgatcggtcggaagaccaaataaaactggataatcaagcggaagaacccctgaagcgttttgtctataccacagtaagaatacagccaaaactgacaccttatga

SEQ ID NO: 21899 - DNA, 150 bp, Oryza sativa
  Clone ID: uC-osflM202041g01b1
ggtgctaccacagatgcttgggtaaccctgaaccagcgcgtctgttttctgcaacggagatattggcgactcttcaagccatggttgcgaacatggcacctgagaaggggatactttacccacagctcttgtggggctgggacccactga

SEQ ID NO: 21900 - DNA, 275 bp, Oryza sativa
  Clone ID: uC-osflM202041g02b1
gtcagtagcctgcatggtggagcgacaccagaagatgggcatagttcagggtatcgatgctatcgatgcttctccagataaaggcgtgcgcgacggcaccaatgatggccataccatgctgacagctgcagcgcggcacgaaccagctgaggctgaccagaaaggggttgctatatggacaagggacagaattgcgcctaatgcgcaagaaagggacttccatcacaagatagactacccgaaagatattggctgcccaaacatttgcttggcac

SEQ ID NO: 21901 - DNA, 410 bp, Oryza sativa
  unsure (1)..(410): unsure at all n locations
  Clone ID: uC-osflM202041g03b1
taaataagcacaagaagtgggcctactaccaagatgacgatgctctctatcctcctcctcctaaaggagggctggacggaagtactggtcgccttagacgtgaaccagatgctcgccgacaagtcccagtactgatcgttcctgaagtggctgacgcagacaaaggacacggaggagacgaaccggctcaagtcggcgtcgctgctgatactacaagacaaggccatgaagacgatcacgtcgnttcccgccgacaagcagcggatggccatggccaaccacgtgctactcaagtacttcgaccccatccagctgggcgagatgaaggaccgcaccgccatgctacccacgctggtgtccaacaccgacaagaagctcggagtcgtcaactacaccaaggccagcgacgg

SEQ ID NO: 21902 - DNA, 261 bp, Oryza sativa
  Clone ID: uC-osflM202041g04b1
gtccggtggtatcaattcttttatctgtacctgaagggcgttgtctaatacctaattaaggttgatctatgagcatctgagacttaatgaaggctagcttgaactactagatcggttaaaactgtagctcatgtgcggaactaccatgaggcactgatagtgtagaccattgctcccatacttattgaggtctatcaggtgatcaatacggtggcatatttagatgtgtggatcataatggaacctgtagaatcctcccat

SEQ ID NO: 21903 - DNA, 307 bp, Oryza sativa
  Clone ID: uC-osflM202041g05b1
gccttgccattcttgtatccatccaaggagtgtgggacgccaaacatattttttttgtatctatgctaatctgatcattaatgaaggagagttttagcagcacagatcggattaaattggagtagtttcatagatggagcatagtgaccttattgagttctgaatggcattcaccctcatggacatataccatttgacaatgacctctgggggaagtgcacctttagatcatactggcacatgttgattagatgattaccatggattgttatgtgctattgggtatttaactgctggttgcctaaaa

SEQ ID NO: 21904 - DNA, 298 bp, Oryza sativa
  Clone ID: uC-osflM202041g08b1
cattatctgacttggctcagcaccgcctggattaggtcttgtgtctgcgactatcagctacgaccagtctgacgataccaagatcactgagactgctgacactatgcagaaatgcaactcctgatgcttcttcgtcaacctcggctcgctgatcaccgtcaccgagctagactacgctcaggacgaccattggcggccgtgggggaacggtggatgcacggcctatattaaagagggcagtggacaggacattgaccatgctaccagcagggtgacatacaatgacgatgctgatgat

SEQ ID NO: 21905 - DNA, 364 bp, Oryza sativa
  unsure (1)..(364): unsure at all n locations
  Clone ID: uC-osflM202041h01b1
agcgttattcagcagctgaagcaccagcaacagctggggcgccagcgaaggcgtgcacgatcatggacccatcctcccgcatactaggcggcaagagccccttgctcggccatacgcgaccctccaatgcccccgtccgcgacatcgccgacgccgacaccggcctgatcaccatgagcaaggagctgtggtacgggccggatagggtgaagtacctggggccattctcggcgcagacgccgtcgtacctgaggggcgagttaccgggcgactacgggtgggacacggcggggctctccgcggacccggaggcgttcgcgaggaacacggcgctggaggtgatccacggncggggggcgatgct

SEQ ID NO: 21906 - DNA, 115 bp, Oryza sativa
  Clone ID: uC-osflM202041h03b1
cccggtccgctcagtctcacctaaatcttacaatgacaggtgggggggcatctacgcattttgagctgctctctatgcatgaccatttcaatgatggatggatgtgaagagatct

SEQ ID NO: 21907 - DNA, 391 bp, Oryza sativa
  Clone ID: uC-osflM202041h04b1
gttatatacacccatttctctctccgagacctgctgtggccactacccaactaccatggatccatgcacatcacagccgtaatgatggatagactcgacgaccacatcggacaaaacggtatctcatgtgtgaacctaccatgagggccttacagtgtggaccatggggcccatactcatggaggactaccatgtgatcaagacggtggcgcacttcaatctgaagcgcatacctgagcgcgtggtacacgcccacggagccatccacaaggatgttttagagtgcaaccacaacgtaaccgacatcacgtgtgtcgacttagtacggtcaaggggcgcccaaacccacgaaattgttcgtttctccaccgacattcatgagcgccgcagg

SEQ ID NO: 21908 - DNA, 432 bp, Oryza sativa
  Clone ID: uC-osflM202041h09b1
ctttctcgtgggtgcctcaacctgacatccatgtggtcttcttctcgtctccctctctctctcgagatcgaacgaaccaagaaccctaggacatccatggcgggggcgatccgcgtcaccatggacgcgggcgccgacggcgaatcagggagcaccgtctgcaagcgacacttctgtgcgatgcatcactgcctgattcagggagtgagggagatagatcgccgaggctagagatcgctacgacgacaacgccatcgagctcaccggtgctggaggcaaattttgtggaggctctgatatcaatgtggtcacagaagctcacaagactggaaatggatctcttatgcctgaaatatcttgtgaacttgggaccaatttgaatgaagcgggcaaaaagacttaaggtgctggcattcaagggcttgcctcttg

SEQ ID NO: 21909 - DNA, 307 bp, Oryza sativa
  Clone ID: uC-osflM202041h10b1
gccttccgcgtgagcggcagcaagtgttcactgcggtcttcttctcgatttatctttcttggtttcttgatctgtagcttattagcggccatgtgcggcggagcaatcatctccgggttcatcccgccgtcggccgctgcggcggcggcggctgcggcggccaagaagcagcagggcaggagggtcacggccgacgtgctgtggccggggatgctgcggaaggggaaggcggcggcggcggaggaggactttgaggccgacttccgggagttcgagcgtggcatgagcgacgacgaggcggaggggg

SEQ ID NO: 21910 - DNA, 449 bp, Oryza sativa
  Clone ID: uC-osflM202041h11b1
actttatgcatcccccggcaacggccggggtgacgaggttcttgctcccggtgtcagactgcgaatgcacgctcagcacgctgctggacgagttgcagcctgaccagtggccggtggagaccgggaaccgtgcgatccggtgcacgggtgttgcgttgagtgtggcggctggcttgctcggggcttgtatgcctgggactggcgcaaggatcattgcgcttcttggtggtccatgcaccgagggtcctggaatgattgtgtcgaaagatttgtcagagccagttagatcacataaggatcttgataaggatgcagctcctcacttccagaaagctgtcaaattttacgatggccttgccaaacaattggtcagtcaaggccatgtcttagatgtttttgcatctgctcttgatcaggttggccttgccgagatgaaggtcgctattgag

SEQ ID NO: 21911 - DNA, 506 bp, Oryza sativa
  Clone ID: uC-osflM202041h12b1
atctatatactagaaaagggaaaaaaaaataaatcaggaatccattccccttctccttccccaaacacggtgtggtctgcacgcgactcctcccccctccgccgccgccgccgccgcagcgagaccccggcgaatggcgtcccgcatcgcctctcgcctcctccgccgctccaacgcgactctaggcctcatcaggagttattcacatgccaggaactacagcagtcaactttcagctcttattccaattggttcccagagctcaaagcttacaagaagacgctattacttgccaaatgcctctccgtaccaactctggagtaggtcatttgcatctgacaatggagaccaggttgaagctgttgtccctttcatgggtgaatctgtaactgatggaactcttgctaacttcttgaagaaacctggtgacagagttgaggctgatgagcccatagcacagattgaaactgataaggttactatagatgttgctagtccggaagctg

SEQ ID NO: 21912 - DNA, 99 bp, Oryza sativa
  Clone ID: uC-osflM202042a01b1
attgtgatcggaagcttctagaagtttccgtgggcgatggcgatccgcgcgaggtcctgctcctacgccgccgcggcggtcgcgctggcgctcgcgctg

SEQ ID NO: 21913 - DNA, 435 bp, Oryza sativa
  Clone ID: uC-osflM202042a03b1
gcgcccaaccccgcgcgcgctctcccctctcccctcccaccaaccccaccccatgctgccgacctccacgccgccggcaatggcggcgaccatggcgtccaacgccgcggctgcggcggcggtgtccctggaccaggccgtggcggcgtcggcggcgttctcgtcgcggaagcagctgcggctgcccgccgcggcgcgcggggggatgcgggtgcgggtgcgggcgcgggggcggcggaggcggtggttggttggcgtccgcgtcgtcgtcgtcggtggcagcgccggcggcgaaggcggagggagatcgtgctccagcccatcagggagatctccggggcgggtcagctgccagggtccaagtcgctctcaacaggatcctgctgctgtgcgccctgttcgagggcacaacagtgggggacaacttgctggaca

SEQ ID NO: 21914 - DNA, 223 bp, Oryza sativa
  Clone ID: uC-osflM202042a06b1
cgcattcttaggaagtgaggtacactgcacgttctatgacgcctcctgcagatagaaatggcacttcaaagtcaaagtcacccactccagtgagacgcagtacctctaggtcacctcctccaaagaagagtgattcaaggtctccacctacaaggaggcgcagcacttcaagatctactggccctagaagacatggcagatcaaggtcaaggtcaagggatag

SEQ ID NO: 21915 - DNA, 215 bp, Oryza sativa
  Clone ID: uC-osflM202042a07b1
atctatttactagcgcgacagagccaatttcgcggcatctactgcttctgctgctgcatgctcctcctcgtcgccggcgatctatctcgccgccctgcctccgccgagatcgacatccagcggcgatgatgctttgcggcggccccttgaaagcaggctcgacaatctactgatcttatagataagaacttcagcgagcgagatgccatccctgc

SEQ ID NO: 21916 - DNA, 329 bp, Oryza sativa
  Clone ID: uC-osflM202042a08b1
gtctagtaacccaccctaccaggacggggcgatgagcttcacgagtgcaggtgcagctgcgacgatgacgacaacatcaccttaccagaccttgacatcctggagcagtgactaggcggaggcggtcgacgcggtaccagcggattacgctgcactgacacggagtgcgtccagatgggataggcaaaggtggctgattgtattaatgacgtcagcaacaatgacacggacgattaccagctaatgatgctcataaggaggaactgtcttgcggtttgtgtaggctctaagaaaaagctttgatataggccaggcaagcatctgtgtga

SEQ ID NO: 21917 - DNA, 267 bp, Oryza sativa
  Clone ID: uC-osflM202042a09b1
tgtaatctaaaaaaaaaaaaaaggaatcctgagaaaattgaggaaagtgaagcaaagcgagacggagtcgtgggaaatatcgactccgcccgcggtggtcgtcgcgtcgccgtctcatcacatctcccccccctcctctcttcttcctcccctcccacggcgactcgccgccgccgccgacgccgacgccgatccggtctccgctccaactccggcgagattggatttggagggcggagccgatccgatcggggtccatcgacggag

SEQ ID NO: 21918 - DNA, 197 bp, Oryza sativa
  Clone ID: uC-osflM202042a10b1
gctctgctccaacccctccacgcctcacctcctggcgctgaaatcccccacgataaatggaacctaatcattcaccggattttgttcggagttttccgcgatccgtcgcctgctcgtcgagccgcaatcagtggtgcgtgggtgggcgagcatgagcatggcgttctcgtgcgcgggcgcccggctgcagcaggggc

SEQ ID NO: 21919 - DNA, 128 bp, Oryza sativa
  unsure (1)..(128): unsure at all n locations
  Clone ID: uC-osflM202042a11b1
taattcccgaatcaacccacccgtccggctganttggtgtggaggcgggaaaatacggggtgggttatatcaaagatgggggggactccaaagtncaaacaacccacttcagtgagactcagtccctt

SEQ ID NO: 21920 - DNA, 263 bp, Oryza sativa
  Clone ID: uC-osflM202042b05b1
ctcttccccttcttcctctcgcttccgccaccaaccccttcgcgaaccttctagaaccccccaaaaccctatccatggcggccaccctcctctcccgggccgctggccgccgccgacgtctccctgcgcggcgcccgctcgcaccacatactgtgctcctccctccccaaggaaaccctgcttgctgctgccctcctcatgctgctcgccaccaccatcgcctcgctcctcgcggggggaagaagccggatggggcgcgcgcc

SEQ ID NO: 21921 - DNA, 181 bp, Oryza sativa
  Clone ID: uC-osflM202042b06b1
gcgtgattctttccatcaagcgggtgcccaccgtggtgggcagctaccatgaggatgctgccgccaccagcagctaacgcccacgagcctgctgcgggagggattgtctcgccgagttgctatttgcccgattccaagcttccgctgtatgctttcaaggcgagtccgaaaaagccgtctt

SEQ ID NO: 21922 - DNA, 467 bp, Oryza sativa
  Clone ID: uC-osflM202042b08b1
cgatggcctcctcgcccgccccaccaggacaccacgacgagcgccacgagtccacctgcagctccgccgatgacgacgagatcaccgccgcagccgaggccagcccggagcagggcggaggcggaggcggaggccgcggcaccggcggatcgggctccgccgccacggagggcgaccagaagggaaagggaaaggtcgtcgaaggttcgcaagaggccgccaagaaggacaaggtcgattcccagctaaagaagttcatcaggaggagcttctttgcggtttctgaaggcttcaagaaaaagctttcagatagacaaggaaagcaactggatgaggcaagcacgtcaaactcgccacctcatgtggatcacaagaaaattccctggaagaagctgtgtatcatattttggggacatccataatgttctgaggctatcgaaaagggaagggagtcagttatattatgc

SEQ ID NO: 21923 - DNA, 529 bp, Oryza sativa
  unsure (1)..(529): unsure at all n locations
  Clone ID: uC-osflM202042b09b1
attttatctgaaaatggtttgaatccagtggatggcccttccgctgatactgatgttatggagcaccaagaagtgaatgaacctgaaattgttgcagatcattcgcaatctgataataaggacaatggggtaggcaatgttggtgatgttgaggagaccggcggtacggacgcatgcattgaagagttggataatttggatatcaaaagcgactctgaggaaggtgtcgattcatctcttgcagatgatgggagcagtgagcagagttgggcgttgaggtccttatctgaatctactgtagcatgcataaccagtgactatgccatgcaaaatgtcatcctgcagattggtctccgtctcttggcaccaggtggcatgcaaatcngtcagttgcacaggtgggttctgaaggtgtcatgcttgctataaggtgacccaagagattgngaaaatattttgcccaaaatggtgcaacggtggcaccctacngaaggtttcngtaacagttggtgaaaatgggatcactatg

SEQ ID NO: 21924 - DNA, 430 bp, Oryza sativa
  Clone ID: uC-osflM202042b10b1
ttatcggagcagcaaggagatggatcatgtagtcgggggcaagttcaagcttggaaagaagatcgggagtggatccttcggggagctcttccttgctgttaatgtgcagactggagaggaagtcgccgtcaaattggaaaatgttaagacgaagcacccacagcttcattatgagtcgaagctgtacatgcttctgcagggaggaactggtattccgcacttgaagtggtttggcgtggagggagagtacaatgtgatggtgaatcgatcttcttgggccaagccttgaggacctattcaactattgcagtaggaaattctcgttaaagactgtcctcatgcttgctgatcagatgatcaatcgagttgagtacatgcatcagagggggatttcttcaccgtgatatcaagcctgataatttgcttatgg

SEQ ID NO: 21925 - DNA, 486 bp, Oryza sativa
  unsure (1)..(486): unsure at all n locations
  Clone ID: uC-osflM202042b12b1
gtctgggcgcgcgccatcctccgcggcctcgcctacctccactcccgcggcgtcatccaccgcgacctcaagtgcgacaacatcttcgtcaacggccacctcggccaggtcaagatcggcgacctcggcctcgccgccgtcctccgcggctgcacctccgcccgcagcgtcatcggcacgccggagttcatggcccccgagatgtacgacgagtgctacggcgtcggcgtcgacgtctactccttcggcatgtgcatgctcgagatgctcaccaacgagtacccctacagcgagtgcgacaacccagcgcagatctacaagaaggtcaccgccggcaagcttcccgacgccttgtacctgctgaccgacgccgacgcccagcgattcatcgggcggtgccttgtcgacgccgtccaccggccctgtgncgaggagctgctgctcgaccccttgctgtgcccggctagaaccacgacgatcacaata

SEQ ID NO: 21926 - DNA, 402 bp, Oryza sativa
  Clone ID: uC-osflM202042c01b1
gcggtgactggggagcggctggcgtgcaagtcgatcaggaagcggaagctccggagcagcgtggacgtggaggacgtgcggcgggaggtggacatcatgcggtatctgccggggtactgaaacgtggcttggcttcctaaggctttgggtgatctttctcttcatcatttttgaataagatgtctcgtttttctttttcattttttactgccattatttatttcctgttgaaattcaaatctatttgtaaatccccttaatgaggttttttttcattttcttaaatcccccctttgagttatattctactccttgcatggagctgggaaccagatggggcgaaatagcttggacctaaaagggaacccaaattttcctcttttaaaaagaaaatctttttaa

SEQ ID NO: 21927 - DNA, 476 bp, Oryza sativa
  unsure (1)..(476): unsure at all n locations
  Clone ID: uC-osflM202042c02b1
agataattgacattgtttcaagagatgttcggcgtccagaagataaagctcaagccctagatgatgtgacgggcacaatattgtatattgtcataatcgtcgtaactggttcagtatgcacagcgcttcgggcatggctattcaattctgctagtgagagagtagttgctcgactgaggaaggacttgtttagtcatctagtaaatcaggaaatagcattttttgatgtcactagaacaggagagctattaagcaggctttctgaagatacgcatataataaagaatgctgctacaactaacctttcagaagcattgcgcaatattactactacgactattggtctttggttntaatgtttgcaacttcatggaaatttacattgctggcacttgtaattggtccgggtatatcaattgctgtgcgcaaatttggaccctttctttgtgaactttcacatcagacacaagcagcag

SEQ ID NO: 21928 - DNA, 263 bp, Oryza sativa
  Clone ID: uC-osflM202042c04b1
ctcctcttcgcgcgctctccgattcgccgcgaaggaagaggatggaggagctcgcggcggcggcggcgcccccgcggcacagggagcggcggaggcaccggaggaaggcgtcgtcgacggacgcggcggcggcgtacggcgacgtgttcggcgggccgccgcagttcgccgtggcgttcgacggggtgccggcggactacggcgaggtgatcagcggcgaatcgtcctcctgctccatcccttacctcgacctgccccaggac

SEQ ID NO: 21929 - DNA, 223 bp, Oryza sativa
  Clone ID: uC-osflM202042c05b1
gcgccttcccttcccttcttggcttcttggcctccttctcctgctcgcccacacacttgacctccgcgcttcccgcctctgcgcattctgaccctccgccgcctgcgccgcggtcgggtggtgtccgtgagagaggagccggaataatgctgtgcgtctcgccgacgacgccgggcccgtgcgcggcacggcgccctgagcgggcctggtgcaccgccacgac

SEQ ID NO: 21930 - DNA, 281 bp, Oryza sativa
  Clone ID: uC-osflM202042c06b1
ggtgtccatgtcatcattggccagtgcaggccgctgtcgaaaactgtgaggttcaacgtcctgaaggtcatcccagctggatccaccggcggcagcggcggcaagaaggccttcaccgcagcatgagcttgtactcgcattattcatgggtagtttatagacagatccttttgcttgaagtcctggcagggctggtgttttgaccctatcgatttggatattgttcccaacaaaacgaagtcttatcatcagaacgtgttttatggaaactactctatgca

SEQ ID NO: 21931 - DNA, 514 bp, Oryza sativa
  Clone ID: uC-osflM202042c07b1
ggagcccaagactgaagaggtactagaaaaagctttggtcaaggaagaaaagattgaggaagaagaagattctgttccacaatttaaagtcgcagaagtgcatgtagctggtttcaagagcgagcctgagaagacaaaatcatggggtaatcaaacacagcaacaatcgggatcaagatggctgcttgcagctggcatgggtaagggcaataagcatcccctgatgaaatccaaagctattgcgaagccaactaaagaggcagctggtcagtcagaagacaccctttggagcatttcttcacgcgtacatggagctggaaccagatggggcgaattagctggacctaaaaggaacccaaatatcctccttcaaaaagaaaagcgatttaggtgatggcttggcaattatcagtatttagctcttgtgatttgctgtcttggatgaatctgttagggaagagtctatttatctggaccttgtcctcctggaatactttagtgactgtaatgaaat

SEQ ID NO: 21932 - DNA, 418 bp, Oryza sativa
  Clone ID: uC-osflM202042c08b1
cctctctctcctctccttttttcgatttgagaaaaaaaaaatttgctcgccttctccttccctcgcggcgaagacaccggagccaccactcgccgcccgcctatttcacgccgccgcgccgcgcagaccgacctcgtgctccaccccacccatctccgacgccgcggaccccggcggccgctcctcctttgctccattcatcgccatgacgcgccacgccggcgcccgccgccgtggcggcgccggcgtcgtcagcctatcgtcgtgcgtcgtcgccgtcctctccgccgctgcaatcgccgcggaggggtgtcgatgtgccggtgttcgacgacgcgcacctgctgccgcgcccgctcgtcatcgagctgcctacgacgacttcgtcgtcgtcgcccgccttggcggaggaggggga

SEQ ID NO: 21933 - DNA, 485 bp, Oryza sativa
  Clone ID: uC-osflM202042c09b1
caggactttcatatgctagttgcaaaccctcgcaaacagaagttgtgcattcaagtaaaggattcagttggtctaaccgatgtcactattggcactggagaggttgagttaggatcacttaaagacacagtacctacagacaaaattgtaactttatatggaggatggggcttacttgggaaacggtcaaaaggggaagtactccttcgcctcacatacaaagcatatgtcgaggacgaggaagatgaaggggtaaaaaatgagtttgctgcgggctatgtttcagacgaggatgtgctagattatgtccaagacagtacatgtaagcaaagtgacatggatggtaaagagagagagaccttcatggatctgctggccgcgctgcttgtcagcgaggaatttaaaggcattgtgtcgtcttttaaccccgtatcttggaagatagtgagctgcttgttaatccataattgttaaattgctttatt

SEQ ID NO: 21934 - DNA, 486 bp, Oryza sativa
  unsure (1)..(486): unsure at all n locations
  Clone ID: uC-osflM202042c10b1
taaaaaaaatccccaaatcgaatcgatcggaatttgcttctccgttgaggcgaggcgagggcgaagggggaacgaagtggaaggagatttggattgattggttggacgcctgcggcgcagatccccaattcgatctcctcctcttcgatcttcatcctaccctgcctgccagtgccagtataagattcttatgagctggtcggctgtggttttccctcaattctggtgctactaagatgggtcaggagctcaccacaaacaagcctctcacaaccctcttaccaacggatgaaatagcaaccgcctaccatttctccctcctgctctcacnctgtcgtctccttttgggactgcatcttccgcaggataagatactcattcagacctgagtgggtgtagcatcctgcactgcctgtttctttttagcgctagccagtgctttgctttttggcctggatcactccaaacaatgaactttgaagcttt

SEQ ID NO: 21935 - DNA, 220 bp, Oryza sativa
  Clone ID: uC-osflM202042c11b1
gctacgcggggttaccgataaaaatccccaaaatttccgctcccaccccgtcggattctccccccgaatccgagagttcatcgttttccgccgatttatttttatctggttttgtaaaccagcagcccaattgctctctgccttcgtctacctcgtggaagattccgggtcaaattctagactttttggtgggttgcgtgcgaggggtggtgggtttttt

SEQ ID NO: 21936 - DNA, 351 bp, Oryza sativa
  Clone ID: uC-osflM202042c12b1
ttgctcttgtagctctcgacccccgcatctcatccctcctctcgcttagttcagatcgaaatcgcaaatggcgaagattaagatcgggatcaatgggttcgggaggatcgggaggctcgtggccagggtggccctgcagagcgacgacgtcgagctcgtcgccgtcaacgaccccttcatcaccaccgactacatgacatacatgttcaagtatgacactgtgcacggccagtggaagcatcatgaggttaaggtgaaggactccaagacccttctcttcggtgagaaggaggtcacccgtgttcggctgcaggaaccctgaggagatcccatgggggggagactggcgct

SEQ ID NO: 21937 - DNA, 158 bp, Oryza sativa
  Clone ID: uC-osflM202042d02b1
gcgcgctgcttcccttctcccctctcgcccgccgccgcctggccgcgacgcgcatcggcgccgccccacgaccgcagcagagaagcccaccaccacgcgcggagcggccgaggaggccttaccactattggtgcgggatggcggaggccagtcttttg

SEQ ID NO: 21938 - DNA, 282 bp, Oryza sativa
  Clone ID: uC-osflM202042d03b1
ccgtcattagcgcgccttccaccacatggggatcatggggcaggaggcgtggcgcccccagcgcgtcctccccgagcgctccgtcaacatcctccgctcctggctcttggaacacttactccacccgtacccgagcgatgcagataagcacctgttggcgaggcagaccgggctgtccaggaaccaggtctcgaattggttcatcaacgcccgtgttcggctatggaagcccatgatcgaggagatgtaccagcaagaatgcaaggagctcgagggttcctc

SEQ ID NO: 21939 - DNA, 312 bp, Oryza sativa
  Clone ID: uC-osflM202042d04b1
gggttgtccggagttggaagcgatcgatggcggctactgacgactggacgagttgttgcgctcggcgcggtggcctcggtggcattcctcatttttcattccatttgcgcgcgcgattttggtttcttttccttcttgccacctgtttcttggtgggcttcccgccttctcagaggtccgccgattggatttggagcccggtgcccacccttgtctcaacgtctgtgttgcctcgatcttattggattcttgaccggattgtattttggcgggttccatttttgttggcttggtcccattcttggttgattt

SEQ ID NO: 21940 - DNA, 219 bp, Oryza sativa
  Clone ID: uC-osflM202042d07b1
tttttaaaaccctcccaaaattcaaacgcgaccaagccgctcggcgaggtgaacgaaacccaaccatggcaggcggcggaggtggcgaggggaaggtggcgtgcgcggcgtggatccggcgccgggaggagaaggagaaggcgacgcgcgtcttcgcggcgtacgggcgggcggggtcgccgccggccgtggaggtgcttgggttcgtttacgaggagg

SEQ ID NO: 21941 - DNA, 384 bp, Oryza sativa
  Clone ID: uC-osflM202042d08b1
tgcgaggtagacatggccgccgccaccatggccctgtcgtccccggcgctggccggcaaggccgccgcgaaggtgttcggcgaggggcgcatcaccatgcgcaagtcggcggcgaagcccaagcccgccgcgtcggggagcccgtggtacggcgccgaccgcgtgctctacctcggcccgctctccggcgagccgccgagctacctgaccggcgagttccccggcgactacgggtgggacaccgcggggctcttcgccgacccggagacgttcgccaagaaccgggagctggagggtgatccactccaggtgggcgatgctcggcgcgctgggctgcgggttccctggagctctcgcccgcaacggggtaaagttcggcgaggc

SEQ ID NO: 21942 - DNA, 423 bp, Oryza sativa
  Clone ID: uC-osflM202042d09b1
cagtagtttacttgatgctggtgaacgatctaattcatgggctttatcctgaggctgtagccattggtgaagatgtcagcgggatgcccacattttgtattcctgttcaagatggtggtgttggttttgactatcgtttgcatatggctgtaccggacaaatggatcgaactcctcaagcaaagtgacgaatattggaaaatgggtgatatcgtgcacaccctaacgaatagaaggtggtcagagaagtgtgttacttatgcagaaagtcatgaccaagcactagttggtgacaagactattgcattctggttgatggataaggatttgtatgatttttatggctctagacagaccttcaacacctcgcattgatcgtgggatagcattacataaaatgattaggcttgtcaccatgggctta

SEQ ID NO: 21943 - DNA, 479 bp, Oryza sativa
  Clone ID: uC-osflM202042d10b1
gtgaatgcctccaccggcggggctgctcccctggccggcgccgtccgccgcgcgcctggccgccccgacccggacgcgccctcctcctcgcactcgcgttcgccctgcaccccctgccgctcctcccccgccgccaccgcctcggctcgagcccgtcgtcgtcgtcgcgccgagcacaaccacggccaccgcgacgctgcctcccatcatcacccccaccttgtgcccctccacctgcacgtgcctcgaatgcgtccacttcaactcgtgttcgggttgcacgcacgaggatggatctggacaagccgccggtgctgaggaggtggaagaatttcttcaagggtcacggagttggaggatttcaccttcagcagaggcaggctgagggagttggcggtgcccggcaaagctagctatacgtggaacaccagagaacccgttgattgggctatatcaggaagggacacacgctgttgcag

SEQ ID NO: 21944 - DNA, 428 bp, Oryza sativa
  unsure (1)..(428): unsure at all n locations
  Clone ID: uC-osflM202042d11b1
acttccgtaacaagcatccgatcaacctcttcttgctcctcctcttcaccgtctgtattagcttctccgtcggcctgggttgcctctccaagaatgggacagtgatatttcaggcggcgggaatgacggcggcgatagtgatcggactgacctgctacacgttctgggccgccaagagaggctacgacttcgagttcctcggcccattcctcttcgctgccacgctcgtgctcttgctctacgccataatcacgatctttttgccgatggggagacggnggaagtttggtgtacggtttgcgtggcggcgcttgatcttctgccgggttcattatctacgacaccgacaacctgatcaagcgatacacctacgacgagtacgtggnncgncgcatcacgctctacctggacatcatcaacctcttcat

SEQ ID NO: 21945 - DNA, 394 bp, Oryza sativa
  Clone ID: uC-osflM202042d12b1
gcgctcgccgtgatggcagttgccgctgctgcggacggctaggtggcggcggtcgtcgtcggtcaggccaagtgcggcgagtgcaccaggaagaacatgatggcgcaggatgctttcaagggtctccaggtggcgatcaagtgcatgaacagcgatggctagtactagagcaaggccgtcggcgacttcgacgttgacggcgccttcagcgtgcccctcgccgtcgacgacctccacggtgccgtcgactgcttcgtgcagttgcacagtgcgacgagctgcacgccgtgccccgtgcaggagccgttcaagatcgtcccggtgtggacaacaacggacaactgcggcgacatggctaacacctttcgtcgtcgtttatggcaagaggatgcac

SEQ ID NO: 21946 - DNA, 357 bp, Oryza sativa
  Clone ID: uC-osflM202042e01b1
cggtgactacggctacgacccttttggcctcagcaagaagccagaggacttctccaagtaccaggcctatgagctgatccatgccaggtgggcgatgctcggcgccgctgggttcatcatccccgaggcctgcaacaagtttggcgcaaactgcggccccgaggccgtctggttcaagaccggcgccctcctcctggacggcaacaccctcaactacttcggcaacagcatccccatcaacctcatcgttcgccgcgcggccagggtcgtcctcgtcggcggcgccgagtactaccggatcatcaacggcctggatctggaggacaagcttcacccatgtggtccattcgacccgct

SEQ ID NO: 21947 - DNA, 312 bp, Oryza sativa
  Clone ID: uC-osflM202042e03b1
gcagtcagtagctgagcttgaagcagcagagcgaggtagacatggccgccgccaccatggccctctcgtccccggcgctggccggcaaggccgccgcgaaggtgttcggcgaggggcgcatcaccatgcgcaagtcggcggcgaagcccaagcccgccgcgtcggggagcccgtggtacggcgccgaccgcgtgctctacctcggcccgctctccggcgagccgacgagctacctgaccggcgagttccccggcgactacgggtgggacaccgtggggctgtccgccgacccggagacgtatcgccagaacc

SEQ ID NO: 21948 - DNA, 423 bp, Oryza sativa
  unsure (1)..(423): unsure at all n locations
  Clone ID: uC-osflM202042e04b1
actggatcaatgaagggctattgcattgatgtctttactcaggcattggctttgcttccttatcctgttacatacaagtttataccatttgggggtggtaatgaaaatccacattatgacaaactcgtacaaatggttgaggataacgagtttgacgcagcaataggggatattgcaattacaatgagcaggactgtaactactgatttcacccagcccttcattgaatctggcttggttatcttggctccagttaaaaaacatattgttaattcctgggcattcttgcagccattcactcttcagatgtgggngtgttactgggattattctttcttgttgtggggcaagctgttttgggttttttgaacactgaataaatgaccaattccgtggcttaccgcgagaacaaataattactat

SEQ ID NO: 21949 - DNA, 335 bp, Oryza sativa
  Clone ID: uC-osflM202042e05b1
ccctcgttgacgcctccatcgccctccgggctccgcctgcgccgccgccgccatggggagaaggcctgctaggtgctaccgccagatcaagaacaagccgtaccccaagtcaaggtactgccgtggtgtccctgaccccaagatcaggatctatgatgttggcatgaagaagaagggcgtggatgagttcccctactgtgtgcacttggtgagttgggagaaggagtaatgtctacagtgaagctcttgaggctgcccgcattgcttgcaacacgtccatgaccaagaatgcaggaacggatgccttccacctaacggtcatggggccacccgtt

SEQ ID NO: 21950 - DNA, 347 bp, Oryza sativa
  Clone ID: uC-osflM202042e06b1
ggctcattcgctcaatcctgctcctgctagtccacttggatacctttaaacaagaggagcggtgctaaagagtaatcgacttcatacctcatttttcattccatatgcacgcatgaaccgggtcttttttacatcttgccacctgattcttggtcgaatctccgccttctcaaatgactgacgattggatttggagcccggggcccaaacttgcctcaacgtctgtgttgtcgcgttcttattggattcttgaccctattggatattagcggatccaatttttgttgggttgctccaattcttggttgatttggccggaagatgatcaattggggcatctatagcaa

SEQ ID NO: 21951 - DNA, 203 bp, Oryza sativa
  Clone ID: uC-osflM202042e07b1
tcgataggcgagagtgagagagatggtggagatcccggcgatcgacctgcggctggccggcggcggcggaggagcagaagaaaccgggaggctccccaacgaacgcgcgcggctgggctgcttgcgagtgtctgtgcacggcgtgccgtcggggctccaggccgagattgaaggccgcggtgcgcgcgctctttgacctcccc

SEQ ID NO: 21952 - DNA, 379 bp, Oryza sativa
  Clone ID: uC-osflM202042e08b1
tacctctcccaaaattagccccgatccgatcgcttcctagccctgattcgaggtaaaaaaggggaggagaagatgagggagatcttgcacatccagggcgggcagtgcgggaaccagatcgggtccaagttctgggaggtggtgtgcgacgagcatggcatcgacccgacggggaggtacgccggcacgtcggacctgcagctggagcgcgtgaacgtctactacaacgaggcgtcgtgcggccggttcgtgccgcgcgccgtgctcatggacctggagccgggcaccatggactccgttcgcacggtgccctacggccagatcttccgtcccgacatcttcttcttcggccagtccggtgccgcaacaactggtccat

SEQ ID NO: 21953 - DNA, 486 bp, Oryza sativa
  Clone ID: uC-osflM202042e12b1
cttcccctggctcctcctcctgcaattccacttccatccgtcggcacaggaggaaggttgctaaggggggatcggctccattcctcattcttcattccatttgcgcgcgtgattcgggtttcttttccttcttgtcacctgtttcttggtcggtttcccgccttctcagaggtcggtcgattggatttggagcccggggcccagccttgcctcaacgtctgtgttgtcgtgttcttattggattcttgaccggattggattttggcggttccaatttttgttggtttgctccgattcttggttgatttggtcggaagatgatcaagtggggcatcggtagcagcgggacgccggcggattcgtattatgaggtccgctcggattgcacggatgacgtgcccaagagcaagttcaagatcaaggcaggaaaaacattgagtgtcccggaatggcaggctgcatttagcactgatggttgtcttgata

SEQ ID NO: 21954 - DNA, 387 bp, Oryza sativa
  Clone ID: uC-osflM202042f03b1
atcagcgctgggcggcctctagccttgccttaccttgccttacctcatcctatggcgggagaacatgccctatttattatatccaagcacacggtatatagcatcacaaacggcgacaatgcgagcatcatctctagcgtcagcacggaggaggacgagcacatcatggccgctggagaaacatcacacgttgggacgatcaccgtgcttgccatggacagaaccgacggcgacgacaggacgatgaaggaggaggagacggacggcatcgccatcgccaggagcgcctactccaacggaagccggcagcaagacaagaagcggggcgcgttcggcctcttccgggcgatgttcatgtccttcaacggcagcgccagcatcaagaaa

SEQ ID NO: 21955 - DNA, 154 bp, Oryza sativa
  Clone ID: uC-osflM202042f06b1
gtctcttgggggccgaaggggagaggaggatccaggggggaaacctccaccgatccggacgacgcgccgtcgacccgcaccgagatggccgtcggggactgccgcagggcgccaccggccgtggaggcgcagtcgctggaggaggtcttttgcg

SEQ ID NO: 21956 - DNA, 443 bp, Oryza sativa
  Clone ID: uC-osflM202042f07b1
ctttctgaaaatgatcaggcttttgacattctctactgcataaccttcaagttgatggatcagcaatggcttgacatgcatgccacttacatggacttcaatacggtcatgaagtccacacgacgtcagctagaaagggagctcttgcttgaagatattcagcggattgaggacatgccatcatacaagcttttggcccgctagctagtaactgaaccataacatggctacgtgctgcaaggcttgagttgcataagggttgcaactagtgcccacaaacagtgtgaattccaaaacgcagatgcacttgtttcctctcaagtttaggtactctgttaacctgtctccaaattacaagttagaggtctcttggccatagcacgccacgtagggtaactgaagtgttcgatcagctgccagggcagagtggttgtagggtgggt

SEQ ID NO: 21957 - DNA, 410 bp, Oryza sativa
  Clone ID: uC-osflM202042f09b1
ctgggactacattcgggtgaatgtaagtgagttggcagtgcaagagctgagtgctactgagtacttggcattcaaggaacagcttgctgatggacacaccaacagcaactatgttctcgagctcgattttgagcccttcaatgcctccttcccgcgcccgtacatgtccaagtccatcggcaatggggtgcaggtccttaaccgtcacctgtagtgcaagatgatccaggacaaggagagcctctaccccttgctgaacttcctgaaagcccataaccacatggagcacgacaatgatgctgaatgacagaattcacagccttcgtgggatccaatcatcccttagaaatgcagaagaatatatgatggtgcattcctcaagacacgccctactcggagctcaaccacag

SEQ ID NO: 21958 - DNA, 357 bp, Oryza sativa
  Clone ID: uC-osflM202042f10b1
tgtatctagcagaagaagaagaagaaaatgccggtgagccggatcgcggtgggcgcccccggcgagctgtcccacccggacacggccaaggccgccgtcgccgagttcatctctatgctcatcttcgtcttcgccggatcgggatccggcatggccttcagcaagctgacggacggcggcggcacgacgccgtcggggctgatcgccgcctccctggcgcacgcgctggccctgttcgtggcggtggcggtgggagccaacatctccggcgggcacgtgaacccgggcggtgacattcgtcgcgttcgtgggggggaacatcagcctggtgaaggcgttggtgtactgggtggcgca

SEQ ID NO: 21959 - DNA, 264 bp, Oryza sativa
  Clone ID: uC-osflM202042g01b1
aatttgttacagaagcggattgttatcctaatattggcatcgcttatcggatcctatgcactatgcctgttactgtggcctcagctgaaataaccttttcaaagttgaaattatcgaagaattatttgaggtctgtaatgtctcaagaaagattaaatggtttggcaactttatgcatagagaagaaactattagatgaaattgatattgatgccatcctcgatgatcttgcatcactacatgctagaagaaaatctctaagtt

SEQ ID NO: 21960 - DNA, 143 bp, Oryza sativa
  Clone ID: uC-osflM202042g03b1
gtgtttattagtatgagtagagtgttcatctttatcgtttgctacgtgagaatgtgaggacatggtggtctgtatgccgtatgcgatgtgatgatgatggatggtttgatgtttggtaatggaaatggggatgttctgctgct

SEQ ID NO: 21961 - DNA, 99 bp, Oryza sativa
  Clone ID: uC-osflM202042g04b1
gcattgcttgtcgtgtcactcctcccgttaagcttcccgcggcggcgagagcaagctaagctaggtcgggcatggggaaggacgaggtgatggagagcg

SEQ ID NO: 21962 - DNA, 308 bp, Oryza sativa
  Clone ID: uC-osflM202042g06b1
ctctctttccctttttaaaataaatccggataacgcatgggtgaaccctgcggattaacagagtaaactgcaacaaaccacgcgacccccaaacctctctctctctcctcgcctccgccgtcgccgtcgccgtgctcgactgctcctccggtgtgatccgatcacgcgcggcctctccgactgccgctcgcccttctccgcttcgcgtgttgtactgttctcccgcggtcccgcccgagcagaggtttgggtaggtcagcgagggaggttgcctagggcagcgggctgctgagagaggcgccaggcat

SEQ ID NO: 21963 - DNA, 98 bp, Oryza sativa
  Clone ID: uC-osflM202042g07b1
gccatctcgagtggctcgccggcggcggcggaggcggggagagatgctgccctacgcgacggcggcggaggcggaggcggcgctggggagggcgatga

SEQ ID NO: 21964 - DNA, 499 bp, Oryza sativa
  Clone ID: uC-osflM202042g08b1
ggctgatcccgcccgcctcgtccatgccgtgggtccgcaacctccgccgcttcgtcggcacgggcgccggcctcggatccgaggccttgatggaactggaaacaaaaaggatactgcttgagattttcaaggagcgccaacggaagagtatggaagctggtgccattccaagtttttataagaagaaacctgaagatggatccattagcaatagagttcagaaattggcaaagtacaggtttctaaagaaacaatctgaacttctgcttaatgctgatgatcttgatgccatgtggggtttgtctcagagaaaattgcgttattgatgatgctacaggtgctgaaaagatgaattatgaagacttttgccatattgcaacagtatgcacagagcagatcggccagatgtgcaagcgtttcttcagcccttcaaatttatgaagtttgagaaggatgattctgggagaattgaatcctaccattttatctttatgttatg

SEQ ID NO: 21965 - DNA, 273 bp, Oryza sativa
  Clone ID: uC-osflM202042g09b1
tgcgaagctagcggcctatgctgaagcggcgacgggctgtctgagagagcgggagcgcggcacgctgatctagaaaatcctacttccagaagctcatcccagaagtccagtcggcggtctggtagtcggcggtctcaaaagttagccgggcaacaatcttcaccaactgtattgccagagaaaaaaggccaatcacaatcttcgaggcagaaacacttggttttggacaataaagactccaagaaagcaaacaatactgagcaaaaacatgat

SEQ ID NO: 21966 - DNA, 407 bp, Oryza sativa
  Clone ID: uC-osflM202042g11b1
caattgaggtggctcttgcggtttactcactggtgttgcttgcctccttctccttcccttgcaggcttgcaagtgccctcctctctcccaagggtgtaaactatgaagtgcaagctctcatgatgatcaagacttccctcaaggatcctcacggtgtgctcaagaactgggaccaagactccgtggatccttgcagctggaccatggtcacttgctcacctgagaaccttgtcactggcctggaggctccaagccagaatctttctggcctgctctccgcaagcataggcaacttgaccaatcttgagatagttcttctgcagaacaacaacatcaatggtccaattccagaagagattggcaggctaacaaaactcaaaacacttgatctctccagtaaccacttc

SEQ ID NO: 21967 - DNA, 318 bp, Oryza sativa
  Clone ID: uC-osflM202042h01b1
gcgactgtatctaccacatttgctccatccagtaccagcccacctgtttcatctccaatccctgcaattccgacattcaattttggttcaagcacttcaatggtggcagcaactaaatcagatagtacaaatacagtggcaaagccagctagcagtttattgttcggtactggggatgctatagctgaagccaaatctactgcccaggatacagccaacaaggcatcatcaaatctaacttcaaatgatggaattgcctcaactacttctgcctcaacagcaccttttacattttcgagctcaagaaacaacactttt

SEQ ID NO: 21968 - DNA, 458 bp, Oryza sativa
  unsure (1)..(458): unsure at all n locations
  Clone ID: uC-osflM202042h04b1
ggttgccctacacatgtggagcattgggcctctctgcatgttctttatggcttttgcgccacagtagcttgatgggaagttctgacattgacaactggattcaagatgcaaaagaatcgatggttggtttttgggatgtgcatgttgggcaaccaatcatttccatcagggatgaactttttgagacattcaaacaaagatctaaacgtgaaatggaaaaacaagaggtccaacaaactgaagaatcattgcgcangatgttgcttgacttttgtgggaacacttcaaatgaaaaaccgccacaagatatgtcagagctagcaatgatggaagattgtcatgaagagatatgagaagggaagcaatgcatccatttaaaggtctttccagtggaaaattaacatgtgcattgtctattcagattgagaagcataaactggctcttctggaggcaatgc

SEQ ID NO: 21969 - DNA, 262 bp, Oryza sativa
  Clone ID: uC-osflM202042h05b1
cacttgtccatctccccccatccatcccccactcctccggtactcgcaccgcaccgcaccgccgattgatttggagaggaaaccccctcctcttcctcctccacctacctatcctgcttcccagccagatccgcctcctcctcctcccctgctccctcccagatctcacactccatctcgcgagcgcgccgacgcgggacagctcgccaccccgcccagatccaccgtctcgccggagccggagagaccgagcggcgggcgc

SEQ ID NO: 21970 - DNA, 353 bp, Oryza sativa
  Clone ID: uC-osflM202042h06b1
gtcatttttcccccccatctcctctctgcttgcgagcttgtcaaccgcgcaaaggttcatatatacaccgatcgaaatcgatcggtgtagagccacactcttggagtcgatcgttcgctggttagctaactaagctaagctgagctgccttgctctcttcgacgatcaggttgcttggtttgacgagctgacgatcgaggagaagaggacggcgaacgtttttttgcaggatcagtactagggttcatcttggagaaccaatttgattcgatagaacgagcgagtcgaagaagatggtgctcgcgagcacgccgaaggtggtgctgggatgcgtggggttcacgatcttctgg

SEQ ID NO: 21971 - DNA, 353 bp, Oryza sativa
  Clone ID: uC-osflM202042h07b1
gctcttttcctccgcggtccgctcgcctcctcacggcggctaagcagccaggaagaagaagaaccacgctgtttgtaggacgattcctggaacagccaacttctgaacctctatctgcaagactgcagacagtgtaatacttcttcctggttgcagtcgactgagcggaaaaaccaaattcagcttcattcatggggtccccaagcaaaacacgtgggatgaagccattggggattcagcttatgagtggtgcccgggggagtcctatctccttcagatcatgccaggctcttgtattgatactgacggtcttatcctatgctagctatcatgcactaggaagactacaagca

SEQ ID NO: 21972 - DNA, 334 bp, Oryza sativa
  Clone ID: uC-osflM202042h08b1
gtagggcctccctctcctggtgatggtggtggctcagttactaggaggggaggcgttgtccacaacaatgaggagacgtacttcttaaaatgctattcttaaaataaaattcccaggaaccctttctacacttattaccaccctactgcaattgaggatccccatgctactccattacacatcaacaattatgacacataccaaagtttctttaccgattctactatctttagggtggatcaatattttttcattgtcctttaccctttccaccagtgtcttcatcattccccaattttctctttagctcaaaatttaaatggacccatatact

SEQ ID NO: 21973 - DNA, 272 bp, Oryza sativa
  Clone ID: uC-osflM202042h09b1
tatcttattctgttccgtctggtgtgcctgtgggtggggccgtccgagatcaagggtggcggtggctgctgtcggtgacggagcggcggcggcggcggcggcggagcccaacctggtggtgtcgttcggggagatgctgatcgacttcggccccgacgttgctgatgcttctctggtccagatcagcaattatgtcacagaccccgggtgggtccccgctctctctagctttagggtggatcaattatttggacattgcctcctttaccctt

SEQ ID NO: 21974 - DNA, 508 bp, Oryza sativa
  Clone ID: uC-osflM202042h10b1
tggtcccaaacccggagagagccggaggagatgccgggtctcccgcatcctcaccggccgccggcgatggagaagggcaagggcctcgcccgccgctgggcggtggagctgcacgacgcctcctactcctcctcctcccactcctgcatccccgacccgcccggcttcaccagatccgaccccgacgcggacgacgccgtcggcgcgcggcagcggaaggattccgagaccgcgtggaaggcgcagaaagcgtgggaggtggcgcatgcgccgttcaagaacctgatgatgatgggtttcatgatgtggatggccgggagcaccgtgcacctgtttagcataggtatcacgttctccgctctgtggcagcccatcagcgccctccgctctgttggcaaagtttttgaaccattcaaggacccaagggtggatactctagcacctaagttggtctttattgctctcaacttggcagctatgggtttaggtgtatggaagctcaatacgt

SEQ ID NO: 21975 - DNA, 302 bp, Oryza sativa
  Clone ID: uC-osflM202042h12b1
ttatggtatggcctctcccctcaggcatgcgcgcgggattcattgatactgtgtcgctatcttcttccctctcactatccggcctaccttcctgcaccccgacacgcgcacagcacacacacagccgaccgtcacacccgcacgcacaatgtaaacccctgtctcacgctacactgctataccacgatgctgacacgccgccaggtgggatccctcagactgacgacgatacacctctaccaaatgcatgcctagaccgaggacgacgcatagagccccaggccttatgatgcaaggacgga

SEQ ID NO: 21976 - DNA, 273 bp, Oryza sativa
  Clone ID: uC-osflM202043a01b1
attttctttaccgtcggagctttttttgctcgatcggaggatgcagcaactcatcgagcggcgcggtgccaccacgctactacgactatatcaatcacctatcgtcagcggaagatcgaccgatcattcaagccagccatcgatccattacaataagcagctagcttggagaccgatcgatcgatcgatcatatgtcgattcgattcgatccgatggagagcataaacagcagcatgcagcagaagcgtggtgatgatgtgcctgcgagctga

SEQ ID NO: 21977 - DNA, 299 bp, Oryza sativa
  Clone ID: uC-osflM202043a02b1
aaccaatctcctcccccctcctttcctcctcctcccgaaccaccggaatccgacgcggcgccgccgcgccaccccgttccgccggctctcttcctcacctctcctccccaggagatcgtcaatctcctcggtcaggtgtttgatcgattgcctgtgggaagcatatgggcggttagattcgtgaagttgagaggaatcagaagacgggaattgtttgaggggactgaatttgatctggaaaatggggtggttttcggcctgcgtccggattggctcgggtggcgctgtggaggaacctg

SEQ ID NO: 21978 - DNA, 502 bp, Oryza sativa
  Clone ID: uC-osflM202043a04b1
ataagattaatacttcacgttgctgagttgagaaaaagatggttgaatcaaaagaattctttttttgaagttcattttttatcaggggacaatatgaatattataccgtgttccattaaaacactcatggggttatacgatatatcgggcgtagaagtaggccaacacttctattggcaaataggaggtttccaaattcatgcccaagtacttatcacttcttgggtcgtaattactatcttgctaggttcagttatcatagctgttcgcaatccacaaaccatcccaaccgatggtcagaatttcttcgaatatgtccttgagtttattcgagacttaagcaaaactcagattggagaagaatacggtccctgggctccctttattggaactatgttcctttatatttttgtttcgaactggtcgggtgctcttttaccttggaaaaatatacagttaccccatgagaaatagcagcgcccacgaatgatataaatctact

SEQ ID NO: 21979 - DNA, 317 bp, Oryza sativa
  Clone ID: uC-osflM202043a05b1
gtttttacctgctctgccgttgctctctggactagtggacagggatttctacgaccacgtgaggttcgagacatatgaaccaagccagctaaactatattatggttgcggcaattttaagggcactgacaggggaaacacccatacgtgactgcgacacaagcccagcatagacggctgaagtagttgacaaggtgattgttgctgatttgcaactaaaacagggggtaaagatagttacagatgataagggtactagactgtcgtatgcatctgctgatgacgctgctgtcattgaagagcttattgcaaagttag

SEQ ID NO: 21980 - DNA, 381 bp, Oryza sativa
  Clone ID: uC-osflM202043a07b1
aataaattggatgtggcagttagcaggtaaagagataggatcaacaaatgtatgaaaatgctgaagactcctgatccaaatgctgcggcaagctctttaggatggtaacagcaaagaagctgaagggcaaggatgaggctgtactgttgagctcttggcaactcaagtaaaaggggtagaaggctcgggtgattcaggtgctgctgttcattgtcggaataaacactgtgccaactggtcttcgggccttgtcttctggctctgatgcaaggatcgtacgccgttgttacactgagagtttccattatactggctggccatccccgcaatgaagcatgtccttatgagggggaaaagggtcggttgattccaggcgctgtt

SEQ ID NO: 21981 - DNA, 420 bp, Oryza sativa
  Clone ID: uC-osflM202043a08b1
ctcctattgtactctgctgcctacgtctttcttgagctaatactatatatccatctggcggggacggcgacgatcatggagaccggggacgacgtggaccacgcctggggactgcgctactcctactcgccgctcgccgccggggacggcgactccgacgacctcggcgccgtccgtcgatccgggaggcgcccgctctgcggcaacctgttacttggctccgactcagtgatcgacagcttcatcgagcagttcatcttcgatctgtcaccgaggctgccactggcgtctaccatcggaggtctattcataatcggtagcggttccttgaatggaggagctgcatatctgtttgaagctgactgtgccaatgaggagctcactgaagctgataagaagggatcatggccgctgagcgcc

SEQ ID NO: 21982 - DNA, 408 bp, Oryza sativa
  Clone ID: uC-osflM202043a10b1
gcttgccgcaggttactgatccaccgaaggagggaggcgcccgcccgccgccatggccgaggtgacggtggtccgtgcggagcgcgaggaggagtccaccctggagcagggtctcctcgccatcccggaggaatccaaccaacttacatacactggagatggatctgtcgacttttctgggaatcctgttgtgaaggagagaactggtagatggagggcatgcccatttatcttaggtaatgagtgctgcgagcggttggcctattatggaatctgcacaaaccttgttacatacttgacaaagaaactgcatgatggtaatgcttctgctgctagcaatgtgactgcatgggaggcaacttgctacttaactccccttattggagctatactggctgatgcatactg

SEQ ID NO: 21983 - DNA, 291 bp, Oryza sativa
  unsure (1)..(291): unsure at all n locations
  Clone ID: uC-osflM202043a12b1
taacacgaaggccaactcgaggctgctgctggaggagagagagaggatctggctagtgcgggcgacacaagcgagggcggccgctgttctggaacaggaggaggggctgccgctggcacgcgcttatctgtcgggctgatgcgagcattagggggatcgtgcggatgcacgagctcccagagatcgatgagcaggagagcagaggctgagacgattgaacctttnactattagaccaactgcttcacgaaaattcaatcaactgagaacaataatgatgatatgaccaact

SEQ ID NO: 21984 - DNA, 513 bp, Oryza sativa
  Clone ID: uC-osflM202043b02b1
gcccctccttgcttgaggctcttgaccagatcaacgagcccaagaggccatcagacaagcccctacgtcttccccttcaggacgtgtacaagatcggcggtattggtaccgtgcctgtgggtcgtgttgagactggtgtcctcaagcctggtatggtggtgacctttggtcccagcggtctgaccactgaggtcaagtcggttgagatgcaccacgaggctctccaggaggctcttcctggtgacaacgttgggttcaacgtgaagaacgttgccgtgaaggatctgaagcgtgggtacgtggcctctaactccaaggatgaccctgccaaggaggctgccagcttcacctcccaggtgatcatcatgaaccaccctgggcagatcggcaatggctacgccccagtgctggactgccacacctcacacattgccgtcaagtttgctgagctggtgaccaagatcgacagacgatccggcaaggagctggagaaggagcccagtttctcaagac

SEQ ID NO: 21985 - DNA, 381 bp, Oryza sativa
  Clone ID: uC-osflM202043b03b1
tgaagttgtgatcattgcttgcaatgcaaagaaggttaggaatactagcacttcggccaatgcttttgtaactccaggaggtgttatatgtgctaaggcatccatgctactgcagagtgtcccacctgcagctttggttcgatttttgagggaacatcgttctgaatgggcggattataacttcgatgcatattcagcttcatctctgaagacaagctcatgttcacttcctgggttgcggcctatgagattttctgggagccagatcattatgccacttgctcacacggtggagaatgaggagattttagaagttgtccctcttgaaagacaaagtggtcacacatgattgatgtacttaagtgttaagatattgaccct

SEQ ID NO: 21986 - DNA, 150 bp, Oryza sativa
  Clone ID: uC-osflM202043b09b1
ttgaaagaaaagaaacaaaaaaggaaaatcgtgtatcgtctcgtatcgtcttcgtctcccccgattcccgagcagcttctcgaaaccctcgcggcctcgattccggcgatggcggagcccaacccgcaagtggagagggaggtggaggtt

SEQ ID NO: 21987 - DNA, 411 bp, Oryza sativa
  Clone ID: uC-osflM202043b10b1
ggttttactccagaagctcgtgacatgtttgaaagagagttcgaattttttgacaaggtcacctcgatttctggtgttctttttcctcttcccaaagaagagcggcgagcgggtattaaaagggagctggagaagattactgtgccaggtgatgatctgtacctacctactgcaacaaacaagtttgtacggggcattcaagtagacagtggcattcctctccagtctgctgctaaagttccaataatgattactttcaatgtggttgatcgtgatggggacccaaacgatgtgaagccacaggcttgcatttttaaggttggtgatgattgtagacaggatgtgctggcactccaagttattgctcttctaagggacatatttcaagctgttggattaaacctttatctc

SEQ ID NO: 21988 - DNA, 249 bp, Oryza sativa
  Clone ID: uC-osflM202043b11b1
accgcaccaaccccaaccccgcgcgcgctctcccctctcccctcccaccaaccccaccccatcctcccgacctccacgccgccggcaatggcggcgaccatggcgtccaacgccgcggctgcggcggcggtgtccctggaccaggccgtggcggcgtcggcggcgttctcgtcgcggaagcagctgcggctgcccgccgcggcgcgcggggggatgcgggtgcgggtgcgggcgcgggggcggcgggag

SEQ ID NO: 21989 - DNA, 511 bp, Oryza sativa
  Clone ID: uC-osflM202043c01b1
cgcgcacctgcgcccaggcggagcagctcaacgtgtcggtgagccccgagtggggggtgctccccatgcagaccatctacggcagcaacgggtgggactcgtacgcgtgggcgttcaaggctatgatggacgaggtgtctctcgtcatgcacaacccgtacttggaggactacccaatggacttgcacgttatggacgtactactacatgatggcactgtgccctgctcgcttggtcgaagtgacacgtgatacatacggcatggattgggtggcttgaacggtaagctgaagaattaattgatggcggaatcatgtctaccgaatgggttttgattgctctgcgtttagagaatagatatttgactttactgaccccaagattaaactcattgatttttttttatgtttatgtacccatttattgaattcttaacagctcgcgcctatagaagaaagcctgccgtgctttctaatatttatctcattttattattttttttctttttttc

SEQ ID NO: 21990 - DNA, 518 bp, Oryza sativa
  Clone ID: uC-osflM202043c02b1
ctccttccctcctctcctctccattccgccgccatgggcgccgccgccgccgccgccaccacccccaactccctcctcctccgccgcccggcggcacccaagccggcctccgcggcggcctcgccgctccgtctccccacgcgggcagccaggatctcctgcgcggccgtgaccacgcccgagcaggccttcttctaccacgtcgtcctggtcgacgaccgagcggcccgctaggtcgacgtgacaccgaatgcgttcaccctggactggctggtttggacgggaggctgaagaattaattcatggcggaaccaggtggaccgaatgggctctgattgccctgcgtctagagcagagatctctgacgttactgaccccaagattaaactcattgattttttcttatgcttatgtacgcatttattgaattcggaacagctcgcgcctatagaagaagccgtgccgggctctacaaattcttgaacgagtcctctcatcttttcctttttgtgcagctc

SEQ ID NO: 21991 - DNA, 520 bp, Oryza sativa
  Clone ID: uC-osflM202043c03b1
ggcgttttcgtactcgcctctctccgcgccctcctccgccgccgctcgccgccgttcgtctccgccgccaccgccgccgccatgagggagtgcatgtcgatccacatcgggcaggccggtatccaggtcgggaacgcgtgctgggagctctattgcctcgagcatggcatccagcctgatggacagatgcccggtgacaagaccgccaggagaagtggatatgcttctgctgtcgttttatgctcttgattagttgatgcgcatgttcaatgatttatgatgtttgtctctgtggaaagattacatgtaaagagtatagtagaacccctaaaagctagccagcgattttcgctcttttttttcaggtctccatgatatgattacccctaaaagggggatatttatgtgatagttacaatacatagtggcaccacgaattgattatgcgataattgctgattccgtcagaaaattgttagattccttgtgctttatacctgcttgttgcgctagtagagaa

SEQ ID NO: 21992 - DNA, 425 bp, Oryza sativa
  Clone ID: uC-osflM202043c04b1
gtgtctggtgacagcaaccgagagataaatgcaatacctgcggagaacctatacaggagattcacatgagctcaaagattctgtcgtggacgataaggatcctagacatctgactgaagggagcttgccagacaaagctgcatcaaattttaagaatggaatcaaaccttcagccagcagtaagcaaaagcaacaaaatgacagccagagtgaaatcagtgatcatacaacaggagcatctatcttctatgagaaagccaagaagcatttagcagatatgctaaagaacactagtcaatctgccagctatccgacagcccaagtatcaaaatctttggaaggaatgctttctcaacctcattacaacggtgtcaccttctagggagtgaccataggggaaaaatgccacaatgccttctcacctg

SEQ ID NO: 21993 - DNA, 504 bp, Oryza sativa
  Clone ID: uC-osflM202043c05b1
cgaactcaacaagccaaccaagaagaggagaggagaagagaggagtcaagaaacgcaaaaggttatcaacagtaagtactcattgaagtatcacttcttcaggagtagtatgggtattgaaattgtacctcaatccttcaatgaggagctggattctactgttactatcactcctgctagtgacaacatagatgtgtctgatgatacaagtgttcctcatccatcagaagtgcctgccacagtaaatgttgttctagttgagcaatctgataattcaatctctgaacctttggaatctgatggagccaatggagctacagaaaatgttgttcccttggcaagtgagaagtctactgacaacaatgatgctatgaattcagagccagtgaattcagaaccatatgaagcatctcctgctaataatgctgaaaagggagatgtgatgcagcaaagtgatgagaacaatggtgataaacaggagaatcaggaactgttgtcttcatg

SEQ ID NO: 21994 - DNA, 522 bp, Oryza sativa
  Clone ID: uC-osflM202043c09b1
ttgatgcttatcaaacggcttgctgataaacaacatgctagagcagtggttttagtgctagtattatgtctttggctgtcagctcatttgactgtcctgcggccgattcgagtcatccccttggtcttgggagttggaattcttataaatgaacggaaaatggaaaaaacaaattgattggtgccacttcaaagttaaatatgccaagacgaattgatatgtttctgctgttggtttatgctcttgattagttgatgcgcatgttcaatgatttatgatgtttgtctttgtggaaagattacatgtaaagagtatagtagaacccctaaaagctagccagcgatttcgctctttttttccaggtctccatgatatgtctacccctaaaagtggtatatttatgtgatagttacaatacatagtggcaccacgattgattatgcgtttatgctgattccggcagaacattgttagattccttgcgctctatacctgcttgttgcgctcagagagaatattaca

SEQ ID NO: 21995 - DNA, 472 bp, Oryza sativa
  unsure (1)..(472): unsure at all n locations
  Clone ID: uC-osflM202043c10b1
ggaacttgttttttgtatttttcttttcggtagctactttctacatctctcttatttggatcacgtattatcctttttcattccacgaccgacgaccaatgttccgacacctcgccgccctgatcctgtccgccgtcgtcttggcggcgtccacaagctccggcgtcgtcgatgcccgtcctgtccacaccggcccgtaccacgtcgtcatcagaaccgccgccaagcccagccgtcgcctgatcgggctcggcggcaatgccgccatatgccaagaggtgcactacaaggcgctgtgcggcacgctgacgacgctgccgggggtgatgacgccgcagcagctgctggacgcngcgttgcgggtggcggagtccaaggccatgatggcgcagaagcggctggccgacgtgatgacgtcccgcgcggtgaaagccgaaggcacgagcatgtcgtcgacgctcgacacgtgcaa

SEQ ID NO: 21996 - DNA, 275 bp, Oryza sativa
  Clone ID: uC-osflM202043c12b1
tacttcggcggctcatgctcgatccgcggccgaaaccctaggtggcggcggtgggattaggacctcctacactatacactccaccctatgtatcacctaaccccaccacactcgcctcttcatatcaacacaaatactcgcaaccactcatctcaaccccatttcctcctcttgcacgacatccccctctccccacctgccgcaatacccaagaagccctcaccccacctcctcgccaacaatttcgcatccctaacgcctacagcaacaccccc

SEQ ID NO: 21997 - DNA, 418 bp, Oryza sativa
  Clone ID: uC-osflM202043d01b1
tctagatcgcgacggacgcccttcatcttaccgtgtggttgagctccccatgacggacatgagcaaagctaggatattccatcatcaaataaatggaataggcaaatgggcaaatgctgtacaagtcctgtacatacacacatgctatccttgatctctcctgtaaggctgccacccagctcttaaaaaggagaaagaattcaaagaattgaactcgtacactatggtccacataacaaacatctattcctggagctatatatgggagtcctctgcacaaaggccagcgtcagctgatgcgtgagattatgtaccggcctttctccaagccggatatgaacttcgtcttgggcttcctccattttgccaagcaaagtgctccacctagaagaaacacccccagcagcacagcaagcaa

SEQ ID NO: 21998 - DNA, 233 bp, Oryza sativa
  Clone ID: uC-osflM202043d02b1
gggatccaagtcgcaggcgaagaccaaggccagggaaaagctgctcgccaaggaggctgcccagtggatgacctaaattatagctcctgtagtttcatttttcagtcagattttgacgaggaactcgaattagcactgtacaaccgtgctgtggttttctgagtcttggtttcatatcttctctgttcaccggaccatgttgggatactatgcaattagtacaaccgtgcttc

SEQ ID NO: 21999 - DNA, 532 bp, Oryza sativa
  Clone ID: uC-osflM202043d04b1
atccgcaccgcagtcctgtctggggattgattgattgatcacgcttgcgaagaagaagaaccttggatggatgggacgaaggccgcacgctgctgcaagcgactgaatacctgggggccgagggcacggctgattcgcaagctccgcggtcttattgtcgagaagaactgtgctccactcatgctccgccttgcgtggcactctgctgacaccttcaatgtgttgccgaggaccggcgggcccttcggcaccatgaagaaccccgaggagcattgccacgccgccaacgccggccttgacaacgccgtcaggcttctcgaccctatcaaggaccaacttcctatcctctcctacgccgacttctaccagcttgctggcgttgtggccgtcgaggtcaccggcggacctgaggtcccctttcatccgggcaggcaggacaagcctgagcgctctctgaaggccgtctttctgatgccacacaaggttctgaccacctaaagcaggtcttttttgccagatgggtttgagtgac

SEQ ID NO: 22000 - DNA, 384 bp, Oryza sativa
  Clone ID: uC-osflM202043d07b1
catataaccccctctcccccacttctcccccacaaactagggtttcactcgccgccgccgcccccgccgacgtcatggccgccgacacctccaagcccttcttcccggcggcgccgaaccccgccctcctcccctccggccgcaagccctcccgcctctccccggaggcctcctactggcgctccttccgcgcctcctagctcacccccgtcaacgagttcaacgtcacccacctcgccttctccccctcgtcggcccccaccctcgccgcctcgttgtccacctccgtgctcctcttctccggcgacccgctctccccgctcccccgcatccccgcctcccaggacgtcgccttctccccgtccttccgctccgacggctccc

SEQ ID NO: 22001 - DNA, 472 bp, Oryza sativa
  Clone ID: uC-osflM202043d09b1
ctctggctcgcctccaccaccgagatgccggggctgaccgcgccggcgagctactccgacgagccggctcgccaccccgccctcaagatcaactacaaggaaccatttaatgctgagcctcatcgatcagcattagtttcatcttatattaccccggtggatttcttctacaagagaaaccatggaccgataccaattgtggatgacctctcaagatacagtgtttccattactggtattgtcaacaagaatgttcagctgtccatggctgacattaggagtctcccaaagtatgatgtaactgcaacgttacagtgtgcaggcaacaggaggactgcaatgagtaaggtacggaaagtgagaggcgttgggtgggacatatctgctcttggaaatgcaacatagggaggagcaaagctatctgatgtccttgaactaggtggaatacctaaacttagtttagatacaattt

SEQ ID NO: 22002 - DNA, 460 bp, Oryza sativa
  unsure (1)..(460): unsure at all n locations
  Clone ID: uC-osflM202043d10b1
gtgagaataatctctatgttgtggagggaatgcagtttgaacgtggttatatctccccgtattttgtaactgacagcgagaaaatgtctgcagaatatgagaactgcaagcttcttttggtggacaaaaaaatcaccaacgcaagggatcttatcaatgttttggaggaggccataagaggtgcatacccaattctgataattgctgaggatattgagcaggaggctcttgctactcttgttgtcaacaagcttagagggtcattgaaaattgccgctatcaaagcccctggttttggtgagcgcaagacccagtacttggatgatattgccattctaactggagcaactgtaatcagggttgaagttgggctgtcacttgacaaggcagacaaatcagttttagggaacggcttgcaagggtggtccttaacanagagtcaacaacaattgttggtgat

SEQ ID NO: 22003 - DNA, 461 bp, Oryza sativa
  Clone ID: uC-osflM202043d11b1
ggtactttggccagactgtggatggcaacctggatccctgactgacttgattactgctgctgcggctaaaaaagtatatagaaaggcaacattgtgcatacatcctgacaaggtgcaacaaaagggggcaaatctacagcagaaatatgttgccgagaaggtgtttgatctccttaaggaggcatggaacaaattcaactcagaggaactcttctaaacggcctgcgcaaatgaaacatattgctcaccaatcttcacctgcatgaggcaatcggggtgggacagcacctcatagaacaaccgagctggagcagtcggtcggcggacccatgaaacgatgaagcgaaagttccaccataattacaattgtattggtattaccaatattgcttggtttattatacaccctcatgttctaccttctgtatgtgttgattcagatgacatttcacagccacatg

SEQ ID NO: 22004 - DNA, 412 bp, Oryza sativa
  Clone ID: uC-osflM202043d12b1
tcggttccacaaactcatcatcgtgtagttttaggccatctgagggcctttgaatggctctcggcctccttcatttttcatagcatttgtgtagtgtgtgcaaatccatcatcgcatcttcatatctgaagaaatgaaggtgaccactcagctcaagcccatggcctcctcgtcgacgtcgccgtcgccgactcggctgccgcggagcgcgagcggcaaggcgcccacctcgccgccgtccagctccaacgcctcgcgccgccaccaccagcagccggcgcgggccgtcggagcctacgcccgccaccccgtggccgtgctgccaccacctaaggacgctgcccatcagctccatgacgatgatgaccaaccaccactcgccgccgacgggctccacccacatcgacaaggc

SEQ ID NO: 22005 - DNA, 389 bp, Oryza sativa
  Clone ID: uC-osflM202043e01b1
gctataacattatattgcagcaatggcatcctacttccttctactcgcctgtgatgaggaggcggctatggtgtccgccgtctcctgcggaccacccaaggagccaacgggccacaacatcacgacaagctaccgcgacaagaggctgtaagccaaggccacctggtatggtgcgcccaagggtgctgaccccaaggacaacggaggcacctgcggctacaaggatgtcgacaaggctccctatcttggcatgaactcctgcggcaacgaccctatctataaagacggcaagggctgcggctcatgcttcgagatcaagtgctccatagccgaggcctgctgcgacaagccgggccttatccacgtcaccgacatgaacgactagccca

SEQ ID NO: 22006 - DNA, 382 bp, Oryza sativa
  Clone ID: uC-osflM202043e02b1
cctcgcggtgtccctggcgaagtacacggcggagctgaccgcgaagctcgccgccgagaggggcgccttcaccgtcgtgctctccggcggatccctcatcaagaacatcaggaagctcgcggagccaccgtacctggattcggtggattggagcaagtggcatgtgttctgggcggacgagagggtggtgcccaaggaccatgaggatagcaactacaagctcgccttggatgggtttctctccaaggtcccaattcctactggccaagtttatgctataaatgacgccttgtcagctgagggagcagcggatgactatgaaacttgcttgaagcaacttgtcaagaatggtgtgattgcaatgtcgcaatcgactgggttt

SEQ ID NO: 22007 - DNA, 206 bp, Oryza sativa
  Clone ID: uC-osflM202043e03b1
gctttttggaccaaacttgaaggtcgcgaccacgaggagcccaacctatacactggtagatggaagaggattgttctctattgattgttgaagctctgagatggaccgtcacgaggtttcaccggacgactgagcggatggacagacgccagagctcttgcaatgtgtctcatgcctcgcgcatggtggaggggcttgaccaggac

SEQ ID NO: 22008 - DNA, 505 bp, Oryza sativa
  Clone ID: uC-osflM202043e04b1
gcaccatgatctgaatccacctgtagcgataaccgacatgcgctccgacacaattttcatgacagatgattatgctgccaagattgctgatgttggtatctggaaagaagtcgccataaaagcaaagactgcaaaggaggatagcagcagccgttctgaatgttctcctgatatcgcgagcaacgtctactgctttggcacgcttctgatagagatcatatccggaaagctccctgaagcagacgaccaagaatccatgtgcaactgggccgctgagtatctgaagggcaagagctacagcaagctcgtcgacgcgtcgctgaaggaacacaacgccaacgagctggaggccgtctgcgaggtggttcaggagtgcattgatcccgactcagataagaggccaacgatgagagacgccacccgcaagctgagacaagctctcaacatctcgccggaggcagcgacgccgcggctctcgcctttttgtgggctgagctcgagatac

SEQ ID NO: 22009 - DNA, 386 bp, Oryza sativa
  Clone ID: uC-osflM202043e05b1
catcgtccaaaatccgaggttggagcttttgctcgggcgattgattttggaatcggaggaggggatgtcaggaccactcgatcgatttgccaggccatgttttgaaggttttacgcataatgatgaaaagaaagagatcagatctgacgcagacaactccgaaggagagaagaagactaaaattggttctttcaagaaaaaggcgattaatgccgggaacaaattcaggcattccctgaggagaagaagcaaaaagaaaaatgaacctcggggttccattgaggacataagggatgttcaagatcttcaagctgttgatgcatttcgacaatgtttagttgatgaggacctgttgccgcaacagcatgatgattatcacacaatgc

SEQ ID NO: 22010 - DNA, 139 bp, Oryza sativa
  Clone ID: uC-osflM202043e06b1
gaaggaaatgggcttttcaattccacagatgcagtgctttataaaaaggcagctagttgagtagcaaccttgtaagaatatcagtatataactcttagcatcatattcagactgtatcaatcagagtaacttacattcc

SEQ ID NO: 22011 - DNA, 301 bp, Oryza sativa
  unsure (1)..(301): unsure at all n locations
  Clone ID: uC-osflM202043e07b1
ctgcgcccatctgctcctctcctctcctctcctccgctctcgcgaagctcccaagtttgactccctcgagacccaccaccaccaccacgccgcgagcacgcgagcgaacgcgcggcggcgggggggatgggaggggttntatacncttgatcgttctctgggggatgtgctctggccggaccagcgggcggcgcccatggcccatggcgctctcggcggctacgtcagcctggatgggtttctctgcaaggacccaattcctactggccaagattttgcttataatgatgccttggccgct

SEQ ID NO: 22012 - DNA, 482 bp, Oryza sativa
  Clone ID: uC-osflM202043e10b1
gtcgtccgtagcgggagggagggagagagtacgtgcgggcgtccggaggtctcagcgcacgcccgcggccgggccgtcgcgccgatcgcgatggggtcgtggcggctcaaggcctacggcgccctcaaggactccaccaaggtcggcctcgccaaggtcaacagcgacttcaaggagttggatattgcaattgtgaaggccaccaaccatgtagaatgccctcccaaggacaggcacgttagaaaaatattcttggcgacctccattaaccgccctcgagcggacgttcaatactgcatctatgccttgtcaaggagattgtccaagacaaagaattggacagttgcattgaagacattgatagtggtacataggctcttgagagaaggtgatcctacattcaaagaagagttcctggcctactcatacaagggaagcgttttgcagagagcaaacttcaaggacgattcaagccaattagc

SEQ ID NO: 22013 - DNA, 336 bp, Oryza sativa
  Clone ID: uC-osflM202043e11b1
cggacgcgtgggtggatggatggtggggttaggattattaagcgcaagatcctgtgcaaggcattccttttttgaaaatcatcctatacctgttaacatcatatacacacagtttccttcggagtaactgaatttctaaaatataatgaaaaatactcaacccaattatgatgatccaattctacaacacatgtccatattacagatattctgttacttgagcagactgtacattgttaccatgtagtttttatttatggatgtttgtacccttaacaggatagtgactatatcgaattgaatatccgggctgttattatttccatgcatgatcat

SEQ ID NO: 22014 - DNA, 499 bp, Oryza sativa
  unsure (1)..(499): unsure at all n locations
  Clone ID: uC-osflM202043e12b1
gacgtgccatcgtcgtcacacgcgtacggcgtaccggcaccttcgatggcggccaccaagcccccgagctgctccacccgcctcagatctccggccaccaccgccgcctgcttcctcccggcgtccctccttctcttgctactcctcctcctcctccgccgccctcccatgggctccttccctcccacaattccaggtggctccgtgtcgtcgcggcgggcggagctgtacgggaggatggcgagggacctcgacgagcgcggcgcggcgttcttggacggcggcgagacgncgcagtcgctcacgctgtcggagctcttcgacaccagggacggcgccgtcgtgcccatgctcaaggctgccaacccgccggtgcgcgcgaatgtgctctacctggatcctgagtttgcttccgtgatatcgaaagctgtgaaggaagtgtttcttccttattttaacaagctatctggttccaaaatatgagcatctaccacttcag

SEQ ID NO: 22015 - DNA, 473 bp, Oryza sativa
  Clone ID: uC-osflM202043f01b1
gctttttcataatatggcactattggtatcctcatcgcttttactcgcctgtgctgtggaggcggacatagcggtcgtcgtctcctgcgggccacccatggcgccaacgggcccaagcatcacgacacgctacggggacaagtggctgtaatccaaggccacctggtatggcgcgcccaagggtgctgaccccaaggacaactgcggagcctgccgctacaaggatgtcgacaaggctccctttctcggcatgaactcctgcggcaacgaccccatctacaaggacggcaagggctgcgggtgatgcttcgagatcaagtgctccaagccggaggcctgcttcgacaagcccgaccttatccacgtcaccgacatgaacgactagcccatcgctgcctaccactttgacctctccggccttgccttcggcgccatggctaaggatggcaaggacgaagagctccgaaaggccg

SEQ ID NO: 22016 - DNA, 349 bp, Oryza sativa
  Clone ID: uC-osflM202043f03b1
actacattgacgaagcttgccggtccagagcatgagaagtttacctgaaatgctagtgaagcaacatgtttgcatgctatgaatgatccaagtgccttgacccaccatatcggagttgtacctgatgctgatcccaaacagaggaagcctgtgggatatgaaactgtcacaagctaagcgcatgaaggaggggctacagcactgcaggactgtggggatattacagaggatagattgaatttccttccagagctggctgcatgtgttaagaaggctggattagaagattctgaccagaaagacaagggtcaacacgaggctggtaccactattttgcctacttgtgatg

SEQ ID NO: 22017 - DNA, 132 bp, Oryza sativa
  Clone ID: uC-osflM202043f04b1
gccatgttgctctacactgtcaaccacgccgccgccggggtcgccgccgcagcggggccggggaaatccttctccgcggatgcgcctgcggagccatcggtgcgcctgccaaggacacgggctcctgctgcc

SEQ ID NO: 22018 - DNA, 522 bp, Oryza sativa
  Clone ID: uC-osflM202043f06b1
tgtctaagtcctcaaggcgaacggcctccatcttctccttccagctcctcccatggcgtccctcgtcgccatcgccatcgccatggctctcatggtggttcaacctggccggcagatgactgcctttgctgctcggacgtcgccggcggcggcggcggaggcgttctggcgtgccgccatgcccggcgctcccatgccggacgccatcgtcgagctcctgcaccatgagcacggcgttgctagcgccggcggcaaggccaacggccaggagctgccgcccaccacagctgtcaaagatgagaacccgttgctgaagcccaagcagggaaaggttccatgctccgcacgtcgccggcagtgggctcggcccggcaaattcgagggtcatatcgcgcccgtcaccaagttccatcgagcgccgaggtcaacttccgtgaacgacaaacccgttattcgacgttcaccgcggcaaggcgctccacggcggcaactttccagggcacccccatcggtgtggtcctg

SEQ ID NO: 22019 - DNA, 192 bp, Oryza sativa
  Clone ID: uC-osflM202043f08b1
tttttgtgtgattctgattattctcagactatgtacagtgtcccgagcgtggtatcgacccggagtacgctgtggatggatcgctgattccaggctatttcctgacaagggcgatgagagcagggtatagggctgggacacatgaacatgcactagaagttatactcatgcctggacgttgatggtccatgt

SEQ ID NO: 22020 - DNA, 511 bp, Oryza sativa
  unsure (1)..(511): unsure at all n locations
  Clone ID: uC-osflM202043f11b1
gagggtggcttcttcacgctgaaccccaaggaaggtctcgccatcgtcaatggcacgtccgtggggtcggcgctcgcggccaccgtgatgttcgacgccaacatcctcgccgtcctgtccgaggtgctctcggcggtgttctgcgaggtgatgaacggcaagccggagtacaccgaccacctgacccacaagctgaagcaccaccctgggtcgatcgaggccgccgccatcatggagcacatcctcgccgggagctcgttcatgagccacgccaagaaggtgaacgagatggacccgctgctgaagccgaagcaggacaggtacgcgctccgcacgtcgncgcagtggctcggcccgcagatcgaggtcatccgcgccgccaccaagtccatcgagcgcgaggtcaactccgtgaacgacaacccggtgatcgacgtccaccgcggcaaggcgctccacggcggcaacttccagggcacccccaatcgtgtgtccatggacaacgcccgtc

SEQ ID NO: 22021 - DNA, 449 bp, Oryza sativa
  unsure (1)..(449): unsure at all n locations
  Clone ID: uC-osflM202043f12b1
gcttgtttgagtaccatgtgaggaagaacttccccttctcagtgacatatgttccattatccgcgaagaaccgggtcttctcgggagtgtcattgtactctccagcatcgtcgggcaattcccattcaggatgcccagcctttgctgcttctgctttgaaatctgcctccaggtatttatcatagcactgcagtattttttttattgtaataactgttagagcagtgaattactaccatttgtcatgcattttgtcccatttcatatctgttcagcatatttagaatttgatttcctcttcttttgttgcttaatttcagtctcaggcttgcttctactgttttttttttctgttagtactgtttttggtccaaacatctttgtgaaccagaaccactttaatatttgtgctcattntccaaagatttttttttcctaaggagatctgc

SEQ ID NO: 22022 - DNA, 522 bp, Oryza sativa
  Clone ID: uC-osflM202043g01b1
ctcctctcctcctctctctctctctctcgcaccaccgctctcttccgccgctgcggctcacggctacgcagctctcttcccctcctcctcggctccgctctcttcgatcgatctagggtttggtcttctgttgggggattgttgatgctcttccgcgcgatcgatcgacgccgcgtcctgagggtttgaggggtttccgccctcccgccgcacgcccgcacccccgcgatgtccggccggagctcgccgatgtacgaggggctcgcgtcgcgtcccgacgagtgggacgtcgtcctcaaggtgaagtatggtgaaactcttaagaggttcggtgggtatgtgcaaggaccacaattcagcctgaacttatccgctctccggtccaagattgcatctgcttttaagtttggctcggatgtcgacttcattctgacttacactgatgaggatggggatattgtcatgctggatgatgaagatgatctgcatgatgctgctattcatcaaaaactgacccccctc

SEQ ID NO: 22023 - DNA, 486 bp, Oryza sativa
  Clone ID: uC-osflM202043g02b1
gctgcttatcgaggtcaaggtgcaggggtggagcaacttgctccaggccacaatggatgggggatgcaccctccaccttgcgctaaggctcaagagaggcatgccgacctatatgaggacggtatcgcggaggcggagtacacacgatgtctgtgttctactgcacgatcgaccgggtggaggccaagatccaggtcaaggatgtattcccacaaagccaggagagtgtcatctacactgtctaggtgtttgatgattatctctcaagggaagagtgctcttgctacttgggtctcgggcactacactggactctggctatggaggggacaaaaatatttcgcccacaaagttcgacctttactggttgttaaacctggacaggataaatcaattgctggtattgttactgagagagattacctcaggaaaatcatagtgcagggacgatcttccaagtgaaactaagtggggacattatgactga

SEQ ID NO: 22024 - DNA, 496 bp, Oryza sativa
  unsure (1)..(496): unsure at all n locations
  Clone ID: uC-osflM202043g03b1
gctaaacaatatacgatgtggaagctaaagtttggtgagggggcaagcaacccactgctccgctccagcaacggcttcctcggccgggagacgtgggagttcgaccccaacggcggctcgccggaggagcacgccgtggtcgagaggctccgccgcgacttcacccgcaaccgcttcacacagagggagtgcagcgacctcctgatgaggatgcagtttgcaaaagagaaccaagtttacagtaaacatgaagtaagcaatcttaaagacagttcagaagtcacagaagaagttctattaacgtctttaagacgtgttcttgatcaatattcctctttgcaagcaccagatgggtattggcctngtggttacagcgggattttgttcattctgccgctcatgatatttgccttacatgtgactaagtcactaaacgatgtcttatcatctgagcatatacgtgagatatgccgctacatctacaacattcaaaatg

SEQ ID NO: 22025 - DNA, 462 bp, Oryza sativa
  unsure (1)..(462): unsure at all n locations
  Clone ID: uC-osflM202043g04b1
gttgattctgaagaccttcccctcaacatctcacgtgagatgctccagcagaacaagatcctgaaggtgatccgcaagaaccttgtgaagaagtgcgtggagctcttctttgagatcgctgagaacaaggaagactacaacaagttctacgaggccttctccaagaatctcaagcttggcatccatgaggactccaccaacaggaccaagattgctgagctcctgaggtatcactccaccaagagtggtgatgagttgaccagcctcaaggactacgtaacccggatgaaggagggccagagtgagatctattacatcactggtgagagcaagaaggctgttgagaactcccccttccttgagaagctgaagaagaagggatatgaggtcctgtacatggttgatgccattgatgagtacgctgntggtcagcttaaggagtttgagggcaagaagctcgtc

SEQ ID NO: 22026 - DNA, 270 bp, Oryza sativa
  Clone ID: uC-osflM202043g06b1
cgcgcgtctccgataaagacgacgtggttatcgcgttggagagctagctacttactgtgcttatttcgaacttaggcaagcttgtgtttttgctgcctacttcactcatatatgtcgacgcaagccataaatggcggctcaggggatcgcggaggcggcgcaggcctacacgggcctctccccggcgtgagccgtcaccatactgggcctgatgctcgccacctacctgctcgtgtcctccctgttcgtcgccccggacgccgtggcccc

SEQ ID NO: 22027 - DNA, 530 bp, Oryza sativa
  Clone ID: uC-osflM202043g08b1
gtcctccttcctcctcatcctccccaaccactgcatccgggtcggcgtcctcctcctcctcctcctcctcgcagaatgcaacgggcaattcaagctatcgggtcacatggcagtctcctcaagtctgctgttctgcgacacatcagtgctccaaaaccatctattttacctgctgtatattcacgctccatgtcagtttcatctgctcaaatagaggagagtggatttgagactgccactgtggcagatattttgaagtctaaggggaagagtgctgatggatcttggctctggtgcactactgatgactctgtctatgatgctgtcaaatctatgacgcaacacaatgttggagctctggtggctgttaaacctggacaggataaatcaattgctggtattgttactgagagagattacctcaggaaaatcatagtgcagggacgatcttccaagtcaactaaagttggagacatcatgactgaagagaaccagctgatcacggtgaagcctgataccaagtcctgcag

SEQ ID NO: 22028 - DNA, 473 bp, Oryza sativa
  unsure (1)..(473): unsure at all n locations
  Clone ID: uC-osflM202043g10b1
ctcgaccataaatggagctctcgtggtcacttgctgccgtattgcactcacctctcttcctcctcgccgcgctcctgctccttcccgtgttcaccttgctgagcttctcgtcggcgaagaagccaggcgatggcggcggctggcggctgccgcttcctccgtcgccgcggggcgtcccgtttctggggcacctaccgcttcttggctccttgccgcaccggaagctccggtcgatggccgaggcgcacgggccggtgatgctgctctggttcggccgcgtgcccaccgtcgtgggcgtcgtcggcggcctcggcgcaggaggccatgagggcccgcgacgcggcgttcgcgagccgcgccagggtgcgcatggncgagcggctcatctatgggcgtgacatggtgttcgcgccataccgcgagttctggcgccaggcgcgccgcgtcagcgtgctccacctnctcagcccgcg

SEQ ID NO: 22029 - DNA, 521 bp, Oryza sativa
  Clone ID: uC-osflM202043g11b1
gagaccccaaaccaaagcagcttgcttgcttgcttgattgtttgttgcttcttgagcccctctcctccttgcccaagtctgtgtttttgtggcagacttcagcataagggtgaagcaaagcatagggtctggttttgggttcttgacagaagtcatgtttcatggtggcaggcctttgtccctcaggggctctctcaaggcgcttgaagctgatatccaccatgccaacaccctggcgcatgctatacacagggcctatgggggtgcctgtgtgcagatgaggctgtcttacagctccatggctccaatcatccttaacctcatccagtggatggattgcagctgctccctttcatataccctccctagttacctaggtctccttgaggttcttgtgtacaaggtatatgttgatgaggatgcctctatatccaccaacattgaaaggagagcaagcctcacggaattctatgctgtaatatatccattcttgcaacaactcgaggggaatttgatggaga

SEQ ID NO: 22030 - DNA, 267 bp, Oryza sativa
  Clone ID: uC-osflM202043g12b1
gccatgttgctctaactgtaaccacgccgctcgacggcgcagccgccatatcggggtagtggaaatagttctacgacgatgtgattgagaacgcttcctacattgggactcgtggcaagggtatccttgctgcagatgagtccactggcaccattggcaagcgctttgccagcatcaatgtcgagaacgttgaggagaaccgccgctctctccgcgagctgctcttcaccacccctggtgccctccagcacctaagtggtgtgatcc

SEQ ID NO: 22031 - DNA, 298 bp, Oryza sativa
  Clone ID: uC-osflM202043h01b1
aacgaacgctgcttttcgacgaagaaaaggagggttcctcgctctgacgccttgcgcagttgtaccgtacattcgtactaccacacagcttgaagaagaagagggaattcgacgagaaatagtagaagcttggcgttcgtgcgaggaattctcggtggttgatcgatccgtgtttcgcggcggatggggcaggcgttccgcaagctgttcgatgccttcttctgcaccagggagatgagggtcgtgatgcttgggctggatgccgcgggcaaaaccaccatcctgtacaagctgcaca

SEQ ID NO: 22032 - DNA, 292 bp, Oryza sativa
  Clone ID: uC-osflM202043h02b1
gcagcagcagcagctgagcttgaagcagcagagcgaggtagacatggccgccgccaccatggccctctcgtccccggcgctggccggcaaggccgccgctgaaggtgttcggcgaggggcgcatcaccatgcgcaagtcggcggcgaagcccaagcccgacgcgtcgaggagcccgtggtacggagccgaccgcgtgctctacctctgcccgatctccggggagccgtcgagctacttgaccagcgagaacggcaaggactgcgggtagaagaccacgttgcttgttgacga

SEQ ID NO: 22033 - DNA, 497 bp, Oryza sativa
  Clone ID: uC-osflM202043h03b1
acccaatcacccaaacatggcggaggcggggcccagccggccggtcgccgccgccgccgtcgccgccggcgacttcccggagctcctcgccttctgcgcccgcgcggaggccctcatcgccgagctcctcctcctctccgaccgcgccccgtcgcagttcgccgaccgccgcttccaccccgtcctcttcgacttccgatacttcgactccccgggcgaattcgaggcgaggatcgaggggaacatggagctggaggccctggaagacgagctccgcgagtcctgcggctcctacatcgggaggttcttcgccttgctggatgccgccgtcgcttaccacgacgagctgggcagctacctcaacgacctgcaggaagggctgtatgtgcattgcacattggatggtgtactggagagtaacctggcttgccaattgcttacagaatcgatgactttgtttgggtgtatggctttgctaatggagcacaagattagcg

SEQ ID NO: 22034 - DNA, 512 bp, Oryza sativa
  Clone ID: uC-osflM202043h05b1
gtttcgttttggtattcccatacactttgtttctcttccccgtctcgtggtcgagagaaaccgcgaggagagagagggagaggagcgctgccgattttccggagggggagatctttttcttctccctgaaggttcgagatcgatctgcgacgaggaggagcgtggtattgttactttatttccgtggaaatttcaacacattgatgcactaatggagtccaagggtggcaaaaagaagtctagcagtagtcgttcctccctgatgtacgaagctcccctcggctacagcattgaggacctccgacctgccggcggcatcaagaagttccgctctgctgcttactccaactgcgcgaggaagccctcttgatagcccccttggctaccttgacctagtagtttagttactcctctgaattcttgttttgggctttcttacatctctctggctagcttgcttccagtgaccggaagggtatcaagcctgcttcctttctttcttatctctggca

SEQ ID NO: 22035 - DNA, 506 bp, Oryza sativa
  Clone ID: uC-osflM202043h06b1
cgcgccgccccccgggcgctggaagccccgcaggcctcgaggccgccaccgcggccgtcgcctcggcgcagcgccgtcgcggaggtcaaggccgtccccgaccccgtcgccgcactcaccaggttcgaggatgtgctgcagacacaggactgcaacataatcctgcgccactacggtgaaaccaggcgctgggatgagctatctaaggtcttcgggtggatgcaggagcacgacatgctcaacattgcgtcttacagcagttacttcaagtaccttgggttgagccgcaaccctgcccgagcgctgcaagtgtacggtgctatccgagaaaacccgacaaggatccatgtctccgtttgtaactcggtcctcgggtgcttggtgaagaacgggaggttcgatagcagcttcaagctttatgatgagatgatacgagaaggtctatcacccgatctgttcacctacagtacccttcttgtagggtgcatgaagttgaagcagggtta

SEQ ID NO: 22036 - DNA, 307 bp, Oryza sativa
  Clone ID: uC-osflM202043h07b1
gctggacctcgtcgacaggaaggtgaggaagatgaagatgatttcgccgtccaacgtcgccgtcgacatcggcggcacgctcgcgccgcacgagtacatcggcatggtccgccgcgaggtgctcgacgcctacctccgctcccgcgccgagggggccggcgccgaggtcgtcaatggtctcttcctgaggtatgaggcgcccaaggaacccaacgggtcgtacgtggtgcactacaaccactacgacagctccaacggcaaggccggcggcgagaagcggacgttcgaggtggacgatagcgggggc

SEQ ID NO: 22037 - DNA, 382 bp, Oryza sativa
  Clone ID: uC-osflM202043h08b1
atctagttggtcatcgagctcgagctgaatctaaacctttgcaacaatggcggcgcgtgttgttgtggcgttcgcggttgcgtccgccatgttcgtggccgtctccggccagaagttcaacgccatcttcagcttcggcgactccatgtccgacaccggcaacctctgcgtgaacggcccccccgccggcctgacgctcacccagtctccctacggagagaccttcttcggccgcgccacctgccgctgctccgacggccgcctcgtcgacgacttactcgcggagaagttcgggctgccgttgctgccgccgtcgaagaggggcggctcctacttccggcgaggcgcgaacatggcgaacatcggcgccaccaccatggac

SEQ ID NO: 22038 - DNA, 483 bp, Oryza sativa
  Clone ID: uC-osflM202043h09b1
ctttcttgcataagaactaccctccctcctcgctgcccgccgccgccgccgttttcttggagaggagaaatccgtaggctcagaggatttttggtagtcttgtttcgtgatattcgtgaagagggggggagctaaggggggattcgtaagatcagaattggatcacgcgggggcgcgctcgggatcgggggttccaaacacagcttgttcgttgaatttaagtggatgtactaatggagtctaagggtggtgaaaagaagtctagcagtagtcggtccttgatgtatgaagctcctcttggctacagcattgaggacgttcgacctgccggaggcgtgaagaagttccagcctgttgcttactccaactgcgcgaagaagccatcctgattgccctttcggcttcttcattctagaagttttagattttttgcaatttccttttgggccttttttctgacctattttttggctgctgcttcct

SEQ ID NO: 22039 - DNA, 491 bp, Oryza sativa
  Clone ID: uC-osflM202043h10b1
atagcggtgatgcaagcgtgtctgcttccacagatgaggctcttgccaaggatgatgacgcaattgtcggtgctgttcttcctcccttgtcatcagaggaacccacaaacatcacacaggattcagttcttgaggatgaggagctgaaagtccaggagactgctcctgctactactaatccttctccggagaagagcagcaacaatggcagctccccctctgtggttccatccgaccctgctactctccctgttcagcagattcctcctactcaagaggcaaaggatcctcctgctcagcaaattccagctgttccagaggccaaagttcctcctgttcagcagattccaacatttccagtggttaagacagattcagaggcggcgccgcggcggaaggagtggaagccgctgtgcgatctctggtcgaaccgccgcatcgactggtgcgagctcgacgggaccgtcggtcgccggcgccaacggcaccgt

SEQ ID NO: 22040 - DNA, 354 bp, Oryza sativa
  Clone ID: uC-osflM202043h11b1
ctgcgttctaactgggggccactggtagcgccggcggggttgtgtcgcgtcgcctccggctaagtatctaagaagacttacaaaccaaccttgggatcacacaacggcggaacaagatgacgaccacgcaagatcctgctgcgggcgagcgaggtctgacgagggaacgactaggagcaggactggcgcccggccgtcggacaatgacacggtagtgtaggactacaccaagaacatgaacggatccgcggcgcatctggaggaggaggtagcaacccagatcgcgaggcaccctgacgtggagacggtgatggcgagcacgatgctgacgctgcccacgacgaggtcatggca

SEQ ID NO: 22041 - DNA, 478 bp, Oryza sativa
  Clone ID: uC-osflM202046a01b1
gcgctcagctccggcgacgacgacgaccacccgcacgcgcgccgccggtcctccccggtcggcgaggtccccgtcgcgcagtcgatcatcaaggcggcgagcaacgtctgcttctcgctcttcgtactcgccgtactcgtcgtcaccgtcgacggcgtcacctaccagccgaccgacccctggctacagtcctccgtcgacatcaccacctacctgtacacgagtactacccaactacaccttgctcctccccgacgactacctgctgcgcaccggcgaggactacaactccttctcctcgaccccctccgtcccgcgccgcgacgacccagaccaggccaccgtcaccgccaccgtcgccgaggataacggcacctgcgacccggacgcgccgctcaactgctccgacccacgcgtcctcgccgccgtcatggcgttcaatgccaaagccttcttccgcaagtccatcagcttcctc

SEQ ID NO: 22042 - DNA, 566 bp, Oryza sativa
  unsure (1)..(566): unsure at all n locations
  Clone ID: uC-osflM202046a03b1
cacgcgcgccgcctcgccctcctcggctattcctcccctcgctttgtgccatcgtcgcctcaccctcctcctattgtcgttgcgccggcgccgccctccttgccagtggatccagccatccggaggaaggaagggtcacgaggccatcaagccatcgctgccctcttctcccctctcatctccagaccactaccgccttcctcttcctctccctatcctcggtgagctacagatccggtttggggtcattggaatcgatggtctcggcctccccactggtggatccgatcactggaatcatcggtgagctacaggtccggtttgggggtcagcggaattgatggtctcggcatccccactggttgatccgatcactggagtcacttgcggccattggtttcctttctggtgaatccttttgataccctttcagccacaatcgttttgtgcatacatttagcacaaaatccacaaggttctgtggagaaactgatgggctaagatgaggggaggtcacagattacagagaagacgacttncatgctgcgcattaccgcatgctgagc

SEQ ID NO: 22043 - DNA, 371 bp, Oryza sativa
  unsure (1)..(371): unsure at all n locations
  Clone ID: uC-osflM202046a04b1
caaaatcatcccagttattaacaggccgtagaagagtatccatttacttctgttcttacattgtggactttatactgttactgttcttctaccaaacaaaaaaaaaaaaaaaaaaaaaaaaaagaagaaaaaaaaaaaaaaaaaaaaaaaaaaaaaaaaaaaaaaaaaagggggggcccgacctcaaaaaaaaaacaaaaaaaacaaatgcatgccactgagatcaaaaacaaaaaaaaaaacaaaatggggggctctgatcaggggtcaaaaaccaactgcactggaaaaaaacaggccaaaacccaactaaagggcccggaaanaaaaacacctttcgccagctaataaaagatggaaaggggaaaacc

SEQ ID NO: 22044 - DNA, 464 bp, Oryza sativa
  Clone ID: uC-osflM202046a07b1
ggttaagcaacttcagttgatacttcagaaccttgcgatgaccaaataaattcatctgatattgatctatgttctgagacacttccagaagaaacaatccagtctgtgaagatagttgattctgaagatttattgaagggtgtctacacatttgaagatgttgtccttcctttgcctggttcgcaagcattatttcctggaaacggaattgctgacatttatcatgaattggctaaaaaggatggcattagcttgacagagaatgcacatggtgtcaaggagttttcaattacaagcatgaaaggaggttatcggcgggtgttccagcggcctattgattttgagtgggaactcatgacttatacagatgacacagcatctttagcagaaactgattgggatgttctgtccagatacaacctacaaaagccaaggaaggtaatgagactatatctagcgcgatt

SEQ ID NO: 22045 - DNA, 412 bp, Oryza sativa
  unsure (1)..(412): unsure at all n locations
  Clone ID: uC-osflM202046a08b1
gtgagcggcagcaagtgttcactgcgttcttcttctcgatttatctttcttggtttcttgatctgtagcttattagcggccatgtgcggcggagcaatcatctccgggttcatcccgccgtcggccgctgcggcggcggcggctgcggcggccaagaagcagcagggcaggagggtcacggccgacgtgctgtggccggggatgctgcggaaggggaaggcggcggcggcggaggaggactttgaggccgacttccgcgagttcgagcgtggcatgagcgacgacgaggcgngaggggggcggcgcgaggaggaggaggacgacgacgacgtggtcgtggtggtccccccgccggcggcggcgaggttcgccgtccgtgccgtggccaaggcggcgcccccaactgcagatg

SEQ ID NO: 22046 - DNA, 133 bp, Oryza sativa
  Clone ID: uC-osflM202046a11b1
gtgagaaacatctagagtgaataagaaagatgggtttcgtccgtgccctgttcctgctggcgatggtgtgcgtggcggcgcacgcgaaggactaccccaaggaggagggcgcgaaggcagaggggccggtcgt

SEQ ID NO: 22047 - DNA, 483 bp, Oryza sativa
  unsure (1)..(483): unsure at all n locations
  Clone ID: uC-osflM202046b01b1
cgttactcgtaaagagatctcgtctcgcctcgggaatccaaccattgccggcgaagtagagatcgggagggcggcgccatgaacaggggcggcggcgtcggcgtcggcgatgagagcggaagcgactacgagagcggcggcggcatgcggaagccgctgctgatgcacacggggagctggtacaggatggggtcgcggcaggggagcctcaccggcgcggggacctcgtccatggccatcctacgcgagtcccacgtctccgccttcctctgcacgctcatcgtcgcgctcggccccatccagttcggattcacgggggggcttctccttcccgacgcaggacgccatcatccgagacctcgacctcaccctctccgagtctcnggtgttcgggatcgctgtccaacgtcggcgccatggttggnggcgattgccagtggtcagatggccgagtacattgggcgcacagggtcattgatgatt

SEQ ID NO: 22048 - DNA, 406 bp, Oryza sativa
  Clone ID: uC-osflM202046b03b1
ctgtatcaagatgaagcggaccatcatcgtcaaagtggacttggaatgcgagcgctgctatgccaagatcgacagggtgctcaccaggatcagagacaagggtgagttcgtcatcgacgacatcgagttcgacgtgaagcacaacaaggtgatcgtgtcggggcccttcgacccggacaagctcgcagacaagctctgctgcaaggcgtgcaagatcatcaaggagatcgagatcgtcgacctcccgccgccgcctccgccgccggcgccggagccggagccggagccacccaagaaagaagagccccagccaccgcctcctaaggaggaaggagaagcccgagccgccgccggcggtgatattggtggagccaccggcgccggcgcccgaaccggagcccgagcc

SEQ ID NO: 22049 - DNA, 364 bp, Oryza sativa
  Clone ID: uC-osflM202046b04b1
catgctactactcctactagccatctcccacccacttatcacgaggctaacccgcatgggcgcgcgccaaggaggcgggaggagtagcacaccgccaccatcaccagcagcagcatggtgcagctgagccgccgccggcaccgcgagcacgctccatagccctctgccatggcggcagcttccgtactcctcctcctcccttcccccttgctccgtgcgtcgggcccggcgcaccgcgcgcgctgtggcattgccaccacgacaacaaccagcacgagcgggaggagggggctgtctctgttgggacatggctgtcgtatcagctgacagaagcgcacgcacatgcttattctgccaccacatc

SEQ ID NO: 22050 - DNA, 468 bp, Oryza sativa
  Clone ID: uC-osflM202046b05b1
gctcgagcgagcagggcgccgtcggcgccgtcgttcgtcatgctgcttccgccgcatccaggcagaacattaccagcctatcatggagacaacagatttcttcttggagcttgtttcctgagtaaactgcctatgctgcgcccaatgaagttgtctttggtatgcagtgctaatcccaacaaccataggtcaagaagttcggatatcacacgccatcagaagggtggatcagctcggaggaaaagtaagccttaccaggagaaagatgactctgagaatattgatgaattcgatactgatattatgtcctccaaaaatggaccacccatctctttgacaagcaattcccgtcctcaagcaacatcagtcccaggggaaagagagaaggagatagtagagctgcttaaaagggttcaagcacaattgcgagcaaggggaaaaaggggaggaggagaagaagcctgaaca

SEQ ID NO: 22051 - DNA, 430 bp, Oryza sativa
  Clone ID: uC-osflM202046b06b1
tggtgaggctagggagattctcaagtttgcaagagctcaagctcgaaggcaggctgccaatcttgagcatccgcttgtttgtattgatgtcattgaagaaggtattgtttcgggaccccgagctgggctctggaaggaagcaaatgctttccagggtcttcttttcgcggatacatgtaaaaacttagttcatgtattcttttctcaacgggcaacatcaaaggttcctggtgctacagacttgggattgatgcctaggaaagttactaaagttgccattctaggtggtggacttatgggttcaggaattgcaactgcgatgatactgagtaattatcctgttatactcaaagaagtaaatgagaagtttctaaatgctggaattgacagaattaaagccaatttgcagagtcgtgtgaggaaagggaaa

SEQ ID NO: 22052 - DNA, 117 bp, Oryza sativa
  Clone ID: uC-osflM202046b07b1
actcacttcacctccgcgcttcccgcctctccgcattctgaccctccgccgcctccgccgcggtcgggtggtgtccgtgagagaggagccggaataatgctgtgcgtctcgccgacg

SEQ ID NO: 22053 - DNA, 456 bp, Oryza sativa
  unsure (1)..(456): unsure at all n locations
  Clone ID: uC-osflM202046b08b1
aataagcttagcttaaagcagcagctagcactggcaggatcaagggcgtgctcggtgggggcgctcctgctcctgagggctatcttgttgccatgggaagctactacgactacttgtttgcggcggctgcaggtgcggagcctcctcaagcgcctcaacaagcctctcctagcaacctttcagagcctacatggagatatcatagattgtgtgcacatctccaatcaacctgcattcgaccatcctgttctgaaggaccatacaatccagatgcgaccttctatccagccaagtggcctatatggagaagcaacacgtncattcacccaaacatggaatcagaatggcgaaaagtgccctgacaatactataccgatccgaaggaccaaggaggangatgtcatgagggccacctctgttacaacgtttggcaagaagacgcacggcgggagccct

SEQ ID NO: 22054 - DNA, 238 bp, Oryza sativa
  Clone ID: uC-osflM202046b09b1
atcatttggggtgtggagttattgcaaagcaacctcgatttctgcaccgtttcctcgattcgatgctgaagaaattgagcaaagcatggacttcgtttgggtgaaacccacaagtatcttaggtcgtatcagaatacgagaatgatcggaggagagcagaggagagccggaggatttccgcgagggagggagctccaggaccctatcaatcggggattcggtgaggggggaggaggag

SEQ ID NO: 22055 - DNA, 268 bp, Oryza sativa
  Clone ID: uC-osflM202046b10b1
tctacctccaccaactccgatcgaacagcccaatcgaccatggccgccgccgccgcccgttccggcgcgcatccgccatcgttcgcctcctcgctcggccggtgcagggttcttccagtcgtggtggtgcgtcggccgggcggtgccgcgaggccgtcaccgctgctcgctccggcgaggtgcgccgccgccgtcgggacggcggcgcccaaggtggagggcggcggacggcggtcgtcggaccaggggcagctggcggaggcgccgg

SEQ ID NO: 22056 - DNA, 233 bp, Oryza sativa
  Clone ID: uC-osflM202046b12b1
tttagaaggagaagaaggagaggagcagccatggcgtcgtcggtggcagcggcggcgagcacgttcctggggacgaggctggcggacccggcgccgcagagcgggaggatcgtggcgaggttcgggttcggcggcgggaagaaggcggcggcgaagaaggcggcgaggccgtcggcaccgacaactgacaggccgctgtggttccccggcgcggcggcgcctgactacctgga

SEQ ID NO: 22057 - DNA, 461 bp, Oryza sativa
  Clone ID: uC-osflM202046c01b1
tcgttcgaagcatgacgagcacacgagaaaacaagagagaaaaaggacaagggggcatggaggaatacgaccgcaagttgtaccaggtcagcgaccagctgcggctgcagacggcgagcttctccggcctctccctcggcgactccatctggtcctccccctccgaccgccgcaacgagccggccttcgacggcgagtaccaccacttctcctccccctcccccgccaagaacgccatcgccaacatcaacggcgtcgccggaaacctggatggcccgggcctcatcggctccggcaagctcgccttcggcgccaccaaggccgaccgctacaacagcgtcaacctccccgtcgacaacaacaacaacaacaagtcctacggcggcgccgccaagatcaacaacaacaacgtcaacgccttcgggttcaacaagatgggggggtacaacaacagcagcaac

SEQ ID NO: 22058 - DNA, 493 bp, Oryza sativa
  Clone ID: uC-osflM202046c02b1
tcttttctcaaccctttgttcatcttcttgttcctcctcttgtctcgtctcgatggccgggattggtccgatcaggcaggactgggagccggtggtggtgcggaagaaggcgcccaccgccgccgccaagaaggatgagaaggccgtcaacgccgcccgccgctccggtgccgagatcgagaccatgaagaagtgtaacgctggaacgaacaaggcggcgtcaagtggcacatccctcaacaccaagcggctggatgacgacaccgagagccttgcccatgagcgtgtctcaagtgacctgaagaaaaacctcatgcaagcaaggctgggctagacgatgacccaggcacagcttgcacagatgatccatgagaagccccaggtgatccaggagtacgagtcaggtaaagctattccgaaccagcagatcatcgggaagcttgaaagggctcttggacaaagctgcgcggcaagaaataatgttctactatta

SEQ ID NO: 22059 - DNA, 458 bp, Oryza sativa
  unsure (1)..(458): unsure at all n locations
  Clone ID: uC-osflM202046c03b1
atggttctcagcaattacatagaggaaattattgtctcggcagtctcgtatcatatgattcacaacaaggatcctgaatacaaaaatgggaagcttgttctatcatctaaaagtttgtcccatgggctaagcattttccaagaaagtggctttggtgggaaagagactctgaaattagaggatgatctgaaaggtgccactggacccaaaaagagcgagacagagaaatcagccacagtgccacttaaagatggtgatggtccattaccaccaccaaaaccggaaattccagataacgagtttgagaagcgcatcaggccagaggttataccagccagtgagaagngagtgacttttgatgacattggagccctggctgacatcaaagagtcgcttcaggagctggtcatgctacctcttcgacggcccgatctttttaaaggaggacttcttaagcc

SEQ ID NO: 22060 - DNA, 239 bp, Oryza sativa
  unsure (1)..(239): unsure at all n locations
  Clone ID: uC-osflM202046c04b1
acctaatcccgcagacgcgatagccgccgccatctcgnggggcactcttcacacccgcagagggggtcttaacacctacatccgagccttcccccttcccctcccccggcggctgtggtcatggccacccgacgggccctcacctccgtactccgctccgccttccgcctatcatccttcttcccttacccgtgccctcgccgtgcgctgctccacccccaccgtcgaccgttcccctt

SEQ ID NO: 22061 - DNA, 472 bp, Oryza sativa
  Clone ID: uC-osflM202046c05b1
gccgaccagacgagccgccgtttgacccaacaccgagctcccgcgcggagttgatgtccatctccccttccgaatccaccagaggatcccagccgctcgcgccgcgcccttccaaccctagccccggaccccgccatggcaacagctccgccccaccgcgccgccgcggccgacgctcccctacggctcccgtctcaccgccctcagccgccggcgggagcggcggcccgagctccgtctcggtggttccagctatcagagaatatgttgatacttcccaaaaggtagttggattcagaatctctagagaagagaatgatgattcatatacccaagaagttggcaatttttctgaatgccactcttctgaacatgggaattcaggtttttcagccaataatggcacctcaggccaggcaactcctcagagacctgaattgatgggatccctgaagattgatctatccactac

SEQ ID NO: 22062 - DNA, 404 bp, Oryza sativa
  Clone ID: uC-osflM202046c06b1
gtttgactttctgactttgggagggagatttgtccaagaagaattccgttggaggaggattcggagagctccattggtctgtgggtcggtcggtccagcttgctggagaataagaagggggtgttgttgcgttgcgggcgagggaaggaggggaggagaggaggcgtcttgccgttggggttctgatccctcttggggctcccgtcgaggaggtggcacgatgaagacgccatcactgcttgttcagtgtttccctggcttgcttcccagcaaggctacgagttgtgtgccaattgtatcagaaagggatctacagctaccatcaccagctgtcgagataatcccatcaaagagtgctcatccttacaaatatgctggcgagaaggttgatgttcaaggtcttg

SEQ ID NO: 22063 - DNA, 521 bp, Oryza sativa
  Clone ID: uC-osflM202046c07b1
cgtcgccacgccagacccctcgagcccgttgctcgcgagcaggagcgaggagtacaggcttttgtttcgcctgccacccgacgaggttcttgtgcaagattttaattgtgcgctccaagaaaatattcttcttcagggtcatatgtatttatttctacaccatatatgcttctactctaacatttttggatatgagaccaagaaaactattccgttgcaggaagtgactgatgtacgtaaagcaaaaacagctgctatttttcataatgccatcgaaattattgccggtacaaaaaggcacttctttggatctttcttgtcacgcgatgaagcttttcgcattatagtagagggctgggaacagcatgtcagtgatgctagattgctccttgaacgccaggatgcaaagtcaggaaacagcagtgatgaaaatggttatgttttgctggaaggagcataggaaactaaacaagatgatgattcatcaccattagacagatctgttaatggtacagctgtca

SEQ ID NO: 22064 - DNA, 487 bp, Oryza sativa
  Clone ID: uC-osflM202046c09b1
gataagtggccctatgaagctgctgctttagcatttgaagcaattccaagaactttggctcaaaattgtgggttgaatgtcatcaggataatgacacaactccagggaaagcatgcaaatggtgaaaatgcgtgggttggcattgacggaaggagcggtgacattgttgacatgaaagagcggaagatctgggattcttacagtgtcaaggcacaaacgttcaagacagctatcgaggcagcttgcatgcttcttaggatcgacgacatcgtcagcggtatcaagaagaagcaggctcctggagcctcagctcctaaacagcctcagatcgaacaggagggtgacgcggacaatgagcagatgatcccagagtagaacttgtgtgctgttggtgtgaggagcctgcactgccgatgttatgctctaaagccagagtaagcccatgaatggagaacggctagtttgacatgtgaagcttttggcagtt

SEQ ID NO: 22065 - DNA, 505 bp, Oryza sativa
  Clone ID: uC-osflM202046c10b1
ttttctctctctctatctctctctttcaaaagcgtgtgtgcctgtgagcctgtgactgacgacggactgtctgctggcacgcacgagcgggcgcctgtgcgtgtgtgctccgacctgcaaatcagagaccagatcgagccccctggccggctgcagctgcctccttgcttcctctagctcctggagtgaggagagctcgccattgctgtctgctcaagctctctagcgtagctagacttctccggcgtgtgcttggctgctgctagctgctagctggccagtcttcctctcttgtccgccggcgagatggtggtggtgggcgccgtgagctgctgccggagagggagttggcggcgacgcgccgccgacctcgccctcgccgtcgtcgtcgtcttcgccgcggcagctggtgccgctgctgcaaggaggccaatccgtgtactacggagaccagcagcagcagcggcgcacgtgaggagactagactcgtcgccgtcgctgatgc

SEQ ID NO: 22066 - DNA, 464 bp, Oryza sativa
  Clone ID: uC-osflM202046d01b1
cacagagggaggaatcggatcggattggatcccaacccaccccgcgccgccgctgccgcgtcccgtcccgaatcctccggcgagcctgacgtcggccgatgggcgcatcagtgactactggcttgcagatggcggcggcacgcccttgtatcccagcttgccaacgcctgctagggtcaagagcagcacttccttcatttggaagggcgcttagtacccaaactggcttcgcgagctgcagaaaaacagcatcagcagggccgtttgtttctctgaaccacaagaggtttgccgtgagggcgatgtctgcccagggactccccattgatctcagaggtaaaagagcatttattgctggagttgctgatgataatggctatggctgggcaatagcaaaagctcttgctgcagctggtgccgagattcttgttggtacatgggtacctgcactgaacatatttgag

SEQ ID NO: 22067 - DNA, 417 bp, Oryza sativa
  Clone ID: uC-osflM202046d02b1
aataaaccatgggatccattctcagctgagcaaaatctctgaaccaacgcacacacgactactcatcagaaacatggcatacactgtccactcctgtcggaaaatagaagcagcacatgagctactatgtctgacaaacacagcaatggtgatggatgcgtgcacctcggatatgcacggggatacagacacaggcgataaacacaacactcctatctgggaggggcgacataacaacacagtactcaactcgacgacgacacagttttcaggtgaaccaacaagacaaccgagccgctagatccgagcgttcgtttcatttcccacctagcgaggggaactgggcctgatcttcgatcaccggagcggcagcctgtctgcgaccaccgttgccattgtaaccaccatagaaacccc

SEQ ID NO: 22068 - DNA, 484 bp, Oryza sativa
  unsure (1)..(484): unsure at all n locations
  Clone ID: uC-osflM202046d04b1
tctttctctgtctctctccctctctctctcggccatggaccatctgcatggacgagcctcgacggcgtctaccctactgacccggcggcgacggcgccggaatcccacgtgcctccgcccccgcagacgccggagaaggattcatgtgaggatacaggagacatgaggatcagtgaagaaaagccatgcacagatcaggagttagatgctgatcagatgaatagttctagctttaatagttccagcgagtgtgagaatcaaacacctagcaatgatgaaatgactggatcagagtccaaatctgaggcagctcaaacagagggtggtggatcgagtgaagagaaggtcctgaagaagccagacaagatcctgccttgtnctcggtgcaacagcatggatacaaagtttctgctactacaacaactacaacattaaccagccaagacatttttgcaagagttggcagagatattggacggcaggt

SEQ ID NO: 22069 - DNA, 244 bp, Oryza sativa
  Clone ID: uC-osflM202046d05b1
acgtgctgacgcacgcggcgcggcggaccagctcaatttgcctgccgctcctcgtcttccggtggggcggaggagggggacgccgggctggctggctctcgcattccggagcggagagcgcgagctcgatcggctgcggttgtgctgctaacccttacccttttcctcgacttagacttatcatttgagacctcgtcctggacgacggctacaccgttaccaccgtcgacgattttaaccaccc

SEQ ID NO: 22070 - DNA, 504 bp, Oryza sativa
  Clone ID: uC-osflM202046d07b1
attctctccagccaccctctcgcctcctcctcctctcatcatctcccatccttcctcctcctcaactcctctcctctcttcgcttcttctctcatgctagctactactactagcttctccttctcctgtcgcacggtgcggcggaagtggtagtagtagtagctctcttggtttaagcaaggatcggcgaggacggacgccggcggcgaccgagcttggggtgtgtgtgtgtaaagttgtcttctccggcggatgagctgctgtttcttggctcgcgcctccggcgtgtccggcttgttgccttccatgtccgcgacgctgcaataattcgcttccatatttgctgccgccatgccatgtatagccgcgctgctgatgcggccctccagccgttttaatgcgtgccaaatcctctccccgaggctcataaaaattattgaattgttgggatctgaggggatccgccggaggtggtaggatcacggtggagtgattttggcccga

SEQ ID NO: 22071 - DNA, 388 bp, Oryza sativa
  Clone ID: uC-osflM202046d10b1
gtctcaagagtcaagccggccttgccggcaacggcaagcagcatcgcgccgtacgcccccctcccctcactttccccaacctccctctcgcctccctccccgtcggcgaccaccaccaccatggccgcctctcctccgctcgcgctcctcaccctcaccctctccctcgccctcgccctcgcctccgccggcctcgtcctggacgacggctacaccgtcaccaccgccgccgacctcaaccacccggtctccgccgcgccccacccctacgcgctcctccctcgcccgcgcgccggggacctcgtcctgctcgactccgcggcctccgcgctctacaccctcgccctcccgctctccgggggcgccgccgcgcggaagcctcgcggcg

SEQ ID NO: 22072 - DNA, 456 bp, Oryza sativa
  unsure (1)..(456): unsure at all n locations
  Clone ID: uC-osflM202046e01b1
cgcatagaaaaaaaaatctcccctcgaagcgaagcgtcgaatcgccttctcaagatgcagatctttgtgaagaccctcaccggcaagaccatcaccctcgaggttgagtcctcggacaccattgacaatgtcaaggccaagatccaggacaaggagggcatccccccggaccagcagcgtctcatctttgctggcaagcagcttgaggatggccgcaccctggccgactacaacatccagaaggagtccaccctccaccttgtgctcaggctcaggggaggcatgcagatcttcgtcaagaccttgactggcaagaccatcacccttgaggtcgagtcgtctgacaccattgacaatgtcaaggccaagatccaggacanggagggcatccncccggaccagcagcgtctcatcttcgctggcaagcagcttgaggatggccgcaccctggccgac

SEQ ID NO: 22073 - DNA, 419 bp, Oryza sativa
  Clone ID: uC-osflM202046e02b1
gtgtttcctctccctcgccgagcaggtcagggagaagctcggcaagatcgacccctacttcgtcaagcttgccgatgccatggtcacctggatcgaggcctgggatgagctgaacccctcgactgctgctgtcgagaacggcaaggccaagtagattgatcctgggagcttgtgtgtcgcaggatggaaagtaccctttaagtgaaagtgttgctgtggcctaggccccctagatatagctctttttgagatgaagggagagattacttaagcaactttataattctttgttgttatgctggttcttttgtagctggaaaaggatttgttatcatcgtttacataattcaagacaataataattttatcatgtaattttgatagtcgtgctttggttgctaaatggtgttattgtattt

SEQ ID NO: 22074 - DNA, 283 bp, Oryza sativa
  Clone ID: uC-osflM202046e05b1
cataaggacaccagaaacatagtacacttgagctcactccaaactcaaacactcacaccaatggctctccaagttcaggccgcactcctgccctctgctctctctgtccccaagaagggtaacttgagcgcggtggtgaaggagccggggttccttagcgtgagccagaaggccaagaagccgtcgctggtggtgagggcggtggcgacgccggcggcgccggtggcgagccccggcgcggcctcgtcgctgagttaccggacgaagacgctgcggcaggggg

SEQ ID NO: 22075 - DNA, 299 bp, Oryza sativa
  unsure (1)..(299): unsure at all n locations
  Clone ID: uC-osflM202046e08b1
tctcgccccccaaatccccctcctcctccgccaccgccatggctcgcctcctcctccccctccccatcgccgccgccgccgcctcccgcctccgcctccccgtcctctcctcctccgtggcgcggcgtgaggcgctgctcttcggggggagggtggcggcggcnagggcgccggagaggctggcgaggagaggggngagcgccggggcggaggcgggcgggacagacgcggccgccgcggcagcgcaggagaacgggcaggacgaggcggcggagagggacaagaaggaccggaggcgc

SEQ ID NO: 22076 - DNA, 541 bp, Oryza sativa
  Clone ID: uC-osflM202046e09b1
gctccttgcgcctgcgctgcgctgcggcgatctccatctccatctctctctctctctcgagcagagcagagcacgccgtcatcctcgtcctgctgctgcttccggcaggagctcagctcggatccgtaggacaaacccaagcttggtcgtcggtgtgtttccggagaatgtgaccgcgccgcgccgcgccttctcttatcacaaatggcggctacaccagggagcagcaggccagcgaatgttgctgctgctgctgcgacggaggccagattccactcccacccaccacagcaggataggcgcagtggatgggctggctgtttgtctggcttgtcatgtttcggatcacagaagggtgggaagcgtatagttcctgcagcacgtgtacctgatgggaatgcgtcaactagtcgtggaaatgcacaccaatctggtgccaattccaaccaaagtgcggctctgaatttatctcttcttgctccaccgtctttctcggggtccttctctaattctgcaattccctcgactgcccaatcaccta

SEQ ID NO: 22077 - DNA, 344 bp, Oryza sativa
  Clone ID: uC-osflM202046e11b1
cgcttttctaaattgggttatagctggtcgagtggcatgggtgcccttgctgaacaatagggagaccgaatggctaacatgcacttgacactactgctataacatggagcgcatgcggatctgaacgaaccagagcagaataggcatactctgggcggacaacaaacggatggcattgttcgtggaggtatattaaaccagctccaagacttatgccagttaacataccagaagatttcagcaaagccattatcgctgagttgtcgactttctgggaatatattggcggatgaattagtccgtgctgctcttgactgtttaggacccttaggagctcctatacc

SEQ ID NO: 22078 - DNA, 432 bp, Oryza sativa
  Clone ID: uC-osflM202046e12b1
gtgctgaaggtgatattcagattttcagagtgagtgctcgtgtgttgtgcgatcagtgcccgcagttcgatcgatccgtgttgatctttgaaagaaagatgtcgtgctgcggaggaaactgcggctgcggatccggctgccagtgcggcagcggctgcggaggatgcaagatgtacccggagatggctgaggaggtgaccactacccagactgtcatcatgggtgttgcaccttccaagggtcatgccgaggggttggaggccggcgccgccgccggagcaggagcagagaacgggtgcaagtgcggcgacaactgcacctgcaacccctgcaactgcggcaagtgaagcaagccacctcctgacgaaaccaaggagatggaagggcctagtactgctaagcttgttatttgattccagtacatgtgatgag

SEQ ID NO: 22079 - DNA, 418 bp, Oryza sativa
  Clone ID: uC-osflM202046f02b1
gcggttgctagaggcaacaagaagctgcaggagagggtgcccatccggcgcaccgcgtggaggctcgccgacctcgccatcctcttcctcctcctggccctactcctccaccgcgtcctccacgacagcggcgcgccatggcggcgcgccgcgctcgcctgcgaggcgtggctcaccttcatgtggctgctcaacgtgaacgccaagtggagccccgtccgtttcgacacgttcccggagaacctcgccgaaaggatcgacgagctcccggcggtggacatgttcgtgacgacggcggacccggtgctggagccgccgctggtgaccgtgaacacggtgctgtcgctgctcgccctcgactacccggccgccggcgagaagctggcgtgctacgtcttcgacgacgggtgctcgccgc

SEQ ID NO: 22080 - DNA, 518 bp, Oryza sativa
  Clone ID: uC-osflM202046f03b1
gcccactcaaatcctctcctccttccccaacggcgagcgtccccggcgaatccgccttgacggaggcaccccggcgagctcaccttcccggaggaatcccagctcagcctcatcgtcttcggtgagggaaatatcttggtgattcttgggaaccttcagaaagaccacttaatagttttccttggcccagaaaggcttgaggcttgagagctgaaaagttctgctggagctagtgctataatggccacaaaacttgtggttcttggaatcccatgggatgtggacactgaaggattaagagagtacatgggcaagtttggacccctagatgattgcgtcgtcatgaaggagcgttcgtctggtcgatctcgtgggtttggttatgtaacgttctcatcagctgatgatgccaagaatgttcttgagtgtgagcatgttctcggaaaccgaactctagaagtgaagatagccactcctaaggaagaaatgaaatcacagggatcaaaaaaggctactag

SEQ ID NO: 22081 - DNA, 536 bp, Oryza sativa
  unsure (1)..(536): unsure at all n locations
  Clone ID: uC-osflM202046f04b1
tgctttgctctgatctggttgatcgatctcgtcgtgggcgatggagaagttgctttcctcctccggcgccgccgccgccgtccgccgcgccgtcctcgacgccggcaaggagctcggcttcttccaggtggtgaaccacggcgtgccgccggagacgatgcgggagatggcggcggtgtgcgaggagttcttccggctgccggcggaggacaaggcggcgttctactccgacgcggaggagaaccccaaccgcctcttctccagcaccatctacgaggtcggcgaccagcgctactggcgcgactgcctccgcctcgcctgcggcttccccgtcgccgacgacaccaacacccactggcccgacaagccccaccatctccgggatgtcacggagaagttcttcgtggcgacgaggggattgtggatcgagctgctgcggctgctgtgcgaggngatggggctcaagccggactacttcgagcgcgaacttaccgccggngatgttatattaacgttaaccactacccttcatgccc

SEQ ID NO: 22082 - DNA, 347 bp, Oryza sativa
  unsure (1)..(347): unsure at all n locations
  Clone ID: uC-osflM202046f05b1
caatctcaaatttcgccatggccaccaccaccaccaccaccaccaccatgggcggcctccaccggctaataagcaggagcagctgcagccggagaaccttcgccgcctccacgccgccgcagcgacccagagcgatagccgtccgagtccgaagcagcagcgccggtgtaacgaagagccagaggcagaggcagaggcaggtgaagctgacatacctggagatcaacagctgggtgtgggaggtcggcggcncgcgcatcctggtcgaccggcgcctccgccgaggtgtacacttccgggtgccatgtctcttccacgccgtcaagaagcgccttatgacccagccc

SEQ ID NO: 22083 - DNA, 458 bp, Oryza sativa
  Clone ID: uC-osflM202046f06b1
aacatccacttgatatctgatgaagtgtttgctggctcaacatatggatctggaaaatttgtaagtgtggcagaggttgttgatgatctagaagactttgacaaaggcagggtgcacataatatatggactctcgaaagacctatctcttgccgggtttcgggttggggtaatatattcctataatgaaagcatcgtgacagcagctgctaagattgctaggttctcgtctgtgtcaactccaacacaacgcttgcttgttgccatgctctcggaccaaaagttcatttcagattacctaaaagttaatagagagagattgcgcaagatgtaccatttgtttgttgatgctttggatcaagtggggattgagtgctacaagagcagtggagggttctactgctgggcagacatgagcaagttcatcaggtcttacagcgagaaaggtgagcgcaagct

SEQ ID NO: 22084 - DNA, 344 bp, Oryza sativa
  Clone ID: uC-osflM202046f08b1
gttaagatcttcgaggacgagtgtaacgaggtcaacaccggccgcgtggtcggcacctatgggtacatggcgccggagttcgcgctggagggcgtctactcggtgaagtctgacgtgttcagcttcggcgtgctgctgctagagatcctcagcggccagcgcaacggcgcgctctacctcgaggagcaccagcaatccctcatccaagacgcgtggaagctgtggacgggaggggttggcggccggagttcatggacccggcgctggggcgggggtacgcggcggaggaggcgtggcggcgctaccacgtgatgcttctgtgcgtgcaggaggaccctgactct

SEQ ID NO: 22085 - DNA, 350 bp, Oryza sativa
  Clone ID: uC-osflM202046f09b1
cactctctccgtctcattctccggcgccggccagaaatgctgccctcctcctcctttaggcgttggggggagctagagctctagctagctagctaggtgcgacgcgacgacgtgatggctggtattgctaaggagaggcggctgccgccggcgctgccactcgccactctcatcggccgcgagctccgcgccgggggctccgagcgcccctccctccgctacggccacgccggcttcgccaagcgcggcgaggactacttcctcgtcaagcccgactgcgtacgcgtacccggggacacctccaccgccttctccgtcttcgcggtgttcgacggtcacaacggggtctt

SEQ ID NO: 22086 - DNA, 471 bp, Oryza sativa
  Clone ID: uC-osflM202046f10b1
cccaaatcccagagaggagtcgcgagcttttcatcaatcctctgattttcccccaggtttccccacccgcaaagagcctcaaaattccccctcctctgtcgcgaccgatcgcgacgacggcgccggacgagcagacaccgccgccacgatgccgccctccaccggctccgtcccacccgccgcatcaacgccggcggctggggacgaggccaccgccgccgggagggtactcctcggcaggtacgagctcggcggcctcctcggccgcggcgcctccgccaaggtgtacctcgcccgcgacctcctcaccggccgcgacgtcgccatcaagtccttccccaacccccgccacggcggcggcctccgcggcggcgaggaggatgtcctcctccgccccgcgcccatcgagcgggaggcggccattcttcccaggctgcgccaccgccacgtgatgcgccttcgcgagattct

SEQ ID NO: 22087 - DNA, 524 bp, Oryza sativa
  unsure (1)..(524): unsure at all n locations
  Clone ID: uC-osflM202046f11b1
ttatgatctgctgctgcaacaagatggatgccaccactcccaagtactccaaggcccgttacgatgaaatcgtgaaggaagtctcatcctacctgaagaaggtcggctacaaccctgacaagattcccttcgttcccatctctgggtttgagggtgacaacatgattgagaggtccaccaaccttgactggtacaagggccccaccttgcttgaggctcttgaccagatcaacgagcccaagaggccatcagacaagcccctgcgtcttccccttcaggacgtgtacaagatcggtggtattggcaccgtgcctgtgggtcgtgttgagactggagtcctcaagcctggtatggtggtgacctttggtcccagcggcctgaccactgaggtcangtcggttgagatgcaccacgaggctctccaggaggctcttcctggtgacaacgtcgggttcaacgtgaagaacgttgcggtgaatgatctgaagcgtgggtacgtggcctccaacttcaaggatgaccct

SEQ ID NO: 22088 - DNA, 317 bp, Oryza sativa
  Clone ID: uC-osflM202046f12b1
ttaactacgactagcttcgagctttcatcactcgtcagcttgagcgcccagcagctatcgtcagcttaaaattagcgccccagcttagcttctgagctgactcgagcttgaagacagattttggtcgcatttcagctaacacaaagcttaacacacgagctcttgtcagctgatcgatccggggttgaagagatattgaaaaagaagaagaagaagaagaatcaagcttggtgcacggcgtcgccgccatggcggcattgcgcgtgggcacgagggcggtggaagggaggttccaagcgagcaacggcggcggcggc

SEQ ID NO: 22089 - DNA, 243 bp, Oryza sativa
  Clone ID: uC-osflM202046g02b1
gcgatttgatcatgaagccgcgtccgtctccggcggcggcgtcttccggcggcgttccggcgaggctccggccgcacctcacccggctcaccgtgttcctgatcgtcttctgcgccgggtactcggttggcatcatgtcgtcgtccatccggccgcctgcgagcaagccgtcgcagacggtcatacggtcgcgcgccgcgcacctcttccggaccggcttctcacggatgtcccgcctagcaa

SEQ ID NO: 22090 - DNA, 410 bp, Oryza sativa
  Clone ID: uC-osflM202046g05b1
ctctacgaacgaacgaaacacgccttcttccccaacgaccaaaccaaagtttgggtgaagaaaaaaaaatatcgccgcgtttttatcccccacgagacgagtcgagacgaccaaaagcctaactaatcgggggcaagacgaggaggagagcggattctcgtcggcttcggcgaccggaagaggagaggagaccaaccccgcgccgtgttccgccgccgccgccgccgccgccgacgacgacggcaagtaggaatttgattctcctggggaattaacttgttaggggaaaaggaatttgggatgggcgaccatgtggtggtgaatgtggaaggcttgggaaacgatggaggggctgtggagaagccatttgaggccgtgaacagctcagtggtggctgctgcttcgctttc

SEQ ID NO: 22091 - DNA, 339 bp, Oryza sativa
  Clone ID: uC-osflM202046g06b1
ccataattagccccgatccgatcgcttcctagccctgattcgaggtaaaaaaggggaggagaagatgagggagatcttgcacatccagggcgggcagtgcgggaaccagatcgggtccaagttctgggaggtggtgtgcgacgagcatggcatcgacccgacggggaggtacgccggcacgtcggacctgcagctggagcgcgtgaacgtctactacaacgaggcgtcgtgcggccggttcgtgccgcgcgccgtgctcatggacctggagtccgtcaccatggactcctttctgacggtgccctactgtcagatcttcctcccctacaatcttttttt

SEQ ID NO: 22092 - DNA, 374 bp, Oryza sativa
  unsure (1)..(374): unsure at all n locations
  Clone ID: uC-osflM202046g09b1
cgcagctcaaccactagcagcagcggcaggaaggcgagaggaggaatcggaggtagctggacggcggcgaggcgacgacgagccggggtggtgcagcaagaacggcgcggcgagcggcggggaggagagattggatcgacgccgggtagttaggaagggagcttggagagatggcggcttccgcgaggcccgtcggcgtcggcggggagagggcgacgagcttcgccatggcgtgcagcctgctcagccgctacgtccgccaaacggcgccgccgccgccgagctcggcctcggcatcagaggggagggtgaggctccgagggcggcgccggcgacgatgagcttgctgcccgnggaggcgcagaggaagaaag

SEQ ID NO: 22093 - DNA, 203 bp, Oryza sativa
  Clone ID: uC-osflM202046g10b1
ctcctactagagtagtagtagtaccactaccactagtaaacacactctcaccttcatcttcttctccttcctccatctcccaatctccccaagaacacctaatctaatctctctccctcctctctctctattgtccatcaatggagatgatgatgccatgatcaaatgatgagagaagaagaggagtagagagggagggggtg

SEQ ID NO: 22094 - DNA, 423 bp, Oryza sativa
  unsure (1)..(423): unsure at all n locations
  Clone ID: uC-osflM202046g11b1
ggaaaagaaaaaaaaaagagataaaaaaaaatctcctcctcctcctcctcgccgccgccgccatggacgcctccgccggaggcggggggaactcgctgccgacggtgggggccgacggggccaagcggcgggtgtgctacttctacgacgcggaggtggggaactactactacgggcaggggcacccgatgaagccccaccgcatccggatgacccacgcgctgctcgcccactacggcctcctcgaccagatgcaggtgctcaagccccacccggcgcgcgaccgcgacctctgccgcttccacgccgacgactacgtcgccttcctccgctccgtcacgccggagacccagcaggaccagatccgggcgctcaagcgcttcaacgtcngcgaggactgccccgtcttcgacggcctctaca

SEQ ID NO: 22095 - DNA, 494 bp, Oryza sativa
  Clone ID: uC-osflM202046g12b1
catgaacagaaaccgccgagagagttcgtagcagtcaacgcgcgaggcagggccgagaagaaaccgccggcgacgcacgcgcgatggacgctcggcggaggcggttgtccccggcggtggccgtggcggcggctcttcttttcttccccatgttcttcgggagccatacgccggcggcggcggcggcgtacggagaggcttcaggcgacgccggcgtgacggcgctgcagaagcacgcggcgttcttcgacaaggacggcgacggcatcgtctccctctccgagacatacgacgggttacgagcactcggactcgggtctggcctctccagcttgagcgccggcttcatcaatggcgtcctttccccaaagaccagacctgacaatggaacagcaccacgcttatctatctacatagagaacatctacaaggggattcatggaagcgattcaagcgcctatgattttgaaggaagggtcgttgctgaaaagttt

SEQ ID NO: 22096 - DNA, 278 bp, Oryza sativa
  Clone ID: uC-osflM202046h01b1
gcgccatccaatctctctatccaacaatgaatcccgttcctctctcttatcttctcttattccccaaatgcttcttcctcgcattcgcaatcgcaatcctgccctaatccccaatcccaatgcaatccccccgcattaatcctaatcctaatcctaatcctaatcccaatcccatggacgagtaccaccaccgcatgggcgccggcgccgatttccgccgggacctcgaggacctcgtctgcgaccacctcgggggatgcttatcccgacgtcgtcct

SEQ ID NO: 22097 - DNA, 344 bp, Oryza sativa
  Clone ID: uC-osflM202046h02b1
gtgttttgcaagaaccttgtgaagaagtgcgtggaggtcttatttgagatcgctgtggacatggaagactacaacaagttctacgaggcctgctgcaagaatcctaagcttgggatccatgaggactccaccaacaggaccaagactgctgagctcctgtggtatcactccaccaagagtggtgatgagttgaccagcctcaaggactacttaacccggatgaaggagggccagagtgagatctattacatcactggtgagagcaagaaggctgttgagaactcccccttccttgagaagctgatgaagaagggatatgaggtcctgtacattggtgatgccat

SEQ ID NO: 22098 - DNA, 505 bp, Oryza sativa
  Clone ID: uC-osflM202046h04b1
acttatgccagctccagccacacgagcctagttgaggtagatacaatggcgtccaccgcctctttcatgctcgccgtcttgctggcggcggccgtcgcggcggcgccggcgagggcggtgcgatgcccgcccagcgacaagcaggcgctgatgagagtgaagcagtctctgggaaacccggcgacgctgtctacgtgggacctggcgtcatcagactgctgccagtgcgaccacgtccggagcgacgaggcctgccgcgtgaacaacgacttgatcgactgcgccaactacttccggtgtcagatgccagactccagggtgctgctgaccgccatatcggatatgcatgtgttgcatatagcgtattcagcccttgatgactatcgttctggatgtacgatatcttctactataaactagaagcttgcgagttggctgcataaatttgaatcttggagcagcaagttatgtcctcaagatacttgcatgtaaaactggtctatgt

SEQ ID NO: 22099 - DNA, 378 bp, Oryza sativa
  Clone ID: uC-osflM202046h07b1
gttttcggcgccctttttccctactatcagagttgatgaatccatggaacggctgaattgacaggattgaacagaacgtgctagtggtgatggcatttgacaaggaagtagtattgcatatctttttctgagcaagatttttattagctagttacccatctgcttctcatgatctttagcacccaaagggcactcatgattacaatttcagttgacaaagaacatggcgtgccaacgtatttgattagcatattattacaatttcataccaggtattaagtaactacactttcctgcatatgccatgttctttgtcaaatacctggtgcttgcctgttatacgttttagcactatgtatactagtaatatgcccgtgc

SEQ ID NO: 22100 - DNA, 443 bp, Oryza sativa
  unsure (1)..(443): unsure at all n locations
  Clone ID: uC-osflM202046h09b1
ctcgcccgcccgctcgcggagtacatgagcttgccggcgagtcagtactcggtgctcgacgcggagcgcatcgagcgcgtcgacgagtccaccttccgctgctacgtctaccgcttccgcttcttcgcgctcgaggtctgccccgtgctacttgttcgcgtcgacgaggagcccaacggctgctgtattagcctcctctcctgcaagctcgagggatcaccgcttgtggaggctcaaaatgacaagttttcagcttccatggtgaataacggtgttctgcaacagtagtatggagtgattcaacatctcaacagcttacatcggatactacattcgaggttacaattgatataccatttccatttcgagcattacctgttggagccatngaatcaagtggcangcangttcttgagcaactactncgagtcatgctttcacga

SEQ ID NO: 22101 - DNA, 221 bp, Oryza sativa
  Clone ID: uC-osflM202046h10b1
tttttcggtccccgccgtcgtcgccgtttttttggagaggagaaatccgtaggcttagaggatttttggtagtcttgtttcgagatattcatgaagagggggggagcttacgggggattcttatgatcactagtgtatcacgcagtgccacgcgttgtatcggacgttccaaacacaggttgctgtatgaatctacgctgatgtactaatggggtgtcagg

SEQ ID NO: 22102 - DNA, 480 bp, Oryza sativa
  Clone ID: uC-osflM202046h12b1
tcagacccacccggatgccgcgggctctctgggtgatcccgtctgcatcgtccaagcgcacagtggcccggcctacgacgtcaggttctacccggattcgcagcagccgctgctcttcagcggcggggatgacgggcgccttcggggatggagatggcacgagatgcagagctgccttgtgccgctatctctgcaaggggatcatttggagccagtacttgatttggtgaaccctcagcatgagggtccttggggtgctcgctctccaatacctgaaaacaacgccattgcgattaacaaacaggaaggatctgtttatgcagcggccggggatgcatgtgcttattgctgggatgtggagagtggtaaatgtaaaatgaccttcaagggacatactgactatttgcacagcattgcagtccgcgaagcgaaccgccaggtagttacaggatcagaggatggcacagcccgtatctggga

SEQ ID NO: 22103 - DNA, 491 bp, Oryza sativa
  Clone ID: uC-osflM202047a02b1
gccctttctcctcctcgtcgccgtcatcttctccttgggctcctcgtcgtgctttgctgtgaccagccatgaggcggcggccatcgcgcggcgccagctgctcaacttcgagaagcacggcgaccacgtccacatcgatatcgacatcgagatcaaggtgagcaacccgcggctggcggcggcgcacagggcgctgcacgcgctgaagcgggcgctctactccgaccccggcaacttcaccggcgactgggccggccccgacgtgtgcgcctacaacggcgtgctctgcgcgccgtcgccggacaacgcgtcggcgagcgccgtcgcgtcgctggacatgaacgccgccgacgtcgcgggctacctgcccagggagatcggcctcctgtccgacctcgccgtgctccacctcaactccaaccgcttctgcggcgtcatccccgaggaggtcgccaacatgacgcggctctacgagctcgacgtcagcaaca

SEQ ID NO: 22104 - DNA, 363 bp, Oryza sativa
  Clone ID: uC-osflM202047a06b1
gacttcttcgaggtcgaggcggtggcggaggagcggggcccactgtcaggaggacgcggcgggtctggacgatgaccttgttctcgaggatgagctgcgaggtcgagaagagggcgaagactgcggctgcagctgctgctaggaagaggaggaggacgacgtttacggcctcgccagctctctcgaatcggggatcctttctggatctagcggcgacgaccctaccggtccggaggaaagggatgagaaggagaagcatttaggagatgatgcgaagaacaataagaggaagcaggagtctgaatctgatggggatagcggcagcggcagcggggaggagcagaacaagaaggtgaggagagc

SEQ ID NO: 22105 - DNA, 489 bp, Oryza sativa
  Clone ID: uC-osflM202047a07b1
atctgtcccaatcacccaaacatggcggaggcgggggccatccggccggccgcggggggcgccgtcgccgccggcgacttcccggagctcctcgccttctgcgcccgcgcggaggccctcatcgccgagctcctcctcctctccgaccgcgccccgtcgcagttcgccgaccgccgcttccaccccgtcctcttcgacttccgatacttcgactccccgggcgaattcgaggcgaggatcgaggggaacatggagctggaggccctggaagacgagctccgcgagtcctgcggctcctacatgcggaggttcttcgccttgctggatgccgccgtcgcttaccacgacgagctgtgcagctacctcaacgacctgcaggaagggctgtatgtgcattgcacattggatggtgtactggagagtaactgggcttgccaattgcttacagaatcgatgactttgtttgggggatggcttgctaatgagcac

SEQ ID NO: 22106 - DNA, 332 bp, Oryza sativa
  Clone ID: uC-osflM202047a08b1
gatgtgtaagcaggggtacactcaacactctggggggtactgcttcgatgaccatggacatgtgtctttgatatgctgtaacatgaatgatgacactttatggtggtctatcatgtttttttttgagatgagctgagcatgagggcttgaagcttgcctggaatactttactggtgactggatatggcaaggccatttaaactctatgataatgggtagaccaggtctatactaaaatacaggtgggactaaacattgatgcactagatatggagagttatgctccctacgcagccaatccaagagagaaacccggaaatgtgggctacaaa

SEQ ID NO: 22107 - DNA, 150 bp, Oryza sativa
  Clone ID: uC-osflM202047a11b1
cacccggggggccccgccccaatattcccggctcgccctcacgcgccgcctactggtgaggcccacgcgctagccgcagagggggggacttttataataatagggggggatacctcaccatgaccttgttctcgaggatgaatttctacc

SEQ ID NO: 22108 - DNA, 476 bp, Oryza sativa
  Clone ID: uC-osflM202047a12b1
gttgtacgcgccgccgctggagtccgtcccgcgggggccgcttctggtcgccgtggccgagcacgacctcatccgggacaccaacctcgagtactgcgacgcgctgcgcaccgccggcaaggacgtggaggtgctggtcaaccgcggcatgagccactccttctacctcaacaagtacgccgtcgacatggacccggccaccggcgagaggacccgggagctcgtcgacgccatcaagagcttcgtcgaccgccactagacgtggagatcagagaagcgcatcttctccaccgtacgtgtagcaccttccaggttgtgattgtttctcgtctcgtgtcatgactgtccgccatacgttggcctgagcttgaccttgtgtgtggcttgctgtccatgtcaagccgatatcatgtacgcatcagtgtttaagtacgcgtttgagtaggtacaaataaataattggatcattcccgaac

SEQ ID NO: 22109 - DNA, 500 bp, Oryza sativa
  Clone ID: uC-osflM202047b01b1
ccggtgttcaccatcgtggtatacttgagggctgggggggagctcatctctggaattgacgtgccattgttcttcttgcgacgactcttttcgtgtttgctccattggtgagctttaagcgtctggattcattgagatacacctctgccctatcggttgctcttgctgtggtttttgtcgtcattactgctggaattgctatcatcaaactcttcaatggaactgtagcgatgcccaaactttttccagaactagatggtcttagttccatctggaagctcttcacagctgtccctgttcttgtcactgcctacatctgccattacaatgttcacagcattgacaatgagcttgaagacagaacacaaattaaacctattgtgcgaacatccctgttcctctgctccagggtttacattgctacaagtttctttgcatatctcctcttcggcgagggtaccctagatgatgttctcgctaacttcgatgcaaatcttggg

SEQ ID NO: 22110 - DNA, 423 bp, Oryza sativa
  Clone ID: uC-osflM202047b03b1
agagtacaaacccccattcccaacaccttcgcgacgggagcgagccaagcacgagggaaaaaaaaaatccccgaatccgcgacgagcgaggcggcgagctcgctgcttctatcgatccggagagggaggtagggaggagtgagcttgctcgctgttgccgccgtggccgaggccgaggccgatcacggcgccccgggtgctcagatcgagcgcggcatgatggatccggggatgatgtcgctggcgcaggagcagatgaccaagatgtcccccgttgacctcgccatgatgcagcagtagcttctgtcaaatcctaacctactaaaggtagcatgctgagagcatgacgaatatgacagctgatgacttcaaacgagctgcacagctcatgaatcacacaggaccagatgaaatgcttgacat

SEQ ID NO: 22111 - DNA, 423 bp, Oryza sativa
  Clone ID: uC-osflM202047b04b1
gggggcgttaccatcttagttgggctcggggttaaatattcacatttaaattttcacctgtcaatcagtcaatctagctaacacgtgtgaatatgtacatcatgttaacttgcacaaattaaaaaatggatatgaacaagcaggaatggctgcagaataaagaatgagaacaaaccgctactatcagggtgtaggcctgcactagatgatcaatgtacacgcacaaggcattgccaaggtaggtaggtagatagaaataagatgttgctttgctgtatatgaagtcgtcagatttcttttgatccatgcgtccggtgcctgcctagccagtctaggactgtcagtaagctcagcggaatgtaaagctgtcgtcacagagatctcatgtaaacagacataactgctttccatagaaatatgctg

SEQ ID NO: 22112 - DNA, 527 bp, Oryza sativa
  Clone ID: uC-osflM202047b07b1
gatcaggctagctacctacagtcggaaaaaaagggggtgtatgatagctagtccaaatgtctctatctgtaagctctgatagcaggaggcaaggagggttaaatttttcactgccaaagaggagttcacatgtcagtgataagagtggtatgtcgccaccagcactaccaacatttaaaatagtatagaaaaatgaagcaacgatataagatggttgaaatgatcataaagttgaacttgagaaaaactatccataattgagggtagaaccacagaagtgaggccctagaggcctatgagcaggttgcctttgcatttcttaacagtgcactgggaccagaacgtaggctctgttcgttatgggaagataggggagattgattctcgttttccgcgtgcacgtttttcaaactactaaacggtgctttttttgcaaaaaatttctataggaaagttgctttaaaaaattatattaatccatttttaaatattaaaataagtaatactcaactaatcatgagctaatg

SEQ ID NO: 22113 - DNA, 404 bp, Oryza sativa
  Clone ID: uC-osflM202047b09b1
ggtggcgcctccgcctccacggccactatatgggggcggcggcggcggcggcgggggcggggggccatggcggggaagaaggaggaggaggaggctgttgtgtacaggggcgacaagctgatcctgcgggggctgcggttccatggcacccacggggtgaagccagaggagaagaagctgggccagaagttcgtcatcgacgtcgacgcctggatggatctcgccgccgccggggactccgacgacatctccgacaccgtcagctacaccgaaatctacaggatagccaagaatgtagtcgaaggcccgtcgcacaatctgttggaatcggtggctcagtcgattgcaaactcaaccctgctcaagttccctcagatttctgcagtttgagtgaaggttgagaa

SEQ ID NO: 22114 - DNA, 328 bp, Oryza sativa
  Clone ID: uC-osflM202047b10b1
tatgtgctggaccgacacctcccgccgtcgctggaggggtttttcgacaaggcttggggggtggcccgcggcgtgcctgacgtggcgagggagctcaccgcggaggtgcagcagtcgggcgtcaccggcgcctcgcgcgtctcgtacgccaaggtcgagcccgtggccatgggcgtgtacagctggatccagccggcggccatggacctctacgtgcgctacgagccggcggcggagcacctcgccgtctccacctggcgctcgctcaacaacctgccgctgttcccgcaggtggcgcagatcgacatgcccaccgacgtctactggg

SEQ ID NO: 22115 - DNA, 142 bp, Oryza sativa
  Clone ID: uC-osflM202047b12b1
cccaatatcccggtcgaccctcacgcccccgatatcttacaccctcattccaccgtcttccactgggagataactaaacaccacccgggggtccataaaccaccactactctataagccagcccttcatctcatctggagat

SEQ ID NO: 22116 - DNA, 529 bp, Oryza sativa
  Clone ID: uC-osflM202047c01b1
atcctacctgactagtactaccactactagctaggggggagctactctctctggtcatcaagctttgagtggttggagtggtggcagctatggctttttccatctccaagaaggctgcagttgctgcactcttctccttccttgttgtcacctgcgtcgccggcgccaggccggggaacttcagcgcctccgacttcaccgccgatcccaactgggaagtcgccagggccacctggtacggcgctcccaccggcgccggccctgacgacgatggcggtgcttgcgggttcaagaacaccaaccagtacccgttctcgtcgatgacctcctgcggcaacgagcctatcttcaaggacgggaagggctgtggctcatgctaccagataagatgcgtcaaccaccctgcctgctccggcaacccggagacggtgatcatcaccgacatgaactactaccccgtttccaagtaccacttcgacctgagcggcacggcgttcggcgccatggccaagctcgggcagaacgacca

SEQ ID NO: 22117 - DNA, 369 bp, Oryza sativa
  Clone ID: uC-osflM202047c03b1
tcctgtgctccaatctcccactccattccggccgggcgttctcccgctctcgatcgatcgatcgatcatggtggtgcctttcgcgacgacgccagcgaggcaggagacggtggtggcggcggcgccgccagctgcggcggcgtccggtgtcgtcggcggcggcggcggcgtgacgatagcgacggtggacatgtcggcggagcgcggcgcggtggcgaggcaagtggcgacggcgtgcgcggcgcacgggttcttccggtgcgtcgggcaccgcgtgccggcggcggcgcccgtcgcggcgaggctggacgccgcgacggcggcgttttttgcgatggcgcccgcggagaaacaacgcgccgggccggc

SEQ ID NO: 22118 - DNA, 473 bp, Oryza sativa
  Clone ID: uC-osflM202047c04b1
gcatgcgcacgcccacacgctcgggctccgcatcggggcgccgccgcctgcgccggcggggcgccgcgctcgcccgcgccggcgcgcagtccgtgtcgccgcggcggcgtcggcgccgcggcgggagacggacccgaggaagcgggtggtgatcacggggatggggctggtgtccgtgttcgggaacgaggtggacgccttctacgagcggctgctcgccggggagagcggggtcggcgccatcgaccgcttcgacgccggcggcttccccacgaggttcgccggccagatacgcgggttctcctcggaggggtacatcgacggcaagaacgaccggaggctcgacgactgcctccgctactgcatcgtcagcggcaagaaggcgctcgagaacgccggcctcggaagggctccgatggccacaccaagcttgacaaagtccgggctggtgttcttgtgggaactggcatggg

SEQ ID NO: 22119 - DNA, 460 bp, Oryza sativa
  Clone ID: uC-osflM202047c06b1
ggaaaaaaaaaccaaaccctctcgtcctccccttgcgggcccaccccggcctcgccgcccccttcccgtcgttcaccggcggcgaattcaagctgacgagctcgccaccgggggggggatttaggattggttcgatcttggccggccaagaagtacaagtttcttcgggggattagcttgttcgcgagggggaggagttcggtggtggagccttcgccttcgtgatggcggacaccaaggcggaggcaaaggcggaaactatcggcggtggcggcggcggctctggctcgttcagcgagcaggcgtttgttgagaagcttaacaagctcaacaacacggcgactaggatccagacactttcaaattggtgcatttttcaccgaaagagagccagacaggttggtgatacatgggagaagcagtataacagtgcacataaggataagaaagtatcattcct

SEQ ID NO: 22120 - DNA, 492 bp, Oryza sativa
  Clone ID: uC-osflM202047c07b1
cgtcggcgaacaccgtccatcgcgagaactcttacgtcgtcggcgtcggcgtcggcgtcggcgaggaggagcaaacatttacggctggcttgcaatcttaatcttttgcagtgttcgtcattcaggaggctcccggccgatccggtggatcggatcggagcgggagcacaaactgcaaattgccacggtccttgcacttgatttccggagccaggaggatgatttgctgcggcggcgaggaggaggagacgtacgctccccgtgcagccagtcgcagtcgcagcaggcgcccgacacctgcgacgcagtacaatgcaggccctcgtaagccaagaggaccaaatgcacccaggagcggcggcccgccaccgaaggtgctctccatcgacgtgccagccatctccatgggcgagctgaacaacatcaccggacactttggacagagtgccttgataggagaaggttcgtacggtccgatctacagggcggtgc

SEQ ID NO: 22121 - DNA, 447 bp, Oryza sativa
  Clone ID: uC-osflM202047c08b1
ggaggagcttcttccgtgtgcttctcaccctgcaggctctggagcggatgaaaatcccatcatcattcaaccaatgccttcagaatcaacctactgggatggtttctctggttgatcgaagtggaaataaatggagtgcagagctgacttcagactctgagggattcttctttgtgcatggatggaaagaatttgtcagagataactcaattcagtgtggtcaatttttagtattcacttatgataaacggtcacaattctcagtgacagtctttgaaccttcaggcattgacaagatatcaactttctctgctcacccttccaaaaatgtgatcattaaaacagaaagtgatgaagggggcatggtcaccgcagctatcacaacagagaaaatggctcccgccctgcaggaaaataatggcatcacaggacagagaactagagatg

SEQ ID NO: 22122 - DNA, 53 bp, Oryza sativa
  Clone ID: uC-osflM202047c09b1
actcttacacccggggtaccccaccccaatacccccgtcaacccacacgcccc

SEQ ID NO: 22123 - DNA, 370 bp, Oryza sativa
  unsure (1)..(370): unsure at all n locations
  Clone ID: uC-osflM202047c10b1
cttttggtgggttggcttctcctccccctctngggctttttttacaatcttcgggggcttgcctcacctatggtttagtgggttgagatggcggccccggatgtcgagtaccgctgattcgtcggccgactcgcctgggccaccgaccaccgctccctcgagggcagcttctccacctacggcgagatcctcgactccaaggttcgccctcgctctcctacgccgcgtcttgagatgggttttttttggctggattatcacgttgactcgctctgtgttgaataccaatgggtttctttgttgggttgcttggatctgcgaactcggggggttttgctccggctgttctgatcccgttggtgccagatct

SEQ ID NO: 22124 - DNA, 523 bp, Oryza sativa
  Clone ID: uC-osflM202047c12b1
ctcttctcgccggcgtcccctccacctccatctggggcgctcgccgcccgatcccggcccctccgccccgctgccccgcacctagagatgccgtcgtcgtcgtcggcggcggcggcggcttgcgggcccccggagttcacgccggggtggaagacggtgtcgacgtgcgccccggacgtcgtcggcgagggcgtccacgtgttcgacatcttcgggtacaacgaccacaaggggatgggcgcccacgagcccatcaggtcgggggccttctccgtcgccggcctcgactgggtcgcctgcctctacgccgacggctacggcgtcgccggcatcgacgacgtctccgcctacctcaggctcctcggcgacgcgcccaccccgcgcgtgtgggtctcctgcgaggtcaagctcgtcgaccagcgcaccggggtggcctccacgccggagcccttctcaggtacgccctggcgttcggcgacaagtgcaaggccctcactgtatgatgatccccaggggccagatc

SEQ ID NO: 22125 - DNA, 506 bp, Oryza sativa
  Clone ID: uC-osflM202047d02b1
gcatgaagcaattcttgagctcaatcagcaacaaggggtatctccttcttgcttaggggagtccttcgccctcccaagaagaagaagatgtcttgctgcggcggcaactgcggctgcggcagcggctgccagtgcggcggcggctgcggcggatgcaagatgttccctgatgtggaggccacagccaccaccaagaccttcgtcctcgctgctccatccaacaaggcgagctctggaggaatggagatggcggtggagagcggcgagaacggcggctgcggctgcaacacctgcaagtgtggcaccagctgccgcggctgctcctgctgctcctgcaactgaatctatcgtcgtcgtcgcccggctgcatgaggatttatcgtatggatgctgctactgtcgatcagagctttgatcgaggccttaatttgcttgcattagtacccagcttatatgtaggcaggccttgccttttgctctgacgcctaaataaaaccgtcgtcgtc

SEQ ID NO: 22126 - DNA, 485 bp, Oryza sativa
  Clone ID: uC-osflM202047d03b1
gatcagtctatctacctacggttggaaaaaaaaaggcggtatgatagttagcccaaaggtctctatctctcagctctgatagcaagaggcaaggaggtttaaatttttcactgccaaagaggagttcacatgtcagtgataagagtggtatgtcgccaccagcactaccaacatttaaaatagtatagaaaaatgaagcaacgatataagatggttgaaatgatcataaagttgaacttgagaaaaactatccataattgagggtagaaccacagaagtgaggccctagaggcctatgagcaggttgcctttgcatttcttaacagtgcactgggaccagaacgtaggctctgttcgttatgggaagataggggagattgattctcgttttccgcgtgcacgtttttcacactactaaacggtgctttttttgcaaaaaatttctataggaaagttgctttaaaaaattatattaatccattttt

SEQ ID NO: 22127 - DNA, 502 bp, Oryza sativa
  Clone ID: uC-osflM202047d08b1
cctattactcctaccactgagagagggccactctgtcccctcgagttcttcaccggcttctttcccctcctctccggaccagggaagcagctaactgtctgcgcaagaaaggtggttcaagcacgatgggacggaaccatctttgcctggtcacttgcttgtggattctgtcatgcgcagttctgcttcatgcttctcctgatggattgctgagaattagcctgaataagaagagattggacaagaagaccttggacggtgcaaaattggcaagggaggaaagccatcgtctgagagccgacggtttaggtgatgacatagttcctttggacaactacctggacacgcagtactttggagagatcggcatcggcactccaccacagaacttcactgtgatattcgacactggaagctccaacttgtgggttccatcagtgaaatgttatttttcgatagcatgctacttacaccacaggtacaagtcaaaagggtcgagcag

SEQ ID NO: 22128 - DNA, 550 bp, Oryza sativa
  unsure (1)..(550): unsure at all n locations
  Clone ID: uC-osflM202047d09b1
gctccggcggtcaataattaaaaaaaaaaaagggggaaatggctttcagaaaccaggacgctgccatggtcctcttcttcttcctcctcatggtgactacctacgccaacgcgcacggacacagcaagaagcccgaggagatcactcagggcgtttacggggcggcggcggcggtggcggccggccccggcggcacgttcgacatcaccaagctcggcgccgtcggcaacggcagggcggacagcaccggcgcggtgatggcggcgtggaggtcggcgtgcgccggcgccgggaagcagacgatcctgatccccaagggggatttcatgacgggggcgatggagctcaggggcccctgcaatggcgccgtgaccatccagctcgacggcaacctgctgggctccaacgacctcagcaagtacccgggcaagaagatgcccaactgggtcgaggtccgccatgtcgacaacttcgtcatcttccgcaagggcaagctcgacngccagggccctcgcgtctggagcaagaactcctgcgccagaactacact

SEQ ID NO: 22129 - DNA, 524 bp, Oryza sativa
  Clone ID: uC-osflM202047d11b1
cacacattctcgaagaaggagaagaaggagaggggcagccatggcgtcgtcggtggcagcggcggcgagcacgttcctggggacgaggctggcggacccggcgccgcagagcgggaggatcgtggcgaggttcgggttcggcggcgggaagaaggcggcggcgaagaaggcggcgaggccgtcggcgccgacgacggacaggccgctgtggttccccggcgcggtggcgccggactacctggacgggtcgctcgtcggcgactacggcttcgacccgttcggcctcgggaagccggcggagtacctgcagttcgagctggactcgctggaccagaacctggccaagaacaacgccggcgagatcatcggcacccggttcgagaccggcgaggtgaagtccaccccgttccagccctacaccgaggtgttcggcctccagcgcttccgcgagtgcgagctcatccacggtcgctgggccatgctcgccactcttggagccctcttcgtcgagtggctcaccggcg

SEQ ID NO: 22130 - DNA, 501 bp, Oryza sativa
  Clone ID: uC-osflM202047d12b1
tttttcttctcgattctactccactccttaaagggggccattttttgtgtaattggggttgttatacggtttattgtgtggttgctgaatcttgaaaatttaggatccaatggttaggagatttttatcggccctgctgtctccagagttttttaggttgaggatcccagttgtaaatttgtaaccagtttttttgccctgctttctccgccggccgatcgatcgattatcgacctgtatgcctggtggtgtacgtgagctgctcttgatttcttccaagaatacaaaaaaaaaaaggattacagctctgccagtggaggttcctttttgtgctcctagtgtttgttcttgggcagaaagcctgacgaaactgaatcctccaacaaaagcaaatggcgaaacgtgggctttggtgttcattatactgtttgagtttgcccattcctcgaggttggtagtggtgaactggtatgtgttggtagtgcagatgatgcttctttg

SEQ ID NO: 22131 - DNA, 446 bp, Oryza sativa
  Clone ID: uC-osflM202047e01b1
gctttcttcgcccttgtcgaccaaccctcctctggggcggttctcataacggggcggggggtacgccccctcctcctgctcctgctgctgcttctcgtgtgggggcatggccccgagcgaggcggccgcagctcatgatgctgagatagacccggacttctcgggcgggggcggtgggggccccacctttgagttcgccttcaactcagtcaacttctcccaccgggtgctcccgatcgaggtctacccgggggacgaccacgacaacgacgaccacgcgcccggattcacactggacagtggggcacactcgctatatgattgggcgcgccaccgcaagcgccgtcgggaggaagtcctcaaggagaaagagtctgaagcagttatgccagaccatataaattgcaaagtagaaccacaagaatgtgatgcatatgaagaaaatc

SEQ ID NO: 22132 - DNA, 479 bp, Oryza sativa
  unsure (1)..(479): unsure at all n locations
  Clone ID: uC-osflM202047e03b1
aatggcttgcattcttattggaaatcttggcgcatgggtcactgaagttgtaagtgatgctgttgtcacagagttcagtagaacgcagaaggccggtgtactacaatcttacgcgttcatagttctggcagctggatctctcttaggaaatttgtctggtggttacgttctgttgagaacacaggaaccaaagactatgttctcagcattctccatcctccttggcctccaactagcactttgcttaagtacaaaagagacgcttccaagctctcatagaaactggaacattcgtcatgtcagaacctctctgtctgacaatctccgcaagcaattctcaaacttgaggacagcaatcagcgaggagcagatcttttaccctcttatgtggataatgacatcatttgcagttgtgcctattctctctgggacaatgttttggtttcaaacacagcatctgangcttgatccatcagtca

SEQ ID NO: 22133 - DNA, 405 bp, Oryza sativa
  Clone ID: uC-osflM202047e06b1
ttcttttgcatctattcagttgcagattgagagcgggggacattatattgattctatggggagggttgtgctagcgaattcttgttagcaacaaattgacatattgctcggcacatccccaccgagaataccaagatgacgttctctggtacacaggacaagtgcaatgcttgtgacaagaccgtgcatttcattgatctccttaccgcggacagtattccctaccacaagtcttgcttcagatgcagccactgcaaaggcacactttcgatgtgcagctattcgtccatggatggggttctttactgcaagacccattttgagcagctattcaaggaaacaggcaccttcaagaagaacttcccctcaagtacaaaggcaaacagtgaacaggctaagattccc

SEQ ID NO: 22134 - DNA, 505 bp, Oryza sativa
  unsure (1)..(505): unsure at all n locations
  Clone ID: uC-osflM202047e08b1
ggggtttatatctaaacacactgttttggaaccggggttattgggactcaatcaggacccttgctggagaggttgagaatccaaagagaacactcccaagggcactttcttatgctctagttttagtggtggggggatacctctaccctctgatcacctgtacagcagcagttccagttgttcgggagttctggacggatggatatttctcagacgttgcgagaattcttggtggtttctggttgcactcgtggcttcaagcagctgctgcactgtccaacatgggcaatttcgtaactgaaatgagcagtgattcttaccagcttctcgggatggctgagcgtggaatgcttccagagtttttcgccaagagatctcgctatggaaccccacttattggcatcatgttctccgcgtttggtgtggtcctgctgtcctggatgagcttncaggagatcatcgctgcggagaactacctgtactgcttcngtatgatcctggaaat

SEQ ID NO: 22135 - DNA, 370 bp, Oryza sativa
  Clone ID: uC-osflM202047e10b1
ctgtacgcctggggtgccggtccgcgattttcgggtcgagtcccacgtgcgcggattcgtggggccaccccctaactcttctctgggggggatctttacttcttctggggcgccatcacacctctgctcacaggggctgggtactagtcccgtttttaatgaaccactttttccgacgtcactgaaattttcaatgcaaaccgcgatctcatagttgactatgtctggatgactggatctgggaacatctcatactataattgtaagtacgactttactcttgctagatttgcttataatatgtgcaatacttatttttattgtggctctctcgtgtatttgctcatgacattgattacatgcctctatt

SEQ ID NO: 22136 - DNA, 488 bp, Oryza sativa
  Clone ID: uC-osflM202047e11b1
gtttggcgtaccacgcccgcggacccatgcaaagggcatacaactacaactatggggcggccggcgaggcgatcggcgcggacctgctgggcaacccggagctggtggcaacggacccgacggtggcgttcaagacggcgctgtggctgtggatgaccgcgcggtcgccgagccagccgtcgacgcacgccgtcgtcacggggcagtggactccgactcccgcggacagcgcggccggccgtgcgccaggctacgggctcaccacgaacatccttaccggcgggctccagtgcgccggcggcaacggcggtgccgaccgggtcgcgttctacaagcgctactgcgacgtgctcggcgtcggctacgggcccaacctggactgcttcggccaggcgccgttcgacggcgacatcatgtcggcgtctgcggcgaagtagacgtgtgcgccgccgtgccggactcgatcgatcgataaaattgcgtgtgag

SEQ ID NO: 22137 - DNA, 500 bp, Oryza sativa
  unsure (1)..(500): unsure at all n locations
  Clone ID: uC-osflM202047e12b1
attctttctgattgcagcctgccttggatctctgggtcactcctccaatgctgctggcaaccaggagaagctgtctagtgccatggtgaaccacagcaacaccaatggggacactgaaaatgaagaactcaccaagcacctccttgagatagaacaacccaaggattgtgaagaacaagagcctgaagtggcaccggctgcccaggctgtggaaaaactagaggcaggaacagctgatttcctggttgaccttgaggggaagagatctattaaagtgctcggatcgaacaccttcctgggcctcggcatcgtcaccttcgccggcgtgagctactccctcttctcgccggcgttcaacctcgccaccaacgaccagtggcacacgctcggngagggcgtcccccacatggtggtgtacacggcattcttctacttctccctcgcctgcttcgccatcggcatcgccctcaacatctggttcctctaccaccccatggtcg

SEQ ID NO: 22138 - DNA, 432 bp, Oryza sativa
  Clone ID: uC-osflM202047f03b1
ccccttgccgcccccaaaaccaaacggaggcgaggggggcgccgttcaccgccgccggcggtgccatggacgtctcgtcggtgctcccgttcgcgctggcgctggtggcgatcccgatctcgctggcgctgctggaccggctgcggctggggcggatcccgccggggccgtggtcgtggccgatggtggggaacctgtggcagatcaagccggcgcggtgccgcggcttactggagtgggcggagaggtaccggccgatcgtgtcggtgtggatcggctcgtcgctgaacgtggtggtgtccacgtcggagctcggcaaggaggtgctcaaggggaacgaccaggtgttcgccgaccggtcgtgcaaccggtccacgcagagcttcatgcggaacgggatggacctgatctgggcggactacggcccgcact

SEQ ID NO: 22139 - DNA, 426 bp, Oryza sativa
  Clone ID: uC-osflM202047f04b1
ctctctctctctctcctccaccttgtcgtagagaggaggcggccatggaagctgccgggatccatgcgcccaccaccaccacctcctccgactccggctcgtgcgtcaccaatggcacgcgagagaagcgcgagatctctaagcacaagcagctcaagcggaagaggagcacctctcctgctcctcctcccggctgcggcggcggccaaggacaggaagcggcggtggagactgacgctgacgctggcgccgccggcgaggaggagagcagcagtgtggctgccgctggcgccggcgagggcgagcgcaagaggggtgacgccggcaggcacccgtcgtaccgcggtgtgaggcggcggagctggggcaagtgggtgtcggagatccgcgagccgcgcaagaagtcgcgcatgtggctcggcacct

SEQ ID NO: 22140 - DNA, 384 bp, Oryza sativa
  Clone ID: uC-osflM202047f07b1
acgcgcgcgtgttttctttctgggacccacatatacagctgggggggttgtttatgttatagcgggttagagtcatcacggatcatagtacgatgcaagaaagagctttgtgcccattgtccatagcgcaccatttactgcattaaaactagccaagcagcgcctacgaggctgtatataccaacaaacgctctgatgatgagcttgtgcctctaaaacgccgatacgatgaagaatgtcttacatgcgactacattgcacatgacctgctgcacatggaaacacctcgtgacggacctatgatccgtaccagtgtcaaaccaaaacgaattttatgaaaaacaccctgggtgagaagaggtactcatctactgggacatttta

SEQ ID NO: 22141 - DNA, 411 bp, Oryza sativa
  unsure (1)..(411): unsure at all n locations
  Clone ID: uC-osflM202047g01b1
cccctctctcgtttagggtttccctccgccgccgcgggctcccgcatccacgcgccgggtgctcctacgccgccggcgccgccaccgcagcatcagccatggccgaagtggagctcccgcagcaggaggtcaagctcttcagccgctggtccttcgaggacgtccaggtgaacgacatctcgctggcggactacctggcggtgaacccgacgaagcacgcgacgtacctgccgcacacggcggggaggtactcggcgaagaggttccggaaggcgcagtgccccatcgtggagcgcctgaccaactcgctcatgatgcacggccgcaacaacgggaagaagatcatgggcgtgcgcatcgtcaagcacgccatggagatcattcacctncttaccgacgccaaccccattc

SEQ ID NO: 22142 - DNA, 421 bp, Oryza sativa
  Clone ID: uC-osflM202047g02b1
caattttcttcctcccgaccgagcaagggggcgaagggacgagctacggaccgagccatggaggaacacaaggctcgctccttcgtcgccttggctccctcgggtgaaatttcatcaatataggacaatagattataccatcagtttttgcacacgcggctgaaatttgactaggagaggcaccatggagaaagtcgaggtcgatgggaacttcattggtacgggtaattggaagctgcatggagcactatgtaagcaacttcacaaagtagttcttgaagtattggatggtattcctgtccttgaagctacaaggcctggaaacagttctggacttcttgcattgagttccttgcgcatagctgttgagaaggccaagaatctacttcagtattgctcagagtgcagcaagctatacttg

SEQ ID NO: 22143 - DNA, 417 bp, Oryza sativa
  Clone ID: uC-osflM202047g03b1
gaatgtgccggggttccttagcgtgagccagaaggccaagaagccgtcgctggtggtgagggcggtggcgacgccggcggcgccggtggcgagcctcggcgcgggcacgtttaaggcggacgggaagaagacgctgcggctgggggtggtggtgatcaccggcgcgtcgtcggggctcgggctcgcggcggcgaatgcgctggcggagacggggaagtggcacgtggtgatggcgtgccgcgacttcctgaaggcggacaccgttgcgaaggctgcggggatggctgccgggagctacaccgtcatgcacctggacctcgcctccctcgacagagttcgccagtttgtggacaactttcggcgctccggcatgcacgtcgacgcgctggtgtgcaacgacgccatttaccggtcgac

SEQ ID NO: 22144 - DNA, 172 bp, Oryza sativa
  Clone ID: uC-osflM202047g04b1
cttttgtcaccctggccctagcttggactgatgggggggcccttaactatcatgggggggtcataagaaagcataaggtcaaccgaatcacacctacgatcgcacatgtgataaaactacggacacatgcttaagacaagtaggacgctagactacagggcaggctaatgca

SEQ ID NO: 22145 - DNA, 474 bp, Oryza sativa
  Clone ID: uC-osflM202047g05b1
gtttgtaccagtcgaattactgaaagcttatctgaaggaggtcaagagtatgtcacatgtcaagaccggaaagatgtctccgggagtacagaatgaaattaatgaacgcgagttgtctgccttgaaagctgttatcaaatgtattgaggagcacaaacttgatgagaaatatcctatcgacccacttcagagaagagtcatccagctagagaaagccaaggcagacaagaggagggctgttgaagctggaaagccacagtctaagaggcctcgtgccaacggatcagtatatgcgccacatattactagcttttctgacaaaagcttataccaggccgctgcgccacagaggcattcctacccttacgagaggcagtatgtatatggtgctgaggcccatgatcacccaacaatgataagctcagctccctatggcatgtcacctgcccacacaacatactatggtaatggcta

SEQ ID NO: 22146 - DNA, 466 bp, Oryza sativa
  Clone ID: uC-osflM202047g06b1
cacttttactggacatactctactactactagccagggggctagctaactaactacgtggctatggcccccaccgtgatggcctcctcggccacctccgtggctccattccaagggctcaagtccaccgccggcctccccgtcagccgccgctccaccaactcgggcttcggcaacgtcagcaatggcggaaggatcaagtgcatgcaggtgtggccaattgagggcatcaagaagttcgagaccctatcgtacctgccaccactcaccgtggaggatcttttgaagcagatcgagtacctgcttcgatccaagtgggtgccttgtctcgagttcagcaaggttgggttcgtctaccgtgagaaccacaggtctcccggatactacgatggcaggtattggaccatgtggaagctgcccatgttcggctgcaccgatgccacccaggtgctcaaggagctcgagga

SEQ ID NO: 22147 - DNA, 440 bp, Oryza sativa
  Clone ID: uC-osflM202047g07b1
gtctataatgatcttactgggaaggatttcacggaggcctttgacgcggcatgttttcctcttacactcttctcaaacacctttgaccaaggttgggcatcaggtatctcggcagctgcaatacaaggactcttagagttgttagtagagggtggtgccgataatgtgaaccagtgctttcttgaggctgctcgctatggaagcactgaactcgtgcgcatcttacttcagattgctcgaaggaatagcttggacatcgatgtggatctagcccttggctttgctgctcactatgggaaactggataccatggggtgcttagttgaggagggtaatgcggttgcctttcttggccctttaatgcgggcagctgaacggggatgccttcaagttgttgaatggttcgtcaaccttggttgtcgggatatggagctttgctt

SEQ ID NO: 22148 - DNA, 526 bp, Oryza sativa
  Clone ID: uC-osflM202047g09b1
aaattaaggaaaaaaagagagtcgtagttcgccgggtcttcctcctctcgttctcgcggcggcggcggagatggcgtcgttctcggaggctcccccgggcaaccccaaggccggcgagaagatcttcaagaccaagtgcgcccagtgccacaccgtcgacaagggcgccggccacaagcaaggtccaaacttgaatggtctgtttggaaggcagtcaggtaccacccctggttattcctactctacggccaacaagaacatggctgtgatctgggaggagaacacactttatgactacctgcttaatcctaagaagtacatccctggaaccaagatggtcttccctgggttgaagaagccacaggagcgtgctgatcttatttcctacctgaaggaagcaacctcttaaaaggagtggagctgtcgtaacatgagacaatcggacaattcattctacagttaaataaaaatatttagacatctgggtcgctctggtttacagagtgcactccacgagacatttatc

SEQ ID NO: 22149 - DNA, 365 bp, Oryza sativa
  Clone ID: uC-osflM202047h02b1
gcgaactttctgtcctctgttcgttccccgccgcgaacgggatccgtatccccaatggccgaccgcgcgccgcctccgcctccgccgcccgctgggatcgactccaggagcggcttctgcgcggcgacgcggatcttccacagcacccgcgccccgggcgacctcccgccggagtcgctcccgatgaccgcggcggcctacgccttctccctcctgtcgtcgtcgacgctccccggccgccccgcgctcgtcgacgccgccactggcattgccatctcctacccgtccttcctcgccgacgtccgctccctcgcgggggggctctggtgctccctcggcctaacgcccggggacgtcgcgctggt

SEQ ID NO: 22150 - DNA, 417 bp, Oryza sativa
  Clone ID: uC-osflM202047h06b1
gcgcttttctcggcgactccctcgccggccgcttggggggcatcgtcgccgcctccgtgggctaccaagtcggcatgctcctcctgacggtgtcggcggcgatgccggtgtttcggccgccgccgtgcagcggcgcctgcggctcgggcgcgtgcgacgaggcggcgccgtggcagctggcggtgctgtacgcggcgctgctgctgaacgcgctgggcgccggcgggtacaggccgtgcgtggtggcgttcggcgccgaccagttcgactagtcggaggcggcggaccgggcgcgcacctggggcttcttcaactggtactacttctgcaacggcgcgtcgcagctggtcgccgtcacggcggtggtgtacgtgcaggacaacgtcggctggggctggggcctcggtgtgcccacct

SEQ ID NO: 22151 - DNA, 468 bp, Oryza sativa
  Clone ID: uC-osflM202047h07b1
gttttcttctccggtccttgcgcgcaagaccgaggggcggctgccgatctccatgtgccgatcgagcagagcatagcaggggatcctgctcttctgtaggaaatggctgacggtgaggacatccagcctcttgtctgtgacaatggcactggaatggtcaaggctggtttcgctggggatgatgcaccaagggccgtgttccctagtattgttggccgtcctcgccacaccggtgttatggtaggaatggggcagaaggatgcctatgttggtgatgaggcacagtccaagagaggtatcctcacgctcaagtaccccatcgagcacggtatcgtgagcaactgggatgacatggaaaaaatctggcatcacactttctacaatgagcttcgtgtggcgcccgaggagcaccctgtgttgctcactgaggctcctctgaaccctaaagccaacagagagaagatgacc

SEQ ID NO: 22152 - DNA, 465 bp, Oryza sativa
  Clone ID: uC-osflM202047h08b1
cggttcgatcgcccacggtggaggcctcgtcggggggcgagaggagccgctccgggctcgggtcggggttccggtacctgaccggcgccgcctccgggtggtgggaccggtggatggtcatgggagccagcggctccaagctcgagaaggccctcggcgaccagttcccggaaggcgagcgctacttcggcctcgagaacttcggcaacacctgctactgcaacagtgtcctccaggcactatatttctgcatcccgttcagggagaaattgctggaatattatgcaaataacaaaactcctggagatgcggaggagaaccttttgacttgtttggcggatcttttcatgcaagtaagccagtcaaagaaaaagactggcgttattgctccaaacgctttgttcaaagagtcaagagacagaatgaactatttcgcagctacatgcaccaagatgcacatgagtt

SEQ ID NO: 22153 - DNA, 295 bp, Oryza sativa
  Clone ID: uC-osflM202047h10b1
gtttttctatctgactacacagataactgcatggggggatcttgcacagtatcgggcggacaaccaccatgtagcttctgaccagcggccagctcgccacctttgccaccgatcttctgcatgatgccacagttctgcgccgtcgtagatgttccaggactgctcccacggcctcaagctccgcaagcccaacatcagctgcccgacgttggtcaagaccacgaccaatgcgagcgcaactaccaaacagactggtccggaacagcgtgtgaaccctacggtcccctccatcacc

SEQ ID NO: 22154 - DNA, 493 bp, Oryza sativa
  Clone ID: uC-osflM202047h12b1
gcctttcggtcacaattcagaacatcctcgactgggggttcattccagtcaacgggctcatcagcacggccattgggtgcattcttgggtacatcgtcgcgctgatctgtcgcccgccgccgcagtttttcaggttcactgtgatcatgaccggatttggcaacacgggtaacctcccaatcgcgatcatcgggtcggtttgccataccacggatcacccctttggtcctggatgccaccgcaagggtgtcgcttatgtttcgtttgctcaatgggtcgctgttattcttgtctacaccttggtttaccatatgatggagccaccgatgcaattctacgagattgtaggcgaagggaacgagattgtggaagagcctgcacagatcagcaactacagtagatctctgcttcatgaagcggaatggccaaggatggctgacaaagaaacggagcactcaaagacgccattcattgcacgggttttcatgagttt

SEQ ID NO: 22155 - DNA, 485 bp, Oryza sativa
  Clone ID: uC-osflM202048a01b1
atcttattctctccttcctcttgctctgctcactcagctgtcccccgcgcgcgccaccggcgtcgccatgtcgggcaacatcgccttcggccgcttcgatgactccttcagcgcggcctccctcaaggcctacgtcgccgagttcatctacaccctcgtgttcgtcttcgccggcgtcggctccgccatcgcctacaccaagttgaccggcggcgcgccgcttgacccggccgggctggtcgccgtggcggagtgccacgggttcgggctgttcgtggcggcggccatcggcgccaacatctccggcggccacgtcaacccggccggcaccttcggactcgccctcggcggccagatcaccatactcaccggcgtcttctactggatcgcccagctcctcggagccatcgtcggcgccgtcctcgttcagttctgcaccggcgtggcgacaccgacacacgggctgtccggcgtgggcgcgttcg

SEQ ID NO: 22156 - DNA, 515 bp, Oryza sativa
  Clone ID: uC-osflM202048a03b1
cccattcgtccgcaaaagagcagcgtcgcctctcctcctgctccctaacccctacgctgccagaaccttctcgaagctcccgctcccccccccttccgctccaatggcgaaggaaccgatgcgcgtgctcgtcaccggcgccgcaggacaaattggatatgctcttgtccccatgattgctaggggtgtgatgttgggtgctgaccagcctgttattctacacatgcttgacattccaccagctactgaatctcttaatggccttaagatggagctggttgatgctgcatttcctcttttgaagggaattgtcgcaacaactgatgttgtggaggcctgcactggtgtgaatgttgcggttatggttggtgggttccccaggaaggagggaatggaaaggaaggatgttatgtcaaaaaatgtctccatctacaaatcccaagcttctgttcttgaggctcatgcagcccctaactgcaggttctggtagttgccaatccaggcaacaccaacgc

SEQ ID NO: 22157 - DNA, 473 bp, Oryza sativa
  Clone ID: uC-osflM202048a05b1
ccattactcccaaaccctcgcgcgcgcgctctctctggtggtcaacgcgcgcgcccccgcccccgccccgacgagagcgatggcctcgccggcagcggcggcccccgcggcgctgatcgtccttctcgccgcggacctggcggcgaccggcgtcgtcgtcgacggctgcgaccaccgctacaaggccaacgagctcgtcccgctctacgccaacaaggtcggccccttccacaacctcagtgagacgtatcggtactttgacctgcctttctgctgtccagagaaagtgaaggagaagagcgaggcactcggcgaggtcctgaatggggaccggttggtcgatggaccttacacgcacgataccggtgtggattatgactccaagccggtttgctcgacgaagctgaccaacgaggaggtggccaagcttctgaatgcggtagcaaaggactactacttgcagatgtactacg

SEQ ID NO: 22158 - DNA, 482 bp, Oryza sativa
  unsure (1)..(482): unsure at all n locations
  Clone ID: uC-osflM202048a06b1
acgttgtcgaggcagaggcgctcgccgcggaggagccaggaccacccaccgccgccgccgccaccgcaaactctctttcttctctcgcctggacgagccgccggagagctcgggggagagctctgctgcttggggaggggaggcggaggcgatggagtctatggagcccaaggacatcgactggagcagggtggtgtcgcggtacgtgcgcgacgagacctacgagggcatcgaggccccgcactgggccgacctcaccgatcccgaggccggcgtcgccgccgtcgacgacgaggcctgggtctgccgccccgattgccggcatccaaagacggtcgaggacttcctcaagatgagccccaggcccaagggcaagctactgcgatcagtgtcggccatgatgatgccgttcggcgagagggacaccaaccttagagacggcggcaacaatctcaagaggcggggagccgtcgncggcagcg

SEQ ID NO: 22159 - DNA, 504 bp, Oryza sativa
  Clone ID: uC-osflM202048a07b1
cacttctggtggttttgaggctggtatctccaaggatggccagacccgtgagcacgctcttcttgctttcactcttggagtgaagcagatgatctgctgctgcaacaagatggatgccaccactcccaagtactccaaggcccgttatgatgaaatcgtgaaggaagtctcatcctacctgaagaaggtcggctacaatcctgacaagattcccttcgttcccatctctgggtttgagggtgacaacatgattgagaggtccaccaaccttgactggtacaagggccccaccttgcttgaggctcttgaccagatcaacgagcccaagaggccatcagacaagcccctgcgtcttccccttcaggacgtgtacaagatcggtggtattggcaccgtgcctgtgggtcgtgttgagactggagtcctcaagcctggtatggtggtgacctttggtcccagtggcctgaccactgaggtcaagtcggttgagatgcaccacgaggc

SEQ ID NO: 22160 - DNA, 505 bp, Oryza sativa
  Clone ID: uC-osflM202048a10b1
tttctttagaaccttctagaagctctcctcctcgggggatggctgtgacgatcgtgggcgtcaaggcgcgccagatcttcgacagcaggggcaaccccaccgccgaggtcgatgtgtgctgctcagatggaacctttgcaagggctgcagttcccagtggtgcatcaactggtgtctatgaagctctcgaattgagggacggtggatctgattacttgggaaagggtgtttccaaggctgtcgacaatgtgaactcggttattgccccagctctgattggcaaggaccctacgtcacaggctgagcttgataacttcatggttcagcagcttgatggaaccaaaaatgagtgggggtggtgcaagcagaagcttggtgctaatgcaattctggctgtgtcactggccatttgcaaagctggagctattatcaagaagattcctctgtaccagcacatttgccaaccttgctggaaacaagcaactggttttggctgtacctgcat

SEQ ID NO: 22161 - DNA, 536 bp, Oryza sativa
  unsure (1)..(536): unsure at all n locations
  Clone ID: uC-osflM202048a11b1
tgtggtgacgaggtgagcgcacgggcgcacagcggaggcgccgatctctctctccctcccagaacccgccatggggagcaggaagaaggcgaagccgagcaggagcaggaagaaggcgaagccgagccccgaccaggccgtggccctcgactacgtccgcgcctgggcgcatcccgctgcctccgcgccgccgccggagccctcggctgccgatgccgccggggacgacttcctgccgcaccaggccgcgcgcatggcctctggaggcggagggagcgtgctgttcgagctccactcccactccaaccacagcgacgggttcctctccccctccgagctcgtggagcgcgcccaccgcaacggagtgaaagtacttgccctgacagatcatgataccatggctggtatacctgaagctgtgtcagcggctcacagatttggcatgagaataatcccaggagtttgaatcagtgcactatattctncaaaggaaatcgctggtactggtgagcaatgtcatattctngcatactatg

SEQ ID NO: 22162 - DNA, 515 bp, Oryza sativa
  Clone ID: uC-osflM202048b01b1
agattggcagtgagaatcgtcagttcggtggcctctatgagagagggagaaagaaacttatggacggtgcccgggtggtgttccctgatgaagttgacccgccttcaatatcagggaaaattgttgagtgctcttggaataaagaagaggactgttggtcctgcatgcgcattcgaacagataaatcaactcctaatgatatcaatacttacagaaaggcacgtcttcctctcctctctcacacatgtactatatcaaattgttgaatactaccgtcagttgcactggttacaaggttaagagttttgtttgcttctgtagaactttacatttatgttctattcttctttcatgaaattgttctgtgatcaagaccagatcctgacagtgttcactgttgatgggctgtaactgcttgctttgaatgcaatatacctttatcttttacaactctgcgtgaagtttgcagctagggagtttatatgtgctgcaaatactgattcctccctattaat

SEQ ID NO: 22163 - DNA, 454 bp, Oryza sativa
  Clone ID: uC-osflM202048b03b1
cccttaaccaaaccctagccggcggcgtcgtcggaggccatggcggaaggtgcgccgatcatctaccttgaccccgccacggtggcggaagcgcgccgccgcggcgacgacccgcgcaagctggaggagtgcaccaagtacttgatgacgcacatctacgggttgctccctggcccacccgtacccatcgccgccgcccgcacccacgccgcctgcgccgccgcagcctccgacggcgtcgaccgcatcagcgccctccccgacgcgatcctccgcaacatcgtctcccgcctccccgtcaaggacgccgcgcgcaccgccgcgctctcccgccgctggcgcccgctctggcgctccacgccgctcgtcctcgtggacgcccacctcttcccgcgaggtcgaagcttccgtgtctccgcctctgccccgacgcgcgccgacacgccgggcatcg

SEQ ID NO: 22164 - DNA, 492 bp, Oryza sativa
  Clone ID: uC-osflM202048b04b1
ctagttttctcgctgcttcgcccgccacgtcaccctgctcctcctcccctttttttggggtcgctcgcctcgccatccatggggtcgatggcgaaccagcagtagtaggagtccaccccaacgacgcgcgcgagccagctccggggtacccgccgctcgtgcccgggggggaagggggtgcaccggggagccgtcgcgccgcgcgggtctgattcttcccgttcccggagatttgaaccatggagtctttacgtgacatggtcctcccaccaggatttggattccacccaaaagatactgagctcatttctcactatctgaaaaagaaaatacatggccaaaagattgaatatgagatcattccagagggggatatatacaagcatgaaccatgggatttacctgcaaagtgcgatgttccaactcaggataataagtggcatttcttcgctgctcgtgacagaaagtatcctaacggttctcggtcaaata

SEQ ID NO: 22165 - DNA, 515 bp, Oryza sativa
  Clone ID: uC-osflM202048b05b1
atattttgttatctttgagtctatgcttcattttggctgatgtatttgtcaagcaattcagacagttgaaagctctgctcgcgagttcttaggaaaggacaagtcaactacacttgtggctagtgcaaactttgttgatctggctggaagtgagcgtgcatctcaggcattgtcagctggcacaagactgaaagaaggttgtcacattaataggagtttgcttgcccttggcactgtcattagaaaactgagcatgggaagtaatgcacacataccgtatagagattcaaagcttacacgcatactacagccatctttgggaggtaatgcaagaactgcaattatttgtacactgagccctgccactagccacattgagcaatcaagaaatactctgctatttgggagttgtgcaaaggaagtagttacaaatgctcaggttaatgtggtcatgtctgataaagcactggttaagcacttgcaaaaggaacttgctagattggagagcgagttgc

SEQ ID NO: 22166 - DNA, 543 bp, Oryza sativa
  Clone ID: uC-osflM202048b06b1
gttttatttcttgtcttgtagggaagttggtagaggatgtgctctcagggtaaggattgattgtcagtttgcttagttctttcttttgattcaccagttgggatttagttagtatggatagataatctgctaggttggggttaaatgttgcctctgatatggtgagtgaaactacttttgtggattttgtatggattgtggttagtgggtgaaatttgtgttcttgattgaaacatctacctagttcttgaatcttcaatggcagcattattgtactgattgttgtatggtccaataatgtatttagggggattctacttactgctagtctgctcccagatatgaagatttgattctgttttttttcctcttcaaatgtttcttttttataattagttgaaatatgctattatccagagtacttttgggggtttatggattgtttcctcctactcaagagaggtaaacaaagtaacttcttcagtacagattttccagagatgccatttcttcttcatcattccttctttgattacttcatga

SEQ ID NO: 22167 - DNA, 446 bp, Oryza sativa
  unsure (1)..(446): unsure at all n locations
  Clone ID: uC-osflM202048b07b1
gtcttattcctggccaccacacccacccacccaccaatggcgtactcccgcctactcctcctcgccgcgctgctcgccacggcggcggagctggcggcgtcgcagaagccgaaggccgacacgccgacaaaggccacgccggcgtcgcccggccccgcggcggcggcggccgacggccccgcgccgacgaacgtgacggcagtgctggagaagtccggcaagtacaccaccttcctccggctcctccacgagagccgggtggacacccagatcaacagccagctgatggacagctacaacgggctgaccatgttcgcgcccacggacgccgngttcgcggcgctcaagccgggcacgctcaactcgctgtcgtcgcaagaccagatccagctgatgctctactgcgtgctcccgcggttctacagcctaggcatgctcaccaccct

SEQ ID NO: 22168 - DNA, 313 bp, Oryza sativa
  Clone ID: uC-osflM202048b08b1
ttcttttctgcctctatccatcccattctcatgagagctcattgacctaatcaggagctttactcgaacataatagtataagtccagcaccggacaagcatctgattctgaattccgattgctgctgcctggggagaggaacggtaaggcttgccaacacggctccgaggcggcgtatccggctaatctacagtcactttggccttgcccgtggcgcgcccgccgcctcgcgccctgagtgaggtgtgtggtgctgaggggcatgcgatctccttcgcctgattactcctagtttctacgagcttgctacgga

SEQ ID NO: 22169 - DNA, 538 bp, Oryza sativa
  unsure (1)..(538): unsure at all n locations
  Clone ID: uC-osflM202048b11b1
gtcctgttcgacccgccggccgacgaccacatggtgctcatcggcgactggtacaccaaggaccacgccgccatggccaagatgctcgacgccggcaagagcttcggccgcccgcacggggtggtcatcaacggcaagtccggcaaggccgccgccgacccgcccatgttcaccgtcgaggccggcaagacgtaccggctccgcgtctgcaacgtcggcatcaaggcgtcgctcaacttccgcatccagggccacgacatgaagctggtggagatggagggctcccacacggtgcaggacatgtacgactccctcgacgtccacgtcggccactgcctctccgtcctcgtcgacgccgaccagaagcccggcgactactacgcggtggcgtccacgcggttcatccacgaggccaagtcggtgtcagccgtcatccgctacgccggctcgagcacgccgncgtcgncggccgtgccggagccgacggcgggatgggcgtggtcgatcaaccagtggaggtcgttccggtggaacctga

SEQ ID NO: 22170 - DNA, 456 bp, Oryza sativa
  Clone ID: uC-osflM202048b12b1
tgttctcgtggacccgccgccggagagcttcgggggcgccggtgaggacgacagcgacgactacgtggaggacatcgaggagctggagcgccgcatgtggcgcgaccgcatgaagctgaagcggctcaaggagctgcagctgagccggggcaaggaccccgcgggcggcgtcgtgggcgacccgtccaagccgcggcagtcgcaggagcaggcgcggcggaagaagatgtcgcgcgcgcaggacggcatcctcaagtacatgctcaagatgatggaggtgtgccgcgcgcaggggttcgtgtacgggatcatcccggagaagggcaagccggtgagcggcgccttcgacaacctccgcggctggtggaaggagaaggtccgcttcgaccgcaacggccccgccgacatcgacaagtaccaggccgacaacgccgttccgggcttcgagagcgagct

SEQ ID NO: 22171 - DNA, 464 bp, Oryza sativa
  Clone ID: uC-osflM202048c03b1
gcatttttcacgacggccatgatgaggctgctgctggtggcggtggcggtggcgatggcggcggcggttgtggcggcggaggagagggcgacgtacatcgtccacatggcgaagtcggcgatgccggcggagtacggcgacgaccacggcgagtggtacggcgcgtcgctgcgctccgtgtccggcgccgggaagatgctgtacgcgtacgacaccgtgctccacggcttctccgcgcggctcaccgcgcgggaggcgcgcgacatggcggtcatggaccgtgtgctcgccgtcaacccggaggcgaggtacgagctgcacaccacgcggacgccggagttcctggggatcgccgggaacgacgggctgttcccgcagtccggcacggggggacgtcgtcgtcggggtgctcgacacctgggtgtggccggagagcaagagctacgacgacgcgggcctcggcg

SEQ ID NO: 22172 - DNA, 535 bp, Oryza sativa
  Clone ID: uC-osflM202048c05b1
cgcttcctccgctctcgcactcgaaccaccaccacgggtcgctgcgtgtgagatccagcgccgccgtcgcgccgccgctgccgccgccgctggtggtgccgatgacgacgccgaagccgagcccgacgatccggaggctggacgtggcgtcgccggtgccggcggacatcgacatcgccaacgccgtctcgccgctccccatcgccgacatcgccgcggagctcggcctgcgccccgagcacttcgatctctacggcaagtacaaggccaaggtgttgctgtctgttcttgatgagttgaaagggcagcaggatgggtactactggggtggtcggcggcatcacgccgacgccgctcggggagggcaagtcgaccaccaccgttgggctgtgccaggcgctgggtgcgtttcttgataaaaaggttgtcacttgcctccgtcaaccatcacaagggcctacttttggaatcaaggggggtgctgctggaggtggctacagccaagtcatacccatggatgagttcaatcttcatc

SEQ ID NO: 22173 - DNA, 521 bp, Oryza sativa
  Clone ID: uC-osflM202048c06b1
cctgaagtagccatggcgaccttctggggattggaggggaagcccggtgaggcctacacccatcactccgcgcccgcccgcctccggattacccaggctgtgctgggcagttgtgatcaaggttggactacactacaatgtgataccaatgacagggagactgtgcgcctctgtgttttaaatcctgggcttgctgtggcatgtcacctagagctggaattacagaaggatgagaatgttctcttatcagttgacggacagaactcgatacacctgtccggatactacacctgttcccatagtggcaatcatgggcgcaatagtcagaagcccactagtaaagctgtaggaagtactggcttcaataaaaagcatcaagatatttctgacaaggcaccagtgatagaggagatactagatgaccagacagtacagcagcaacagcagcaaggtgttaacatcagctcgaaggatgtagaaccttctcataaaaatggtcatggacaaaatagtgaatgggc

SEQ ID NO: 22174 - DNA, 501 bp, Oryza sativa
  Clone ID: uC-osflM202048c08b1
ttctgtcctgccaggacccgacgtgcgtggtcgccagcgcgtaccgtgctccgacctgcaaggtcaccggcggcggcggcgactgcagcaagaacgtgtgcacggcgtacccgtacaacccggtgaccgggcagtgcgccgccgggaaccttgcccacacgaggttcatcgccaacaccaccgacggcaagaaccctctgatccaggtctccgtcaaggccgtggcggcgtgcgcgcccaagaggctcctggcgcggctgccgcgcggcgccacgggcgtcgccggcctcgccgtctccggcctcgcgctcccggcgcaggtcgcgtcgtcgcagggcgtcgccggcaggttcctcctctgcctcccgaggctcgggtacggccagggcgtggccatcttcggcggcggcccgatatacctcggcgaagggctgccggacttcacgacgacgctggactacaccccgctcgtcgccagagagacaaccccggctactacgt

SEQ ID NO: 22175 - DNA, 507 bp, Oryza sativa
  unsure (1)..(507): unsure at all n locations
  Clone ID: uC-osflM202048c09b1
gtgtgggcgccgtcggcgcacggctgcgtcggggagatcccggcgccggacgtctcgctcacccgcaagcttggagcggagttcgtggggacgttcatcctcatcttcttcgcgacggcggcgccgatcgtgaaccagaagtacggcggcgcgatctcgccgttcgggaacgcggcgtgcgcggggctcgccgtgacgaccatcatcctgtcgacggggcacatctccggcgcccacctcaacccgtcgctcaccatcgccttcgccgcgctccgccacttcccgtggctgcaggtcccggcgtacgtcgccgtccaggtgctcggctccatctgcgccggcttcgccctaagggcgtcttccaccccttcctctccggcggcgtcaccgtccccgaccccaccatctccaccgcccaggccttcttcaccgagttcatcatcaccttcaaccttctcttcgtcgtcaccggcgtcgncaccgacacccgcgccgtcggcgagctcg

SEQ ID NO: 22176 - DNA, 522 bp, Oryza sativa
  Clone ID: uC-osflM202048c10b1
ttattcctctgcaagaggaaaacaaaaaagagttgcatatcaagatcctgaacaggggaaacgaaatgggggtaaattagcagttcggcagatgaataagccccatgagttagttatatcgtgatcccgatttcgatctggaagggaattttttttcgaattcgcctctcctgatcagatctatcaccttgggcactgattagtgtgggaaggaagctccatgcgtgctcctctcaatggatctaagctacctaacctgatccaagaatccggtcaagcgggagcgaaacgaactgaattactgctacctaatctgctccaagaattctggcaaaagcaggagcgaaacgaactgaattactgatgaaacgaatcggaattcaaaaaaaaaaaaaaagccaccgacacaccgaactggagccaccgacacagtcaggaggggatcgcattgcccaaatctcgtggtcacaactcgtgaaagttagtcgagagcctcggcgattcggcccgcgcatggatctg

SEQ ID NO: 22177 - DNA, 524 bp, Oryza sativa
  Clone ID: uC-osflM202048c11b1
gcataagcctccccctccaattcaatttcctctgtgtccatctctctcctccaatcgctgcctcgctcacgcacgcgcgctctacctacctgagggcgaggctggtgccgatggcaatggaggctgcggcggagaggagcgccggagcaggggcggcggcgacggcggcgccggagagcggtggcggtggtgcaggggagaggcggtcgcggttcaggcggatctgcgtgtactgcggcagcgccaaggggaggaaggccagctaccaggacgccgccgtcgagctcggcaaggaactggtcgagaggggcatagacctggtctacggcggtggctccatcggcctcatgggcctcgtctcccacgctgttcacgacggtggtcgccatgtcattggggtcatcccgaaatccttgatgcccagagaggtcactggtgagcctgttggtgaagttagagcggtctctggcatgcacgagaggaaggctgaaatggcccggtttgctgatgcgttcattgcactg

SEQ ID NO: 22178 - DNA, 476 bp, Oryza sativa
  Clone ID: uC-osflM202048d02b1
ggattctaaaacgaaggccttttccaaggaagggggggggcaacaaccgaaaactgatccaaaagagaaggcaaaagctgaaacaagagattggcttaacaatgtggttagtgatttggaaaaccaaatcgataacttcgaagctgaggttgaaggactttcaattaagaaaggaaagcaaagacctcctcgattggtacatttagagaaatctatcacacggcataaagctcacataaagaaattggagtcaatattaagacttttggataatgatgagttgagtcctgagcaagttaatgatgtgaaagatttcctggatgactatgttgaacgtaaccaggaagattttgatgaatttagtgatgtggaagagctctatagcacattacctatcgagaaggttgaagcactagaagacatggtttcacttgccccttccagtcttgtaagggtgttgcttctgtttctactac

SEQ ID NO: 22179 - DNA, 527 bp, Oryza sativa
  Clone ID: uC-osflM202048d05b1
aatggagttgcttcatctgctacagtgatgcctacggctcctgtgatgccagaagtgccgctaacagttactgggttgctgaattcactaggacttgagaagtatgtcttcctcttccatgctgaagaggtggatatggctgcattgagtcagatgggagacagtgacctgaaggaaataggggtaccaatgggtcctagaaagaagattctccaggcagtggcaccttattcaaaacggcgtagatgaacagcatgctcaggaacttggggcgttcgtgggcaatgacaatttattggtgtaagctgcttcattgcagatcttgtatatcccaatggtctagtgctctagtcaatccgtttcattgctgatagatcaacgcatcgcttttcttggcatgcataatcttatctgtcagctgatgatcccaatcctgttattcacgacctgccccttgtgtagcaggatctgaaacatggatatgtagctttgctacactaaccagtcagttttttcttcctctttgg

SEQ ID NO: 22180 - DNA, 528 bp, Oryza sativa
  Clone ID: uC-osflM202048d06b1
ctatccctaaatcgccgcagccgccgcaagcgccggagggacgaggccgagcccgacctctcgcgccccgtccacttccagtccgccggcaagttcatgcccagcaaggagcccgagcccgagctcgaggagaggcccggccttggcgccgctgcctccgcctccgcctccgcctccgcggcgggtgaggatgatgcggcggaggaggaggaggatctcgacctgcccacggcgttcgggcagcggatcgcggagggcgcgagggcgaggcgggaggagagggcgcgggagcgggagacggccgcgcggcgcaggcaggcgtcgggggtggcctccgggaagccggcgccggctctggggagcctggggtccaacacgaaggtggccaagatgatggccatgatggggtacaaggatgggatggggctcggcaagaacgagcaaggtatagtcgcgcccgtggagaccactctgcgcccccagaacgccggtctcggaagcgtcgaggggttcaaggagcccaagcca

SEQ ID NO: 22181 - DNA, 488 bp, Oryza sativa
  Clone ID: uC-osflM202048d07b1
tttttcaagaccacggcgtggttccgcgaccactggttcaggcagcaccagatgtacgaggacgctgcggcggaggaggaccaccaccgccaggtgttcgacgacgacctcgccgcgctcctgcccgacgactcgctcgacctcctcgacatggtcgacaccgacgacctcttctacacccccgacccccccgtccaccacaagccgacgacgactcccaccctcgacgccgacgtgctcagggcgctcagcctcaactcgccgaggttgggcggcgccgggatggtgaggcacgccgagaagccggcccagttcgtcgccgccaagggcggcgccgcccgccacgtcatccaccagcctcgctagagcgccatgggtgagtggtgatgctgctgctgctgctgtctagtgtataaccttggagttttcagagtttagtctctctgcttttctttactgtgtataaaaactgaaaaaaaagggggaaa

SEQ ID NO: 22182 - DNA, 364 bp, Oryza sativa
  Clone ID: uC-osflM202048d08b1
ttctacaacacccgaggatccattggctaccggttgggtacattccgtgagccggtggctgttatcaaagctgggttcgatccctacccggtgatcgttgcgaggagggccaactgtaatctggcatatttaggtgtccagagatccaacgcagctgatgaggatttgcacacttatgctgaacatatgagggcatttaagaacatcatccaaactggcgacggtggcgcaaggtgatgcatggtacatcataggattcagcagggcatgcccacctacaatgtatatggataatcacgttatatgtcgaatcacggctatgcgatgagcttctataaaacacaccgtgggcttggagcccagt

SEQ ID NO: 22183 - DNA, 232 bp, Oryza sativa
  Clone ID: uC-osflM202048d09b1
taatcttccgccaataattaaaaaaaaaaaagggaggaatttatttaagaaaccggggcgctcacatggtcctctcctaattactgactcatggtgactacctactccaactcccacggacacaacaagaagcccgtggagatcactcagggcgtctacagggcggccgcagctgtggctgccggcccctgcggcacgtttgacatcaccaaactcggcgccataaacaact

SEQ ID NO: 22184 - DNA, 522 bp, Oryza sativa
  Clone ID: uC-osflM202048d10b1
tgatttatcgaggcgaggaggaggaggagctagggtttctgatgggaggaggaggagggttgtagaagcgcgggggcaggctgcggtggatcgtcgatgggggagcagccggcgcggggggcggcgtcgtcggcgtcggagtcgtcgccgctgatcccaccgccgtcggagatcgacatcgaggccggggccggggaccagttccagtgccggatctgcctcgagaccgacgggagggatttcatcgcgccgtgcaagtgcaaggggacgtccaagtacgtccaccgcgactgcctcgaccactggagagccgtgaaggaaggatttgccttttcgcattgcaccacttgtaaagctccttactatttgagggttcatgttcacactgataggaaatggcgaacattgaaatttcgtttcttcgttactagagatatattattcatctttgctctagtgcagtttgtcatatctgcattagcgtatttggtgcattttattgatggattacagaattactgg

SEQ ID NO: 22185 - DNA, 502 bp, Oryza sativa
  unsure (1)..(502): unsure at all n locations
  Clone ID: uC-osflM202048e01b1
atgttgtttactacaatgaatgtattattttagacaggggtaagcaccagcaaattttgtgatttttttttcatgttgttgtgagcatgcattgggatcattgatatggaattagcattacattgttcttgatgtcaacacatgcacttattttgactgtcttgttgacacccatcagttacatgggcaaaatcccttatatcatgggacgggggtagtagatggttttcataatcacaaaagagtgcaatcagtgcatgctggtaactaaaaaataagatgtgattccacagtgatacaaaatctacttctcatactaagacagagtagctttgacaaaacattctttgcgatataactgcaaacaaatgccaacattgatcaagaaaactggaaaagtaagcgggttaatatggtactcttgatcgntactacccgaacaagcattatggaagacagctagcangtggttgaggtatcgagttatcctactactaccatg

SEQ ID NO: 22186 - DNA, 502 bp, Oryza sativa
  unsure (1)..(502): unsure at all n locations
  Clone ID: uC-osflM202048e03b1
ccctatatctaaccggagaaaaccccaatctctcgccggcgccgccgtgatgtctcgccggtacgacagccgcacgacgatcttctcgccggaggggcgtctctaccaggtggagtacgcgatggaggcgatcgggaacgccgggtcggccctcggcgtcctggcggccgacggcgtggtcctcgtcggcgagaagaaggtcacctccaagctcctccagacctcgcgctccgccgagaagatgtacaagatcgactcccacctcgcctgcgccgtccccgggatcatgtccgacgccaacatcctcctcaacacggcgcgcctccacgcccagcgctacgccctctcctaccaggagcccatccccgtcgagcagctcgtccaatccctctgcgacaccaagcaggggtacacccagttcggcggcctccgccccttcggcgtctccttcctcttcgccggctgggacaagcaccatggcttncagctctacatgagcgat

SEQ ID NO: 22187 - DNA, 521 bp, Oryza sativa
  Clone ID: uC-osflM202048e04b1
gcgtctggtaacgggaggccatcgaaggcgagaaggatcgcggtataaactgcagcgtctgctactgcagcagtcggcacacatatcattttttgggacagcggcactgctccatcttgcagagagcaggtaaattctttcatactttcaactcttgatctgactagtccattgcagtaattgatttgactagtccattgcagtaactatgcctgctgatgttaatgaaatttgtaaattggaacttttcaatatgataactttttagtggaatgtaatatttaaaaagaactgcaccaattttatggttgatgtagtgatgctaatttacatatacccaagagaagcgacaaaactgctgttgttgcaacagttggattccttgaataaagaggtagatgaattgtaagcatcaagggagcagcagtcgaagaaaattgaaagtttgaagaactcatcagaagagaccaattcccttcttcgtcgtttgattggccatttggcctgaatactccatattt

SEQ ID NO: 22188 - DNA, 431 bp, Oryza sativa
  Clone ID: uC-osflM202048e06b1
cgcacacacatagagacagacaatgtactttaagaaacgcacccattacacgatgaaaaccaatcaaacacgaaaaaaaaaaagcacaaaagaccgacaaacaacgcctgggacaacggaggcatgggggggccaaagaggggcaccgggtaactgacgctgggccccaccgccctggatgacaaacttttttatttagccccacgtaacgcgtacccacacacacctacggggtggagtactaccactccagttaactaaactaataactggttacacgcacacgtacgtacaactccggggagtccccggcggcggcggcccccgcgggccatgcatgtactccacggtgtacgacgacggggagccagccttccccgggatgcactaactcgttggccttttgggcctccggttccgggaccggggcc

SEQ ID NO: 22189 - DNA, 397 bp, Oryza sativa
  Clone ID: uC-osflM202048e07b1
catggcaccaaatccccccaccatggatcaccgcctcctcctcctcggcctcctcctcctctccccggcggtggccgccgcctcagtccccggcgaggaggagccgctgatccggcaggtggtcggcggcggcgacgacaacgagctggagctgaacgcggagcgccacttcgccagcttcgtccagaggttcgggaagtcctaccgtgacgccgacgagcacgcgtaccggctctccgtgttcaaggccaacctccgccgcgcgcgccgccaccagctgctcgacccctccgcggagcacggcgtcaccaagttctccgacctcaccccggccgagttccgccgggcctacctcggccttcgcacgtcgcgccgcgccttcctgcgggggcttggc

SEQ ID NO: 22190 - DNA, 438 bp, Oryza sativa
  Clone ID: uC-osflM202048e08b1
ttatttcccaactccccaccgatccacctgcccgactgcaggctgcagctcacacccgaacgcctcacgccccgccgccatgcgcatcttcgtgctctccggccagagcaacatggccgaccgcggcggcgtccaccaccggcgctgggacggcgtcatgccgtcggagtgcgcgccgtgcccctccgtcctccgtctgaccgacgcgctcgactgggtggaggcgcgggagccggtacacgccgacattgacacggccaagacctgcggcgtacgccccgggatgggcttagcccgcgccggactaccgcgcctggacccgcccggctccggcgtcggcctcgtcccctgcgccgtcggcggcaccgccatgcgggagtgggcccgcggggagcgcctctacgaccagatggtgcgccgagcgcgcgacgaggagga

SEQ ID NO: 22191 - DNA, 456 bp, Oryza sativa
  Clone ID: uC-osflM202048e09b1
ttgttcacaaggtcagactaagtttgcgttggggagcaaaggagaggaaaaatgtcgcctgctgaggcatcgcgtgaggagaatgtgtacatggcaaagcttgccgagcaggctgagcgttacgaggaaatggtcgaattcatggagaaggtggcaaagaccactgatgttggtgagctcaccgttgaggagcggaacctgctttctgtggcttacaagaacgtgattggtgctcggagggcatcgtggaggatcatctcttctattgagcagaaggaggagagccgtgggaatgaggcatatgttgcatcaattaaggagtaccgtagcaggattgaaactgagctcagcaagatctgtgatggtatccttaagcttctggattcccaccttgtcccatctgccactgctgcagagtccaaggtgttctacctgaaaatgaagggtgactaccac

SEQ ID NO: 22192 - DNA, 522 bp, Oryza sativa
  Clone ID: uC-osflM202048e11b1
gactcgaccaagcgccgccgtcgccgacgcttccccgccgtcggagatggacttccaggtcgtcgtcctcgccgggggcacctccgagaagctctcgcccctcgtctccaaggatgtccccaaggcgctcctccccgtcgccaaccgccccgtgctctcctacgtgctcgacctcctcgaggccagcgacctcaaggacatcatcgtggtggtggaggggcaggaggccgcgcgactcgtcggagcttgggcctcgagcgcctacctagaccgccttctcgtggaggttgtggcagttccagaggacattggaacagctggtgcactacgagctatttcaaagcgactgactgcaaatgatgttttggtgattagcggcgacctagtaactgatgtacttcctggggctgttgctgctactcatagaagaaatggtgccgctgttactgctttactatgttctgttcctatcagtggtccttcagatgctgcttcttctggagggaaagataaagctaaaaa

SEQ ID NO: 22193 - DNA, 510 bp, Oryza sativa
  Clone ID: uC-osflM202048e12b1
ttctttagccaatctctcgctgtgtctctctggcgcggtctactagcaccggcgcggctcggctcgcgcggcggcggcggcggggcggcgtggcgccgagggaggggaacgccggtgtggggagggcggcggccaggggactcgccggcgacgagctggtttgggtatgagaggggttacccatgcggcgccgaccacgagcgtcccccgccgcggctccatggacggcctcctcatcttcgtcttctacctctcgcttcctatacgtggtggccgtgaccactcgttaatctcctcctctaattgttagccgatctcgcctttcccccacactctctgatcccgctctctctctctgcttcgattcgattcgattcgatcttctccaccttgtcgccgtcgaacgcaactcggatcgggaggataatggaccagccttctaatgggttcgccgtcggaggtctttttcttctcacattgatggggcaaatgcctttcccccttctggca

SEQ ID NO: 22194 - DNA, 507 bp, Oryza sativa
  Clone ID: uC-osflM202048f01b1
aagatattagaaagaacaacacataccaggatgtctcagctcaagtcttctagcctggctgcactgctgatcttcctcctggcagtgttcaccactgcagcagcagcggcaggtacagaatgccagaacgatgtcgaggtgctgaagacaacctgctacaagttcgttgagaaggacgggccgaagctgcagccatcacctgactgctgcacctccatgaagggcgtcaacgtgccctgcgtctgcacctacctgggcagcccaggcgtcagggacaacatcaacatggataaggtgttctatgtcaccaagcagtgtggcatcgccatccccgggaactgcggaggtgagcaggcttcacttgattggccacactgatcacctgggtaagaactgacaataacacgccggctcctctggattgcgacttccagtggggcccaagtgtcggtgtcagctgggatccaaggtctaaaacaagaactgattgacttgtgaagttggctg

SEQ ID NO: 22195 - DNA, 351 bp, Oryza sativa
  Clone ID: uC-osflM202048f02b1
caaattttaaaatccgatcccctcgaaccaaagaatgcgaggcgcgcaggcgggcacacgccccaaatgcgccggcggacgacgcgcgccgccgcagaagcagcacggcgccgatgagtcgcgcccctccggacgccgccggcgacctcttcgccgccaacctcaagggctccctcctcgccgtcgcctcctccgcgttcatcggggtcagcttcattgtcaagaagaaggggctccgccgcgccggcgccgccggcccccgggcaagtggtggagggtattgataccttttggaggcttttttggggggtggaatgattacaatgcttattggtgagattgcaaatttcg

SEQ ID NO: 22196 - DNA, 526 bp, Oryza sativa
  Clone ID: uC-osflM202048f04b1
gtgttggtcaaggagctggacgagggcaagcagaccgaccaggacaggtggaagggtctcgcctacgacatctccgatgaccagcaggacatcaccagggggaagggtttcgtcgactcccttttccaggctcccacgggtgatggcacccacgaggccgtcctcagctcctacgagtacctcagccagggtctcagaacgtacgacttcgacaacaccatgggaggcttctacatcgcccctgctttcatggacaagctcgtcgtccacatctccaagaacttcatgaccctccccaacatcaaggtcccactcatcctgggtatctggggaggcaagggtcagggaaaatccttccagtgtgagctcgtcttcgccaagatggggatcaaccccatcatgatgagcgccggagagctggagagcggcaacgccggagagccggcgaagctgatcaggcagcggtaccgtgaggcggcagacatcatcaagaaggggaagatgtgctgcctcttcatcaacgatc

SEQ ID NO: 22197 - DNA, 524 bp, Oryza sativa
  Clone ID: uC-osflM202048f05b1
catttagtacggtgatgatgatgccggagatgactgtgaagtttaccacagggttagggggaactggtggacatcctgtattttctgtaagtcattctgcagatcttcaggaggcagaagtagagcaagagcaagggaaaggagaagtagtggaaggaggagcagcaataggtctagccaagaaagctttactattgaggtgccctcgggatctgttgacataagggaaatcagatttgatgaaatagatgatgaatatatagttacaggagcaatgcccggcattgcagcatccaggaggatcgccagtcattacagggatcctagatatggacgcagacgttcatactactaggatgaaccagccagctgaaatgtaatgcagtgcagccacaaccagaatattgtgcctctacccgcctctttttcttgttctctcaaaaatctggaagatgctatcccagcccaaatttggtgtgcatataagatagcagcaaacccttcattgttgttcatttacagca

SEQ ID NO: 22198 - DNA, 489 bp, Oryza sativa
  Clone ID: uC-osflM202048f06b1
tgattcgatcggatcaagatcaaatcaaggagggaggaggttgagcaattcctgacagggacagatcgggaaagctctcacagctttttctttgtttttgtttgatttgttcctgcttttcgattggaaaattgggaggggaggaaggtgatagccattgaggtggtggcatttgctgtcaccacctttagctatcgccttcctcttcctcgtctcgctcgccccccggtctagcttctttctgcagggccggacggaaaaaacaaaacaaaagaaggcaccagccagccatggcgatggtgctggactccttcgtcacccggtgcacggcgtcgctggaggacttcgccgggcaggaagcgtgccggcgccctcggcattcgggacgacgtgcggtgcctcctggccacgctccggcgcgtccaggccgtcgtctcccacgaggagcgccgcggcagggtgctgagcgccaaggtggacgcctgggtg

SEQ ID NO: 22199 - DNA, 461 bp, Oryza sativa
  Clone ID: uC-osflM202048f07b1
gcttatcgccatctctctcagctctcacagctcactgcatcaatggccgcggccaccatggcgctctcctccccggtgatggcccgcgcggcgccgtcgacctcctccgcgctcttcggcgaggcgcggatcaccatgcgcaagaccgccgcgaagcccaagccggcggcgtcgtcggggagcccgtggtacggcgccgaccgcgtcctctacctcggcccgctctccggcgagccgccgagctacctcaccggcgagttcccgggcgactacgggtgggacaccgcggggctctccgccgacccggagacgttcgccaagaaccgggagctggaagtgatccacttccggtgggcgatgctgggcgcgctcggctgcgtcttcccggagctcctcgcccggaacggcgtcaagttcggcgaggccgtgtggttcaaggcgggctcgcagatcttcagcga

SEQ ID NO: 22200 - DNA, 408 bp, Oryza sativa
  Clone ID: uC-osflM202048f09b1
ggcagtaattgcctcgggacgtaaaattcccacatgagcaccaaaattggtttacaaaagaatcggatagtcttggaataactaggcaaatttacagtccaagaacaactatatctacacaaccgaggggggaggggcctatttgggcgtgtacattgtggatcatgttgtgtgaagtcgtgacataaatcaattggacgacacaattgcgtcatgcaacatttcaatatcgccaaagagcttcgacacaacatccctggagcaccctccattgtcactgtttttttaacatctatcatgcttttcacagtttactcaatctgctcgcctatgagatcaagggctactaacaagaaagatattccctggaacaggaggaagtagaaatgtataccctgtttcgagagc

SEQ ID NO: 22201 - DNA, 489 bp, Oryza sativa
  unsure (1)..(489): unsure at all n locations
  Clone ID: uC-osflM202048f10b1
ttctcggccggtcactactcaccatcgagaggagagcaaaaataattgagtgatagctgttagctaagctacctagcatcatgcagggaggcgccaataataagggcttggtatgcttgatcgccgccgccgccgtggtgttggtattcgccggcagcagcggcattgcggcggcgcaggcggccgggctgaagaaggggttctacaagaagagctgccccaaggcggaggagatcgcgcagcgggtggtgtggaaccgcgtcgccggcaacccggagctcgccgccaagttcctccgcatgttcttccacgactgcttcgtcagggggtgtgacgcgtcggtgcttctggactcggctagcaacacggcggagaagaacgcggcgccgaacctgtcgctggcggggttcgaggtgatcgaagaggtgaaagcggcggtggagcgggagttgcccngggtggtgtcgtgcgcggacatcgtggcgctgg

SEQ ID NO: 22202 - DNA, 492 bp, Oryza sativa
  Clone ID: uC-osflM202048f11b1
tttctcctcaccgccggccaagccagccgcggcggcgcaagatgaaccaccacctctcgctcctccacctacctcgcctctcccccgtactccaccaccacccccgccacctccgcctccatggccgcaccaccgtcttccaagctcgcctcccttcccctcagcgaacgaaccagcaccgcctcctcgccgtgacgaccgcaccaccggagcccgagaagacggaggagcagcagctcctccaccccctccaagaaccagcggagggagaagtcagcggcggtggcggggcagacaggacgtgcgggctcccgacgtgggcgctgatcggggccatcgcggcggcggtggcgctgtcgtcggcggcggcggccgggccggcggcggcgctggggccggagggcccgctggtggaggagttctgggacaacatgcggcggtacgcgctgtacgtggtgacggtgagcaccgggttcgcgtacacgctggcgc

SEQ ID NO: 22203 - DNA, 449 bp, Oryza sativa
  Clone ID: uC-osflM202048g01b1
aaatgttctctgcggaccgagttgccaactgttgggctgggcaaccaagtgataaacgatctcgaaacactgaaagctagagatgtaaactggcagggaaaatgctctggcacagtttatattgctgggagtgaatccgaaggtcattttgcattgataaacaaggcttactctatgttttcacacaccaacccacttcaccaggacgtattcaagagtgtggcacaattagaggctgaagtagttgcaatgacagctgctttgcttggcatcaaagaaaaatcatccggtggacagatttgtggtaatatgacatcgggcggaactgaaagcatattattagcagtaaaaacatcacgcgactatatgcgaacaaagaaaggcattacaaagcctgaaatgataattgccgaatcagcacattctgcatacgataaagctgctcaata

SEQ ID NO: 22204 - DNA, 513 bp, Oryza sativa
  Clone ID: uC-osflM202048g02b1
ctcttttcagctccagccacacgagcctagttcagggggatacaatggcgtccaccgcctctttcatgctcgccgtcttgctggcggtggccgtcgcggcggcgccggcgagggcggtgcgatgcccgccgagcgacaagcaggcgctgatgagagtgaagcagtcgctgggaaacccggcgacgctgtcgacgtggtccctggcgtcggcggactgctgcgagtgggaccacgtccggtgcgacgaggccgggcgcgtgaacaacgtcttcatcgacggcgccaacgacgtccgcggccagatcccgtccgccgtggcggggctgacggcgctcatgtcgctgtcgctgttccgcctcccgggcctctccggccccatcccggcgtgcctcaccgcgctctccaacctccagtttctcaccatctaccacaccaacgtctccggcgtcatcccggactcgctcgcgcggatccgcagcctcgactccgtcgacctctcccacaacagcctga

SEQ ID NO: 22205 - DNA, 509 bp, Oryza sativa
  Clone ID: uC-osflM202048g03b1
cccacgcgtccgtgttcatctgcgccacgacacgacacgacacgacacgagacgagagaggagtcggcaatggcggaggggtcgcggtcgccgctgaggtcgttcgtggaggtggcgccggggtcgcacttccccatccagaacctccccttcggggtcttccgccgcaggggctcgccggagccggagccgccgcgcccggccgtcgccatcggggacttcgcgctcgacctcgccgccgtctccgacgcgggcctcttccacgggcccctcctctccgcctccccctgcttccgccaggaaacgctcaacatgttcctggggatggggcgtccggcctggaaggaggcgcgcgccacgctgcagaagatcctctcagctgatgagccggttttgcgtgacaacgaggccttgaagaagaagtgccttgttcccatgagcgacacagagatgcttctgccaatcacggtaggagactacaccgactttttttggtctgtgcaccatgc

SEQ ID NO: 22206 - DNA, 522 bp, Oryza sativa
  Clone ID: uC-osflM202048g04b1
gctgtcttttcccttcccagatctccagccccaggagctgcggttggttcccaatggcggtgaatgactatgtcgtgtactactctatgtatggacatgttgctaaactagctgaagagatcaagaagggtgcttcatctattgaaggtgttgaggctaaaatatggcaggttcctgaaactctccatgaggaagtacttggaaagatgggcgcgcctcctaagccagatgtgccaacgatcacaccacaagaacttactgaggctgatggaatcctgtttgggttccctacaaggtttggcatgatggctgcgcacatgaaagcattctttgatgcaaccggtggcctgtggagtgagcagagccttgcatgcaagcccgccggcatcttcttcagcactggtacccagtgcggtggttaggagaatacaccgttgacagcaataacttaattgactcaccacggcatggggcccgtcccggtcggtacaccttccgtgccaagatgtttaacatgggaga

SEQ ID NO: 22207 - DNA, 503 bp, Oryza sativa
  unsure (1)..(503): unsure at all n locations
  Clone ID: uC-osflM202048g05b1
cgattatctcctcctccctaccaacaaccaccaccatcctcttcttggcacttggcatcaagagacacatccagacgcctcgagttgtagctagcaccagtggctcagcttgcccagtgctgctgcatcgatcagtggcagtagctagctcagctctagccttttgccaccgaccgctccgatcgaatccggtgctaggctagccagcctcctcgctctttataaccccagccgccattggagagggagggagggagctagagctttgttcttgttcttgcatgctgttcttgttgatcgagtgagagagggggaaggaagaaaggagggaggcacatgcttataccgttcgtgctggagttcctgatcgatgtcgcctgtgatcagtgagatcctcctctcggngtttatgatcaactccacactccggcgccgcacccatctcgtccagtctttctccgtcgtcttcctctactggttctatgtcttctcataagctactc

SEQ ID NO: 22208 - DNA, 528 bp, Oryza sativa
  Clone ID: uC-osflM202048g06b1
ctcttcttccatcttcgtcatcttcaacctcctcctcctcgttatattagctctcgcatatcagatcggagaagaaggcgatggcgtccaactacgtcgacaccaccggcgacgagggcaggttccacggccaccacagcaccaacaccacgccgacgggcgccgcggcgtcgtcgccgaggacgatgcgccggagcttctccaacgcctcctccggcagccacggcggcggcggcggcgccaagtgcgtgtgcgcgccggcgacgcacgccgggtcgttcaagtgccgcctccaccgcaccaactcccagggccacggccacggccacccgcacccctcccctcccacctccccggccgccgccggcgcctccgccgcgccccggccgtcctccgcctcctcccgcaccgtcgaggcccagtgacccctgacctccccggccgcaccaagaaaccaaccaaccaagaagaggaggagaatcagagtgggggaagagagagtaaaaaagagcatcgcgtatcatatca

SEQ ID NO: 22209 - DNA, 357 bp, Oryza sativa
  Clone ID: uC-osflM202048g07b1
cttttagcttctcagccttttgcctctctttctactgtctttcttggccgtctctcttatatccctcaatttaaccatcgagggcggccaaaaaaaagagagaaaggaagagcaaaataacacattacaccatggcgcgattcgtcatcatctccgtcgtcgtcgtcgccgccttcgccgctgccgctgtcgttgaggcccgggttggacctatcgacgtcgctccgaccaacctgatcaccaacccactcggtgccatcatcgacaatggccgcaagatcaccggcgccgtcgtcgacgagtgcgcctggacctgcgatcatgtcgcggcgggtaacaagaagatgtgcaacacgc

SEQ ID NO: 22210 - DNA, 509 bp, Oryza sativa
  Clone ID: uC-osflM202048g08b1
ttctaatcgcggcatcgcgcccatcccttcccctaggctgcatatccgcttccccgagatggaatcctgtcctgaggggaagaacattcttgtgctggattccgaagggaagcgcgtggcggtgaactactacagcgatgactggccctctttgtcctcgaagcaagctttcgagacgtaggtctttgctaaaacccagaaaacgagcgctagaacagaagctgagatagtaatgtttgacagttacttcgttgtatacaagttcatccaagatctacacttttttgtaactggaggtgatgaagagaatgagctcattttagcatctgttcttcagggcttctctgaagctattgattaccttctcagaaacaaagtgcacagaagggctgcgcttgaaaacttggatcttatcttcttatgccttgacgaaattgttgatggagggattgttctggaaacagatgcaaaggcgattcttgaaaagtataagtcatggattggaagat

SEQ ID NO: 22211 - DNA, 441 bp, Oryza sativa
  Clone ID: uC-osflM202048g09b1
gtgtgagagagctcaaaaaccctaggaggaggtttgaggggccagatcgatggagagccccgcgaaggaggaggcgggaggggagctggcgatggagatcgagtccaccgtcacggcggaggactggcgccgggcgctggcactcgtggtgccctccgtcgtcgtcctccgcaccaccgcgccgcgggccttcgacaccgaggtcgccggcgccagctacgccaccggcttcgtcgtcgacaagtccaggggcatcatcctcaccaaccgacacgtcgtcaagccagggcctgtcgtcgcggaggcgatgttcgtgaacagggaggagatccccgtgtatcccctgtacagagatcctgtacatgattttggtttttttcgctatgatccaggtgctatcaagttccttaagtatgatgagatccccctagcacctgaagc

SEQ ID NO: 22212 - DNA, 464 bp, Oryza sativa
  Clone ID: uC-osflM202048g11b1
cgttgccgactcggacagagactcatgtctcccttttgtatatccatgtgagatttctgcaccattgctgcattctgttcgatctcgatcttccaagaaggaacttggagcgatggccaccggcgggaactcgctgccgtcgccgtcgtgcgccgacgacaagaagcggcgggtgtgctactactacgaccccggcatcgcccacatcaaattcagcgacgaccatgtcatggtgcccgcccgcgtcgccatggcgcacagcctcgtcggcgtctacggcatgctcggcgacatgcgccgcctccgtacgagacccgccacggaggcggagatccgccgcttccactcgccggagtacgtcgacctcctccgcgacctcaccccggagagctacgccaacgacgccgcgcttcggcagaaggcgaaggatgaccacggcatcggcggcgacgacgattgccccc

SEQ ID NO: 22213 - DNA, 515 bp, Oryza sativa
  Clone ID: uC-osflM202048g12b1
ttctttacctagcagtccaaaatcgctaaggtgtttggcggagccaaaggttgtaaggaggatcagggttgtagctgagaagactccaattcagcatgttctccagccaccaaccatcgcctccttgctcgccattgtcatcggcatggttcctttgttcaaagattttgtgtttgtgcctgatgcaccactgtcgttctttacagacagtttggagattctagctcaagccgttgtaccctcggtgatgttaattctagggggcatgcttgcagaaggacccaaggataatgccttgggtatccggactatcactggtataattgttgcaaggctcctgattctcccatgcattggcatcggtgtcgtcctgctggcagatcggttgcatctgcttgtcgaggaagaccacatgtaccgctttgtgctgtcgctacagtactccacccctagtgccatcctgcttggagcgattgcgagcctcagaggttatgctgtcaaggagcatcggcact

SEQ ID NO: 22214 - DNA, 468 bp, Oryza sativa
  Clone ID: uC-osflM202048h04b1
cctttattttttgttcatttgatgtgctttggttatgtagaagggatcttgtggaaggaattatggggggctgcaaaaccaatacctgctgttgaacaggcgcctatatatgatgaagatttagctgtggagagcatttttgatgccttggaagttattgaaccgtcaaaactttttgagcagctactagctgtcattctttctgtatgctttgtagcagcagaattggtgctaccagcaggtagcaacttgtcgaaattattctacgactgtaaagattacatactcagcatttaccaagatgacatatcaaaagagaagctagatgagatatgcatggtctacgagacgatggaagccatagtaactaaccttgaaaaacttttcagataatgatgcacctgagaaatgtacgcacttgagagtaaaaacccgttcatgatcaagctcaactttatcggcaaagat

SEQ ID NO: 22215 - DNA, 507 bp, Oryza sativa
  Clone ID: uC-osflM202048h05b1
ctcctcctctcctctctcccgtcacgggcgcatctctctgtctctctctctctctctctctctctccccgcacagccgcgccgcgccgccgtcgccttctcgggcgagggcgaagagcgagggctcctgctcgccgacgcccctccccctcgtccgcggcgcgccggaggtcaggtagaagatggagggagctggcagagatgggaaccctcttggcggttaccggattggcaaaaccctagggattgggtcatttggcaaagtgaagatcgcggagcatatattgactggtcacaaggtggcaatcaagatcctcaatcgccgtaagatcaagagcatggagatggaagagaaagttaaaagagaaatcaagatacttagattatttatgcacccacatatcattcgcctctatgaggtgatagacaccccagctgatatttatgccgatatggagtatgtcaaatctggagagttgtctgattacatcgttgagaagggaagact

SEQ ID NO: 22216 - DNA, 429 bp, Oryza sativa
  Clone ID: uC-osflM202048h06b1
ctctttgtcctgatgcgctccctcggcgggaaccccacccaggcgcagctccgcgacatcgccgcgcaggagaagctcaccgcgcccttcgacttcccgcgcttcctcgacctcatgcgcgcccacctgcgccccgagcccttcgaccgcccgctccgcgacgccttccgcgtcctcgacaaggacgcctccggcaccgtctccgtcgccgatctccgccacgtgctcacctacatcggcgagaagctcgagccccacgagttcgacgagtggatccgggaggtcgacgtcgcccccgacggcaccatccgctacgacgacttcatccgccgcatcgtcgccaaataatttgtcatttctggttttctcccctctctccctctctctgcacctgtcaggatccacagtttgacacataataactctctc

SEQ ID NO: 22217 - DNA, 341 bp, Oryza sativa
  Clone ID: uC-osflM202048h07b1
tcgttgctctcgccttgcctcgctgtcgctcgctcctgccaatccgcgctgcccccgtccctcccttcccacacgctctgccctccaaataaagtaaacccgcgcgagccgccaccggtgaggctcccgtcgccgtccgtaccccggctcccggcgaccgtcgccaccaccacccagggtccccgcttcgtaggcgaggggggaggaggagacgacgccatggggttctgggaagccttcctcaactggctccgcagtctttttttcaagcaagagatggagctttccttgatagggcttcaaaatgctgggaaaacatcgcttgtgaatgtcattgctac

SEQ ID NO: 22218 - DNA, 447 bp, Oryza sativa
  Clone ID: uC-osflM202048h10b1
tgcgtcgggggtcctctgcgacccgttccacaagaggggctttttcttccactacaaggacccgtcgccggcagcgccggcggcgtaccacaagccgccggcgtcgtacacgcacccggcgccgacggtgtactcctacccgacgccggcgtactctcacccgacgccggtgtacaagcagccgctgccgacgccgtcgccgacgatctaccacccggcggcggaggagaagaaggtggcgatgcatgacgacgcggaggctgaccccgagctgttcaagaagctgctgtcattgatcaagaagaatccattcctcaagttccccaagctcccgtctgtggaggtggaggcaaagccatagatggtcgtcggcttcggcgcggcgccatgatcgatcgatcgaagcgaggaaacatgagtactagctggtttaattgcttcgttctt

SEQ ID NO: 22219 - DNA, 501 bp, Oryza sativa
  Clone ID: uC-osflM202048h11b1
gtccgcgagaggattccgatacccttctctctgtgggggagctcgaatccaccaccacgaccaccaccaatcggagccaccggagagcggcggcgcagcagacggcggcggctgcggggggcgagaggccgattcgccggaggagagaaggagagagagagagagatggcgttcacgatgcgcgcggtgaaggtgccgccgaactcggcgtcgctgaggaggcgcggcaccgcgtgttcgacttcttcaggcaggcgtgccgcgccatcccctccatcatggagatctacaacctcgacgacgatgtcaccccgtcccagcttcggtccaccattgccaaggagatccgcaggaaccagggcgttactaaccccaaggtcattgatatgctcctgtttaaggggatggaagagctgggcaacatcaccgaacacgcgaagcagcgccatcacgtcatcgggcaatatgtggttcgacaaaaggactggtgcagatatggag

SEQ ID NO: 22220 - DNA, 416 bp, Oryza sativa
  Clone ID: uC-osflM202048h12b1
gttcttactaggattcaaccgcgactacaagcgcaccggcattacctacatcgacggcaatggcgactggcacaagctgagcaagggcgcgccagagcagatcatcgagctctgctacatggccgtcgacgcagtgaatgaaggttcacgccctgatctacaggtacgctagatcgggggctccggtcgctcggattgtcctaccagacaggtgccggagaagagcaaggacagcagcagcgacaccgaggcagaatcatcgggctggtgccgttgttcgacccgtcgaggcacgacagcacggagaccatccggccgacgctacacatgaggatcaacgtcaagatgatcaccgaggaccagctcgccatcgtcaaggagacgatgcggctgctcaggatgggcaccaacatgta

SEQ ID NO: 22221 - DNA, 143 bp, Oryza sativa
  Clone ID: uC-osflM202049a02b1
gatgcgcctccagcaccaccaccgctcccgctggggctactacacctacttcgcgcgctcctccgacaccgccgccaccgacgccgacgcccgcagcctcgccgcggacgccacccaagacagccccttcggacacgtcaaag

SEQ ID NO: 22222 - DNA, 52 bp, Oryza sativa
  Clone ID: uC-osflM202049a03b1
caatgtaggccttgcctctggggcgcccgacggagcggatcgctaaccgttt

SEQ ID NO: 22223 - DNA, 294 bp, Oryza sativa
  Clone ID: uC-osflM202049a07b1
ttttcttacccaagtttaaaattattattggcgggggtgtgacggatcggtgttgctgaacgcgacggcggcgagcgggccggcggagaaggacgcgatgccgaaccagagcctggacgggttctacgtcatcgacgccgccaaggcggcgctggagaaggagtgccccggcgtcttctcctgcgccgacatcctggcgctggcggccagagacgctgcctccatggctgccgggaacatcaatggcgcgagcctttggcaagtcccgacggggcggcttgacgggcgcgagtt

SEQ ID NO: 22224 - DNA, 128 bp, Oryza sativa
  Clone ID: uC-osflM202049a11b1
cgccccagaatccctggcgagacccacgcgcgcatattgatagccttatgtgagcaagcccaaaaggagacttactcttgctaagagaggtggtcaagcaaaaacaagctgggaggaccttccagcaa

SEQ ID NO: 22225 - DNA, 106 bp, Oryza sativa
  Clone ID: uC-osflM202049a12b1
cccattatcaacacacagctcagacaccaagaacgggagggtacttcaccaccatatgggtctctttcgctcccgctaggcagaaacgtctaggacaccaagggca

SEQ ID NO: 22226 - DNA, 106 bp, Oryza sativa
  Clone ID: uC-osflM202049b02b1
tcatactgctgatgaaggggatggtggagatggggggctatgtccagactacgcgcgccgggccacgccacggccaggcacccaattttgaagccctacctccacc

SEQ ID NO: 22227 - DNA, 215 bp, Oryza sativa
  Clone ID: uC-osflM202049b03b1
aaatactctcaatccaatccatccccgaccccggggccaaaccctagctagcacgtgctccagtagactgcgatgggcgcgccgtcgaccagggaatccgaagcccgcgacgaggaggcggaggtgtcccgatcgggtgagcaaggcggtggcgaggcctctacgacgcatgagcagcagaagcacggtgcctctgtgccaccagctgctcggat

SEQ ID NO: 22228 - DNA, 95 bp, Oryza sativa
  Clone ID: uC-osflM202049b06b1
catgggaatattgatgccaacactggtgatccccggatcggttgggacaccgatcggttccttacagatatttcagaggctactttgggtatgtc

SEQ ID NO: 22229 - DNA, 259 bp, Oryza sativa
  Clone ID: uC-osflM202049b08b1
atataagctctcacctttgcctcctcactctcctcacactctcttgtctccactcgccgcgccacgccacgccgcgccgcgcaatgcgcctccactaccaccacctcgccgtcgtcctcctcgccgccgtggcggcggcggcgacggcggcggccggtggcgaagccgacgcgctctcgcggtgaaggcggcgctcgacgacccgacgggcgcgctcgcgttgtggacgacgaacaccaccttgagcccgagcgcgcgg

SEQ ID NO: 22230 - DNA, 137 bp, Oryza sativa
  Clone ID: uC-osflM202049b09b1
atgcaaccctaatccatccatggcggttaatagttcgcgcgcatagatactagtggccatccgcgcgcggcctcaacatctcaacctccggccagcctcgcaatcctgctgctatctcggcggcggggaggaggtta

SEQ ID NO: 22231 - DNA, 326 bp, Oryza sativa
  Clone ID: uC-osflM202049b12b1
gcaccggcccagaatcccgggcgagacaccacgcgccctgtaaaaaaagagagagagatctgcagcaacagcggttcctgatagagacaacctacgggtgccatctactatctctgactgcagcagtgcagcactctccatctcaacccaagctaggaggaggtcatggcagcccaggggggcaaggatgcatggagcagcagctgcagacttcaagaaccattttgtgatgggggggaaccagggtcattggctacctcattgtcaggatcctatgtcagggggggcaccaggccacatctgttacaataggaaaggtcctcatt

SEQ ID NO: 22232 - DNA, 59 bp, Oryza sativa
  Clone ID: uC-osflM202049c03b1
gatcagtccaaggaaaagagagaattccaggattgtgctttcgatgtgtctgtctagta

SEQ ID NO: 22233 - DNA, 103 bp, Oryza sativa
  Clone ID: uC-osflM202049c06b1
ggcaccccgcatcgcccgcacgtggccctcctggggtcccttccacctagtctcctcaagaaatcgcaacccaatccaagcagatttcgcgtccaggacgtga

SEQ ID NO: 22234 - DNA, 150 bp, Oryza sativa
  Clone ID: uC-osflM202049c10b1
gtagcgcactgcgaagcgaacccttctccggcggctccgctctacgctgcacggggctagctcgccgccgtccgtctcgcgcgcctcaagggttatcacaagatgtatacagcaaggaggaagatccagaaggacaagggatttgagcca

SEQ ID NO: 22235 - DNA, 78 bp, Oryza sativa
  Clone ID: uC-osflM202049c12b1
gtcatcgcggacaccaccatcgcgacgggcggggactgcatctccatcgggcgggggaacgacaacatcgacgcggtg

SEQ ID NO: 22236 - DNA, 406 bp, Oryza sativa
  Clone ID: uC-osflM202049d02b1
ctttacgccgccgccgcctcctcctcttgttgggggaccgccgccgccgcctggggggaagaagaaagaagaggaaggagaagatgagggagatcctccacatccagggtgggcaatgcgggaaccagatcggcgccaagttctgggaggtggtgtgcgcggagcacgggatcgacgccaccgggcgctacgacggcgactccgacctgcagctggagcgcgtcaacgtgtactacaatgaggcctcctgcgggcgcttcgtcccgcgcgccgtgctcatggacctggagccgggcaccatggactccgtccggtccggcccctacggccacatcttccgcccggacaacttcgtcttcggccagtccggcgccggcaacaactgggccaagggacactacaccga

SEQ ID NO: 22237 - DNA, 405 bp, Oryza sativa
  Clone ID: uC-osflM202049d03b1
cattagtcgctaatcagaaagagcttgaatttgggtggggaggaactccagaggggggtttccaataactataatgtgatactgaaagagcggaagcttccactgtcactactgcaggatcatcaaaagcaagctagggcgcatcttcttgacactgaaccttttgagcatgcatttggaccaaagggcaagaggaaacgcccaaaactaatggctcttgattaccaatctctattgaagaaagctgatgattctcaaggtgcatatgaggataagcatgctacatcgaagttgctgaaagaggaagaggaagatggcttacgagacctagtacggcacacaatgttcgagaagggacagagctaaacaatttggggtgaactctataaagttattgactcttca

SEQ ID NO: 22238 - DNA, 345 bp, Oryza sativa
  Clone ID: uC-osflM202049d04b1
cttttcgtctccttcccccccatggcctccctgggggcgcccgcgccgccggccggcggcggcgacccgctcgccgccaccattccgccctcattgccgtcgccggcgccgtcgtcgtcttcgctcaacctctccccgtcgcttctcatcatcaccgcgctcctcgccttcgtcttcttcgcctccgtgtcgatccacttcctcctccgctgcctcgcgcggccgtcgcacccggctccgagcccgctgcccagggcgtcggcggcggcccaacgcgcgacgacggcgtccgccgtcgaggctggggaggctaccgccgcgtcggcggtggggaggagccatgag

SEQ ID NO: 22239 - DNA, 402 bp, Oryza sativa
  Clone ID: uC-osflM202049d05b1
gttttgaacctcgagctgcttctcacagctgggatggggtcagatcatattgagctgccagcagctgctgcagcaggtttaactgtggcagaggttaccggaagtaacactgtgtcggtggcagaagatgagctcatgcgcattttgattttgctcaggaacttcttgcccgggtatcagcaggttgttcatggtgaatggaatgttgctggcattgcctatagggcttatgatcttgaaggaaaaactgtggggactgttggggctggtcgtattggcaggctcttacttcagcgtcttaagccctttaactgcaacctgctgtaccatgacagacttaaaattgacccagaacttgagaaagaaattggggccaaatatgaagaggatctcgatgctatg

SEQ ID NO: 22240 - DNA, 277 bp, Oryza sativa
  Clone ID: uC-osflM202049d08b1
atttgacgcgatggtgcggagcgaccgcaggggcgtgaggattggcactggcggtgtccacggatcactattaatcaagacgctttacaaccacacgtgcgatatgctcatcgatgtgagcgcgtcctcatagatgccccgatcgaacctgatcgctatgagggacactgcggctagggtgcgcacggtgaatcagcactcttggttcgtgcaacatgatacagtggagccctcaagttgtatggggctgttaactactattagatgctcaccttct

SEQ ID NO: 22241 - DNA, 389 bp, Oryza sativa
  Clone ID: uC-osflM202049d11b1
ttcagacatacttccttcgcctagggatagggcatctggtagcacccatgaagatggtggctctcgagattttgaattcaagcctcatctgaattcatcctctcaatcgacggcttctgctatcaatgatcccaaaaagcatgaaacttctatgaaaaatgaaagcctgaatactgccctgtcatctgacgatatgatgatcgacaatatacctctatgttctcgtgagtcaactctcgcagtcaatatttcaagtgccccgagccaactggttggaatggttggtttaactgacagctcacctgctgaagttggtacatctgagttgcatcagatgaatagctctggaaatgctatgcaggagtcacagcctgaaagtgtggctgaaa

SEQ ID NO: 22242 - DNA, 260 bp, Oryza sativa
  Clone ID: uC-osflM202049d12b1
gtatacacgatctcgtgggggcgaaccgaggggcttggtcatagttcggatggggcagatgttgagcctcgtcttctctctggaccacttgagggtgttcttgttgcacagatttctgctgggaattgctatctccttatgttggcctaccagccaactggaatgtcagtgtattctgtaggctgtggtttaggaggcaagcttggtcacggatgcaaaaacaataagggcacccccaagttgattgaacatttcctgac

SEQ ID NO: 22243 - DNA, 247 bp, Oryza sativa
  Clone ID: uC-osflM202049e01b1
attatttcccacgacatcaaaaaatttcaggggtgggctttagaagaacctggggcgaaaaaactccccacctacatttgttttatatatgtgaatgcaatcgacgatacacactgtacctaactcttattacctatcctctaacatataaaggaaaaccctgtgtgcctcctccagtctcttgagctgacctatggaatgagggatgctaccaatgaacttattttctacaataacaaaggtgacc

SEQ ID NO: 22244 - DNA, 385 bp, Oryza sativa
  Clone ID: uC-osflM202049e03b1
ctgtccgccttcgccatggccgccacgccgcggggggccaggaaggtgccgggggaactcgcccagcacggcgacgtccgcgtggacaactactactggctccgcgacgactcccgctcccaccccgacgtcctcgcccacctccgtgccgagaatctctacaccgccaccatcatgtctgatgtcaagaacctcgaggatgaaatatatgctgaaattagagcaagaatcaaggaagatgatataggagcgcctcttcgcaaaggccagtattactactataacagaacactgactggcaggagtatgtgcaacactgcaggcgtctcgtgtcaactgatgctcctgttacagtctatgatgtcatgcccacaggacccaatgc

SEQ ID NO: 22245 - DNA, 352 bp, Oryza sativa
  unsure (1)..(352): unsure at all n locations
  Clone ID: uC-osflM202049e05b1
ttagagcccaacaataataatccccccttttgagggcggcgacgatacccgccgtgttcatctcattctcaccaccaaaagcgaccacgcagcgaccggccaccgatcgagatggagcagcatgaggaggcagcggagaggaagccttcgccgccggtgatattccggctgttcggcgtcgaggtccgcggcggcggcggcggagttgacgaggaggagtacgaggaggaggaggggagggtggnatttgttcatcaagaagagctccagtatgcccaacctcacctccatcgacccgctgccggtgccggccgacggcggcaaacggcgcgcctccgacgactccgagctc

SEQ ID NO: 22246 - DNA, 251 bp, Oryza sativa
  Clone ID: uC-osflM202049e06b1
tttaaagttgctagatagtccaacagcagctcgggatgataatatcaactgtggagtataccgtcattgaaacacatagttcaatcctagtccattatacggccaatcgttggcataataagcatattctatattccttagttccttggtaaataaactgagatatcgagtatgcgaataaaagaaaaataaggcactgtaagtttatttgtacaaagtttggaatttatgctatgtatagttttgcctgt

SEQ ID NO: 22247 - DNA, 292 bp, Oryza sativa
  Clone ID: uC-osflM202049e07b1
tccaacacgagtcgcgccgccgatctcaggaggggaggtgaggggaggggatgctgtttaacaaatatggatggactggtatagaattttgacgcagatgatcttggtgaaatgtcttataatcattataatgaagaacaactgatcccctacagtgatgtgtcacatccttacaacgaataacccgataacatggacaacgtataataggggaacccatacattcagcaagtgagttttgacagtgaagaaccagagaatcagtacaatgaggagccatctaacccttatc

SEQ ID NO: 22248 - DNA, 383 bp, Oryza sativa
  Clone ID: uC-osflM202049e09b1
ttatgaaggttaatgagatattgtctcactgtgaggcaactacaagcagtgtggtattattccaatgcttgatcttgcccagcagcagcatggtggatgggtgccagttgcagcaatgaatgctattgctaagatcgttgaagttgcaccaatcagagtatatgaagttgctacattttacacaatgtttaaccggactaaggtgggtaaatatcaccttttggtgtgtggaaccacaccttgcatgattcgtggttcacgtgaaattgaagaagccttgttagaacatcttggagttaaacggaatgaggtgaccagtgatggtttattttctgttggagaaatggagtgcatgggctgctgtgtgaatgcctccatgattg

SEQ ID NO: 22249 - DNA, 450 bp, Oryza sativa
  Clone ID: uC-osflM202049e10b1
ttttaatgtgcctctgggagcaaatggggcggggggagaaagtcaatctgagtgagcttggtccagggcgcggaactctcttggcagatttacttcgtgggtcatcaaaatttgttaatttcaccaaagcactcaacattaacttggtagaatgtagccccacgttacaaaaggtgcaatacaatactctgaaatgtgaagatgagcccattggcgataaaacaaggacagttagcaagctttgtggagcccctgtacactggcatgcttcccttgaacaggttccttcaagattgccaactataattattgcacatgaattctatgatgccttggcaattcatcaatttcagaaagcatcacgtggctggtgcgagaagaatgtggatcttgcagaagactcatcggttcgctatggtctatcttcacagcctacagcctctttacttt

SEQ ID NO: 22250 - DNA, 311 bp, Oryza sativa
  Clone ID: uC-osflM202049f01b1
atttctctctctttttcttcttcttcctcctggggtaaattctttctccactgccgcaagaaaaggcacctcaccgtcaccggggtgtgccggaaagctcccatctttgtctccatttgcttgccctcaattccttccttctttcctccctctgggttcttgtccccggaggcccggtttcatctctccactcctcgatgtgatgcgtgtgactcccagacaggcgattgaagctcacgtcgaggcggtgatttgccctctgacaagcactgttctcggggtctgaattgctgattactactgagcgtctc

SEQ ID NO: 22251 - DNA, 319 bp, Oryza sativa
  Clone ID: uC-osflM202049f02b1
atttatcttgaattcttgatcagttgagttggagtgcatgcataaagctcatgggaggttcacaaccaatagcaatcaccaagtttttttttttttgacactgtgacagcatccaccatgcaagccatgcagagacttgtgctgtgtcttgttgtgtccatggccatcgcggcgtcggctcagggcccgacgtctgcgccggccgcgccggcgcctgcgacaccggcggcaccggcgacgccagcagcgcccgcgccggcgtcgacgaagacgactaacatcactggggttgctcgccaaggccgggcagttcaacacg

SEQ ID NO: 22252 - DNA, 332 bp, Oryza sativa
  Clone ID: uC-osflM202049f03b1
gttttataggtcctccattgttcaaggtggggtcggggcatgcgttcgtgaagaagaggggcagctgcgaggacatgggacctcgtgcgttcccggtgcacgaagttcacaagatctgcgtgctggacatcaggctggccaacgccgacaggcacgccggcaacattctcacctgtagagacgaacaagggcatggcctcaccctggttccgatcgaccatggatactgtcttcctgagagttttgaggattgcacattcgagggcctctactggccgcagtgtcgggagccattcagcgaggagaccgtggagtacataaggtcactggac

SEQ ID NO: 22253 - DNA, 338 bp, Oryza sativa
  Clone ID: uC-osflM202049f04b1
ctttttaacgttccccgacgccggccggccgcgcacggccctcgcgcgcatgggcggcttcgctccccaccccgtcgtcgtccccaccgccgccatggacgggaccagcagcgttagcgcgcggacggcctcgtctctgtcgtcgtcgtcgacgtcgctcgacgacggcggccgtggccggcctccgccggccgggtcgacgctggagctgccgtcgcggaagcactaccggtacccttcccggtcggcgaggctgttccagaagctgcgccgctcgctcccgctgctgacgctggcgccgcggtgcggccggatgcaggtcggctcggcgagcgagg

SEQ ID NO: 22254 - DNA, 477 bp, Oryza sativa
  Clone ID: uC-osflM202049f05b1
atacggtcttgctgtggtggaagtcaaggatgcgtacccaactgtaatggaagatttgcaggcactgaaggcagcaggtgaagtttggctgttatcgaacatggattcccaggaggacattgtgtatcctaacgacccaaaggcaaagatcaaggtcgacgatgacctgaagcagctcttccgggagatggagttaccgcgggacatggtggatatcgagaaggagctccagaagaatggcatcaagcccatgaccaacacagctaaacggcgggctgcagcacagatcaatggggtgcagcccaaggctaagcctaagaagaagcagcgtgagatcacacgccggaccaagctcacgaacgcccatctgcctgagctgttccagaacctcaacacttgattgctctacgcttattcgacgtcaagtggagatatttatttctgtcctcactctacctactgcaatgctttatatac

SEQ ID NO: 22255 - DNA, 396 bp, Oryza sativa
  Clone ID: uC-osflM202049f06b1
gtccaaaaccctcctcccctcctctcctctccgtgtccgccgccatggccgccgccgccgccgccgccaccacccccaactccctcctcctccgccgcccggcggcacccaagccggcctccgcggcggcctcgccgctccgtctccccacgcgggcagccaggatctcctgcgcggccgtggccacgcccgcgcagtcctcctcctcccccgccgccgccgccgccgaccgcggggtctacaacttcgccgcgggcccggccacgctgccgctctccgtgctccagagggcgcaggcggagctcgtcgactaccgcggctccggcatgagcatcatggagatgagccaccgcgggaaggagttcgacgccgcgatcaagaaggcggaggccgacc

SEQ ID NO: 22256 - DNA, 312 bp, Oryza sativa
  Clone ID: uC-osflM202049f07b1
agaaacccgcggcgcgtagcgatggcccggggaggccttctactcctccctgtgctcgccgacgccgcggcggtgctctcgtcgccgctcggacgcgcgctcgccaagacggccaagaagagcaacgacatcgtcaatggcccactgctcacctccaagatcaacgccaagcgcacgctgatcgacggccccgaggacgagttcaagaccgagcagtccgccatcgacgccgtgcccgtcgggcaacaccgagtgggtcatcgtccacctccgctccggcatctacagggagaaagttatgatcccggaaac

SEQ ID NO: 22257 - DNA, 364 bp, Oryza sativa
  Clone ID: uC-osflM202049f08b1
atcaaatttgctaccagagacatatgatgagggcggaagtcattggactgacagccaatggttcaggttctcgcgtacgatcatttggccaagctcaagaaaacagtatggagccagtaggcttggatgagaattcagtagatattggctctgaaggtgcacttgatccctatatcatggaaaagctgagtgaagaaaacatcggtctgttcacaaggcgtgaagaacttcgacaacgagatacacagttgaggcaaacggtcggggagctagagcaacaactagcggagacaaaaagaaagtgtgctcagcttgctgatgacctgcgtataaggaagagccagcagcagcagcagccccctta

SEQ ID NO: 22258 - DNA, 373 bp, Oryza sativa
  Clone ID: uC-osflM202049f09b1
ttctcctcgctccccgccgccgccgccgttgggttggagaggagaaatccgtaggctcagaggatttttggtagtcttgtttcgtgatattcgtgaagagggggggagctaaggggggattcgtaagatcagaattggatcacgcgggggcgcgctcgggatcgggggttccaaacacagcttcttcgttgaatttaagtggatgtactaatggagtcaaagggtggcaaaaagaagtctagcagtagtcgttccttgatgtatgaagctccccttggctacagcattgaggacgttcgacctgccggaggcgtgaagaagttccagtctgctgcttactccaactgcgcgaagaagccatccctgatagccc

SEQ ID NO: 22259 - DNA, 456 bp, Oryza sativa
  Clone ID: uC-osflM202049f10b1
tgtataaaggacaccagaaacatagtacacttgagctcactccaaactcaaacactcacaccaatggctctccaagttcaggccgcactcctgccctctgctctctctgtccccaagaagggtaacttgagcgcggtggtgaaggagccggggttccttagcgtgagccagaaggccaagaagccgtcgctggtggtgagggcggtggcgacgccggcggcgccggtggcgagccccggcgcgggcacgtcgaaggcggacgggaagaagacgctgcggcagggggtggtgggtgatcaccggcgcgtcgtcggggctcgggctcgcggcggcgaaagcgctggcggagacggggaagtggcacgtggtgatggcgtgccgcgacttcctgaaagcggcgaccgccgccaaggcggcggggatggcggccgggagctacaccgacatgcacctgga

SEQ ID NO: 22260 - DNA, 391 bp, Oryza sativa
  Clone ID: uC-osflM202049f11b1
tgttagagagagagagagagggagggagagggaggcaatggtggcgacgaacctgaaggcggagacggtggggctgatggaccggcgggcggcggtggaggcggagatggacgccatcatcgccgccctctccgtgcccgtcgggccggggatcaccggcggcctcgtggacgcggagggtttccccaggtccgacatcgacatcccggccgtcctcgcccagcgccgcaagctcgccgaattgcggaatgatcacaaggatattacgaacaaaattgagaagaatctggaagttttgcactcaacaaaattgtcaagaaatgaagcgtcaatccctgcaagttctggcacacctgcttcattgcacagtgggttatctcaaaatgatcct

SEQ ID NO: 22261 - DNA, 329 bp, Oryza sativa
  Clone ID: uC-osflM202049g01b1
atttcttctctcaccgatctcgtcaacctcagggggtccgacaccacggagaagatcatcgccaagtacatatggatcggtggatctggcatggatctcatgagcaaggctaggactctctccggccctgtgactgatcccagcaagctgcccaagtggaactacgatggctccagcaccggccaggcccccggcgaggacagtgaggtcatcctgtacccacaggctatcttcaaggacccattcaggaagggaaacaacatccttgtcatgtgcgattgctacacgccagccggagaaccgatccccaccaacaagaagcacaatgc

SEQ ID NO: 22262 - DNA, 392 bp, Oryza sativa
  Clone ID: uC-osflM202049g03b1
atttttcgccgccgtcgaaacccaaaatcttgggttcccgtacgtgagaagcgcgaggtcgtcttcgccgccatgggcgtggaggtgtgcgtcaaggccgccgacggacacccggacactctcggcgactgtccattctcgcagagggtgctgctgactctggaggagaagaaggtgccctaccagatgaagcttatcgacgtccagaacaagcccgactggtttctgaagatcagcccagaggggaaggtgcctgtgtttaacggtggtgatggcaaatggattcctgatttgtgggaatcacttaaagtcattgaggagaagtacccaaccccgtctcttgtcacccctcctgggtatgcatcagtggggatccaaaattttctcatgct

SEQ ID NO: 22263 - DNA, 490 bp, Oryza sativa
  Clone ID: uC-osflM202049g04b1
gttttgttgcacaacagcagacagttggacctgtgcaacttcctctcgcagatgtggctgtgattgcacagacatatactgacttgacaggtggtgcctgtgccattggagaacaaccagcaaaaggtttacttaatcccaaggccatggcaagacttgctgttggggaggccttgactaatctggtctgggctaaagtttcatcactttctgatgtcaaagcaagtggtaactggatgtatgctgcaaagcttgatggagaaggtgcagatatgtatgatgctgctgttgcattggctgactgcatgattcaacttggtattgcaatcgatgggggaaaggacagtctttccatggcagctcaatgtgatggtgaaggtttgcaaggctcctggaaatcttgtcatcagtgcttatgtgacatgtcctgatataacattgacagtaacttctgatttgaagcttggcaatgatggagttttgctgcaca

SEQ ID NO: 22264 - DNA, 432 bp, Oryza sativa
  unsure (1)..(432): unsure at all n locations
  Clone ID: uC-osflM202049g05b1
gtcaccgatatgaatttcttgtgctttttcccggtcacaaagaagccggattcgagcaagggggcggaggcatcgccatcgatggaagagggggaggcctgcgacgactgcgagtgcgagatcgcgcggttgccggaggagctcctctccgccgcgatctccctcaccgcgccgcgggacgccttccgcgccgccgccgtctcccgggccttccgcgccgccgccgactccgacgccgtctgggctagcttcctgccgcgtgatctccccgatctcgccgacggcgagctctcccccgcgccgccttccaagaaggacctcttnctccgcctctccgncggccactaccacctnctgccagacaggctcaagggcatgtgattggacagggagaccggngcccagtgctatgtgctctcggctagagcgctg

SEQ ID NO: 22265 - DNA, 386 bp, Oryza sativa
  Clone ID: uC-osflM202049g06b1
ttttgatgtgactgatggtggactgaatcaactcaaggattgcatcaacttgcaaagtttgtcatgcaattactgtgatcagatatcggagcatggacttaaaacattgtcaggcctctcaaatgtgacatccctgagctttaaaaaatgttctgctgttactgctgaaggagctaaagcctttgcaaacatggttaatttgggtagcttggaccttgagcgatgtccgaagattcatggtggacttgttcatttaaaaggcttgagaaaactggaaaagctaaatttgaggtattgtaatggcatcacagattctgatatgaaacatttatcagatcttacaaatttgagagagcttcaactttcttgctgcaaataagtgactt

SEQ ID NO: 22266 - DNA, 406 bp, Oryza sativa
  unsure (1)..(406): unsure at all n locations
  Clone ID: uC-osflM202049g07b1
tttgacttgtccctgcagtccgcagacacgggccactgataccggccacgctgagccatcaagagttgaccacgcctccgttcctcgaagctctgccctgtctgctcagaatcagattgatgatgagctaggcggccacatctcttcaatcttcacttgatcatcatagtagttcatcgattgcttggagtgatttcccaagtacggcagcatcaaggtttacataattaccgtatgagaaagaatccaagtcattgaaacgtgnagcgttggatcaccatcggacggcccatgtagcccaactccttcgctgccacgcgacgccccaggcccagcccaagccaaaaccaaaccaaacaaaccccgtccgtcacctatccaaacagataaaggcgcgcgcgcgcac

SEQ ID NO: 22267 - DNA, 452 bp, Oryza sativa
  Clone ID: uC-osflM202049g10b1
tttgccggctatgtaataaagtgatggcagatgcggtgttgacaagcaagtgctgcttcgacagtttctgtgataaatgtgagtaaattctgtatttctccttaactctttgctgtggatatgaacaatgtcattactttgatattcgaaatgtggctagtcatgcttcaaattagtcacagaagcatgttgttttggacattgacgtggtatttgacaggaaaaattacgaatagttattgttgtacgacctccatccttcaatatatgatgttggttagttcaaaattgaactaaacaacatcatacataaaagaacagagggagtactatatttgtaaaactcgataaaattatagcactgttaagtactttccaagacaaatataaacatttagtaatttaccaatactcaaaactttgtctaaatacattgctaaacatgttttcac

SEQ ID NO: 22268 - DNA, 475 bp, Oryza sativa
  Clone ID: uC-osflM202049g12b1
ttttataacgaggcgacagttgcctactatttgcggttggacaataggctgcgcgcaaccagtggctaccttggagctgagttccatgaatctatggaatcttctctcgctcaagtaactccagctgagacaccaaactcagccactgatcatcggcagcatgggcatatggaatctcctgggtttggcttgaggcatcatttcgcagctgacaggaaatgggcccttggtcttcagtctcgagcacatccacgagaaataataactgaagttcttaaagctctgcaagagctaaatgtttgctggaagaagattggacattataacatgaaatgcagatggagtcctagttttcccagtcatgagagtatgatgcataacaaccatggctttggtgcagaatctgctataattgaaactgatgacagtgagaaatcaaccacactgtgaaatttgaaattcagctttacaaaac

SEQ ID NO: 22269 - DNA, 243 bp, Oryza sativa
  Clone ID: uC-osflM202049h02b1
attttctctcctgtgccagtgcacaaatatataggtgccaccatcagaagcaatctaacaccataaatcatgggaccagcccacggccaccatagtactcctcgacgacgacgaggcgttgctgaaagctggcttcctcccgcacgctgtagataagaagggcggcgccgtgccaccggcggatgctgacatatgctctcgcactccattcccagacacgtgccagaacaccgaccggcggca

SEQ ID NO: 22270 - DNA, 340 bp, Oryza sativa
  Clone ID: uC-osflM202049h03b1
gcccacaccctgctgaaaagaggccgggtaaagcagcatccttggacccattgcctctggcctcccaaacatttattttttgcatttttgcttgtgtttgtgagctcaagcaaagactgcaagagaagaatcaaagtgtgcaagcaacttcatccctatccccctatatagacaggtaaaaactaaaagtggtagtagatgaaaagatcaaaaactttgatttcaagggtacacctagtacaagcctgatttgtcaaaagaacaacaaaaatcttgtgaagaacagtgtgtctgaatgtctgatgcgtgtgtgctgctgctgttcttcttcttcttctca

SEQ ID NO: 22271 - DNA, 373 bp, Oryza sativa
  Clone ID: uC-osflM202049h04b1
gttttcggcgcgtgcgacggcgggcagttgctgggacgtcggcgacatggtgaggatggacaggttccgcgcttggcagggagctcacaaccggtcgtacccgagcgcagaagaggcgctgcagcggttcgatgtgtaccgccgcaacgcggagttcatcgacgccgtcaacctgcgcggcgacctcacttaccagctcgccgagaacgagttcgcagacctcaccgaggaggagttcctggccacgtacaccgggtactacgccggcgatggccccgtggacgactccgatatcacgacgggtgccggagacgtcgacgccagcttctctaccgcgtggacgttccgggcagtgtcgactggagggcccaag

SEQ ID NO: 22272 - DNA, 353 bp, Oryza sativa
  Clone ID: uC-osflM202049h06b1
tttacgcgtccggtcttttctcaattgtgttattgcagtttcatgtgagggtgctcctcctgtccaaatgggagaaagataccctcacatgttcttgatcctcctactttttcatggagcccatgcggctttgaaagatccagtacagaaatggcagactcttggaggtcagcgtcctcttgtcattgctcgtggagggttctccggcttgtttcctgattcaagccagttctcgtaccagtttgcaatgtcgagtagcttgcatgatgtggttctgtactgtgatctgcaattgtccagtgatggtttgggcttttgcaaaactggattgacattagagaactcgacgctta

SEQ ID NO: 22273 - DNA, 301 bp, Oryza sativa
  Clone ID: uC-osflM202049h08b1
ttcgaaacgacggatttcaccaacacatccgtgtgctcaagcccttcttgctcttcccgttcattgtccagctcgattgatctccatggaaatggtcatgttattgaaaagtcgatatctagggttggctccttcaatctcaggcagatcaaaggcttatcaggtagcatgccattgccacctgaggaactaaggtgcccgatctccttgcaactcatgcatgaccctgttattatcgcatctggtcagacatatgagcgggcttgcattgagaaatgggttagcagcggcaacacaacct

SEQ ID NO: 22274 - DNA, 362 bp, Oryza sativa
  unsure (1)..(362): unsure at all n locations
  Clone ID: uC-osflM202049h09b1
tatcagcatgaacctggctgacgccatgacgggggctcgggtgctggacatggacctgcacaagcagctccggcatcacatggagtgcatggtgcccctccccggcgtctacaaccctgacttcatcggcgacaaccagggctcccgcgccaacaatgtcatcaagggcaccaagaaggagcaggtcgaacaggtcaagaaggacatcagggagttcaaggagaagagcaaggtggcacggtggtggtgctgtggacggccaacacggagcggtacagcaaccaggtgggcgggatgaacgacaccatggacaacctgctggcgtcgctggacaaggacgagccggagatgtcgncgtcgac

SEQ ID NO: 22275 - DNA, 338 bp, Oryza sativa
  Clone ID: uC-osflM202049h10b1
ttccaaaccacccccctcctcccctcacggggtgacggcctcacccacccacgaacccatccatccaactccgcggcggcggcggcggcgatgacgacccgatccaacggcgagcaccaccacgggccgccctcgtaccagcagcggcgcccgcactacgggggcgggtacggcggcgggtcggcctcgttccgcggctgctgctgctgcatcttcctgctgctcaccttcctggccctcctcgcgctggccgtcgcgctcgtcgtggtgctggtggtgaagctcgggaagccgcagttcgacctcaaccaggtgtccgttcagtaccttctcgtcac

SEQ ID NO: 22276 - DNA, 101 bp, Oryza sativa
  Clone ID: uC-osflM202049h12b1
ctaagctggtcgtgtcactcctcccgttaaggttcccgcggcggcgagagcaagctaagctaggtcgggcatggggaaggacgaggtgatggagagcggcg

SEQ ID NO: 22277 - DNA, 127 bp, Oryza sativa
  Clone ID: uC-osflM202050a01b1
gtattcccgaggaagaagaagaagaagaaaagagtgtctactacggccagcaacctcccgtcggcgtcccgccgcagcaaggttacccggggaaggacggctacccgccgccggggtacccaccggc

SEQ ID NO: 22278 - DNA, 128 bp, Oryza sativa
  Clone ID: uC-osflM202050a04b1
tgcctcccttttgttccacacgagatttctgtggggggtgttcttatcttagggcgacctgcgttatcttttaacagatgtgccgccccagccaaactccccacctgacaatgttttccccccggatc

SEQ ID NO: 22279 - DNA, 218 bp, Oryza sativa
  Clone ID: uC-osflM202050a06b1
tagccgcgggtctcctctcaacaacctgggctgggctgttgagcttccgggacgcttactccggctaccaccaaatcagcatggtgagagaggacgaagagaagacagcattcatcatgccgttcagggtattttgctatgttaagatgccgttcggactaataaccgccgggaatactttccagcgcacgggctagggcgcacttagcgaccagatt

SEQ ID NO: 22280 - DNA, 86 bp, Oryza sativa
  Clone ID: uC-osflM202050a11b1
cgcctgccgcgggtctcctcgtcttctcctctcgctgtcttctcaaccagctgtcgtgcgcggtcaacagcggcagagaggggagg

SEQ ID NO: 22281 - DNA, 144 bp, Oryza sativa
  Clone ID: uC-osflM202050a12b1
tagccgcgggtctcctctcaacaaccagcggtgggctgttgagcttccgggacgcttactccggctaccaccaaatcagcatggtgagagaggacgaagagaagacagcattcatcatgccgttcagggtattttgctatgtta

SEQ ID NO: 22282 - DNA, 221 bp, Oryza sativa
  Clone ID: uC-osflM202050b07b1
ttgttaagagcagcgcttgagcaatttcagaaccgggtcagaccgtccagagccggggtggttgcatcatcaaatgatcagctggtaactgacgaagacgattgcgcagctcggcggcgaaccctgcgcactaagtatatctgcttttataatagatttctcgtgtacataaaatctaaaaaaacgggttcagttggttacagaacttgcaaatttgcttc

SEQ ID NO: 22283 - DNA, 330 bp, Oryza sativa
  Clone ID: uC-osflM202050b08b1
tcgatattttttggccgggagagagagcatctagctagggagagaaaggaagagacgagaggagagagatggccactgcttatgctcccatggcgagccagctgatgaagagcagcttggtgtgctccaagccgagggggctgtctggtgcttcgctgacaaggaggccccgcttcacagtcaaggccatccagtctgagaagccaacgtaccaggtggtgcagcccatcaatggcgaccccttcattggcagcctggagacgccggtgaccctcagcccgctggtcgcctggtaccttcttcaaccttccggcgtacccgcacccgtct

SEQ ID NO: 22284 - DNA, 276 bp, Oryza sativa
  Clone ID: uC-osflM202050b09b1
tcggtgaatattcccaacctttttaagaaaatgagagggtggcatatatacccttggcagtcatttgtcacctttggcaagggatttgattcccagaatgcttgttgttgatcccatgaagaggatcaccatacgtgaaatccgtgaacatcagtggttcacagttggtcttccgcgttatttagctgtgccacctcctgacactgcacaacaggttaaaaagctcgactatgaaactctgaatgatgttatcaatatgggggctcgacaagaatt

SEQ ID NO: 22285 - DNA, 63 bp, Oryza sativa
  Clone ID: uC-osflM202050c05b1
gtcatatattggccgcctaatctctccgaactggctaacatagacgatacctccactgacgat

SEQ ID NO: 22286 - DNA, 53 bp, Oryza sativa
  Clone ID: uC-osflM202050c07b1
acctcaagcggtggatacctaggtacccagaggcgaggaatgttataccaagc

SEQ ID NO: 22287 - DNA, 123 bp, Oryza sativa
  Clone ID: uC-osflM202050c09b1
gcctaagcggaggacacctacccccacaaatcggggggtctctttcaacaacaccgccaccaccgacgacgcgatgatcagcatcctctcgcacgatcgcctactcgtgttcgtcctggtctc

SEQ ID NO: 22288 - DNA, 162 bp, Oryza sativa
  Clone ID: uC-osflM202050c10b1
tcggtcttctcatattgttgccattattcacctgccttaattcgccctcctcccataaccgtagtagtaatcgtactcctccattctcgccggaatccagagcgaagctgtaggaaattgttgggaggaggagcaatgtcttacagctaggtggactggttc

SEQ ID NO: 22289 - DNA, 421 bp, Oryza sativa
  Clone ID: uC-osflM202050d02b1
ttccttttccactctctcctctccccttcgtggcggcggcggcggcggcggcggcgtgacgaggaggagcaatggcgatggcctcctccgcctacgccccagcgggcggcgttggcacccactccgcgccgggcaggatcaggccgccgcgcggcctcggcttctccaccaccaccaccaagtcgaggcccctcgtgctcaccaggcgtgggggaggcggcggcaacatctccgtggctcggctgaggtgcgcggcgtcgtcgtcgtcggcggcggcgaggccgatgtcgcagccgcggttcatccagcacaagaaggaggcgttctggttctaccgcttcctctccatcgtctacgaccacgtcatcaaccccggccactggacggaggacatgcgggacgacgccctcgagcccgccga

SEQ ID NO: 22290 - DNA, 405 bp, Oryza sativa
  Clone ID: uC-osflM202050d03b1
ttcttttcctgtcttgcaatagaacattcagctgcgcaagagcaaaagatcagctgggttatgaacccattgtgtcactcaaggatggacttaagagaacaatagagtcatatccccatctgcaagcacaaaatcaaaggagcatatcaaaagcctcaattttccttggcaatggaaatcttgcgaagacagttctctgggaagacatgaagcaaacaatgactgtactactgctactggctgttatctactatcatttatttacatgtggttacaccttcattacagcaatggcaaagcttttctcactaaccacactgtttttattcattcatgggattctgcctgcaaatgtggttggacacaaggttgagaagctcgagcctttaaattttcacatcacac

SEQ ID NO: 22291 - DNA, 474 bp, Oryza sativa
  Clone ID: uC-osflM202050d04b1
tttgttcaatcaagaaatcgttctagctagaagggggtgttcgatggcggcgatggcggtggtaatggcggtgatggcggcggcggcggcgtcgccggcggagggcgcgagggcgttcttcgtgttcggcgactcgctggtggacaacggcaataacaactacctcctgacgagcgcgcgcgccgacatgccgccgtacggcatcgaccacccgagccaccgccccacgggaggttctccaatggcctcaacatcccggacatcatcagcgagcacctcggcgccgagcccaccctcccttacctcagcccggacctccgcggcgccaagctcctcgtcggcgccaacttcgcctccgccggcgtcggcatcctcaacgacaccggcatccaattcgtgaacatcgtgaggatgagcaggcagctgccgtacttcccggagtaccagagaggctgccccgcttgtcggcgcggc

SEQ ID NO: 22292 - DNA, 467 bp, Oryza sativa
  Clone ID: uC-osflM202050d05b1
ttccttcgaaaaatttctccccaatctcgcgaggcggtcgtcgtcgaatcgggtgctctcgcgtcctcaagatgcagatctttgtgaagacattgaccggcaagactatcaccctcgagggggagtcctctgacaccatcgataatgtcaaggctaagatccaagataaggagggcatccccccggaccagcagcgtctcatcttcgctggcaagcagctggaggatggcaggacccttgctgactacaacatccagaaggagtcgacccttcaccttgtcctccgcctccgtggtggcatgcagatctttgtcaagactctgaccggcaagactatcacccttgaggtggagtcttctgacaccatcgacaacgtcaagggccaagatccaggacaaagagggcatccccccagaccagcagcgtcttatctttcccggcagcagctggaggatggcaggaccctt

SEQ ID NO: 22293 - DNA, 459 bp, Oryza sativa
  unsure (1)..(459): unsure at all n locations
  Clone ID: uC-osflM202050d06b1
ctcgttagctgctgcccgcccgcagcatcagggggggcctcgccgccgccgccgggggcgtctccttcccacgccctgctcccccgccgcgccgctgcgccccacgccgncaccgccgcgccctcgctccgcgcgcgggctcctcctccccctccccctccacggcggtggcggcgcccgtctacgcccccacgccgcgggaccgggccctgcggacgccgcacagcgggtatcactatgacggcacggcgaggcccttctttgagggatggtacttcaagggtgtccattcccgagtgcaggcagagcttctgcttcatgtactctgtcgagaaccccgttgttccgagatgggatgnagtgatctggaatcgggtcatacaatggttccgcgcttcattgggcgtcggggcgcagattcttggcgccgatgataaagacatatgccagttcaccgag

SEQ ID NO: 22294 - DNA, 459 bp, Oryza sativa
  Clone ID: uC-osflM202050d08b1
tcgtgttccaagacgccagcttcacctgcaagggtcgtgcaatatgaagcttctgatgttggtgcggacgatgcattgggcatttggaaaatagatgatgccgataacagcttctacacgcagccatttcgaatcaaatatgctagacaagacatttatctatcagttatggtgtcttttaacatattcaacagtgaagaagagggcccagcagcttcatctgttatattgaaatttgagctgatatatgccccaacgctggagaatgggtctgatattcaagcttctagtgccacttcttcggctgctgttcatgaatttagagtcccacgtcgagcactccttggttcacactcatattgtccagttcactttgacgcattccactccgtgcttgttgatctgactttactatcgtgtacctcaaagctggtgcaactaaatcatcattgaagatac

SEQ ID NO: 22295 - DNA, 426 bp, Oryza sativa
  Clone ID: uC-osflM202050d10b1
tctttactgtgtcaccgacctcctccccttcggggggaaggtttacgtgttggggggcaacaacctccacatgaacatgcacatcattatcaacatggaccaggtcgcgatccatgtcaccaacccctgctgcgagctctataccatctaccatacgatccacgctgagggccagatgatccccaacatcatcgacgagctagaccatcatcatcttatctacatcctcatcatgactggcattaactagcatgtgcctcgggttgacaaggggaaggggctctacttcctgatcgataaggcggagactaatacctaccgagggctgtctgacagtgccgagctgaccagctactacaagagcgaccacttcaagaaccggccgggcgactagaaccacaactacacgagccctactgtgggcat

SEQ ID NO: 22296 - DNA, 478 bp, Oryza sativa
  unsure (1)..(478): unsure at all n locations
  Clone ID: uC-osflM202050d11b1
ttgttatatttcatcatacttgcaatcctcacgctagctttgaagggagcatggcatttccgtcaggttgtattgactgtgctcgttgtgatttggggtcttcgcttaggactattcttattaatgaggattcttcaatggggagaggacaaacggtttgatgaaatgcgcgataacttgggaaaactagcagttttctggattttccaggctgtttgggtatggactgtcagcttgcctgttacaattgtgaacgcaagtgacagcgatccctcaattgaagcccgtgatattattggttggatcatgtgnctgatcggggcaggtatggaagcaatagctgatcagcagaagcttacgttcaagaattctccagcaatcgtgaagggtggtgtaatgtgggtttttggagttatacttcgccatccaaattactttggcgaggatttcctttggtgggggatatttgtagcatcta

SEQ ID NO: 22297 - DNA, 341 bp, Oryza sativa
  Clone ID: uC-osflM202050e01b1
tttattaatctcccctcgaagcgaagcgtcgggtcggcttctcaagatgcagatctttgtgaagaccctcaccggcaagaccatcaccctcgaggttgagtcctcggacaccattgacaatgtcaaggccaagatccaggacaaggagggcatccccccggaccagcagcgtctcatctttgctggcaagcagcttgaggatggccgcaccctggccgactacaacatccagaaggagtccaccctccaccttgtgctcaggctcaggggaggcatgcagatcttcgtcaagaccttgactggcaagaccatcacccttgaggtcgagtcgtctgacacca

SEQ ID NO: 22298 - DNA, 341 bp, Oryza sativa
  Clone ID: uC-osflM202050e03b1
ttgatccacccgccggagaggaaggccgccgcggccgccatgctcagggtcggcgggaggcgcctcaccaccgccctcgcctggcgccccgccgcggcggccggcgccaggggcccgctcgccgggggctccctccccggcgacgacgaattctcgcgtgagccccagaggccgcgcttcgccgtggattccccgttcttcgccgcttcgaggggcttttcctcagaaactcttgttccaaggaaccaggatgtaagcttgactgagcttccagcaacagtgtcagctgtgaagaatcccagtgcaaagattgtatatgatgaatataaccatgaaagata

SEQ ID NO: 22299 - DNA, 479 bp, Oryza sativa
  unsure (1)..(479): unsure at all n locations
  Clone ID: uC-osflM202050e04b1
gtggtttcattgatctgggtaagctcgacatgggaggtccttttgctcaaggggcatttgggaagctttatcggggaacatacaatggagaagacgttgctattaagctgctggaaaagcctgagaatgacccagagagagctcaattgatggaacagcagtttgtgcaggaagttatgatgttgtctacgttgaggcacccaaatattgtaaggttcattggggcgtgccggaaatcaattgtttggtgtatcattactgaatatgcaaaaggtgggatctgttcggcaattccttgcacgaaggcagaacaangtctgtgcctctggggctggctgtgaagcaggcacttgatgttgctcgggggatggcttatgtgcatgccttgcgatttatccatagggatctaaaatcagataaccttctaatttcagcagacaaatccatcaagatagctgactttggagttgttcgattgg

SEQ ID NO: 22300 - DNA, 456 bp, Oryza sativa
  unsure (1)..(456): unsure at all n locations
  Clone ID: uC-osflM202050e05b1
tgtatttataaattcaatttttggtgaagagaagtccaaaactgatgctttcagttcagccaccaacagtgtacgggagattgttggtaatgtcgatggtgtccagatacggatcattgatactccaggccttcgacccaatgtgatggaccaaggatccaacagaaaaatcctcgcttctgtcaagaaatataccaagagatgccccccagatattgttctgtatgtggaccgcctggatagtctgagccgtgatctcaatgatttgcctcttctaaagaccattacttctgttctgggctcatctatatggttcaatgccattgttgctctcactcatgctgcttccgcccctcctgaaggtctaaatggtgcccctatgacatatgaggtgctaatggctcaaaggtctcacattatccagcaatccatcangcaagctgcaagagatatgcg

SEQ ID NO: 22301 - DNA, 163 bp, Oryza sativa
  Clone ID: uC-osflM202050e07b1
tcgtggacccttgggcgagcgctcgcgagcgccaggggcaccccacgtttatgcgcgtcttatataatgcaagaggcgcaccactgacgctccttctttgtctcttccttgttacatatttaaaacttttttatctgctgaaaccgacgcttcttcctacatt

SEQ ID NO: 22302 - DNA, 398 bp, Oryza sativa
  Clone ID: uC-osflM202050e08b1
tcgttagttctagatcgcgagcggcgcccttgttgggttttttttttttttttggggttttttttttttttttttttttttttttttttttttttttttggggcgggaaacccaaattttactacttgttagcacgggaaacccaaccctaaacaaaacttctgggtggggcccaagttccccaaaaaaattaaatcaagaccccaacttgataaatacactaggaccatggccttccatgggttggtcgggagggaaaaacttttattaccccttgggggggaaaacccgcaccacaaaattgttggccaccaaaccgggcttgatctttccggtggcccccttgggaagcttttcggcaaagtacacctttttgggccccttgaaccccgcccggt

SEQ ID NO: 22303 - DNA, 194 bp, Oryza sativa
  Clone ID: uC-osflM202050e09b1
tcgtcccccctcacctaatccctccctcctcgaatcgccctcgtcaaaggggtgcaagaatccaaggggggagtggttggggttgattggttcttggttgtggtggcgcatggcgtttttttattcttttttttttgttcttcttcttcttcttttgcttatttttttttatgttttcttcttttccttatatt

SEQ ID NO: 22304 - DNA, 436 bp, Oryza sativa
  Clone ID: uC-osflM202050e10b1
tcggtctcaatcccctcgcccaggtccttgatgcgcgaggcgaatcaattccatgggcctcatatgattcctggatgggttatgtacctgaaggccagttcctttcgcggatagggccaactgatttcctcaaggaccttgatgaatttgttggtgctgatgcagtccaggagtggaaaaagcttcttgatgcagttattcctatctctgcagctgcaatggctttgcctccactttccattcgaggtgatttaggtgttctctccacatctgctggtagatatgctccttctctgttgaaatcaatcctgcaaatgggacctcaaggggctcttggtgctacaaaacttctaagacctttctcagagatcgttgattcattgggcctgaaaaacccctttgttcgtaattggatcgatcttttgtgttttctact

SEQ ID NO: 22305 - DNA, 457 bp, Oryza sativa
  Clone ID: uC-osflM202050f01b1
gtctttcccgcgtttgctctcatcgtaggccgggagggacggacgcggcgagaggatagagaccaggggcggccgggcggacggacagagcaaccagcgccggctgccggcttagctagctcgcggcggagcatgccgagatccagggggtccgagctgccgcagcgagcgtcgccgcgggcgccgctgcacctcaagacgacggcctgctcggatgcgaatggcgcgcaccaccgtacagtcgtcgaccggagcagccccaagctcgccgaccgccactcgccgcgcagcccgctgcatgagaagaagcgcgcggggacgcgggtggctgagctggagacgaagctgggcaaggtgcaggacgagctcaagaagctgcgggagcagctcgccaccgccgaggccgccaagaaggacgcgcaggtcgcgctcgaggaggctaagaaacgcgttggca

SEQ ID NO: 22306 - DNA, 350 bp, Oryza sativa
  Clone ID: uC-osflM202050f02b1
tttattaacccggcgccgacgacgacgccacagtgggggccgggcggcgaagcgcccacgtcgacgccggcgtaatgggcggcgccggccttctactcctcgccgcgacagcggcggagggcgccgcgtccagatgggagtccaactccgactaggactaccacatatttgcggacaaccggatgtcggacaacatgcacctgagctgttacgccgcgcagggcggcggccggagcgagctataccacagatttcgagccaaccccgggagggaggtgcagctgccgtacctgtagtcggcgcccaacgcctgactcgtctgcaagtgggcgtgcgcggagaactacctg

SEQ ID NO: 22307 - DNA, 447 bp, Oryza sativa
  Clone ID: uC-osflM202050f03b1
ttaggtagctatatcgtcgtcattaattggagctagctagggaggcagcaggcagagcgcaggggggcggccgggcggcgagggaaccatgagcaaaggtgctatcatcggcgcttccaccgtgctggtggtggcggtggtggcagccgtgtgcgtggtgtcgttcaagaacggcggcggcggcaaggaggatggcgagctgtccacgtcggtgaagtcggtgaaggccttctgccagccgacggactaccagcagacgtgcgaggaggagctggggaaggccgccggcaatggcgccagctcgccgacggacctggccaaggccatgttcgccgtgacgtcggagaagatctccaaggccatcagcgagtcgtcgacgctggaggagctcaagaacgacaagcgcacgtcgggcgccctgcagaacttgcaggagctgctggagta

SEQ ID NO: 22308 - DNA, 470 bp, Oryza sativa
  Clone ID: uC-osflM202050f05b1
aatgtacattgatccaaggacggaggcaaccgtgtgcttgtcagagaagcttgttcaattggctgttactcctacacagaagcaaatagcttttcatcagcttggatgcattaggcttttaaggaaggaatataatgaagctgaacaccaatttagtgttgccttctcagctggtcatgtgtattccattgctggtcttgctagaattgctggtacaagaggtagaaagggtttggcttatgagaagctcagttcggtcataacatcaagtgtaccactagaggatgatatgggagagatctctgtattagagggtgataaaaagttgggtgaccttgacaaagcaactgagctggatccaactctcacttacccttacatgtatcgagctgcatccttgatgagaaaaaaggatgcaagacttgccttagaggaaatcaaccgacttttgggtttcagctagcattgga

SEQ ID NO: 22309 - DNA, 470 bp, Oryza sativa
  unsure (1)..(470): unsure at all n locations
  Clone ID: uC-osflM202050f06b1
gtacccggagaccccacatatccagatctgcaaggggcctcctcctccttcctcctgatcctttagcttcctatatacgattccaccatcgaaggccagggcccagacttgcttgccgcaggttactgatccaccgaaggagggaggcgcccgcccgccgccatggccgaggtgacggtggtccgtgcggagcgcgaggaggagtccaccctggagcagggtctcctcgccatcccggaggaatccaaccaacttacatacactggagatggatctgtcgacttttctgggaatcctgttgtgaaggagagaactggtagatggagggcatgcccatttatcttaggtaatgagtgctgtgagcggttggcctattatggaatctccacanaccttgttacatacttgacaaagaaactgcatgatggtaatgcttctgctgctagcaatgtgactgcatggcagggaac

SEQ ID NO: 22310 - DNA, 463 bp, Oryza sativa
  Clone ID: uC-osflM202050f07b1
tcgtttagattcccagtatcccaccaccgcatggtgcatttgtgaattgtgagtgtcgaatccaagagttggagttcgtgttcgatggggtcgcaggcgatagaggcgcacagggagggggcggaggtgtaccacggggcggcgctgtgcgcggagaaggcggtggagctcctcgcggagatccacatgccgctgggcctgctgccgctggcggagatggaggaggtcggctacaaccgcgccacggggttcgtgtggctgcgccagaagaaggccatcacccacaccttcaagcagatcagcaggcaggtctcgtacgccgccgaggtcaccgccttcgtcgaggaccgccggatgaagcgcgtcaccggggccaagaccaaggagctcctcatctgggtctccctctccgacatgttcatcgacaaggacgaccccttcaaatcacctttaagacccccac

SEQ ID NO: 22311 - DNA, 414 bp, Oryza sativa
  Clone ID: uC-osflM202050f08b1
ttggttttctatattcgatttgttcgcctcaatggagttcttttcacaaggacaagcttggaaacatttggggagttgtctgctacagttatcagcgatttgcaaattcttctttcatctggtccttacgaggagcttaattttggtgttgaggctgctgaaaacgcgctttctgttgttaagcttattgctatccttatattcacagtgcacaatgcaaacaaagacgcagataatcaatcatatgctgaaattgtgcaacgcagagttgttcttcaaaatgcatttgctgcagcctttgaatttgttggataccttctcaaaagatgcgcagagcttcatgatgttgcatcaagtatctacttgccagctattttggtcttcattgaatggctggcgtgccatccagatttt

SEQ ID NO: 22312 - DNA, 463 bp, Oryza sativa
  Clone ID: uC-osflM202050f09b1
tcggttacattgtcaagtttcatagtagttattttggactcacctcttcaaagtacctgtcatctgggttgggaggtaatttctaaatctcagctctactatttgatgatctgacattcatattttactatatacttcttgtcactagaattcctgctgcatacgtactagctaggtatttcctcttacaataatggttgtcagaattagcagcatatcagctcaactccatgcttgaacaatctgagtttttctttactccagaacacctgagagttgacatatatgatatatttaacagattgtgttgattgcgcataaagaagtagccgaacatatttctgctatgcacattaacatattggtacatatttacaattctatttttacgaagcactatgctactgataggctattgatgggctacagcttgatttattttaaaaacacccccggttttttt

SEQ ID NO: 22313 - DNA, 471 bp, Oryza sativa
  Clone ID: uC-osflM202050f10b1
tcgatccgcgacgagcacggcggcgacgacgaccggggccgcgacgatggccgggcgcctcctcctcctcgtacttttcgccgtcgtggcagcgcgcgtaggcgcagcggcggcctatcagcccggatctgctgaggggcacacgatcgcgggccgcatcaagatcgatgctgcaagtgcaattgcaaagggctttggtcttccagccaagacatcaaacacaaaagtgatacttaacggtggtcagagggttacatttgccaggccagatggctactttgcattccacaatgtgccagctggtactcatttaattgaggtctcctcattgggctacttattttcaccagttcgggtagacatcagtgccaggaatcctgggcacattcaagcagcattgactgaaaacagaagagttctaaatgagcttgtgttggaacctctcagagaagagcaatactacgagaaaag

SEQ ID NO: 22314 - DNA, 463 bp, Oryza sativa
  Clone ID: uC-osflM202050f11b1
cgacgcgagaggagacgagacgaagccatccgatccccacccttccccccctccccctcccccctcttcagcgctggaggcggcggcggcggcgtcccctggatccctcggcggcggcggtggcgcacggttatgccgagaggcacccaggttccaacaccgtgcactgccagggctctagcattctcattaaggatatggagtacaccctctacaccacaagttcctctgtattgcacatttcgctgctcgaggaagttcttggctggaggttttctctttacggagacttcctcgttatctcttttgtcaactgcacctgaagatcacacctcattcagcagccgtcttgcctggtcccatgctattgcacattagagtcgactattgattacagtgcagctgtagcacatttcttcgagcatggtgcatctcatcctcttgcatccttccgggtagtttt

SEQ ID NO: 22315 - DNA, 416 bp, Oryza sativa
  Clone ID: uC-osflM202050g01b1
gttgttctggtggtgctgctgctgcggcgagtgctgcggctgctgctgccggtggcggtggtgcagccgctgcagctgcagctgcccaaccttctgccgccgcaactagtgcctctctgctcctgaccaagacatttttggcgggaaaagatgaagggaaaaaaccgagaccaactcggctaatcctgatacagccatagttaaattaattattgctaccagattaggcatcactgcatgagaggatcatatcatatgtatgcatgtgcagatgggtaaaaagatgaagatgatattgttcactgttgacaaggaaatgttatgctaacctgcagatgggctgaggtaacaaacaatatcctggtatccaagagaaaagtacatattctaatgtaaaaaaaaaaaaaaaagggcgg

SEQ ID NO: 22316 - DNA, 491 bp, Oryza sativa
  Clone ID: uC-osflM202050g02b1
gtcggttcgagatcgggatcggccgccggcgagcggggagcggcgaggatggggcgggggaaggtgcagctgaagcggatagagaacaagatcaacaggcaggtgacgttctccaagaggaggaatggattgctgaagaaggcgcacgagatctccgtcctctgcgacgccgaggtcgccgccatcgtcttctcccccaagggcaagctctacgagtacgccactgactccaggatggacaaaatccttgaacgttatgagcgctattcatatgctgaaaaggctcttatttcagctgaatccgagagtgagggaaattggtgccatgaatacaggaaacttaaggcaaagattgagaccatacaaaaatgtcacaaacacctcatgggagaaggatctagaatccctgaatctcaaagaactccaacagctagagcagcagctggagagttcattgtagcacataatatcaagaaagagccaccttatgc

SEQ ID NO: 22317 - DNA, 407 bp, Oryza sativa
  Clone ID: uC-osflM202050g03b1
ttcatttcaagctgaacaagctgtccctcccgggagagaacacacaggagctgaggtgcaagatgtctgcttgattgcctcctgcttcacttcactgcttctcttccttctccctctcctctctgcaatcttcttgtatttttctccctagctctcctgcatcagcatcagttcttgcctgtggctaaggatcttttgatcttcaaagggagagaaaaggatcttgcctgagcttcagtttcttgtgctgcctcctcctctgtgtttgtgtgatccaatttccaacttggaggagttcttggtttcctggcattgtgctttcttggacccagagcttgacaagattggggcaatagtttgccaatctagagagagagagagaattcttggtttcttggcaaggggga

SEQ ID NO: 22318 - DNA, 470 bp, Oryza sativa
  Clone ID: uC-osflM202050g04b1
ctttttctttggtgcccagaagacagtgcaaagctggcaattattcttgtgtgtggcggttggtctttgggctggtctaatcattggatttgttaccgagtattacaccagcaacgcatatagccctgtacaagatgttgctgattcttgcagaactggagctgccactaatgtcatttttgggcttgctttgggttacaaatcagtcatcatccctatttttgctattgctttcagcattttcctcagcttcagccttgctgccatgtatggtgttgctgtggctgctcttggaatgctgagcacaattgccacaagtcttgctatcgacgcctatggtcccatcagtgacaatgctggaggaattgctgaaatggccggcatgagccacagaattcgggagagaactgatgctctggatgctgccggaaacacaactgccgcaattggaaagggtttgccatcggctc

SEQ ID NO: 22319 - DNA, 459 bp, Oryza sativa
  Clone ID: uC-osflM202050g05b1
tttttatccgatactacaaagaagctgttcttcctagagttgatcgaagaaaggcttataaggatatcaccttttgcaaaccgactgtcctttgatgctccatcagctgttcaacggttgagatgtctggctaattttgaagccttaaagttttctaagccgatcacaactttatctgacattttagtatctcgaatgagagaaaaaagtgccgaaaacaatgggaaatatgtagcggtgcatctccgttttgaagaggatatggttgcattctcttgttgtgtcttcgacgggggtgaaaaggagaagaaggaactggatgcagccagggagaggggttggagaggaaagtttactaggccaggacgtgtaataaggcctggagcaataaggatgaatgggaaatgtccacttacacctttggaggttgggttaatgcttcgcgggatgggtttcagc

SEQ ID NO: 22320 - DNA, 270 bp, Oryza sativa
  Clone ID: uC-osflM202050g06b1
atctgcatgaagagtgtatgtagatcactcttgagatcacggagattagcctgtatatttcataagctgaaaccaaacatgtatggttttatgatatatagtagctagtacacggacaaacctctttggttgcttctttctgaagaaaaaagaagaacagacatggatgtatgatctacctgatgtgtataaattgaatgatgcagtctgagaaataatcctctgatcatattgtggattctgaaatatatccgagtttcttttttcaac

SEQ ID NO: 22321 - DNA, 486 bp, Oryza sativa
  Clone ID: uC-osflM202050g07b1
tcttttgtgctgaaggacaggacaccgcacatgaggagtttgccaaatgtcacatcatgggaaatcacaagaggccattgttactatcgagtgaatccagaaagcttatcgcataccatgaaagtgggcatgctattgttgcactccacactcagggtgctcatcccatacaccaagcaactgtacttccacatggtctttctcttggaatggtcacacaagtcgcttcaccaggaaatacttcaattagcaaacaaaaaatcttggcccgcattgatgtttgttttggtggagcagttgctgaagagctgttgtttggggagcacactgttacagctggggcgaaaaatgacctctttactgctaaagagcttgcccaaaaattggtattatactgttagaccagtgatactggtgatcgtatgcatctggaaaaatggccaagtgtacaaatgcaagccacgattaatgcagaggtgttgaaac

SEQ ID NO: 22322 - DNA, 419 bp, Oryza sativa
  unsure (1)..(419): unsure at all n locations
  Clone ID: uC-osflM202050g08b1
ttgtttaaccctagctcgccgccttcgcgcgagctgtgctccatggagaaccccaggccacaggctcctgcggggacccctcccatggctcccctccccgtgcccccgcccatcgcccccatccctgccccgcctccgcgagccccagcacccgccccggccgccgccgccgccgtcgcctcgacctccgcggcgggaggaggcggcgggggcggcggtgaggctgactacgaggtctccgatgaccaccgcgccgcgcgggagcgccacgagcgcgcggtgcaagagctgctccagcgccgccgcgccttcgccatggccgggcccaccaacgacttcccccggcgggcgcgcctccgccggctcggcgagcccgtcacgctcttcngcgagcgcgagatggagcgccgggaccggct

SEQ ID NO: 22323 - DNA, 471 bp, Oryza sativa
  Clone ID: uC-osflM202050g11b1
ttggtggtttggcggcggcgtctacatcgtcaccgggctgctgatcttttacgtcaagatcggtgagcttggtgttgcgcggaaggtgttcgacggaatgccgcagaggagcgtcgtggcgtggaacgccatgatatccgggtgcgcgcgcggcggcgcggaggcgcgggcggtggagatgtttgggtcgatgcgggcggaggggatgaggccggaccagttcacgttcgcgtcggtgctctgcgcgtgcgcgaggctggccgcgctggagcacggccggcgcgtgcacggcgtcatggtcaagtcgcgcgtcggcggcggcaacgtcttcgtcgacagcgcgctcgtcgacatgtacctcaagtgcagcagccccgaggaggcgcgccgggcgttcgcggcggcgccggcgcggaacgtcaccatgtggaccgccgtcatctccgggcacggccagcacgggcgcgccgc

SEQ ID NO: 22324 - DNA, 525 bp, Oryza sativa
  unsure (1)..(525): unsure at all n locations
  Clone ID: uC-osflM202050h02b1
ttttgtagtcctatagagttgcagcggcatctcaagcggatcattttttagcgggagcggcggtgtccgaggatgtcnttttcttcctttttttttttttctttctttttttttctttttttttttttttttttcttctccttttttttttttttttttttcttttttttttttttctttttttttttttcttttttttttcttccttctttttttttttttttttttgatgtttgtcttttattctcttttattttttttgttttttctctcgttttctcttttttttatctcttttattttttctttctttttctttttattcttcttttatcttctattttgttttttttttttttctctctctttttatctcttcttctatttttttttttttttttttttttctcttttctttttttttttatgattcctctttttttcccttttctatcttttttttcttttgttcttttctttttttcgtctcctttttatttttcttttttttctcaaggctttttt

SEQ ID NO: 22325 - DNA, 456 bp, Oryza sativa
  Clone ID: uC-osflM202050h05b1
ttcaaaccctagccgccgccgccggcgtactcgagagaaacatcagcatccatggcgggcaagggcgagggtccggccatcggcatcgaccttggcacgacctactcgtgcgtgggcgtttggcagcacgaccgcgtggagatcatcgccaacgaccagggcaaccgcaccaccccctcctacgtcggcttcaccgactccgagaggctcatcggagatgctgccaagaaccaggtcgccatgaaccccatcaacaccgtcttcgatgccaagcgtctcattggcaggaggtttagcgatgcttctgttcagagtgacattaagctctggcccttcaaggtgattgctggacctggtgacaagcctatgattgttgtccagtcaagggtgaggagaagcagtttgctgccgaagagatctcctccatggtcctcataagatgcgtgagattgctga

SEQ ID NO: 22326 - DNA, 277 bp, Oryza sativa
  Clone ID: uC-osflM202050h07b1
tcgtttcaatcttgcttttccacattcttcttcggcggcgggtggtttccaccgggttccgaacttcgagggaagcaacgccgcacccgggcggtggcggcggcggcatggcgttcgagaagatcaagggcggcaaccccatcgtccagatggacggggatgagatgaccaggatattctgggaggctatcaagggcaagcttatctttccatttttggatctggacattaagtactatgacttgggaggtcttcaccgggatgcaactggtgacaa

SEQ ID NO: 22327 - DNA, 378 bp, Oryza sativa
  Clone ID: uC-osflM202050h08b1
tcggtcgcacgcgcacctcacctcctattctctgggggtcctcgccaacctcctgctgtgcctctgtccctctctctctcgctctccattcccaaatctcctccgcatcgggatggcgcaagtggtggctgcggcagggacggcggcggcggtggcggcggtggggaggccgctgggtggcggcggatctggggccgacgcgctccgcccggcggcgaggctgtcgttcgcgccgcgctggtgcggtgggagcgcgggggcagcaagggcgcgccgcgagtccgccgtcacgtccgtgattagccgcgccccgcgtctcgacgccgaggtgctgccggtgtcggccgacgacgacgcggacgtgaaggaagaagaaaa

SEQ ID NO: 22328 - DNA, 495 bp, Oryza sativa
  Clone ID: uC-osflM202050h09b1
tcgctatcgtggtgctctttttactgcattggtgtgggatctatgctctcacttcaggaattgctgggtatattgcaacctctttctactgtcagctagagggaacaaactgggtgaggaacttgctgttgacaggatgcctgttctgtggacccctattcctgactttctgcttcctaaacactgttgctattgcttatagtgcaacagcagctttgcccttcggcactatctgtgtcattgtgctcatctggaccttagttacatttccccttctagttttgggaggcattgctggtaaaaacagcaagactgaattccaagctccctgccgtaccaccaaatatcctagggagattcctccactttcgtggtaccggcaaacaatcccgcagatggctatggctggggttttacctttcagtggcatctatattgagctctactacatctttgctagtggtgggggcacaggatttacacaatttacagcat

SEQ ID NO: 22329 - DNA, 294 bp, Oryza sativa
  unsure (1)..(294): unsure at all n locations
  Clone ID: uC-osflM202050h11b1
ttgattaaattaaaaagaaaatcacggcgcgggggcttgcagagacagcaatggggagagttggtgccgccgcggcggtgctcgtgctggcggcggcggcggcggccatggccgccgagccgcccaccgatgacggcgcggtccgggtggcggcggggctgacgaagtgcgtgtccgggtgcggtagcaaggtgacctcctgcttgctcggctgctacnggcggcggtgtcgccgaccgacctcttcctgacaggaatgccgttctgcctcatctgctgcacttggcgtcgttt

SEQ ID NO: 22330 - DNA, 421 bp, Oryza sativa
  Clone ID: uC-osflM202050h12b1
ttctttgaagcatactctggtattcttcaagggtgggagagctcccctaagacacaattactgatgcagtatgctcccaatattcttaatttccttgatgctctttacaatgggaaggatatggatgatactgtgatgaagactgcgataggtgtactgggagatctcgcggacacgttgggtgtccatgctggccctttgatcaatcaatctatctcaagcaagaaatttttggaggagtgcttagcatctgatgatccactggtcaaagagtcagctgattgggcaagggttgcaatcagccgtgcggtttcaggttgaggtcacattgggcttgagtctgcacatgcatcattccacttgtcatggtcgggtcttggttgcatcatgtctagacctgctctttggagaaggcaaccca

SEQ ID NO: 22331 - DNA, 443 bp, Oryza sativa
  Clone ID: uC-osflM202051a02b1
tcctgtcaaaaaaatcacccactctttgcccggcacgtgtgccctccccggccatgggagccggcatgctcctcggtgccatggcctatgctgcctgctagcctacactcccctggccgccgtcacctgcccaccccgtgtcggctccgcctgcagctgctctcccgcgccgtgcccgaagccgtcttcggcaccaccaccaccaccaccgagcccgacaaccacttctctgtcgaggaatacctcatctccaactgcaatctgacccagccacaggcccacagggcgtccaagagcatcgcccacctcaagtcccgctccaaccccgacgccgtgctcgccttgctcgccgacttcggcctctccccaagggaggtcgcggccattgttgcctgcaacccgcgcatactgtgcgcccgcatcgaccgctcccttgcacccat

SEQ ID NO: 22332 - DNA, 304 bp, Oryza sativa
  Clone ID: uC-osflM202051a06b1
ttatcatgtacaaataggagggcgcatgcaccttgtttgccattagctctcgacgtagcctagagcgcaagcagcagcagcagctagattggttggttgccaatgatcccggccatctccccgatgatggacggcgccgcgcctctgcttcccgagacgagccccgagagccgccagcaacgtgatccggagaggggacagaggtggggcttgtcttttgtgttcatgtgtgattcaagtgattcttgtttggtcggactctgccctttttgttctagagagatcttcctggtgctcttggggc

SEQ ID NO: 22333 - DNA, 353 bp, Oryza sativa
  Clone ID: uC-osflM202051a07b1
aaaaaaaaaacaaaacacaggggggaaataaaaaaaaaaaccccccccaaaccacaaaaaccaaaaaaaaaaaaaaccaaaaaacaaagacaaaaacacacaaagacaaaaaacacacaaccgaaaaaaacaaaaagaaaaaacaaaaaaaaacaactaaaacaacaaccaccacaaaaacaacaaacaacaacaagaacaaaaacacaaaaaaaaaacaaaacaaaacaaaccaaacaaaacaaaacaaaaaggcaaaacagacaaaacaaacaaaacaaaacaaaacaaaaacacaacagacataaactggcgaaaaacacaaacaacaaaaacaacgaaaacaccaacac

SEQ ID NO: 22334 - DNA, 371 bp, Oryza sativa
  Clone ID: uC-osflM202051a08b1
ttttctagaggcatgagaaccgctaacttatgaccgtcatactcaagaacaagttgatattcaggggatttgtgatcacggactgtcaagcgtgggtcaggatcacgacgcccccgcacaggcactactaccacttgctccaggagacaagccacgcggacattgacatggcgctgatcccgtacgactacccggagttcggagtcgacctagctacgcatgtgtcgaacgggtcgatcaagctggacaggatcagcgacaccgacagccgcatactccgagtcaagttcgccatgggcctgttggagaaccctgctcccggacccgcgcctctgcggaaagctgggcgacaaggagcaccggctgatcgc

SEQ ID NO: 22335 - DNA, 334 bp, Oryza sativa
  Clone ID: uC-osflM202051a09b1
gttgtagaatctacctcccctccccaaatctcgctgccacgcctcttccttccgacttgtgacagaatggcgctcaatgaggagtacacatacgtggagctggagaaggagccttactggccatttgagaagctgcggatctcgattacgggagctggcgggttcatcgcatcccacatcgcgaggcgcctcaagagcgagggccactacatcattgcttctgactggaagaaaaatgagcacatgactgaggatatgttctgccatgagttccatcttgttgatttgaggttgatggacaactgcctcaaggtgaccaccgtggttgaccatg

SEQ ID NO: 22336 - DNA, 294 bp, Oryza sativa
  Clone ID: uC-osflM202051b01b1
ttcatgcgtccgagctgatggtgatgctgatcgcaacatgattctgggtaaaagattcttcgtaacaccttcagattcggttgccattattgcagccaatgctgttcagtcgattccttacttttcttctggccttaagggagttgccaggagcatgcccacatcagctgcccttgatgttgacgctaagaatttgaatctcaagttctttgaggtgcctactgggtggaaattttttgggaacttgatggatgctggaatgtgctcaatccgtggtgttgaaagctttggcac

SEQ ID NO: 22337 - DNA, 194 bp, Oryza sativa
  Clone ID: uC-osflM202051b03b1
ggtactgagtatcaaatgcttccatgcttggatttgagcaagagcaaggacaagcaaaactatgtgccgattgaattgtgtgatcttcttgaagggcagagatacccaaaagcaagcttaaataggaattctgataaaacactgaaagaaatggctttgatccctgcctcaagtaggaaggaggagattctgga

SEQ ID NO: 22338 - DNA, 496 bp, Oryza sativa
  unsure (1)..(496): unsure at all n locations
  Clone ID: uC-osflM202051b05b1
gtgcgtcgtccacatctccaagaacttcatgaccctgcccaacatcaaggtcccactcatcctgggtatctggggaggcaagggtcagggaaaatccttccagtgtgagctcgtcttcgccaagatggggatcaaccccatcatgatgagcgccggagagctggagagcggcaacgccggagagccggcgaagctgatcaggcagcggtaccgtgaggcggcagacatcatcaagaagggggaagatgtgctgcctcttcatcaacgatctggacgcgggtgcaggtcgcatgggaggcaccacccagtacacggtgaacaaccagatggtgaacgccaccctgatgaacatggccgacaacccaaccaacgtgcagctccccgggatgttcaacatggaggacaacccncgtgtccccatcatcggtaccggcaacgactttttcacgcttgtacgcgcccgttattcgtgacgggcgtatgaagaagttttact

SEQ ID NO: 22339 - DNA, 509 bp, Oryza sativa
  Clone ID: uC-osflM202051b07b1
tcgttcacttctctgcttgtgttgttctgttgttcatcaggaagaacatctgcaagttatacatatatgtttataattctttgtttcccctcttattcagatcgatcacatgcatctttcattgctcgtttttccttacaagtagtctcatacatgctaatttctgtaaggtgttgggctggaaattaattaattaattaattgacttgccaagatccatatatatgtcctgatattaaatcttcgttcgttatgtttggttaggctgatcaatattattctagagtctagagaaacacacccaggggttttccaactagctccacaagatggtgggctagctgacctagatttgaagtctcactccttataattattttatattagatcattttctaatattcgtgtctttttttattctagagtctagatcttgtgttcaactctcgtaaatcatgtctctcgccactggagaaacagatcaggagggtttattttgggtataggtc

SEQ ID NO: 22340 - DNA, 439 bp, Oryza sativa
  Clone ID: uC-osflM202051b08b1
ttctttgaagtgactaagagggttgcacacataaaaaatgttatcgcggctgtcgaacaagaatacgagaaggaaaagctcaatgagaggattgcatagcttgctggtggtgctgcagtcattcatgtgggagcacaaacagagaccgatctaaaagagatgaagttgagagttgaggatgccctaaatgctaccaaggctgctgttgaggaaggccatgttgatggtggagggggctctctgatgtgtctgtcgcatggagtacactccgtgcatgactacctggtgacctatgagacggaggtaggagttccacatgtgaggagagcactggacgactcatttttgtcgcatgtttcacatggttatgttgcctgaagtaggagccacacaaaggaaaatcatatctctctcccatagcctgagtccgatccccacc

SEQ ID NO: 22341 - DNA, 375 bp, Oryza sativa
  Clone ID: uC-osflM202051b10b1
gtctttattaaagactcccatcaactatttgcacacaccctccctgtggataccatctgcctctatccagacgcagattgagagccaaagacattatattgatcttatcacgagggttgtgctagcagactcttgcccgcagcagactgacatactgctagccgcatccccaccgagaataccaagatgacgttctctggtacacaggacaagtgcaatgcttgtgacaagaccgtgcatttcattgatctcctaaccgcggacagtattccctaccacaagtcttgcttcagatgcagccactgcaaaggcacactttcgatgtgcagctattcctcccatggatggggttctttactgcaagacccattttga

SEQ ID NO: 22342 - DNA, 473 bp, Oryza sativa
  Clone ID: uC-osflM202051b11b1
gtcgtcgcaggtatctcaccaggatggtgtgcgcagtgttgttactggatctctggcatctgaaggcatatgccggagatgtacacagtcattcttccttgcaccacaagaatgtggtggctatgttgctctcaatgatatttttagatttatagtggaaaggccaccagttgcaataagtcaagttagtcaagaaaatgagaacaatcagaacactggcactcttcctgaaactgatcctaatccagcgggagatggtatgatctcagagcctgtggcagtggaaaataatgttgcggaggtggaagtgacaaattccacggttgatggcactagtattgaaaataatgctactgctgctgtcgaaccacctgtacatatgacgaaagaggagcccaggaagatctctgttgctgctacttcccctccagctcagaaggtagttacgaaaaaatgcctatgcggccctgtga

SEQ ID NO: 22343 - DNA, 418 bp, Oryza sativa
  Clone ID: uC-osflM202051c01b1
gtacttcgaggccgggcacaagccgtgcgcgcaggcgttcggtgccgaccagttcgaccagaacgacgccaaggagtccgtgtccaggagctccttcttcaactggtggtacttcggcatgtgctccggcaccgtcatgaccaccatggtgtcctgctacatgcaggacaacatcggctggggcctcggcttcggcatcccctgcctcgtcatggcgttcgccctcgcaatgttcttgctcgggacaaggaactaccgctactacgtctgcacccagtccagccccttcgctcgcctcgccagagcgttcgtcgcgctcatcagaggatccaaagacgacgctttgcccgtgtggacgatgacgactgcggcgaccaccgagaggagctgagaggcgtgctgcggttgtttcccgatt

SEQ ID NO: 22344 - DNA, 162 bp, Oryza sativa
  unsure (1)..(162): unsure at all n locations
  Clone ID: uC-osflM202051c02b1
cgtcagctctctcagctctcacagctcactgcatcaatggccgcggccaccatggcgctctcctccccggtgatnggcccgcgcggcgccgcgacctactccgcgctcttcggcgaggcgcggctcaccatgcgcaagaccgccgcgaagcccaagccggcg

SEQ ID NO: 22345 - DNA, 264 bp, Oryza sativa
  Clone ID: uC-osflM202051c03b1
tggtcaaggcgaacgcgactctgtgaccgacctgttctgtctctgctcgccgtcctaggaagtcgcaaccatcctcagccaagagccacaggataacgcaactcacatggcacgcacccatagatagatagagagagggacagagagagagagagatagagctcaggttgcaagcagatagaacgggtccaggtagctccgcaatcaagaagaagaagaagagtgaaggaggaggaggagcaagagcaagccatggaggagccg

SEQ ID NO: 22346 - DNA, 93 bp, Oryza sativa
  Clone ID: uC-osflM202051c04b1
catgacaattaacacgacaaatcatggagagatcagccaccgtctttgtagcgctcaccttgctcgtcgccggcagcgtcgtcgtcgtcgtcg

SEQ ID NO: 22347 - DNA, 349 bp, Oryza sativa
  Clone ID: uC-osflM202051c05b1
atgtttcctaaattgtgacatggtatcagagcaagagcaagggatcaaaccctaacgtcgatccggagtccacgccggcacgccggtggcagctcgccaccggcgagcccatccaatccgtgcacatgctcgtcagcttcgtcgtccaccaccgtcgagccgtcaatcgtggcagccaatcgtttcgtcgttcgtccacaagcagcaagcagatccagtcagcacaagcaacaagcagcatcaagcaatcaaatccacaagcaagcagcggatgcatgaacaagcattcagatccagttcttcgtcaccacgtcagtcgtagccaggccgtactcgtcgcggatcttgt

SEQ ID NO: 22348 - DNA, 309 bp, Oryza sativa
  Clone ID: uC-osflM202051c06b1
gttctagatcgcgggccgccatcctcatctcttggggggtaaccctagacgagcgaccatggccaccatgccaagcactagcgcgtacttctcctgactatgtctactcctccacagggacaggaggagcagcaagagagccagactgcctggccccgcccaacgtttgcgggatgggcgcaccttcctcctggagagagtctcccaccagggactgcgaagcgccctccaggtcgacgttctaaccatgctggtttagcttgctggagatggaaataatcagaggctacaaccaccaaggagattcaa

SEQ ID NO: 22349 - DNA, 234 bp, Oryza sativa
  Clone ID: uC-osflM202051c07b1
actcgagccaatccgtcgaagaaggaagcagcggcgatggcggcgaggtccggcgaggtgcgggcgacggtgctgggcatggcggtgctggcgctgcttctgctgctcggccaccacgcggcggtcatcgaggccaacgtcggcgtcacccgccaggtcagtttcagactgaactgctgttccttttccattctttttctcttttacttccttttctcttttcattcttttctt

SEQ ID NO: 22350 - DNA, 92 bp, Oryza sativa
  Clone ID: uC-osflM202051c10b1
acctcgggcgctcgccgacacgaagaaacagcaaggggagggcgccaaggccgggagaggaggagggcagcacgagcgcaaggaggagggaa

SEQ ID NO: 22351 - DNA, 414 bp, Oryza sativa
  Clone ID: uC-osflM202051c11b1
tcttgcactcccaactcctctcctctccttcccactactctcgcgaggaggaaagcgaagccaagcgagagaggcttccgccgtcgccttccccttcgccttccgatcggtcgcgaggtttcaagatggcgacgtgcacacttgcaacttcatgtgtgtccttgagcaatgctagaactcaggcctccaaggtggcggcggtcaagagcccggcatctctaagcttctttagccaaggcatgcagtttccaagcctgaaggcctcctccaagaagcttgactgtctcggcaatggctacctacaaggtttagctcatcacaccagaagggcaagagcacgagttctaggctccggatgtcacctacattcttgatgccgccctgaccgctgtagtagagctttcctacttatgc

SEQ ID NO: 22352 - DNA, 100 bp, Oryza sativa
  Clone ID: uC-osflM202051c12b1
accgggccggaatggccggaacgacaccacgcgttcgttgcaccaacaaaaccaaaagggagggggggctaaataaaaaaaaccggccaaacccaacaaa

SEQ ID NO: 22353 - DNA, 76 bp, Oryza sativa
  Clone ID: uC-osflM202051d01b1
gcctggcccaggccctgatgtcagcgggctactcgctgtgcctctgggacctgcagcacttcatggtgctcctccg

SEQ ID NO: 22354 - DNA, 378 bp, Oryza sativa
  unsure (1)..(378): unsure at all n locations
  Clone ID: uC-osflM202051d03b1
gtcctctccttttttttttttttttatcataaaaacgtgcaaggtgtatgccatttccattctatgaacagagtaacacaggctgcatcgcttgtctgctcggtgagcagtagacaaggtgagtttgggcatttcatgtggttgtatgtggaacatttgtagctgaactgaacgactacaagacacattgaatcagaaccaggcaaggagcttttgctgctcacttgctcaggcgagctcactgtaaccgtgcagatctatgtacagtgcaacaagaagatgatggtcttcatcatgtttgagccaatgcaacgcttggggcggccttgaactccttcaccgccttcttgacggcttgacgncgatgtcgatcagctt

SEQ ID NO: 22355 - DNA, 433 bp, Oryza sativa
  Clone ID: uC-osflM202051d04b1
ttgttgagagagcccccctacgacgacgacgaccatggcgctcgcctgcacctgcgccaccgcgtccgcggccgtgctcaagacgcccttcctcggggcgaagcgcgcgctcgccaatgccgtcggcgtcgcgggcgccaagcccgcgccgcgccgcgcgctcgtcgtgtcggccaagaagtcgtggatcccggccttcaagagcgacgccgagttcatcaacccgccgtggctcgatggctcgctccccggtgacttcggcttcgacccgctggggctgggcaaggacccggcgttcctcaagtggtacagggaggcggagctgatccacgggcggtgggcgatggcggcggtgctggggatcttcgtcgggcaggcgtggagctggcggcccgtggttcgaggcccggggcgcagacggaggccatcgcgc

SEQ ID NO: 22356 - DNA, 259 bp, Oryza sativa
  Clone ID: uC-osflM202051d09b1
tcgtgcctcagctgtggccgggccgcgcccgagcgtgagcggactacagtggcagcttgctagctcacaggcgtggctggccgccgcccgccgcgcgcgcgatcggtggcgaggcggagatgctgcgggcggcgaagtacctgctgggttcccctggcgccaacggcttcggctccaagtccaccgccgaggacgtatgccccgacctcggctgcatcaccgccatcatcacaggcgcgacgtccgggataggggcgga

SEQ ID NO: 22357 - DNA, 494 bp, Oryza sativa
  Clone ID: uC-osflM202051d11b1
tcgtaaaaaggaagagcaagaagaagctctgaaacaactaaggaagaatctggttattagagcaaaacccatgccaagcttctatcaagagggtcccccacctaaggttgaacttaagaaggtgcctccaactcgtgccaaatcaccaaaattgacacggagaaagagctgcagcgatacccctcatacaccagagggtaaaaatggaagtgcagcatgttgccggttacatcgtcacagtattgggaactccaaagaagttaacagcaggacccaatgttctccgaagagtgctccaaagactggagtagccgcaaaacccagagcgaccaagggcgtcatgaagaatgtgggaaagccaggtgctgcgaatgttgctgtacaaacctaactcatgatccattcccattcccgtgcaatttttcgatttaatttattccttacatcgccgatgacggcatcattgtcccgaccacagtgagtttgttgctgga

SEQ ID NO: 22358 - DNA, 519 bp, Oryza sativa
  Clone ID: uC-osflM202051d12b1
gtcgttggcaccttacttttccccttgggcgctaatggtcactatgtctcagcagcaaagtttgtgaatgcaaatacgctgactattccgacaaagttagaatcaggcttcaagattgaaccacgggttctagctgacacacttgagacagtatctaggccatgggtttatatttctggccccacaattaaccctactggtttcctgtacagtgacagtgatattcaagagctcctttctgtttgtggtaaatatggagctagggtagtaatagatacctccttctctggtctggaattccaaactgatggctggagtcgatggaatttggaaagatgtctttctgctgtgaattgtccaaaaccctcgttctctgtagctcttctcggagaactgtcctttgagctgactgctgcagggcatgactttgggtttctgattttgaatgactcatccttggttgacacatttcacaggttccaagcttgagtccgtcccacagtacgctgaaggacactt

SEQ ID NO: 22359 - DNA, 302 bp, Oryza sativa
  unsure (1)..(302): unsure at all n locations
  Clone ID: uC-osflM202051e03b1
ttagtcataatccatccatggaagccaccggcacacggctgacgcgctccgcctgcctctgcccacgcctgcgccgctcccccacagccttgtgcgtctccccgcgcagcatgcatcatcatcatcagcagcagcagcagagcctccgccgcgccacctgcgacgccgacatcgccagatccgcgcccgcgacggcatcatcgccgctgcccctcctgctgcgcgacatcctggaggaggaacgtggncgtggtnggggacggcgccgggcgcggcaggggcaacgacgacgacgacaagac

SEQ ID NO: 22360 - DNA, 231 bp, Oryza sativa
  Clone ID: uC-osflM202051e09b1
tcgtgcgaggcggggtggctgaaggctgtggctgctgactcatgtagaacataaagcaatctttccacaagaacgtgctcgaatccaaaaggctggaggatctgttggccctaatggcagattacaaggtcgcattgaagtatctagagctttgggtgatcgtcagtttaagaaggttgggctgattgctacaccagactctcacttctttgtagtaacgtgataagatca

SEQ ID NO: 22361 - DNA, 143 bp, Oryza sativa
  unsure (1)..(143): unsure at all n locations
  Clone ID: uC-osflM202051e10b1
gttaatttctcatcttttcgctctcgatctcctacagaagcaatagtagccagcaaatcaatcgatcgatccgtacaatggcggccctgaagatgaacaggatggccgtggcggcgctgttnctcgccgtcgtggtggtggtg

SEQ ID NO: 22362 - DNA, 366 bp, Oryza sativa
  unsure (1)..(366): unsure at all n locations
  Clone ID: uC-osflM202051e11b1
tctgtacggacacggccacaccacccaccaactgagagctgagcaggcgagcgagcggacatggcagcatcgctccaagccgcggccaccctgatgcagccggccaagctcggcggccgggcctgctccgccgcgctgccatcgcgcccgtcttcgcacgtcgccagggcgttcggcgtcgacaccggtgccgccggcaggatcacgtgctccctgcagtcncgacatccgggaggtcgccaacaagtgcgccgatgccgccaagctcgccggcttcgccctcgccaccttagctctgctcgtctcgggcgccagcgcggagggcgtgcccgggaggcttaccttcgacgagattcagagtaagac

SEQ ID NO: 22363 - DNA, 203 bp, Oryza sativa
  Clone ID: uC-osflM202051e12b1
tcgttctcagctgtcacagatcactgcatcaatggacggggccaccatggcgctcacctacccggagatggcccgcgcggcaccgtcgacctcctccgagctctggggcgaggagcgaaccaccatgcgcaggaccgccctgaagcacaagcaggctgcttggtttgacgagctgacgatcgaatagaagaggacagctaacg

SEQ ID NO: 22364 - DNA, 500 bp, Oryza sativa
  unsure (1)..(500): unsure at all n locations
  Clone ID: uC-osflM202051f02b1
tgtagttttcccgcaggcggagctctctctctctctccggcaaatcggcgaggatggaaatgttctttggcagttttcttaatgaatcagcatcacaagagtacttctctggtcgtccaaatgtcgagagatgcccattcctgagaaacatcaatggagctacaacattttcattttcttctgctttgccagtagctgcccgaggagccaagggtccaatttttgaggacggaccaggctttgattcagcatttaaacttttccatggacgggatggaatagttccgctttcaggaaagtcatatgtacctgatgagaacaacagcgagagcgttgatgccaagcctgaacctgctctgccgtttaacccattggctgctagagctgccacaataagtctatctgcatttgggccattcngctgtaacttctttaatggcaagggcaaaaggcagaacatgaagctcaacaatctaaatcagtcaaacaagaagcccagc

SEQ ID NO: 22365 - DNA, 635 bp, Oryza sativa
  Clone ID: uC-osflM202051f03b1
ttcctcgtcgctcccgtcccaggggcggcacggacggttccttatacttctccgccgtctcctcccttctcctcccctttgactttcctctcttcctttctgtctcttcttttttctcctccctttccattctctttcctctcttttttttcttctttttttttttcttatttcctttcccttttttatttttttctttttctttttttttttttcttttttttttttctttaattttttcttttttttcctttttctatcttttttttttctttttttctctctcttattttttatttctcttttctttctcttctttccctcttttcttcttctacttctttctgtttctttttttccttctctatcttcttcctttcttttctcctatttctcttcttttccttctttcttttttcatatttctctctttctcttatctttttcttttctctttcttattcttctttcttttcatctcatttctcttctctcttttttttcctctctcctttcttccttccttttctcctttcttgtccctctctttcttctctctctttttttcttcccccttttttcttctttcttatttctttcttccttctctcttctttctttctccaccttttcct

SEQ ID NO: 22366 - DNA, 505 bp, Oryza sativa
  Clone ID: uC-osflM202051f05b1
gtgatgctctagtcagagaaacgaatcctctcgcgtcctcaagatgcagatctttgtgaagacattgaccggcaagactatcaccctcgaggtggagtcctgtgacaccatcgataatgtcaaggctaagatccaagataaggagggcatccccccggaccagcagagtctcatcttcgttggcaagcagctggaggatggcaggacccttgctgactacaacatccagaagcgagatacccttcactttgtcctgcagctccgcggtgtgaactatacctgaaagcaagatgaggaccggcagacccttggtgactacaacatccagaaggagtcaacgcttcaccttgtccttcatcaaacaggaaggatttaaaatctttgttaaagacttttaccgggaagaccatcaccctcgaggtggagacttctgataccatcgacaatgtcaaggccaagatccgggacatggaggcattcccccgtaccagttacccttattttt

SEQ ID NO: 22367 - DNA, 108 bp, Oryza sativa
  Clone ID: uC-osflM202051f06b1
gcgtacggcacgccgcaacacaacgcgctcgcctcgcctcgccccgatcggtggtggtgctcgccgtcaccgggcggagctagggtggtcggagaggctacagagagt

SEQ ID NO: 22368 - DNA, 458 bp, Oryza sativa
  Clone ID: uC-osflM202051f07b1
ttgttaatctctcgtgaatgcaagagttttaacctacctaatgcaaaactgagttttcttccaacgattaacaatgaccattggactattttctgcttcaacttcaaccacaaacgaatcgatatacttgattcattaggacatgacagagacgagaaagctctaaaggctatgaaagacagagtggttggtaggttccttgatgttcttgatgtgatgttcccaaagaagttcacagatgttaggaagtggaaatgctatcatgcttgtaaccaaaagcaagtcttgacaaatgattgtggctttttagcgatgaaacacattcagttctgggatggccaagtttttgtgaagaaagtttgccctaaggatggaacaaaatatcggggggaggtcctctattacatactgttccacccactgaacgaggcgaagcttcctgcggctattgagcgata

SEQ ID NO: 22369 - DNA, 367 bp, Oryza sativa
  Clone ID: uC-osflM202051f10b1
gctgaagtactacatgatactaaacaggagtacaacgcgacggtggagttctactgggcgccgttcctggtacagtccaactcggacgacccgcaggtgcacagcgtacgtgacagggtcatcgcgtggcgctccatcgcaaagcacgccgccaactggaagggcgtccactacctcgtcttcaatacctacatctggtggctcaacaacttccagatcaaagtgctgaaaagcagaggtgctccgtttgcgggcagcggggtggtggagcagccggtacgcgctggtagaccgagcgatcgcctacagggaggtgctaaaggacggggccaagggggtggacagtggtttcgaccccaacaaaacc

SEQ ID NO: 22370 - DNA, 507 bp, Oryza sativa
  Clone ID: uC-osflM202051f11b1
tcgttaggacaaagagggcatccccccagaccagcagcgtctcatcttcgccggcaagcagctggaggatggcaggacccttgctgactacaacatccagaaggagtccaccctccaccttgtcctccgcctccgtggtggcatgcagatctttgtcaagacactgaccggcaagaccatcaccctcgaggtggaatcttctgacaccatcgacaacgtcaaggccaagatccaggacaaggagggcattcccccggaccagcagcgtctcatctttgccggcaagcagcttgaggacggcaggacccttgctgactacaacatccagaaggagtcaacgcttcaccttgtcctccgtctcaggggaggcatgcaaatcttcgtgaagactctgaccggcaagaccatcaccctcgaggtggagtcttctgataccatcgacaatgtcaaggccaagatccaggacaaggagggcattcccccggaccagcagcgcctcatctttgc

SEQ ID NO: 22371 - DNA, 143 bp, Oryza sativa
  Clone ID: uC-osflM202051g04b1
gaatagaaaaaaaaaaaggaaaatcgtgtctcgtctcgtctcgtcttcgtctcccccgattcccgagcagcttctcgaaaccctcgcggcctcgattccggcgatggcggagcccaacccgcaagtggagagggaggtggagg

SEQ ID NO: 22372 - DNA, 81 bp, Oryza sativa
  Clone ID: uC-osflM202051g06b1
ctcgttgtggatacctaggaacccagagacgaggaagtttttttcaagcaaccaactgcttacaccagaagaaaataatcc

SEQ ID NO: 22373 - DNA, 161 bp, Oryza sativa
  Clone ID: uC-osflM202051g07b1
tcgtcctcagcagcagcatcaggggaagggtctagaagcttctagaagcttcttccgagatgaaggtgatcgagaagatccaggaggcggcggcggatgggcggacggagttctcgttcgtgtacttcccgcccaagacggcggaggggctcgacttctct

SEQ ID NO: 22374 - DNA, 360 bp, Oryza sativa
  Clone ID: uC-osflM202051g09b1
tcgttctcgcccccgcaccaccactccctcctgctgcatctgctccgctcccgatctcacaaccaccgactcctcctcctcgcgcggcggcggcggcggcgtgagccagcagcagccatggtgctgttctcggtgacgaagaaggccaccacgcccttcgacggccagaagcccggcacctccggcctccgcaagaaggttactgtattccagcagcctcattacctgcagaactttgtgcaatccacatttaatgcccttcctgccgacaaagtaaaaggtgcaaccattgttgtgtctggtggaaggcccgtatttcttggaggatgctgttcagaaccataccaaaatgggtggccg

SEQ ID NO: 22375 - DNA, 153 bp, Oryza sativa
  Clone ID: uC-osflM202051g10b1
tcgttcgcctcgtcaccactccgatctcttcacctggatcctgcgccaaaccctagccccgcccgcgagcgccgccctcgccggctcgccctcagggggttgcgagagagcggaggctgtggcaggggcgcgccgccgtaggtagggtatgag

SEQ ID NO: 22376 - DNA, 301 bp, Oryza sativa
  Clone ID: uC-osflM202051g11b1
tcgtgccccttcttctccttcttcttcttcttcttctccctcaccatcaccaacaagagagaggaggagtggattcatcgatcgagaagtcgaggtagtacatacgttggattggattggaggaggagaatgcctcgcggtgggttctcggggtcgataagctcgcccaggatcgacgtcaccatcgacatggggaaccccttcctaaaccgcaccgtcgacggcttactcaagatcggcgccgtccgggcgtgcaaggagatcgtcaaagacacatttgactgccttcacagaggggatg

SEQ ID NO: 22377 - DNA, 134 bp, Oryza sativa
  Clone ID: uC-osflM202051g12b1
gcctcggggcggtttcccccaccatttccccctcctggatctgggcctcctccccgcaagcgtgcgcctcgcattcccaccgagcgtgcctacgtgctgcgctttgctgtgctgcgggaggatggagggtgggg

SEQ ID NO: 22378 - DNA, 307 bp, Oryza sativa
  Clone ID: uC-osflM202051h02b1
cgttcttttcggaggagctctgcctgaccatcaacccagatgaatgtgatggttatggtgctgctgtccaggttgccatctggcgtgacgtgggcctcgtgaaggtgcaggacctccttctggtgaacttcatgcttctgtctcttgcgacggagaccagttgcttggacatgagcgacttgatcccaaggaacaggaccattgccaccaagaaggagcaggtcttctccacctactgtgacaaccaggctgttgtgctgatccaggtttatgagggtgagaggaccaggacacgtgacaacaacct

SEQ ID NO: 22379 - DNA, 379 bp, Oryza sativa
  Clone ID: uC-osflM202051h04b1
ttagtttgaagctgatgattttgatgatagcttaaggatcttgccaaactcttgtgttgggagtagttgcttgcagatcgagctgcaaaggtcccattttgcttctccatctgagcttggttaggttgcgtctgagtacacttctgaggcttctttggtcgttttggcctcgagctccgttcttaaactctgcctcgatcgatcgatctcatctcatctgcgctgttcttgttgctgttgctgttcaattttgagaagaaggtgccgatcgagttgagccgatcgggttcagtgaaattcacttgcgtttttgagagaattgcttgagttggtttcggttcttgagatgtttctgagatcgaaggtccaggagatgatc

SEQ ID NO: 22380 - DNA, 199 bp, Oryza sativa
  Clone ID: uC-osflM202051h06b1
caataccatttcccccatttcctcccctcccctaccctaccatggacttctccggcggcagcggcggcggcggcgtcacgtcggggaggctgcaagcggagcggcggctccagatcacccacaagctccttgcggcgccggaccacagaggacactggcgcagatccgcgagccgctggtcaagaaccagggtgccacc

SEQ ID NO: 22381 - DNA, 299 bp, Oryza sativa
  Clone ID: uC-osflM202051h07b1
tcgttacggtggaacgcgtacttacccacaagttaggtgcatgccatggcaccattcatggcgtgcgcctcgccaccggtactcacgctggccctgctcgcgtcgtgcggtgcccttctcgccacctgcatgctcccggcgcgtgcgacggcgggcagttgcttggacgtcggcgacatggtgatgatggacaggttccgcgcttggcagggagctcacaaccggtcgtacccgagcgcagaagaggcgctgcagcggttcgatgtgtaccgacgcaacgcggagttcatcgacgccgt

SEQ ID NO: 22382 - DNA, 448 bp, Oryza sativa
  Clone ID: uC-osflM202051h09b1
tctttttctcttaacttgttaattcgacgggaggctcgtgagttctccagtgaactccgtgctggttcaaaggcatcgaagagcagtacaccattatttgagggtcctgcaagtgcaaaccagtcgattagtattaccgatactactgcagacgcatactgcaaaatgattacggttttcattccactgcttgttgacgagagctcattctttgcacattttatgtgctttgatgttgctgcgctagctccgtcagatgaatcagataacaataatcctgttgctgcttcagaacctcctggaagcagtgccaaaccaattaacagttcagctgagttgggagtactaaaccaattccttcaagagttgcttgatggtattcaggaggacttctatgctatagttgactgggcattcagctagatccttgagttgtatatcaatgcat

SEQ ID NO: 22383 - DNA, 319 bp, Oryza sativa
  Clone ID: uC-osflM202051h10b1
acctgacgcgcacatcgcctccgccaccgccatggccgcgccgtgcaggggcagccgcggcgccctcccgctcctcctcatctccctctccgccgcctacctgacctacaccgcgctcctctcctcccgctccctcctccccctccccaccgtctccttccccggcgccaccgtctcccgccgcctcgcctcgggccgcccgacggcggcggcggcgtatcacactccggtctccacattcctctccctctacatcacgacatttttccattctcttgaccctccggcttttttctaactttttaccgctcactcttcc

SEQ ID NO: 22384 - DNA, 301 bp, Oryza sativa
  Clone ID: uC-osflM202052a04b1
ctagcgagcagctagctagctgcggcgatggcctccagagcggcggcggtcgccgtcctcctcctcgccgtggcggcggcgccgctcttcgccccggcgagcgcgcatggccgaggctaccttggtgccaagtcctggcctcctgacggcagcctgagctcatcaagctccggcgaggctgcagcggcggacgtcgacgacggccacacggactggaagtgctactcctcctgcatgagcaagtgctgtcaccgccacgacgacgacgacgacgacaaggccaatgccaaggccaacgcca

SEQ ID NO: 22385 - DNA, 220 bp, Oryza sativa
  Clone ID: uC-osflM202052a05b1
ctaatcatggagagatcagccaccgtctttgtagcgctcaccttgctcgtcgccggcagcgtcgtcgtcgtcgtcgtcgacgcctgcgacggcgtgccgaggatgtctgccgcagaggcctgccagcacggcaactgggtccccggcgatgtcgcggccttgctcacaaacgctgggaacctcgtcggactagcaggacgcaaccgacttcatggtggcc

SEQ ID NO: 22386 - DNA, 434 bp, Oryza sativa
  unsure (1)..(434): unsure at all n locations
  Clone ID: uC-osflM202052a07b1
tttttgaaaggccaaattcctcagtcgcttcaaacatttccaaatggctcattcttggggaatcctggattatgtgggccacctctagctaaatgcttgcttcctgattcaccgacgccttcaccagcatccccttcatcagcaccaactccaatgtcagcgcatcatgagaaaaagtttggcgccggattcataattgcagttgctgttgggggcttcgcagtactgatgtttgttgggcttgcgcggctctgngcngcaactcaaagaggacaggcaagaaagagagtggtgtggacttcacgggccagggcactggtgtcagaagtgagaagcccaaacaggagttcagtaggggcgttcagatcgccgagaaaaacatggtggttttcttggagggttgcttctataccttcgatttggagggatctact

SEQ ID NO: 22387 - DNA, 229 bp, Oryza sativa
  Clone ID: uC-osflM202052a10b1
tgctcagcagccaccatttgtgttgttacttggtaggattgaagaaatatggccattgatctgaaagctgcttttcatgtgtgtgggcaaagcattgataaaataatgtgacattgtgatttcagcacggcacatgaataccaagggagaagattgggtgaaccagccagggtgggaaaatattttaagttggtatgcacaaatattgtgagcctgatataataatcag

SEQ ID NO: 22388 - DNA, 269 bp, Oryza sativa
  Clone ID: uC-osflM202052a12b1
tgagaagcaaccagacactgcacacatcatcatcttcttccccgaaacccggtgatcttgggttagcttagctagctaaattaaagctgggtgcagcatggggcttctcgaccaggttttggaccaccccggtggccgggccgcggccggactccggccttggcaagctccggaaggaccccttctttttccctttcttcttctcttgaccgatgggggggtcgccgacgcccatttcggcggcggcggcggcggccgacccgccggcc

SEQ ID NO: 22389 - DNA, 324 bp, Oryza sativa
  Clone ID: uC-osflM202052b02b1
tttaaaagctctcctcgttcgtctcctcctcctccccttctcattcccaaaatccaccaaatcccggcagcaaggcgcgatctctggcgcttccgcggttcgcgcgatccccgatcggtccgcgccaggggcgctggtttcatggattggagttgctgggacggctcttcgtgggaaccctcgtgctgacctgattcgtttgggcgtggttgatttgggtcttagtttttggtggactttgagtccctttgcgggtggctcttgtttgtaggctgtgattggggaatcctgggaggttgtaggaatgggattttctagattgct

SEQ ID NO: 22390 - DNA, 325 bp, Oryza sativa
  Clone ID: uC-osflM202052b06b1
tgtttgactcccgaggagtatgaaaagaagggggaatcggccaggagcttcaattcttcggcactacatggaataataaaggcctggaatgctcttgattaccatgattttattaattcatcgataacccttctcacaaagtttcctgaagtatacgacgagtgccgaaatacatggcaggcaatagtagttgatgagtttcaggatacaagtgctatgcaatattatcttttaaagacactagcatcccacaaccgcataactattgttggtgacgaaaatcagtccatcttcagtttcaatggggctgatgtctctggctttg

SEQ ID NO: 22391 - DNA, 360 bp, Oryza sativa
  Clone ID: uC-osflM202052b07b1
ttcacttctccccccggaatatctccgccaagagaagagaagagacacccaacaacccaaaacctagcgcctctgcgctcgaggcccccccgaatccgcgaatccgccgactcccatggcgagccagggagagccctcctcctcctccgatccgaaggggaagaaggatttctcgacggcgatcctcgagaggaagaagtcgccgaaccggctggtggtcgacgaggccaccaacgatgataactccgtcatcgggatgcaccccgacaccatggagaagctccagcttttccgcggcgacactgtgctgctcaagggtaagaagagaaaagacaccatctgcattggtcttgctgatga

SEQ ID NO: 22392 - DNA, 186 bp, Oryza sativa
  Clone ID: uC-osflM202052b08b1
tttgacgcgtggggggctgtgaactgtagaagcgcccttgtctatgaacttgtttggacatgtttctctcgtcgatgttgagagatctcttttgagatcagctgatgtttctcattaactttacgctactgctaccgcaaatgtgattgtagactcgtatagatgctttttattcatgtttccttt

SEQ ID NO: 22393 - DNA, 285 bp, Oryza sativa
  Clone ID: uC-osflM202052b12b1
gccgaccacacccgcccgtagctctcctctagccggtgcacccacctgggctcccaagatctcacctttgcaccccctccgcccgcgacttgagccgggcctgtcttcccccggccggccccgtcggcgagcttctccggatcgaccccgccgaactccgctcgcccttcgagctgaagaagcagatctcgtgctcgatgcagctatcgaatctcagggacgactacatggccttcaaggtgaaacctccaggccaaaagaagtatacggtgcggcctaacacag

SEQ ID NO: 22394 - DNA, 506 bp, Oryza sativa
  Clone ID: uC-osflM202052c01b1
tctcactccactaaccagagagagaacgcagctagtagcattattagcatcatgaccgcgatggcggcggcggcggcggtgttggtgtcgttgctgctggtggcggcggctgcggggcagcaggcggcgctggtgccgggggtgatgatattcggggactcggtggtggacgccgggaacaacaaccggctggcgacgctggtgcgcgccgacttcccgccctacggccgcgacttcccggagacgcacggggcacccacggtgcggttctgcaacgggaagctggccaccgactacaccgtggacaacctggggctcaccttctacgcgacgtcctacctaggtcaggtcgcccagtccgacaaccgctccctcctccacggtgccaacttagcctacggcgcctacggctacctggacaccaccgactccctctacggggcgatatcgctgagccggcagctggggtacttcaaggagtacaagacgaaggttgaggcggtggc

SEQ ID NO: 22395 - DNA, 523 bp, Oryza sativa
  Clone ID: uC-osflM202052c03b1
tttccgccgccgccgcagcctcctcctctcgccatctcccgtcctctccttcaagtcagctacctgcttaatcaaccatgggtaaggagaagacgcacatcaacattgtggtcattggccacgtcgactctggcaagtcgaccaccacgggccatctgatctacaagcttggaggtatcgacaagcgtgtgattgagaggttcgagaaggaagccgctgagatgaacaagaggtccttcaagtacgcgtgggtgctcgacaagctcaaggccgagcgtgagagaggtatcaccatcgatattgccctgggaagttcgagaccaccaagtactactgcacggtcatcgatgcccctggtcaccgtgacttcatcaagaacatgatcacgggtacctcccaggctgactgtgccgtgctcatcattgactccaccactggtgttttgaggctggtatctccaaggatggccagacccgtgagcacgctcttcttgctttcactcttggtgtgaagcagatgatct

SEQ ID NO: 22396 - DNA, 511 bp, Oryza sativa
  Clone ID: uC-osflM202052c07b1
tggctttatgtgttatgtctattttctgcccaacggtgatgtagacttaatacataataattttaatgttaattttgttctcacaatacatgattatctcagatggctactccttgatgggttacattaaagatattccgaccctgaaaggagataactacgaagaatggaaaagagaactcgaccttgcttttatcttgggagaggtggactgggtgttgactaccccatgtcctatagaacctgctgaaattttcagaggtgaaaaagagtcagatgctgaatggcaaaagagagagagggacaatgcttccctcatcatgtcgtatgacattgagcatgcgaaatggtcttcagccaacaagaattgtttggctgcggtaaagaacacgattgagccaaccatattgggctcaatcccagagtatgacactgtctctaagtacctcgaaagtataaagagcccgtttactggttcttcaagttttatgcgacacagctgataaagcag

SEQ ID NO: 22397 - DNA, 254 bp, Oryza sativa
  Clone ID: uC-osflM202052c09b1
tcgattctgcccatggcgacgccgccgcacgacgcctcgccggccccaccaaaccctaaccccgtctccgacgaccccccgccgccgccgccggtgacggagacgaagccggagccggagccgcctctccccaccacctcgatcgaccccaccccgtctggcgacgaggagagcggcgatgactcctcgtcttctgtctcatccgcctcgtctacttcgcccacggccgccgcggctgctgctgctgcgggagg

SEQ ID NO: 22398 - DNA, 200 bp, Oryza sativa
  unsure (1)..(200): unsure at all n locations
  Clone ID: uC-osflM202052c11b1
tctccttcatgctctgcctcctcggcggcttcgtcgccgactccttcctcggccgctacctcaccatcgccatcttcaccgccgtccaagcctcgggggtgacgatcctgacgatctcgacggcggcgcccgggctgaggccggcggcgtgcgccgcggggtcngcngcctgcgagcgcgcgaccggggcgcagatgggg

SEQ ID NO: 22399 - DNA, 391 bp, Oryza sativa
  Clone ID: uC-osflM202052c12b1
ttgcacactgacattcttcgagttccattcaggagtgagaatggtatcctccgcacgtggatctcccgttttgatgtctggccattcctggaaacatacactgaggatgttgcaaacgaaattatgagggaaatgcaagccaaacctgatctcatcattggcaattacagtgatggaaaccttgttgccactctgctggctcacaaattaggagttacccagtgtaccattgctcatgccttggagaaaaccaaataccccaactcagacatatacttggacaagtttgacagccagtaccacttctcatgccaattcactgctgatcttatcgccatgaatcacactgatttcatcatcaccagtacattccaagacattgctggaagca

SEQ ID NO: 22400 - DNA, 463 bp, Oryza sativa
  Clone ID: uC-osflM202052d01b1
ttgaacatggagctccacaagtacatgaacaattctttccagcacatcaaggccatgtgtaaatctcatgattgcaacctgaggatgggggcgttcaccctgggagtcaaccgggttgcacgtgccaccctcttgaggggatgggaggcatgaggccattaacaacactcatatccatgtccgaaaatgttggacgaccaatgtctgatctgataaattcatcagaagtggccggcttggaaggagctcacttgcaataatattcaagatagatcggcgtcggcgtccttccaccgttccggcgaaaaataataataaatatattaagggtacctaacaaaaatgtgatgtttcttctttcgtttttacaaaaggccgattcaatcgtgcgtgattatagtattgacaaaaaatggtgtaagctctagaggcaatttgaatttcacaaaggttgtattctgtc

SEQ ID NO: 22401 - DNA, 490 bp, Oryza sativa
  Clone ID: uC-osflM202052d03b1
ttgacgcgtgggctctacccacccaccctctcgccgtcgcagatccgatccaggaagagctcgccgccgccgctgccatggcgctctccgtggagaagacctcgtcggggagggagtacaaggtgaaggacctctcccaggcggacttcggccgcctcgagatcgagctcgccgaggtcgagatgccggggctcatggcgtgccgcgccgagttcggcccctcccagccgttcaagggcgcccggatctccgggtccctccacatgaccatccagaccgccgtcctcatcgagaccctcaccgcccttggcgccgaggtccgctggtgctcctgcaacatcttctctacgcaggaccacgccgccgccgccatcgccagggactccgccgccgtgttcgcctggaagggggagaccctcgaggagtactggtggtgcaccgagcgctgcctcgactgggcgtcggcggcggccccgacctcatcgtcgac

SEQ ID NO: 22402 - DNA, 323 bp, Oryza sativa
  Clone ID: uC-osflM202052d04b1
tttaatggtaaacttatgtatatgttgattactatgcaagcatagaaataaccaagctaaggctgtaaggcataactaattcccatgaagtcatgattatggtgaacatcccggtcataattagctcccatacagccatgctcatgtccagttcttttctttgaggcatgactcatgatgtgccatcatgtgatgttgttataagaggcagttcaactctaggatattatttccgatgttactatgaggtgatataagttgcttagataatgtcaaactaattaatgcaaaaaaaaacttctgcaccttgctttgcctacaag

SEQ ID NO: 22403 - DNA, 226 bp, Oryza sativa
  Clone ID: uC-osflM202052d07b1
tacttgcttggctactactacttcaccacgcacagctggttggttggttggattagctagctactaggatcagtgcttcgcttctctctctctttgcgttgccgtcgtcgtcgccgctggtggtggtggtggccgatgaccaggctgagtgagcggcggatggagggccaccaggcagttgttggagcctggcgcccctttcggcaggtgggtggtggagagcctt

SEQ ID NO: 22404 - DNA, 179 bp, Oryza sativa
  Clone ID: uC-osflM202052d08b1
tagcctcttctctctctcgtttcgtctcgtactcttgcttccccctcaattccccccctcctcggacccccgcgtcgccgaattgggcgcctgattcggcgtccccccgccgcgccgcggccggatcgaggcgccggagggtgccgctccggtttgctcctggggtggcggccgcgggg

SEQ ID NO: 22405 - DNA, 380 bp, Oryza sativa
  Clone ID: uC-osflM202052d09b1
tgcgtcgtgtcgcgttcgtgctcgtggccgcgtagcggagtacgctgctgcgcacgcattgatttcatcccaccatctcgtggtacgtacacgtccgtctccgtccccatggcgcgcggctaaaacgagctctcgacccccgaaatagcccggcacaaacacgcaccacccgcccgcgcgcctacgcctaccgcgcaggaggcagggcgagcgagcggcctccctccctcgctgctgccgcgcgagcgcgccgacgctgctcgatcttggttttcgcctgtccgggggcgggcgagatgatgaagctgcgttggtggcgggtggacgcgtcggaggtcgcggccgtaacggcgatgggcgtgtgggaggccgtcctcgcc

SEQ ID NO: 22406 - DNA, 296 bp, Oryza sativa
  unsure (1)..(296): unsure at all n locations
  Clone ID: uC-osflM202052d10b1
tgttgggccggagcaaaacacagaccgttggatacgaaatggacggcccgaacgagacccaggatataatacgcagcgcagaagaaaatcaaacggaccaacacgaaaaccctcctcctccgcccaaccccattccttctcacccactctcttctcccgccgccgccgccggaggaggcggctcctcgtcgtcggcctcgacgaccatggcancggatcgtgtcgcgcgccctcccgttcgcctcgcgctcgccgcagctcgggcgcggcgctgatacgctcggcgccgatgcgct

SEQ ID NO: 22407 - DNA, 252 bp, Oryza sativa
  Clone ID: uC-osflM202052d11b1
tgttgctgctggggaagtaggcctgctcgcacatggaaaattacctctattgaggattgcaatgtatatgttggaactctggaaactttcatcgaggaaagggacactgtaactaacaagggaccctatgatggggggaaaattgaaggaagaaaccagggtcctgtgcttgcagtgtgggaacctgatctgagggctgagcttcctatactggttgtgcccaccacctaagtaatggtcaagaaccctcac

SEQ ID NO: 22408 - DNA, 344 bp, Oryza sativa
  unsure (1)..(344): unsure at all n locations
  Clone ID: uC-osflM202052e02b1
tttgtagttctggaagacttcaacactggaaagtcatctgcaaatggtggcagccctggcaatgacagtccaggaaatgacaggaaaagggttagaaggccatatcagacaaaaacttttaaagttgagctgaactttgcagcaaaaattcctatgagcgccattgctcaggccttgagaggccaggaatctgaaaacacccaagaagcaattcgtgttattgatatcatattaagacagcattccgcaaaacagggttgccttttggttcgccaatcctttttccataacaatccttcaaattttgttgacttgggngctggtgcgatgggctgaaggggatt

SEQ ID NO: 22409 - DNA, 476 bp, Oryza sativa
  unsure (1)..(476): unsure at all n locations
  Clone ID: uC-osflM202052e03b1
gtcttcgacctccgcgcgcagacgacgctaacgcggaggaaagaaggacaacatacccaagaagagttacagaagaggaatctcagggacgaacttgaggagcgtgagaggaagcactactcgtcaaaggacaagtcctatgctgaggagagagataggcggaaaagcacaagcctactcctagaaggttcaaggagagaggctgaggataagatagttcctagagaaatcgatgcagatgattctgatgtggaacccagaagtgatgatgaaagtgatgaggatgatgacgacgatgatgacactgaagctctaatggcagagcttgaaagaatcaagaaagaaagagctgaagaaaaccttagaaaggaacgccaacaagcagaagaggaggctaagatgaaggaagctgaactgatgcggngaaaccccctgatcaatattaacaacgccggatccttcaatgttaagagaag

SEQ ID NO: 22410 - DNA, 491 bp, Oryza sativa
  Clone ID: uC-osflM202052e04b1
ttttctccaagtccaatcgacctcatttcattcgattcatcgatcgctcggcgcggcttagggtttttggcggcagcgatggcgtcggagaagcacttcaagtacgtcatcctcggcggcggcgtcgcagcgggatatgcggcacgggagttcgccaagcagggtgttaagccaggggagctcgccatcatctccaaggaggccgtggctccttatgagcgccctgctctcagcaagggatacctctttcctcagaatgctgcaagactcccaggatttcatgtgtgtgtcggcagtggaggagagaggcttttgcccgaatggtactcagagaaaggcattgagttgatcctgagcactgaaattgtcaaagctgatcttgcctccaagactttgactagtgcagttggagcaacctttacatatgagattttgatcattgcaactggctcctcagtcatcaagctatcagattttggtactcaaggagc

SEQ ID NO: 22411 - DNA, 440 bp, Oryza sativa
  Clone ID: uC-osflM202052e05b1
tttcttagtactgcgagattaattactcattcctccccgcagtgccatgttcttgagtttctttcggtttttttaatccattttgcaacactctctgtcctgcagccagagctgcatttgctggggatttatactagtaggcggcttcagctttactctctcccctttctgcttctgctgcttctccctttccctctcaacttctcaggtggcagggggggagggtagcatctggcccaagcaaagcgccgggttcttggctctgctcgctttttttcgtggtaaatctgtgtgcaagatctggggtccaaaaggaggggacagcagcacaagggaggagagggagttcttgcgttgggattctctcttcggcaatgaggcccgacgcgaggctggatgcggccgtgttccagctcaccccgacccggaccaggttcgat

SEQ ID NO: 22412 - DNA, 313 bp, Oryza sativa
  Clone ID: uC-osflM202052e08b1
tgccctccgtgcgctggaggagccaacacggaactttgatggcaaaatgctcaatgtgcagaaggctatagatggcaggaccaagaacacacctgggatgaatgcaaattctaaccctagtggtaccgctgcctcggcagcagctgctgctgcagctgcacagatgactgctcctgctactgctgcaattacaccgcatgatgcatcagcttatggtgctactgccgatcctgacttgggtcatgcgcaccaggctgccttgtggtgatcgaatgctttttccataacaatccttcaaattttgttgacttgg

SEQ ID NO: 22413 - DNA, 372 bp, Oryza sativa
  unsure (1)..(372): unsure at all n locations
  Clone ID: uC-osflM202052e12b1
ttctaaagaggctgttgagcttcccttgactcatcctgagctatatgaggacattggaataaggcctcccaagggagtaatattatatggggaacctggcacaggcaaaactctacttgcaaaggcggttgctaattctacatcagcaacatttttgcgtgttggtgggagtgagatgatcccaaagtaccatggtgatagacgacggctttgaagtgtaggatattatttgccatgttactatgaggtgatatacngcccctaattgacgagatatactcaattaatgcccaaaaaaaacttctgcaccttgctttgtctacaagttgtgtatagagcaaggaaatgaacaaagattggcctttaatacta

SEQ ID NO: 22414 - DNA, 526 bp, Oryza sativa
  unsure (1)..(526): unsure at all n locations
  Clone ID: uC-osflM202052f01b1
tttgtccacatgctccatgtgtactaaatctacaaacgtgagcttgcaagagaatacccggttgctgatggaaaactttctcagacatgctatctgatggctcttgattcgtgctataggcaatattgtaccaagtatgaaaagatagtgggagaacaattctcgatttctgatgcagaatactgtgtcttccattctccatataataagcttgtacaaaagagtttcgcccgactttatttcaatgacttcatgcgtaattgcagcacggttgataatgatgctaaagagaagcttcagccttttgcaaatttgactagtgaagaaagctaccaaagtcgtgacttggaaaaggcctctcaacaagtagcaaagcatctgtatgatatcaaagttcaaccatcaactctgcttccaaaacagatcggtaatatgtacactgcatctctttatgctgcattggcatctgtgatctacaacangcatgacagtctggatggccagcgaattctcatgttttctttat

SEQ ID NO: 22415 - DNA, 385 bp, Oryza sativa
  Clone ID: uC-osflM202052f04b1
tccgtcgcagatccgatccaggaagagctcgccgccgccgctgccatggcgctctccgtggagaagacctcgtcggggagggagtacaaggtgaaggacctctcccaggcggacttcggccgcctcgagatcgagctcgccgaggtcgagatgccggggctcatggcgtgccgcgccgagttcggcccctcccagccgttcaagggcgcccggatctccgggtccctccacatgaccatccagaccgccgtcctcatcgagaccctcaccgcccttggcgccgaggtccgctggtgctcctgcaacatcttctccacgcaggaccacgccgccgccgtcatcgccagggactccgccgcccagttcgcctggaagggggagaccc

SEQ ID NO: 22416 - DNA, 405 bp, Oryza sativa
  unsure (1)..(405): unsure at all n locations
  Clone ID: uC-osflM202052f05b1
ttaccatcatgacaatctccaaggaccgtgtcaagccgtccccgaccccggactcgtggaagctcaaggagatcttcgccacgggcatcgtgctcggcacgtacatggcgctcatcaccgccctcttcttctacctcgcgcacgacaccgacttcttcacagagacgttcggggtgaggtcgatcaagacgaacgagaaggagatgatggcggcgctgtacctgcaggtgagcataatcagccaggcgctcatcttcgtgacgaggtcgcggagctggtcgttcgtggagaggccaggggcgctgctgggtgatcgcgttcctggcggcgcagctggtgccgacgtgctncgcggtgtacgcggagggggagttctgcaagatgcggggatcgnggggggtggga

SEQ ID NO: 22417 - DNA, 475 bp, Oryza sativa
  Clone ID: uC-osflM202052f08b1
tctacaatctcctccactcccattccctccatctcccccccacgctcgcgagcttcgcggagtcgggagatcgaccgccgcctcccccaccacacatccgcccgcggcggcgggttgcgcctgcgccggccttctcggagtcccgcctctccactccggctcactctctccgggctagcccaaaggatttaaaatggtagagaatggcgttctggagcaaccaaagggggtgtctcgaaataggccacgtgctcagtcgaatgatcatccagttgatcctggatacctcccagagttgacatgggaacacaagcttagcaatattggctatgatttgccatccttcagacttacatggagagagacattccagttggctggccttggtcttcgtcttggccgacacatccttgaagaaacatcaaaaggacgtgctgctgtgattgatcccatgaagaagcgcattgcaaaatct

SEQ ID NO: 22418 - DNA, 502 bp, Oryza sativa
  unsure (1)..(502): unsure at all n locations
  Clone ID: uC-osflM202052f09b1
ttcagaacagaaatcagagaactgaggacagaaggcaagtaggaagaatctgagctgtctgaatggaagggaaaaacaactagggggagaaaaggaaaggattatccaagctttcgtgtatcatccgagtgtcccttgtatgcaatgggtttgatcaatagaggggtcttcttcaagatcttggccttcctctgcttcatcagatcatctcaaggaagaaatcattttaccacattggatctccctcccctactgaaggcaagcagtttctccagaatacagcatgaggcatatgactacatcattgttggaggtggcacagctggatgcccattggcagcaacgttgtcccagaagtacaaggtgctcttgctggaaagaggagggtctccttacggcaaccggaacatctcacatcttgagaacttccacatttgcttggcagatgactcgccaaattcaccatctcagggatttatctncactgatggtgtcatcaatg

SEQ ID NO: 22419 - DNA, 250 bp, Oryza sativa
  Clone ID: uC-osflM202052f10b1
tcaacgacaacgttggcgttgggaaccgagtggagactagctagtgaagaccagaggcagacatggcgagatcactggcgcacgcgacgctgctcctcgtcgatgccgtcgaggcggcggcggcctgctggaccacggcggccggcgagaacgaggaggtggccgatctatgcgagatgactccagaccaacgggagggagatgacggcggggctgaacctgcaggtgagcataatcagccaggcgcccc

SEQ ID NO: 22420 - DNA, 386 bp, Oryza sativa
  Clone ID: uC-osflM202052f12b1
taaaatgcttagcacaaactgcacagaagactttcagtgactttgaagaagctgttgaaaaggacgcaacaaagaatattcatattgatgggacagtgcatcctttgacgagctacgtgattaactatgtcaaatttttatttgactaccagtcaactctaaaacagctcttccaggagttcaaaagggaagatggaacaggttctgagttggccactgtaaccatgagtatcatgcaggctttacagaataatctggatgcaaaagcaaaacaatacaaggatccagctttgatgcacatatttttgatgaataacattcattatatcgtgaaatctgtccgcagatcagaagccaagatttattggtggatgactggattcaaa

SEQ ID NO: 22421 - DNA, 541 bp, Oryza sativa
  Clone ID: uC-osflM202052g01b1
ttcgccacctctccccaaccctagctagctccccctccttccccggcggcgacatcgacgatggcggcggctgcggcaggcggcggcggcggcggcgccccgcgggcgctctcccagcgggagcaggacatccagatgatgctcgcggcggacgtccacctcggcaccaagaactgcgacttccagatggagcgctacgtctacaagcgccgatccgacggcattttcatcattaaccttggcaaaacctgggagaagcttcagctggctgccagagtgattgctgccattgagaacccacaggacatcatcgtgcagtctgctaggccttatggtcagagggctgtcctcaagtttgcacagtacaccggagctcatgccattgctggcaggcacactcctggtacatttaccaaccaactgcaaacctcattcagtgagccacgtctttttatccttactgaccccaggacagatcatcagccaatcaaggagtctgctcttggaacatccccactattgctttctgtgacactgattc

SEQ ID NO: 22422 - DNA, 450 bp, Oryza sativa
  Clone ID: uC-osflM202052g02b1
tttaggtcttcttccccactctctccctcccacgccgccgcccccgcaaaccctagcgaacgcagcggagagaggagagagcgccatggccgtggaggtggcgacgcagaagatcaggtggggagagctcgaggaggacgacgagggggacctcgacttcctgctcccgccgcgcgtggtctccgggcccgacgagaatgggttcaagaaggtggtcgagtatcgcttcgacgacaaggggaacaaggtgaaggtcaccaggaccttccgcgtccgcaagatcgcccgcgcccgcctctgcaagagcgccatcgagcgccgctcgtggcccaagttcggcgacgccgtgcaagaggacgtcggcgcgcggctcaccatggtgtccaccgaggagatcgtccttgagcgcccacgcgccccagggagcaaagctgaagaaccaagtgcttc

SEQ ID NO: 22423 - DNA, 381 bp, Oryza sativa
  Clone ID: uC-osflM202052g03b1
atcatctggatcttgaggcttggagtgttccagaagtgcttcggccactctacgagtcatctagggtagttgctcagaaaatgactactgcagcactacggcacatcagacaaattgctcaagagacaagcggggaggttgtatacgctttggggaggcaacctgctgttttgcggacatttagtcagaggttgagtagaggcttcaatgatgctataagtggtttcaatgatgatggttggtctgtcatgggtggggatggcattgaagatgtgatcattgcttgcaatgcacagaaggttaggaatactagcacttcggccaatgcttttgtaactccaggaggtgttatatgtgcttaggcatccatgctactgcaga

SEQ ID NO: 22424 - DNA, 522 bp, Oryza sativa
  Clone ID: uC-osflM202052g04b1
tctcgcctgcctcctcctcctgctcctcctgctcactccttccggccccgatcctatagctcctccgctcgccgcggggatctgcttacgacgaggcccggcacccccgccgccgccggatcgtggtttggcgcttcagacccgtgcgtagcgtgtaggatcaattggcgctccacgttccccgatgttgccgaattttcagagtttgttgggtagattgacccccgctacctccactgtggagcaggcttcttctacaatctcaaacatggttgttgcaaatggtaatgtcgacacggaggaaggaactcttgagattgggatggagtacaggacagtctctggagttgctggtcctctagtcattcttgataaagtgaaaggtcctaaataccaagaaattgtcaatatacgattaggagatggcacaactaggcgtggtcaagtgcttgaagtcgatggggagaaagctgctgttcaggttttcgaaggaacatctggtattgacacaaatacacaact

SEQ ID NO: 22425 - DNA, 345 bp, Oryza sativa
  Clone ID: uC-osflM202052g05b1
gaccaatggatgtggaatacagctcctgcttcacgacctgcgcacaggggatccccagccacaacaggccatcctgctcgctgagtgctggacgatgagaaccacattctcgtgcataggacagccgactgcactctagatgcgacgaagtatgtagatgcaggaggctgtgcagactaaggcgaactactcactgatacataggttctcgacggaactaaggacaaacctgagtggagggagggacctgcatattggacaccacgttcaagaatggggcactcagtgccatggcatggtggcaggaaagttttgatgcttggaggcaatgctaagagtggtcca

SEQ ID NO: 22426 - DNA, 64 bp, Oryza sativa
  Clone ID: uC-osflM202052g07b1
tcgtcacccgccacactgtcacagacgcgacgcgctcccgctccccgacgatgccggcggcggc

SEQ ID NO: 22427 - DNA, 329 bp, Oryza sativa
  Clone ID: uC-osflM202052g11b1
gcttcgcttcctcccctctctaagccggggaagctaagccatggcgtccgtcaccgcccgcaccccggtcgcagccctccgctcgtcggcgtcgctcaagtctaccttcctagggcaatcctccacccgcctcgcccgcgcaccgactacgaggcgtaatgttcgggcggaggccaagggagagtggctccccggcctcccttctcccacctacctcaacggcagcttgccaggcgataacgggttcgacccgttgggtctggcggaggacccggagaacctgcggtggttcgagcaggcggagctggtgaacgggcggtgggcgatgc

SEQ ID NO: 22428 - DNA, 217 bp, Oryza sativa
  Clone ID: uC-osflM202052h03b1
tgcgaacaggaggaccacttcccccctccctcctctccagtctccctccgccgcgccgcgattcccctccctcccttctcccccccgcgccgacgtcaccgccgccgcgggaggagggggcagatacaagcggggaggtagcatacgctcagcggaggcaacctgctggtctgcggacatttagacagaggccgagtagaggattgaatgatgctat

SEQ ID NO: 22429 - DNA, 498 bp, Oryza sativa
  Clone ID: uC-osflM202052h06b1
ttcttacctttccctccctacctctcgtctcgatacgggccactacctctacctactgtctgcgccgccgacgccgacgagcgccatggtggagctcgccttcctatagtacctctccccctgcggactcgcgcgccgacgatcggcctcctcaggcggctgtatctcatgctgcgcggccccgcccccgccctccgcgaaaggatctcaagaatccagaactccacgtagaagggtgaggaaaactgagggtgccaccaagagcctggaagattcagtcaagcgaaagatgcagcagttttatgaaggattggatggtccacctctccgagtccttccaataggtggccttggagaaatcggcatgaattgcatgctcgtagggaactatgaccgttacatattgatagatgcaggggtcatgtttccagactttgatgagttcggtgtgcaaaagattatcccagacacaacattcatcaagaaatggagtcacaa

SEQ ID NO: 22430 - DNA, 285 bp, Oryza sativa
  Clone ID: uC-osflM202052h07b1
tcgggagagagagagagagagaggggatggaaatggtttgcactccgtgtccctactgtgtgcgccggcgacgccgacctgcgccatggtggatctcgcctccctatagtacctttccccctgcggactcgcgcgccgactatcgcccatctcagcctgctctatctcatgctgcgcggccccgaccccgccctccgagaaaggatctcaagaatccagaactccacgtagaaaggtgaggaaaactgagggtgccacccaagagctctggaagattcattcaag

SEQ ID NO: 22431 - DNA, 156 bp, Oryza sativa
  Clone ID: uC-osflM202052h08b1
gcgaccaggagggccagttagccgcacctgagtttgatgcatgccctgcgagggacacatggccgccgccaccatggtcctctcgtgcccggcgctggccggcaaggccgacgagaaggtgctctgcgaggggcgcatcaccatgcgcaagtcgga

SEQ ID NO: 22432 - DNA, 131 bp, Oryza sativa
  Clone ID: uC-osflM202052h09b1
tgacaagttagtcttaatcactcccggcgtgggctcatccctccgcggatggaacaaggcgtgcctgctgatttgttactgaggggggcttacatgcatgcagcgcgaaaggatggggcgacctgacagat

SEQ ID NO: 22433 - DNA, 76 bp, Oryza sativa
  Clone ID: uC-osflM202052h11b1
tgtcacagcctcggcggcgccctggcgctggtcgtggtcgacgagatcgccaccaccgtccccgacgcgccgcccg

SEQ ID NO: 22434 - DNA, 304 bp, Oryza sativa
  Clone ID: uC-osflM202052h12b1
tgggacctcttcatggagcagcttgacgataagatgacaacagatgatgtgtttctttcctttctaccgcttgctcacatccttgaccgcatgatcgaggagtttttctttcacaaaggagcctcagttggctattatcatggggattcgaatgccttgagagatgatctcatggagctaaagccaactctactagttggggtgcctcgagtgtctgaaaaaatttatgaaggtatctttgaaggccttatcagaactcagaccactcagaagattaattatgaatgctctgaatcaccgtaaa

SEQ ID NO: 22435 - DNA, 374 bp, Oryza sativa
  Clone ID: uC-osflM202053a02b1
tcgttaagacgagcagccgtacgagtgcgggcgggggtttgactcgcatacgccggcgaccgtgctatctctctggtgcggaagaaaggggctcctgccgccgcccaaggagcgggagatagctcgcgcgctggaacgcaatggaggacactgattactgcgggtgcgtgacggaccgcctaaggacagtcgccagggacagcggatgcccacggccgccatgatcaacgagctactgccagaagggatggtgtagaggaccaaggggagggggctcacatggccgaatcgggagccggagaaagagatactagcgcacgcccccacgggcggtttagagacccactggcgtgggaactcaatggtgaagagcc

SEQ ID NO: 22436 - DNA, 117 bp, Oryza sativa
  Clone ID: uC-osflM202053a04b1
tttcgtctccgccgtgtctgctcctcttccttccatctgaccaccaccggtgacgacaccgtcaaggatctccacgacccgcggcgagaggacgcggtgggcgacgggtgggaggag

SEQ ID NO: 22437 - DNA, 392 bp, Oryza sativa
  Clone ID: uC-osflM202053a06b1
tttctagatcgccagcggctgccctatgcataggcttgttctgcacagagaagggggcatcattctcccttcctcatgataagctgggccttggtaatggtttctgtagctcttgtcagcagaaagagccacattgtgatgaattgcaaatactatccaagaacagcttcatttacagaaacattacctacaatgtcaatgactatttgtatattagacctgactctttctctcaagaggaggatcgcgcacccttctagggagggcgcgatgatgtggtctccttcaccttctccgatatctcctccgcgccgatcaccccggcctgcccctcccagctccaggtgtccgcccacacgccgagcccggcgcgcgccaccacgcccgagttc

SEQ ID NO: 22438 - DNA, 327 bp, Oryza sativa
  Clone ID: uC-osflM202053a07b1
ttgggtttgcgagaatcggcggcggcggcggtgagagcggagagagacaggagggggcggcggcggcggcgggggggcgcggagatgacggggaaggcgaagccgaagaagcacacggcgaaggagatcgcggcgaatatcgacgcggcgacgacgaacaggggcggtgggaaggccgggcagaaggaccggctggcgcaggacaagggcggccacgccaagctcgagtgcccgctctgcaagaccaccgcccctgacatcaagttcatgcagatccaccacgaggcgcgccaccccaagctccccttagagcccgacaagctcaac

SEQ ID NO: 22439 - DNA, 257 bp, Oryza sativa
  Clone ID: uC-osflM202053a08b1
cccgccggacgcggaccggaacggaagggccgacccaagccacccgttcgttcggacgagcagccggacgactgccagcacgggctgatcaagatgacgccggcgatcaagctctgcatcagctagggcaaggaggagctcatggagccggccagggatcagcagagtgtcgcacggctacaacgcacagacgcccatcaagctctgcgagtgctgcaccgcctgctccgggacggtcgagtacaacatcatgggcc

SEQ ID NO: 22440 - DNA, 433 bp, Oryza sativa
  Clone ID: uC-osflM202053a11b1
tcgttaaaggtttgccaatggaatatttatgcaaaagcttgtactggcctgagaagggtgcatttttctcccttcctcatgataagctgggccttggtaatggtttctgtagctcttgtcagcagaaagagccagattgtgatgaattgcaaatactatccaagaacagcttcatttacagaaacattacctacaatgtcaatgactatttgtatattagacctgactttttctctcaagaggaggatcgtgcaaccttcaagggagggcgaaatgtgggtctaaagccctatgtagtttgccatctattggatgtgcatgaacctgctggatccagaaaaattcatccagcatcaacaaaaatcagtgttagaagattttacagaccagatgacatttcatcagccaaagcttatgtttctgacacttgaga

SEQ ID NO: 22441 - DNA, 309 bp, Oryza sativa
  Clone ID: uC-osflM202053b01b1
cccagacccacccttacgttgacgcgtggcctaccacccagccatgggggacgcgtggacatgaccagcaccacgcaaccaccggcggctgcgccgacctcggctgcatgctgtgcgcgcgagctgacgcgactgccgcgggcgacgccgcctccccgctgtggaagcgcggcgagggtggcagcaccgggagcgggagcggatgcactagctgcaggcaggtgcggaggagggccgcggcggtgagggtccgtgcggcggtgcctaggagggtggaggcggtcgcgatggagttcgcggcggagaccg

SEQ ID NO: 22442 - DNA, 473 bp, Oryza sativa
  Clone ID: uC-osflM202053b02b1
ttgagattggtcatgtgacatccttatctccctctccctccaagtgcctaacccaactcttcccgagcctttttctgatcattggacaaatggccgtctcttcagccgttctcgttgggctactcgtcgtgagttgcgccgcggcggccgaagccacgaggtacaccgtcggcgacggcgagggctggacgaccggcgtcaactacaacaactgggccaacggcaagtttttcagacagggagacgaactcgtgttcaactaccaggcgagggcgcacacggtgacggtggtgagccagaccaacttcgacagctgcaacggcaacagcccgctgagcaacgacaacgggggatcgaccaccatcaggctctcctacccgggcatgcactacttcatctgcaccatccccggccactgcagcagcggcatgaagctcgccgtgaacgtcaacggtgacccgtcgtactctgcc

SEQ ID NO: 22443 - DNA, 271 bp, Oryza sativa
  Clone ID: uC-osflM202053b04b1
gcgttccttggctggctccaaatagattcaatacgagactggacagtggcggcagctgtgagagtacggatactgcggcaatctgacctggtctaaggatttactgcgtctgccgagaacaggtcataggacagagtatgcgaatgaaagtgcacacatggttgcagtgatagcaggaggaatcaaaaaagatccaactggaaacgtgtgtattgcaagggctctgatatcaactacgtttggatgatcggttactgatgggcaggatacg

SEQ ID NO: 22444 - DNA, 401 bp, Oryza sativa
  Clone ID: uC-osflM202053b06b1
tatcgttggcggcggcgacgcttgagaggcggtcctgcgacgatggttcacgtcagcttctaccgcaactatggtaagacattcaagaagccacgtcgcccttacgagaaggagcgtcttgatgcacagctgaagctagtgggtgagtatggactgaggtgcaagcgtgagctgtggcgtgttcagtatgctttgagccgtatccgtaacaatgcaaggcacctgctcacacttgatgagaagaatccacgccgcatcttcgagggtgaggcactgcttcgccgcatgaaccgttatgggctccttgctgatgggcagaacaagcttgattatgtccttgccctcactgttgagaacttcctcgcaaggcgtcttcagactcttgtcttcaggctggcatg

SEQ ID NO: 22445 - DNA, 520 bp, Oryza sativa
  Clone ID: uC-osflM202053b07b1
ttgacgcgtgggcttccccccagccatcggcgacgcgaggacgcgacgcgccccaccaaccaccaccgcctccgccgacctcgccgccatgctgtccgcgcgcgccgccgccaccgccgccgccgccgccgcctccccgctgtggaagcgcggcgagggtggcagcagcgggagcgggagcggatgcacgagctgcagggaggtgcggaggagggccgcggcggtgagggtccgtgcggcggcgccgaggagggtggaggcggtcgcgatggagtccgcggcggagaccgagaagaaggaggagtttgcggcggccggcggcggggttgaggacatggctaccgaggaggtgcccgtcacgccatgggccttctccgtcgcgagtggttacacccttttgagggatccacatcacaacaagggccttgcctttagtgagaaggagcgggatgctcattacttacgtggccttcttcctccggcagttgtgtctcaggatcttcatgtgaagaagatcatg

SEQ ID NO: 22446 - DNA, 488 bp, Oryza sativa
  Clone ID: uC-osflM202053b08b1
tctttaagaaatgcatcagcaaagcaatagatgctcttttctcaactaaggtttctaatgatttggaagatcatttggagaaaaacagtgaagaaaataaggagagtgtgaagccaaccctactctggagctgtgtgtatgtacaagagattatacagggaacatctggtactgcattgtcatgccccatacctgatgaaaatatggactacaggagtatacttgaatcaacaaaaatgctgttcactgatatttgtcctaatgaagagttcctgcctagaaattcagctcccaaatatgcttctgataatgactctgattctgcagagtaaatccaaacttgcaaagggctttgtattctacatgacagggttatcgttgaagatatctgttccatattacagtgttccccaaagtcacggttagaaatattgcagcaagggggagctctttacgttggtgagatttgccaggtttttctttgacta

SEQ ID NO: 22447 - DNA, 371 bp, Oryza sativa
  Clone ID: uC-osflM202053b11b1
tcgttatcatctcgatcgatcgacaaagctatagctagcccagtcatggccgcctctcccgcaatggcgacactcctcctcctcctcctccatgctgtcctcgtcgcggcagccgatgccggcgccgccgataaggaggcctatgcggcaacaggatcaaccgctggcaaggagaccgctgcggcggccgacaaggagacctctgcagcggccggatcaaccgcgggcgccgtccctgaccccaacatcttcaacaaggaggccgtgtgccccaagacgacggacgagaaggcgtgccagcaactggtgaaggtcctgccgcccgagtttgcagagacgaaagacgccaagggcctcgcaagctgtgcatc

SEQ ID NO: 22448 - DNA, 528 bp, Oryza sativa
  Clone ID: uC-osflM202053c01b1
gacgaaccgactggagcacttaccagaaaggactatatgggaaaatggcatccatatgtgaagttaaagctactcagatcgagaaactaccatctaagataacgtcagagtagcgaacctacttgaaccctgaatggaatgaatatttcacgttagttgtgagacacccatagtctgaggctcaggagcttactgtttacgatggtgagcatgctgggaagcacgacaagattgtaatgagaggtatcccatcgaacgagcttattcctgatgaggcccaggcacttacacttgacttacacaagactatggatgctaatgacccagcaaatgacaagttacgagggcagctcactgtggatgtaacatataagcctttgaaggaaggtgattctgatgctgatacaagtgatgaatatggcaccattgaaaaagcccctgatggcacaccggatgggggtggtttgctggtagttatcgatcatgaagcacaagacgttgaaggaaagcaccacactaatccatatg

SEQ ID NO: 22449 - DNA, 485 bp, Oryza sativa
  Clone ID: uC-osflM202053c02b1
ttagatgaaggagaggagcagccatggcgtcgtcggtggcagcggcggcgagcacgttcctggggacgaggctggcggacccggcgccgcagagcgggaggatcgtggcgaggttcgggttcggcggcgggaagaaggcggcggcgaataaggcggcgaggccgtcggcgccgacgacggacaggccgctgtggttccccggcgcggtggcgccggactacctggacgggtcgctcgtcggcgactacggcttcgacccgttcggcctcgggaagccggcggagtacctgcagttcgagctggactcgctggaccagaacctggccaagaacaacgccggcgagatcatcggcacccggttcgagaccggcgaggtgaagtccaccccgttccagccctacaccgaggtgttcggcctccagcgcttccgcgagtgcgagctcatccacggccgctgggccatgctcgccaccctcggcgccctc

SEQ ID NO: 22450 - DNA, 494 bp, Oryza sativa
  Clone ID: uC-osflM202053c03b1
gaagcgtccgcctccccctccctccgagggcgagatcggaacaaggcccccacccaaccaccgccgccgccgccaccggcgatcgccggcgacccccgggccacgggaggcgccccgccctcctcgccattggagaggaccttctctcctgctcggattcgtttgctctggtggtggtggtggggctttgctgtcgcgaggccgtgcctgccatgccggagaccgggccctacggccacaagaagaccgacggcatctgcgacggcgtgtgcggcgagcctgcgttaaaggcagttctgaccatgtcgaggctgagatgtgcacttcggggatttgattccacagcactagagggcctattgatcggagtgccagttctaattataaggagatatgctcatggtcagaaggagacatacttagttaggccagtatgggagtctcctcctatgccctacaaactatacctaattactaccatgagaatgtcacca

SEQ ID NO: 22451 - DNA, 383 bp, Oryza sativa
  Clone ID: uC-osflM202053c04b1
gtcctagacggtcagtagctttcagggcgtggcggctcatcggtcgctggaccggactggaaccggagaagacggacgagaagatggtggaggccattatggacgccggtactgaggacaccgacagcgtcactgatggtggtcctcacgagaccgagtcgggcggctactgctagacggagggctatcgcaagaaggtaggtgacaggccactggcaccgaactggggcagggccaaggactgtagcctgatgaatgatgaggtcaggcaaggaaagattgtcaagttctctgagtgcatttggaagctgacatactatggatgttgtcaagcatgggtcctcttgataataaagcaggaaccctggtcgttagatacaatg

SEQ ID NO: 22452 - DNA, 479 bp, Oryza sativa
  unsure (1)..(479): unsure at all n locations
  Clone ID: uC-osflM202053c06b1
ttgttatcgaggaagaagaaataatcaatggagtgttgggagaagaagccaaggaatctgggtggctcgctgccggtgcccaacgtgcaagacctcgccgtccgcccggaccacctcacgcccaccctcctccgccgctatcttcgcccgcaccacctgtccctgcccgccgacgaccaccatgccatggctatgatacctgtcgttgactttgccaggctcatcgatcaccatgaggaggccgccaagctgaggcacgcctgcgaggagtggggtttcttccaggtgatcaaccacggaatcgccgacgagacggtggaggagatgaagcgcgacgtcatggccttcttcaacctcccgctggccgacaaggcggcgttcgcgcagcagccggaatggatcgagggctacggccaggcgttcgtcacgtcggaggaccagacgctggactgggtcgacctctacttnctcaccacgca

SEQ ID NO: 22453 - DNA, 454 bp, Oryza sativa
  unsure (1)..(454): unsure at all n locations
  Clone ID: uC-osflM202053c07b1
tcgttcgtcaacaaaaaggcgcctctaagaattcctcccaaactttttggtgttgtcaagccgtgcgtttcggggtacatcaacggcggcgatgagctcccggatggccggatcggcgatcctccgtcacgtcggcggcgtccgcctcttcaccgcgtcggcgaggccgttccttgcaggcggagaagccgtccccggggtgtgggggttgcggctgatgtccacgtcgtccgtggcgtcgacggaggcggcggccaaggcggaggccaagaaggcggacgcggagaaggaggtggtggtcaacagctactggggcatcgagcagtcgaagaagctggtgcgggaggacggcacggagtggaagtggtcttgctttangccatgggagacctacaccgcggacacttcgatcgatctgacgaagcaccacgtgcccaagacgctgctcgacaag

SEQ ID NO: 22454 - DNA, 413 bp, Oryza sativa
  Clone ID: uC-osflM202053c08b1
ccttgggcttttccaggttcacatcgacgactccttgctctggacattgttgttagttggtgatggctgggcgaggtcctcatctgactgtccttcacaagtgcggtggccagttccaccttggctccagcttttctgaaggtgtacgggctcgcaacatctgcccatctgtctcatcctatgacaggcgctttaccacaaggagctacatgacccagggccttgtcaatggtggcatcaacgtcccaatgatgtcgtcctctccaatttttgctaatgctccagctgagaaaggtggcaaaaacttcatgattgatttcctcatgggtggagtgtcagccgcagtttcaaagactgctgctgctcccgatgagcgtgtgaagctgcttattcagaaccaggatgaaatgatc

SEQ ID NO: 22455 - DNA, 507 bp, Oryza sativa
  Clone ID: uC-osflM202053c09b1
ggctcgcccgcctgcccgtaccggaccggcatgcccggcccagacccacccgtacgttccattctcctctgtctcctgcttctctctgtcctcctcttcttcacctgctcttgtctgtccatagatcgagccgctcagaccaaatcttggatgcgttctctcttctttctcgctgcgagggaggcgggttgttcgatctgcgggtgaaatcgagcgagagatccctagacctccccctacttctctgtagctgtacatatttcaagagaggaaattttgggctggtttctgatacggttcgagaagatttttggcaatttcttcggattttcctccccttgtgggttccttggttcattgagaagaatcaaatgggtgatgtgtcagtcaatcgaccgatcaaggcggagccagctgcaggcggcattgcttcagggcatcgaatcctggacatgatgtcgtcagggtggacagatgagcggcacatgcattatataagctcaatga

SEQ ID NO: 22456 - DNA, 465 bp, Oryza sativa
  Clone ID: uC-osflM202053c10b1
aggcgttggttcccaacgaccacccttcacattatcggggcgcgcgcgcgcgagagggggggcgccctgccgcgggagttcgccgtggtggtgcggacggcgagggggctctgttgggttgtcggcgatggcgatccggggcccggaggcgtcgtctttcttccccctcacgctcgtcttctccgtcggcttcttctgcgcccgcttcttcctcgaccgcctcgtctacaagccactggcagcttactgtttcagtagcaaggcttctaagctgatgaatgatgaggtcaggcaagcaaagattgtcaagttctctgagtcgatttggaagctgacatactatggttctgttcaagcatgggtcctcttgataataaagcaggaaccctggtcgttagatacaatgcaatacttcgagggctggccagatcaatacatgacgtcctcattgatgcttttctacat

SEQ ID NO: 22457 - DNA, 231 bp, Oryza sativa
  Clone ID: uC-osflM202053c11b1
tcgtccgatcgtacgatgaggacggggaggctgccgtcttctctggctcacgccgtcgcggctgtccatagggtggcgccctcagaccaaaccctggatgcggactctcttgtttatccctgcgagggagactgcccgaacgctctcaggctgcaattgatcgagctatccctacacctccccctactggggtcctgctgggcgtatttcacgaggcgctatcttgggctg

SEQ ID NO: 22458 - DNA, 210 bp, Oryza sativa
  Clone ID: uC-osflM202053c12b1
tcgtgggttggggggacgcgcggctagggtttccgcgattcaggaggtgagggttgttggacacctccctgatcaagctcaacaatccaaagaaatatacactcacgaagctccttacgaacaccctcctcatttgcaagacaaaccagataccaaaaattcataatcacagacaaccaccatgccatggctatgatacctgtcataaac

SEQ ID NO: 22459 - DNA, 326 bp, Oryza sativa
  Clone ID: uC-osflM202053d01b1
gtgttcacttgtggcctcttcctgggcgcccccatgggcttgtccagggacgactccggcttggacgtaggcgaggaagacgggctcatggaggatctactgtaatagctcgcgaacggaggatgacgcagccggctgggactacacctgaacggcaggcgctgcgccagctggcactactggttcaagggtaccgtgatcgccatgggcttctactgagctgagctccagtacctagccgaccccatcaccaaccatgtgcagagcgcggagcagcacaaccagtacgtgaactggctgggtctcgtataggccaggaagaccct

SEQ ID NO: 22460 - DNA, 243 bp, Oryza sativa
  Clone ID: uC-osflM202053d03b1
tcatacgtcggtggtgaaagaagatgagagggctactcgcgtgcgccacgctcgcccgacgcgccgacggcgcgacgtagacagcgcggcggcacctgacgggcgcgatcgaggctgaggatgcggagctgaagaggaccgcactgcactactttcacatctcgcacggcgtggagagggtgctgatagactagaggaggaggtccaaggggtacaaggactccttgatggacgagacgctga

SEQ ID NO: 22461 - DNA, 470 bp, Oryza sativa
  Clone ID: uC-osflM202053d05b1
ccacccgttagtgcaagaatagaatagccagcaggagcagagcacctcctcgatctcaatcgtgggccgggtcgaggctccgaccaattcgttcctccacgatggctttaatccatctgctgcttctttctttcttttcttcctcttcttgggagttgaagagaaagaatcgagttgttgctttgtttaattttgtgtgttgctggcggtagcgtcatggcagggtgactcaatgacgacgacactcactgattcttaccctgtttaaatagaccgcgcggaaaggagagatttggggagagcaacagggcggtgctaggaaggcggtacaaacctacgcgttccatggggagaagacaatcttccatcttaacccatctggtccccttcgtcattggcggacctcatggtgatgctggtctcactggccggaagatcatcattgacacttatggtggctggggagctca

SEQ ID NO: 22462 - DNA, 332 bp, Oryza sativa
  Clone ID: uC-osflM202053d06b1
gcgttcttttcctcctcctcctctcctccttcctgcgtcgcctccctgatcagccgcagctcgttgccggccgttgttgcgcggccatggaggcgagcgccgggctggtggccgggtcgcacaaccggaacgagctggtgctgatccgggggcacgaggagcccaagccgctgcgggcgctgagcgggcaggtgtgcgagatatgcggcgacgaggtcggtcgcaccgtcgacggcgacctcttcgtcgcctgcaacgagtgcggcttcccggtgtgcccgccctgctacgagtacgagcgccgcgagggcacccaagactgcccccagtgc

SEQ ID NO: 22463 - DNA, 466 bp, Oryza sativa
  unsure (1)..(466): unsure at all n locations
  Clone ID: uC-osflM202053d09b1
tctgtcgccgccgcgagcgaaccgggaggagaaagtccaaaccctcgcgaaggcagagtcggggatagggatatcgccgaggtgggagaaggcgacgtcgccgacatgaagctgttcgtgaagaccctgaagggcaccaacttcgagatcgaggcgagccccgaggcgtcggtggctgaggtgaagagaatcattgagagtactcaggggcagaatgtgtacccggcggatcagcagatgctcatacaccaagggaaaattctcaaggatgatacaactttggaaggcaacaaagttgctgagaacagcttccttgttataatgctgtctaaggccaaagcatcatcaagtggagcttcaactgcttcaaaggcacctgtgagccagtctcaaccagcaactccagttgcctcagttgcaagaacaccacctncacangcacctgttggtacacctgaaccggcac

SEQ ID NO: 22464 - DNA, 454 bp, Oryza sativa
  Clone ID: uC-osflM202053d10b1
ttcgccctgaggagattggtgctggtgaccagggacacatgtctggatatgcaactgatgagacccctgagttgatgcccctcagccatgtgcttgctaccaagcttggcgctcgtcttacggaggttcgcaagaatgggacctgcgcatggctcaagcctgacgggaagacccaagtgactgttgagtaccgcaatgagagcggtgccagggtccctgtccgtgttcacaccgtcctcatctctacccagcatgatgagacagtcaccaacgatgagattgctgctgacctgaaggagcatgtcatcaagcctgtcattcccgagcagtaccttgatgagaagacaatctttcatcttaacccatctggtcgcttcgtcattggcggacctcatggtgatgctggtctcactggccggaagatcatcattgacacttatggtggctggggagc

SEQ ID NO: 22465 - DNA, 401 bp, Oryza sativa
  Clone ID: uC-osflM202053e01b1
ttaattcaacccaaccgccgccgcatcgccctcgttagaacgatggccgcgtcggcgctgcaccagaccaccagcttcctcggcaccgcccctcgccgggatgagctcgtccgccgcgtcggcgactccggtggccgcatcaccatgcgccgcaccgtcaagagcgcgccccagagcatctggtatggacctgaccgtcccaagtacctgggcccgttctcggagcagacgccatcgtacctgaccggagagttcccgggagactacgggtgggacacggcggggctatcggccgacccggagacgttcgcgaggaacagggagctggaaggtgatccactcgcggtgggcgatgctgggggcgctgggctgcgtcttcccggagatcctgtccaagaacg

SEQ ID NO: 22466 - DNA, 482 bp, Oryza sativa
  Clone ID: uC-osflM202053e03b1
ttcgatctcaaaagacacacattccaaaagcatctgtggccatctcctcctagtcctaggctcgcgtcaatggcggcgtccaccatggcactctcctcccctgccgccctcgccggcaaggcggtcgccaatgccaaggtgttcggcgagggccgcgtcacgatgcgcaagtcggcggccaagcccaagcccgccgcggcgtcggggagcccgtggtacggcgccgaccgcgtgctctacctcggcccgctctccggcgagccgccgtcctacctcaccggcgagttccccggcgactacggctgggacaccgccgggctgtcggccgacccggagacgttcgccaagaaccgggagctggaggggatccactgccggtgggccatgctgggcgcgctcggctgcgtcttcccggagctcctcgcccgcaacggcgtgaagttcggcgaggccgtgtggttcatggcggtgtcccagatctt

SEQ ID NO: 22467 - DNA, 218 bp, Oryza sativa
  Clone ID: uC-osflM202053e06b1
gtcgtgcctacgccctcttcctcccccctcggcttcgagggttattgttttcttcttcttttttctttttttcttcttctccttttttgattctcgtttctttttttttttcggtttcgggggagttggatgcttgaaaccttcctccccctgaggccaaaccctaataataatctgatccctgacacgagagcggaggcggaggaggaggtggggga

SEQ ID NO: 22468 - DNA, 190 bp, Oryza sativa
  Clone ID: uC-osflM202053e08b1
tccacgcgtccgctcagctcctcctcctctcgcatggcagccatggccaccaccgcgtccagcctcctcaagacctccttcgccggcgtgcgcctccccgccgccgcccgcaaccccaccgtctccgtcgcgccgtgcaccgcgagggccatctgccactgcatctggtcgtcgacaatccctcacccct

SEQ ID NO: 22469 - DNA, 479 bp, Oryza sativa
  Clone ID: uC-osflM202053e09b1
ttagagatctctcccgagctcgatccggtccaccgcgacacgaagacgaccatggcgatggctcgctcccagcttgccgccgtgttcctcgccgtcctcgtctcggtggcgccgctcgccggcgcggcggacaacctccaggacgcgtgcaaccggacgctgttccccaaggtgtgcatccaggcgctgacgacgaacccggagagccggacggcgaacgcgcggcggctggcggagctgtcggtgtacgtggcggcggaggtgggcacggcggtggcggcgttcgcgcaccacgagctgaacggcgtgaaggaggacgccctgttcaagtgcgtggacagctgctccgacgacatcgagggccgggtggcgcacctcagcgcgctcacccgcgagctcaccgacgccaagttcctggaggtcaaggcctggctctccgccacgctcggcggctcctccacctgcgaggacacctgcag

SEQ ID NO: 22470 - DNA, 281 bp, Oryza sativa
  Clone ID: uC-osflM202053e10b1
tcgtcgagaccagaccgtctcccctggccctctgtccgattcagcaaaattgccacctgtttccgcatccgcctctaccgaggttttagacaccgcggcgcaggcgctcttcccatttctcgcgtcccgcgaggcagccgcaactcgccatcaccacctcccgatccgcgcgctttctctcccgcgccccctgcggatctgccggctctggaagggcgagagggcgctggagtcgtctcggcggcgctagggttgaagctggtgggggaaggaggtggagg

SEQ ID NO: 22471 - DNA, 195 bp, Oryza sativa
  Clone ID: uC-osflM202053e11b1
tcgttataatccaagctcaataaacgagccaatccgtcgaagaaggaagcagcggcgatggcggcgaggtccggcgaggtgcgggcgacggtgctgggcatggcggtgctggcgctgcttctgctgctcgggcaccacgcggcggccatcgaggtcaacgccggcgttgcccgccaggccagactgagcctgatc

SEQ ID NO: 22472 - DNA, 424 bp, Oryza sativa
  Clone ID: uC-osflM202053e12b1
ttgaaacattttttacatttatattttttaaaaaaatataatttatctgttatatgctttataaaatattttttattgatgtttttaatataaatcatctttcatatactacataagatatttttttgtgttattatccctcgtataagcatatttttttcccattatataccacatacaaaatttttttctaaaatctaaatatactagaaaaaattaaagcatgtatacttgtgtaacgaggccacataaaaattttcatatttttttgaaacttctaattagataaatcaaatgttaatcttgtatgtatctaaggtttttttgcgtatttttgaaaagaatgcccagtccaatagcatattgtagaacaattaataaagtcaccggtatattatagaaagagacaatatcggaggcaaat

SEQ ID NO: 22473 - DNA, 564 bp, Oryza sativa
  unsure (1)..(564): unsure at all n locations
  Clone ID: uC-osflM202053f02b1
gcgttattttcctccgtatgcccaacgtccaactcactgaagcaattcgatggcagtggttcaccgggatataactaatactaataatttcccaaaaaaaaaagtaaggagtagtactagctattcacgcatttagaaaaaagaaagggttgctcctaacattatataaatgactggtgtattgctatatttgtgtatctatatatgtgtgtctaacgagcaaagctgcagcaagcaggggagtggaaacctataaaagataattctacaatgtgatttgcttaagcttaaatgaaatttgactattaaagatcaaatgtatttgactctaagtacccatttagcttccggtttgctgtgaagggtgtattcactgattaagaatgaattttgataatttatgaagcaaataataaagcaatcaaatattgtattatcaggtatttctttttcttgatgttatgagttttaaagcaggaattgaaatgactgtaatatgattngcgttattggtctttacctgaagtgacaattatgaaatanacgtcctttcaaaaattgggt

SEQ ID NO: 22474 - DNA, 344 bp, Oryza sativa
  Clone ID: uC-osflM202053f05b1
ttctttcgcgttagccatcaacgaccagcatctagggtttgctcgacctgctcaagctgctgctgccatgggggcacagctctactccttaggagacatgcacctgcacggcgggcagcgcagcgctctgctgcaggcccggacgggcaccgcatactggctgggatgccctcgtgcgaccccataccggactagtattaacgcctgggcggccgcacggcatgcatatgggcgcgaattgaggcagagactggcaccctttatggggagggccttatacacacatcgaaggaggatggggaagcactaactgcgaagctgcaagtacagcattccagtgggat

SEQ ID NO: 22475 - DNA, 531 bp, Oryza sativa
  Clone ID: uC-osflM202053f06b1
tgtgttgcaattatgccttctgttctatacattcagataacattgcgcaggaggcctttcttgataaagaatcttgaaaatgttatgcgcacataccttcagtcactggagttcttcgaagaaaatgagaggaagaaacttgccattttcacagcacttgccttttctcagaagttatcaggtcttccacctgaaactgtcttccagccactgctcaaggataatcttgtttccaaagggatagtgctttcgttcattactgagtttttcaaagaatatctgaaggagaacactttagatgatcttattgcacttttgaagaaaggcaaaatggaggacaatttgctggaatttttcccatcggcaaaaagaacctccgaggctttatctgaacatttcactaaagaaggtctgacaagtcttgttgagtacaatgaaaagaagatgtttgaggttaaactcaaggagattaagttaacactgacaacaatgatcaatgaagaggctgaaatatctgaagtcacagaagct

SEQ ID NO: 22476 - DNA, 467 bp, Oryza sativa
  Clone ID: uC-osflM202053f08b1
tcgttaagatgctcgtggcttgctcaaagctgcgattagggatccggaccctgttgttttcttggaaaatgaactgctctatggagaatcattccctatttctgctgaagtgcttgattctagtttcgctctgccaattggcaaagcaaagatagagcgtgagggtaaagatgttacaattactgcatactccaagatggttggatatgctcttcaggccgcagatatattgtccaaagaaggaatcagtgctgaggtgataaaccttcgttcaattagaccacttgatagagctactatcaatgcatctgttagaaaaacaaatagattggtgaccattgaggaaagctctccacagcatgggattggtgctgagatatgcatgtctgttgttgaggaaagctctgaatttcttgatgcacccagctagaagaattgctggagctgatgtacccatgccctatgct

SEQ ID NO: 22477 - DNA, 491 bp, Oryza sativa
  unsure (1)..(491): unsure at all n locations
  Clone ID: uC-osflM202053f09b1
tcgttcttccacgacgcccgcgcagcaaccgaccacctcctcgcccgagcccgcgtccccattgtcgccggagggactggcctctacctccgctggtacatctatggcaagcccagtgtcccgcagtcttccatggacgtcacctccgccgtctggtccgagctctcccgcttccgggacaccggccgctgggaagaagccgtcgacctggttgccaacgccggcgaccccaaagctcgggacctgtcagtcaacaactggtcaaggttaaggagaagccttgagatcatcaggtcttcaggctcacctccctctgccttctccttgccctacaatgcttacaatctcaatcaccaccgtcgtctcagtctcaccaaccaagccgatcaacccacggagctggagctggactacgacttnctctgcatcttcctcgcgtgcccacgcgttgagctctacagatcaatcgatctgaggtgcgaagagatgct

SEQ ID NO: 22478 - DNA, 480 bp, Oryza sativa
  Clone ID: uC-osflM202053f10b1
tcgtccgcgtcaaccacacattctgttcttccagtgccggtaccagcagtaccatatgctgccccctcaccttcatacgcactaccccctgcaggataccctgcagtaccgccatatcaatcctatcctgctagccatgtcccggcgccatatcctacttcagcatacccacatccaccaccatctctgctagctcgcgatgttgagcatgcggcataccctcctacaagtacaacatatcctccacagccgtacccaccacagccgcagggacaaacatacccaccgcagccgcagggagaaacataccaaccgcagccgcagcgagaaacatacccaccgcagcctcaagtacaaccatacccaccaaagccacagggacaaccatacccaccgcagtcggagggacaaccatatccaccgcaaccatttggacaaacttacccaccaccttcaaaaggacagcccacatatccacct

SEQ ID NO: 22479 - DNA, 508 bp, Oryza sativa
  Clone ID: uC-osflM202053g02b1
acccatctgtatctattgggagagcacgaaggttagaagaggcatgtgatctgtgtcgcgctggctggtcagtcactggagagctgcaactctttgcccctttggtggcatagatttgtttccttccttggaggccatgctgaagaatggaaagtctagaacactgcaagcgattgaattggaaagtggtgttggacggcagttatgtctttggaaatgggcttcatattgtgcttcagagaaaattgctgaacaagatggtggccgatatgagatggcagtatatgctttacaatgcagtaacttaaagcgtatcttgccgatctgtactgactgggagtcagcttgttgggcaatgacaaaatcctgttaggtgttcaagtggatctagtattgtcttagtaccaaaccagtagaccagatgagaaacagtctgatgacgagatgaaaggaacccaacctatgttgaactcagctggcccaagaagttggccccacagtgttcttg

SEQ ID NO: 22480 - DNA, 353 bp, Oryza sativa
  Clone ID: uC-osflM202053g04b1
agctggtacgcctgacgtaccggaacggaattgtcgactcacgcgaccgttctgttgtggttgctgctctatccgttatgcgagcgcagtcatggtaactcgcagcatgtagcatgacagactcatgggtggacgggcggctaaagaactcggaccgtgtgagcaagtaggatgatgagacattgatccgtcaaggagtagcaagaaggtaagcactggcgaggtagtaaggatccacgcgtggaggcaggaagacaggagatggcttactattgcaggggtgagtttgggcatgttatttggaagcacacattgtggggagggaaaggaaaagaatatatggtacccatgct

SEQ ID NO: 22481 - DNA, 424 bp, Oryza sativa
  Clone ID: uC-osflM202053g07b1
atgatggacgcctcccgggcccggtccggactggcaggctcgacccaccccacccgtacgtttgtaggggagactactatgtcggtgttccaaaataagagatgtggagggtgtggacaagaaggaggtttctggcgccgccgcggacctgctgcactcggcgtccacctacagcaagctcaacgacaagccggtcgggcagtacatcgacaaggcggaggggtacctcaaggtcttcagctacggcagtggcgggtccgcaccgacaacgccggcagccggagacgccgcagcgccgaagccagcggtggaggagccgtccaaggagcctgcgccggctgagaaggaggaaggcaagccaccgtcgtcgtcggaagggttcggtctcgacgacgtcatgaagggggccgagtcgctgatggag

SEQ ID NO: 22482 - DNA, 178 bp, Oryza sativa
  Clone ID: uC-osflM202053g11b1
tcgtggagatctgtctcctggccaacagcctgtggcttccctggtattgtctctgttgtcctcactgcgttaaattccatgctgtggtcaaggaatagtacaggagctcttcccatctcactcttcttcacacttctgtccttgtggttttgcatctctgtgccacttaccctcctcg

SEQ ID NO: 22483 - DNA, 309 bp, Oryza sativa
  Clone ID: uC-osflM202053h01b1
aaactcccataaacccctcctcttcgagaaaatccctttttgttcaaccacgacgcgaattcccaagcaacccccccacacccagctgagtagctgacgcagcaccagcagtcgcggggaaagggacacgtctcgccgccccagcttcccgcctgcctcccatcccgccgccgcggacgcgtccaagccacagcaacagcaaccactccgacgaacacctcgcctgcgcgatggtggcggcggcgctggacgcgatggcggggacgaggtgggggcaggtggctggtgtttgagacggccgtgtggttg

SEQ ID NO: 22484 - DNA, 260 bp, Oryza sativa
  Clone ID: uC-osflM202053h02b1
atccggtagattatcacacagatgcgcacgttacaggaattcagaggggctacagaatgtcgctgctgtaataagagcgagtttctggtgcacacgccgagttgtttaggctacagtaatggacacagctgggaagcaaagtgtactcagtcgattcctagagtgagccgtgaaatgttggaatgagctgctaggatggatggttatatcgaactcagaaggagctgaactagtggcacagcagagaaaaagaagataag

SEQ ID NO: 22485 - DNA, 455 bp, Oryza sativa
  Clone ID: uC-osflM202053h04b1
acccacgccatgcgtttcgttgccgcgcacgcaccgagcattccctatgctctatcttcgactctcacttctactgcttgatcgtcggccgacggtcaccgtctactatacacagggcgagttactggttagtggtggatatgacctgtactatcgacatgagaggcggatatgcctgatgatgaggggggtgaccttaatcaacatacgaatgatggcatccttactgtgtcgaaaagtttgccggaacgcacagataaaagcactagtctggatgattcaaaaaagtggcacttagatcctgcaaagacatatagtgcagtttacaaaagatcaaagacaaataagcacatgaaaaatttggattcagatgcatatggaaatggggagagcacttccgtatacaatgatgatgacggttatcaacctacagattacagtcctgttaaacctga

SEQ ID NO: 22486 - DNA, 321 bp, Oryza sativa
  Clone ID: uC-osflM202053h05b1
gcgtaacttacctggcaaaaaagcggggaagtaaagctaggggtgaaaagaaaggagaaacataccctagccgtaccgatcgatgcagaggacgccaccagcggctattcgtgaggcgaggcgtccgggaccactatcgccgctggtgaagctgcttctggtgcggcatcagcgttctgggacgccgaccgggccgaagaggctgtccgtgctgtgtcgcatggatcgcctgagggcacagatcaaagccctagtgtggatgatgcaaaaaagtgggacttatatcctgcaaagacatatagtgcggtttacaaacgatca

SEQ ID NO: 22487 - DNA, 237 bp, Oryza sativa
  Clone ID: uC-osflM202053h06b1
attcgttcacaaattcccccgcgccgcgccagccacacccacacgcgcgcgccggccagcctacgctattcccctccccccctgccccgcaacgagccgcggcggaaggaaggatggggagccttggcggtgaggagggggcgaggccggctgcagcggcggagggggcgcggaggccgaggttcctgtgcctgcacgggttccggacgagcggggagatcatgcggaagcaggtgg

SEQ ID NO: 22488 - DNA, 320 bp, Oryza sativa
  Clone ID: uC-osflM202053h08b1
caccctttacgtcttcttgtgagtgcgaggaaatctgccttctggcagaagatgaatgacccagttgtcctggaagcgagttctgagcacagagcccttggtgtttaaattaccctactacacacagctgggggcagagtgtatctcatctgcggctcagagtcagcactgggatgttggaatgagctgctaggatggatggttatatcagactataagggagctgagctaatgtgcaccggcagagaatacgaagatactggttttacctgtcaggacaattactatgtagtggacgacaacaagaatgttttgagatc

SEQ ID NO: 22489 - DNA, 339 bp, Oryza sativa
  Clone ID: uC-osflM202053h09b1
ttgcgttctcttctgcgaccaaggaagtctgccggctagacagggcatggtggaccgaggagacaaaccctagctaggacgctcactgctctacactctactgcacaggagaggaggagatggagtcgacgtcgaccgccgccgtcgtcgccgccgcagccgagcgaccgtccgaggcagccgcgctgcgtgcgctcgtggaccgcgtgcgcgccggggaggtggaggccgcgcgcgaggtgcgccgactcacccgctgctcctccaggcaccgccgcaagctcgccgccgacgtagagcccctcgtggtcatgctacgatcccccgaccccgacgccg

SEQ ID NO: 22490 - DNA, 335 bp, Oryza sativa
  Clone ID: uC-osflM202053h11b1
tcgttagcattcccctctacatcgctccagagtccccagttcccaactactagtttctttcaggtgcagcgcgcgatctcgtcactctggtgaccatctgacaagttctcggtgcgtcgcggccggacggattctgtatgcacgcctgacgacttctgctggtgaagcagggcattgaccgtcgtcggcgatcagatgacccggtgcggactggctccgatcgctcgagtggcgctgccggtcagcctgtagtctccggtgaacggcggagggggacaaccttcctggtaagacggagcgggaggtctactcaaccagccaaccagaggctgatc

SEQ ID NO: 22491 - DNA, 504 bp, Oryza sativa
  Clone ID: uC-osflM202054a02b1
gcggctgttcatggtgtcggagctcgacctgccgctggacctcgtctccaggaaggtgaggaagatgaagatgatttcgacgtgcaacgctgccgccgacatcggcggtacgctcgcgccgcacgagtacatttgcatggtccgccgagaggtgctcgacgcctaccttcgttcccgctccgagggggccgccgccgaggtcgtcaatggtctcttcctgaggtatgaggcgcccaaggaacccaacgggtcgtacgtggtgcactacaaccactacgacagctccaacggcaaggtcggcggcgagaagcggacgctcgatgtggacgcgatcgtgggcgcggacggtgccaactcccgggtcgacaaggacatgggcgccggcgactacgagtacgccatcgcgttccaggagcgcgtcaagatccccgacgacaagatgaagtactacgaggagcgcgccgagatgtacgtcagcgacgacgtctcggcagacttctacgg

SEQ ID NO: 22492 - DNA, 501 bp, Oryza sativa
  Clone ID: uC-osflM202054a03b1
ctttctcttccggagaaaaagcttgggtgatttcttggaagcgaagagtgaggggagaagaagaagaagaagaagaagaagaggggggaggaggaggagcagcatggctgagcacaaggaggagcagtcggtgatggagaagctctccgagaagctgcacggcgactcctcgtcgtcttcctcggactcggacgacgacaagaagggttcctcctcgtcgtcggcggcggcggccatgaaggccaagatctaccgcctcttcggccgcgagaggcccgtccactccgtcctcggcggcggcaagcctgctgatctcgtgctatggaggaacaagaagatctccggtggggtgctcgccggagccacggccatctggctactcttcgagatcatggagtaccacctcctcaccttggtgtgccactgcctcattctctccctggctgtgctctttctctggtccaatgcctccactttcatccacaagttcccttcaaacat

SEQ ID NO: 22493 - DNA, 500 bp, Oryza sativa
  Clone ID: uC-osflM202054a04b1
gttcattcgccagccacacctctctccatcctctcgtgctctctctgtctcctcttctctctcccccgacggagaggagagaaggcgaggagccgggggagatgggatcggactcgccgcccaagaaatggggcctcagggagcagcgcgaagcctacctccggtggttctccctcgccgacgacgatggagatgggcgcgtgacggggaaagacgcgctcaagttcttcgccatgtcgaatctctcccgccccgagctgaagcaggtctgggcaatcgctgattccaagcgtcagggttatcttggattctcggagcttatgaccgcaatgcagctggtttctcttgcacaagctgggaatgagactagtcaggacacccttgcacatgcagatttggagacgttgctacctccgacaatggaaggtctggacaaaaaactaaaaaataattctatgagcaagagcaactctgatattgtcgtacgtcatccgtcagaa

SEQ ID NO: 22494 - DNA, 407 bp, Oryza sativa
  Clone ID: uC-osflM202054a05b1
cgagagagatctctcccgagctcgatccggtccaccgcgacacgaagacgaccatggcgatggctcgctcccagcttgccgccgtgttcctcgccgtcctcgtctcggtggcgccgctcgccggcgcggcggacaacctccaggacgcgtgcaaccggacgctgttccccaaggtgtgcatccaggcgctgacgacgaacccggagagccggacggcgaacgcgcggcggctggcggagctgtcggtgtacgtggcggcggaggtgggcccggcggtggcggcgttcgcgcaccacgagctgaacggcgtgaaggaggacgccctgttcaagtgcgtggacagctgctccgacgacatcgaggtggccggtggcgcacctcagcgcgctcacccgggagctcaccga

SEQ ID NO: 22495 - DNA, 520 bp, Oryza sativa
  Clone ID: uC-osflM202054a06b1
cttgctggacccacgcgtccgcttatttcgagagagatctctcccgagctcgatccggtccaccgggacacgtagagagccagtgacagcagcaacggcggggggcgagcttgcgctgctggacttctgggcgagcccgttcgggcagcggcgccgcatcccgctggcggagaataaggtgcactactaattagcacaagcacaagtgaaaatttgcctgttattcatgaatctagaaatacagaccataccatgagtacacagagcaaagataagtcctctgcagcgaataattcgtcatcaagttctccttcatcttctgaggtgggtggtgctccagcagtacgaaagatgaaagtgaaagatgtctcagaatatatgattagtgctgcaaaagaaaacccccagatagctgagaggatccatgctgtcttacttgaaaatggagttgtcccaccacctgatttgttttcagaagaatcaagggaacaacctaaagaccttattgtgtatgacacat

SEQ ID NO: 22496 - DNA, 134 bp, Oryza sativa
  Clone ID: uC-osflM202054a08b1
ctgcatcctaagatcatctaggaggtgggttgtggctcgttacagcatatgccgacgttttctttctattttgtacttggaatcctgtggctgaagttaatcctttcgttggtactacaatcaagtattacctg

SEQ ID NO: 22497 - DNA, 471 bp, Oryza sativa
  Clone ID: uC-osflM202054a10b1
tcttttccacccaccatccaccggtcgaacacttggcgctctcgcccgccttagctcgctctgctcgtggtgctcgacccgaacaagaacggacatggctcccaggaacgccgccgaggccgtcgccgtcgccgtggcggagggcggaggagccggcatggagcccaggttccgcggcgtgaggaagcgcccgtggggcaggtacgcggcggagatccgcgacccggccaggaaggcgcgggtgtggctcggcaccttcgacaccgccgaggccgcggcgcgcgcctacgacagcgccgcgctccacttccgcgggcccaaggccaagaccaacttccccgtcgccttcgcgcacgcccaccaccacgccccgccgccgtcgttgcccaaggcggcggcgctggccgtcgtcagcccgaccagcagcacggtcgagtcgttcttccgggacacgcccgccgccgtcccggt

SEQ ID NO: 22498 - DNA, 302 bp, Oryza sativa
  Clone ID: uC-osflM202054a11b1
cttgctggaccacgcgtccgttattcgagagagatctctcccgagctcgatccggtccaccgggacaggtagagagccagtgacagcagcaacggcggggggcgagcttgcgctgctggacttctgggcgagcccgttcgggcagcggcgccgcatcgcactggcggagaagactctccactacgactactacgagcaggagctcctcgtcgcctagagcgacctactccttcggtacaaccccattcacgccaaggtccccgtactgctccacggcgacggagacggccgcgccgcctgct

SEQ ID NO: 22499 - DNA, 269 bp, Oryza sativa
  Clone ID: uC-osflM202054a12b1
tggaccacgcgtccgtttttcgagagagatctctcccgagctcgatccggtccaccgggacacgtagagagccagtgacagcagcaacggcggggggcgagcttgcgctgctggacttctgggcgagcccgttcgggcagcggcgccgcatcccgctggcggagaatacggtgcactactaattagcacaagcacaagtgaaaatttgcctgttattcatgaatctagaaatacagaccataccatgcgttcacagaggcggcggcggt

SEQ ID NO: 22500 - DNA, 503 bp, Oryza sativa
  Clone ID: uC-osflM202054b01b1
gcgtctgtccttccactgtccacacctcgcctcgcgtcgagcacctggcaatggcggctcacgcgccctcgatgcgccccacccacgccctctgctcgtgagatcgcctgctgcgctctctccccgcgcgcgcgcgcgcctccctccctgtttgttgaatccaagagcgagcccgaccgcatcttggaccctcccctcccgcggttcttggacgacgccggtgcgcgcggtggctatgctgtcccgtgccgaaccgggccgaatgctggcagatcatgcgcccgcctgcggtgggatcggccactgcattcatgcttgcacaactggttgcgacattcctcgctgtctatgccaactggggctctgccaggatcaagggcattggctggggctgggctggcgttatctggctttacagcattgtgttctacttccctcttgacatcttcaagttcttcatccgctttgtgctgagtggaagggcctgggacaacctccttgag

SEQ ID NO: 22501 - DNA, 479 bp, Oryza sativa
  Clone ID: uC-osflM202054b03b1
tcgtttttatctactgtctgctatgctcttcctgagctccgtgcgaaggaagcttctggacggatctcccgtatgactacaagccgatggggaggtgctggtggtcatgcgcctccgcctccgtcgtcaccgcggactccgccccaggctccgccgcagggatggatggccttgtgacggagggcgatctgcgggagctggtgggcaacctcggggtggccgcgcgtgagccggagagggaggaggtggcagcaggtggtcgccaaagggaacgatgacttctcctacagtgtgaggtgcgacatgcccacagatgctcgtcctgaagatcttagtgctgcagcactgatactatgctgaacctgacttctgtgccctgcggagctgcatttacgaatgggaaaatgataaaagtccgcttgtggtacaacaccactggctgctttgagttatcaggcaatggttggtctgtaaaaact

SEQ ID NO: 22502 - DNA, 480 bp, Oryza sativa
  Clone ID: uC-osflM202054b05b1
gtgtgtagctgaagctcaaggttcagtacctggacacggcctacatcggcggattctgcagctacggcaaggatctgagcaagatctgcaccatgcacgccaactgctgcatcggcctccaatccaagatcagcgatctcaagggtgttcttgctgactggaagaactacaccaggttgccaccctgggcaaagcccaatgccaggtggactgtgcctggtaaatgcatccattgattttgattgccgatcgggcagtatctggtgttgtaggctacgtacagtcaggaagatagctttatttgcacatgaaagggcgaattgcgttatttttggtttgctgtagattgatgggttcgatttcaagttatattactgtatacctgacggcagacaagcatacgcatgatgggcacactatatgatatgatatgatatgataggactttagatgtaagatgtcatcatgtcttcagctatg

SEQ ID NO: 22503 - DNA, 505 bp, Oryza sativa
  Clone ID: uC-osflM202054b07b1
tttttctcgaaggacagagttaagccttctcccttgccagacagctggaagctgaaggaaatcttcgctaccggtattgtgcttggaagctaccttgctctgatgaccgttattttcttctgggccatgcacaagacagactttttcacggacaaattcggtgtcagatcaatcaggaacagtgaacatgagatgatgtctgcactgtacctccaagtcagtattgtgagtcaggccctcatcttcgtcacccgttctcgcagctggtccttcatcgaacgccctggtcttctcttggtcactgcattcatgcttgcacaactggttgcgacattcctcgctgtctatgccaactggggctttgccaggatcaagggcattggctggggctgggctggcgttatctggctttacagcattgtgttctacttccctcttgacatcttcaagttcttcatccgctttgtgctgagtggaagggcctgggacaacctccttgagaaca

SEQ ID NO: 22504 - DNA, 247 bp, Oryza sativa
  unsure (1)..(247): unsure at all n locations
  Clone ID: uC-osflM202054b08b1
cttctctctccctctctgctctgctcttcctgagctccgcggcaaggaagcttctggaaggttctgcgggatgacgacgagcagctggggtggtggtggtggtggcggcnncnncnncccncggctgcngcgctgcggcctcctcctgacgctcctttcaggcggtggccggtggcgcatgcgccatccctcaaaggcccccggtctacatgacctctacccgatttcgctcccatcctcataactg

SEQ ID NO: 22505 - DNA, 495 bp, Oryza sativa
  Clone ID: uC-osflM202054b09b1
ttatcgatgtcttcgagttcaactcaaagtttactgacaagctgcgaagattaaagatacctcttcctccagttgatgagaagaagaaagtagctgaagatgttgataaggatcgcagatacgcaattgatgcatcaattgtgcgtattatgaagagtcgcaaagtattgggtcatcagcaacttgtgatggaatgtgtggagcagcttggacgcatgtttaagcctgacttcaaggcaataaagaagcgaattgaggatcttatcacaagggattacttggagagggataaagacaacccaaatgtgtacagatacttggcttgatgggttttctgctggtggacggatacttgccggagcctgacttctgtgccctgcggtgctgcatttacgaatgggaaaatgataaaagtcgtcttgtggtacaacaccactggctgctttgagttttcagcaatggttggtctgtcaaaaactagcagagtccgcagga

SEQ ID NO: 22506 - DNA, 503 bp, Oryza sativa
  Clone ID: uC-osflM202054b11b1
tgtgacttctctacgcggtcacgggttccccagcggaggagaaagatagatagagagagcaaagagcaaaaaaatctctcttttttcttcttgttgtttctgcagttacctttgtcttgccttcaatgccaccgctttactgccggatctgaggaaagctcccatccttgctgagttcttgtgctgcttcttccacaattcttccttttgttgagaattttgccttccatctgcttaatcggtgacaaaggtggctgggatcttgcttctcttcctgcaagaaaaggctcgtttttttgtttcgccgtttgctgcttgctcaggcaggaggaaggcgatgctgttcttgctgatttcagtcttcttcttccggtggtcgagtgagttttgttgctacttcaccttcgcttcgttgcgctctgcggagagaaagaaagcaaaggtggtggaaaagaagcgaaaattttgcttgcttcctctgcaaatctgaggaattttctcgc

SEQ ID NO: 22507 - DNA, 313 bp, Oryza sativa
  Clone ID: uC-osflM202054b12b1
tggtattccgagtaggagagagcgagagagagaggtggggagggaagaagagtgactccacactccacactctcatcccctggtccctttcttggatcatgagaaaccgcgcttcacaaccgcaatactaggcagcattaggaccggggactcggctacgtggtgttcggccctggatcgcagcgtggaattaagaccggcgaggactcagcgacggaggcacccccgtcattcctacgcttttgtgcccgtcagcttctcgcagcgagagagagagagagatcgaccaggcgttcactgaattttactagaa

SEQ ID NO: 22508 - DNA, 507 bp, Oryza sativa
  unsure (1)..(507): unsure at all n locations
  Clone ID: uC-osflM202054c01b1
ttatcttggaatgcccagggagcatattccggtcgccggatgccgacgtcggcgactcactctcctaccgtgccgccggaccttcttcgacacctggacggacgagcgctctccacccccatgctcgacccgctcatccgcgcggcctccgcctccgcctccgcgccgcaccacgccttctccctcttcctcctcctgctccgctccgcgctgcgcccttcccacctcaccttccccttcctcgcccgcgccgccgcgcgcctcgccaccccgcgcctcgcgcgcgcggtccacgcgcagccgctccgcagggggctcctcccccacgatctccacgtctccaactccctcgtccacatgtacgccgcctgcgcgctcccgggactcgcccgccgactgttcgacgaaatcccacgcccgaaccacgtctcctggaacgccctcctcgacggctacgccaagatgcgngacctccccgtcgtgcgccggatgttcgcgctgatgccc

SEQ ID NO: 22509 - DNA, 506 bp, Oryza sativa
  Clone ID: uC-osflM202054c02b1
gcgttccttctctaatctcaagtctctgtctcgaggtgctcgcatctccactcgccatgggcaagattaagatcggaatcaacggtttcggaaggatcgggaggctcgtggccagtgtggccctccagagcgaggatgtcgagctcgtcgccgtcaacgaccccttcatcaccaccgactacatgacctacatgttcaagtacgataccgtgcacggccaatggaagcacagcgacatcaagatcaaggactccaagactctgctcttgggcgagaagccggtcaccgttttcggcatcaggaaccctgacgagattccgtgggctgaggctggtgctgagtatgtcgtggagtcaccggtgtcttcactgacaaggagaaggctgctgctcacttgaagggtggtgccagaaggttgtcatctcagccccgagcaaagatgcccgaatgtttgtctgcggtgtcaacgaggacaagtacacttcagatattgatattgtctcaaa

SEQ ID NO: 22510 - DNA, 459 bp, Oryza sativa
  Clone ID: uC-osflM202054c04b1
cttctttctgtcgaaccctctccagtctccactccactgaatcctcccacctcggctcgaaggaatggcaagcggtagtgaagctgagaagtcacctgaggttgtgctggagtggcctaagaaggacaagaagaggcttctacatgctgtttaccgtgttggagatttggatcgcaccattaaatgttacacagaatgctttggaatgaaattactgaggaaaagagatgtgcctgaagagaaatatacgaatgcatttcttgggtttggacctgaggacaccaactttgcacttgaattgacatacaattatgctgttgataagtacgacattggagcaggatttgggcatttcgctattgcaactgaggacgtgtacaaattggctgagaaaattaaatccagttgttgctgcaagatcactcgtgaacctggtcctgtaagggaggatccactgtg

SEQ ID NO: 22511 - DNA, 473 bp, Oryza sativa
  Clone ID: uC-osflM202054c06b1
gatttttatgtcacgatggtgtttcctgaaccttggtgcatgcctcgtctcttcactgctgatatcgcggctttctatgagagttactacactaacaaaggagttaagatcgtgaagggtacagtagctgttggttttgatgctgatgctaatggtgatgtcacagcagttaacctgaagaatggcagtgtgcttgaagctgatattgctgttgttggtgttgggggcagaccgctgactactctctttaaaggtcaagttgctgaggagaaaggtggaattaagaccgatgctttctttgaaacaagtgttcctggagtctatgctgtcggtgatgtggccaccttccccatgaagatgtacaatgagttgaggagagtggaacatgttgaccatgctaggaagtctgcagagcaggctgtaaaggcaatcaagggaaaagagtccggcgagtccgttgtggagtatgacta

SEQ ID NO: 22512 - DNA, 431 bp, Oryza sativa
  Clone ID: uC-osflM202054c07b1
ctctctataaatatttccagtccgagggataggagcggcgacgacaggcggctcccctccagcgctggctccggcgagcccgatcctccttcctccaaagagtactacctgctccctgcggtaacaggttgcccccccccgtgccgccgccccggcatcaccggcgccgaaaggcatcaacgtgccgtcgcggccccggccggccggcctcctcccctttgcctcgctttgctcccgctacgatcaccggccgcccgcccttgtccgccacccaccgccggtccgccgcctcctaggtcctgtctccaaacccgatcgcccacttccccctacccacagggaactctcggcatattaccaacgacagcctgcagaagctgatggtgctggccatgctcacggtgtggagacacctcagccggcgggggagc

SEQ ID NO: 22513 - DNA, 105 bp, Oryza sativa
  Clone ID: uC-osflM202054c09b1
tcactcacaccgtccacacacccacaccgccggtagcgaggcagctcacatggcggcgacggcgacggcgacggcggcgccggaggaggaggaggggaagaggtc

SEQ ID NO: 22514 - DNA, 511 bp, Oryza sativa
  unsure (1)..(511): unsure at all n locations
  Clone ID: uC-osflM202054d02b1
gcggcatctttacaagtacgtgcatagaaattttgtaggaacttttgtagagtttgaattgtttgtaacaacagatattcctgcaggttatttgctttcatagaacaggataaggatgaaaatttgtgagatgtcccacagtttccacgttcgtctgaccagcattcaagaaggcatatgctggacatgtggttccaatgacagtcaaggctcaatgaatgggctaaggttaatgttggaagccattaaccttagcagtgaagtatgctaaggtattatgaatgatgaaatgcactgggcgccgagcagtgaattacgccacgttttgatggatatgncgttttgcctagaaagcattgtctgacacaagaatcagcagcacatgtttaagttcaaagttgtacttcttttacaactaaaatgtgtaaattcaaatttgtaacccatactgacctgaaagcaggttttgtttggcatgttcacatcttgcaggtccacacctacaagatct

SEQ ID NO: 22515 - DNA, 464 bp, Oryza sativa
  Clone ID: uC-osflM202054d03b1
gcgtctgtttggtcggtctggatttcgatttaccccaaatccaccgcaggagccaagtcgccgtcagtatgcgaagtggagatggcccgtacgaagcagaccgcccgcaagtccacctgcggcaaggtcccgaggaagctgctcgccaccaaggcggcgtggaagtctgctccgaccaccggctggtgtgtagaagtcccaccgctacaggccggggtcggtggttctccgctagatccgcatgtactcagaagagcacggagctgctgatccgcaagctgcctttcgagcgcctggtacgcgagatcgctcaggactgtaagaccgacctacgatttcagagccacgcggtgcttcgcctacatgagggccgcctggcctacctcgtcggtctcttggaggacaccaacctatgtgccatgcacgccaagcgcgtcatcatcatgcccaaggacatgcagctc

SEQ ID NO: 22516 - DNA, 444 bp, Oryza sativa
  Clone ID: uC-osflM202054d04b1
ctttctcttgggttctccgccgccgtcgcagcatcagcccaatccgacgccatgagggagtgcatctcgatccacatcggccaggccggtatccaggtcgggaacgcgtgctgggagctctactgcctcgagcatggcatccaggctgatggtcagatgcccagtgacaggactgttggtggaggtgatgatgctttcaacaccttcttcagtgagactggtgctgggaagcatgttccccgagctgtatttgttgatcttgagcctactgtgattgatgaggtgaggactggttgataccgccagctcttccaccctgagcagctcatcaatggcaaggaggatgcagctaacaactttgcccgtggtcactacaccattggcaaggagattgacgatctgagccttgaccgcatcaagaagctagctgacaactgcactggt

SEQ ID NO: 22517 - DNA, 482 bp, Oryza sativa
  Clone ID: uC-osflM202054d06b1
ctcattcttccattgatgggaaagaagttataaactttgcatcagcaaattatcttggtttgattggcaatgagaagattattgattcttgtgttggttcactggagaaatatggtgttggttcttgtggtccacgtggcttttatggaacaattgatgtccaccttgactgtgaggcaaaaatagcgaagtttcttggaactccagactcaattctgtattcatatgggatttctacaatatttagtgtgatacctgccttttgtaagaaaggagacatcatagttgctgatgaaggtgtgcactgggcagtgcacaatggtcttcatctgtcaagaagcactgttgtttattttaaacacaatgatatggcttcacttgcaaacactttggaaaaacttacacgtggaaataaacgagcagaaaagatcagacgatacattgttgtagaatctatctaccagaattctggtcaaattgct

SEQ ID NO: 22518 - DNA, 388 bp, Oryza sativa
  Clone ID: uC-osflM202054d07b1
tctttgaaacaaacccctctcactcccagatacctgctgctgccactagcccactaccatggatccttgcaagttccggccgtcgagctcgttcgacacgaagacgacgacgacgaacgcgggagctccggtgtggaacgacaacgaggcgctgacagtggggcccagggggccgatcctcctcgaggactaccacctgatcgagaaggtggcgcacttcgcccgggagcgcatcccggagcgcgtggtccacgcccgcggcgcctccgccaagggcttcttcgagtgcacccacgacgtcaccgacatcacctgcgccgacgttgtccggtccccgggcgcccagacccccgtcatggatcgtttgtcacccgtcatccacgagcgc

SEQ ID NO: 22519 - DNA, 504 bp, Oryza sativa
  Clone ID: uC-osflM202054d09b1
tgatctttgaatgcacagcgagcaaatcccgctcgccggatgccgccgccgccgcctcactctcctcccctcccgccgcacctcctccgccacctcgacggccgggcgctctccacccccctcctcgacccgctcatccgcgcggcctccgcctccgactccgcgccgcaccacgccttctccctcttcctcctcctgctccgctccgcgctgcgcccttcccacctcaccttccccttcctcgcccgcgccgccgcgcgcctcgccaccccgcgcctcgcgcgcgcggtccacgcgcagccgctccgcagggggctcctcccccacgatctccacgtctccaactccctcgtccacatgtacgccgcctgcgcgctcccgggactcgcccgccgcctgttcgacgaaatcccccgcccgaaccacgtctcctggaacgccctcctcgacggctacgccaagtgccgtgacctccccgccgcgcgccgggtgttcgcgcggatg

SEQ ID NO: 22520 - DNA, 453 bp, Oryza sativa
  Clone ID: uC-osflM202054d10b1
ctgtcgcgtggggaccggcacacctcgaagccggaggcggagtacccggcgctgcggttcatccgcagctgcagcgcgtcgctggcgccggcgatcatggagaagctggaggcggcgttcggggcgccggtggtggaggcgtacgcgatgacggaggcgtcgcacctgatgacgtcgaacccgctgccggaggacggggcgaggaaggccgggtcggtggggcgcgcggtgggtcaggagatggcgatcctggacgaggaagggcggcgggtggaggccgggaagagcgccgaggtgtgcgtgcgcggcgccaacgtgacgagcgggtacaaggggaacccggaggcgaacgaggcggcgctccggttggggttggttccacaccggcgactcggcgtcgtggacgaggaggggtacctgcggctggtggggcggaacaaggagctgatcaac

SEQ ID NO: 22521 - DNA, 486 bp, Oryza sativa
  Clone ID: uC-osflM202054d11b1
atttccatttccccctcgatcccacacaattcgatcccaatttccggttttcgtgtgtgaatcttttggagagatcgatgaagttcggcaagagcctgagcagccagatcgtggagatgcagccggagtggcgcgacaacttcctctcctacaaggacctcaagaagcgcctcaacctcatctccggcggcgccgccggggagagggcgagcaagcggcgtcgcgtcggtggcgcgacggcggtgacggtgacggcggcggcggcgggcgggatgacgctggagcaggccgggttcgtcggcctcctcgacgccgagctcgacaagttcaacttcttcttcctcgagaaggaggaggatgtacgtcatcaagcagaaggagctccgggagaggaagatggcatcggcggaggaggtgatgcgcgtgaggaaggagatcgtcgatctcacggcgagatggtgctgctcgagaattacagcgcgctca

SEQ ID NO: 22522 - DNA, 487 bp, Oryza sativa
  Clone ID: uC-osflM202054d12b1
tgttatcacaaacagatcgatcgctcctatcctctttcccccttctcctcgcgtcgcctccacaacccaaccaaccatggcgaggccgccgcaggaggcgatcgacaccttcgtcagcatcaccggcgccgacgaggccctcgccgtccgcaagctcgaggaacatggtggcgaccttaacacggcaatcaatgcacatttcaatgaaggagacagtacagtgaacagagccagtcaaaacaatatacctgagagtcatgatgatatgatggacctggatggaccacttgataatgcatttagaagactctttgttccctgaaactttgcgtgacccttttgcactgatggacacaaactttcagcaaaattattttgacgaggttggttccacagatcttttcggtcatggcccacaggtttcacaccctaaggaggtgcgagagatacctacgaagttaaggatagcaacccgcatacaggccct

SEQ ID NO: 22523 - DNA, 513 bp, Oryza sativa
  Clone ID: uC-osflM202054e01b1
gtggtctgtacgcgactcctcccccctccgccgccgccgccgccgcagcgagaccccggcgaatggcgtcccgcatcgcctctcgcctcctccgccgctccaacgcgactctaggcctcatcaggagttattcacatgccaggaactacagcagtcaactttcagctcttattccaattggttcccagagctcaaagcttacaagaagacgctattacttgccaaatgcctctccgtaccaactctggagtaggtcatttgcatctgacaatggagaccaggttgaagctgttgtccctttcatgggtgaatctgtaactgatggaactcttgctaacttcttgaagaaacctggtgacagagttgaggctgatgagcccatagcacagattgaaactgataaggttactatagatgttgctagtccggaagctggtgttattgaaaagtttcattgctagcgaaggtgatactgttactccaggcaccaaagttgctatcatatcaaagtct

SEQ ID NO: 22524 - DNA, 513 bp, Oryza sativa
  Clone ID: uC-osflM202054e02b1
cctgtgtggtagatttgggaaactaaacaagagagttacattcccaatgaagttagacctaacgccatacatgagtagcactgatggaagtgaccaatacgatctctatgctgttgttgttcatctggatatgctcaatgcttcattttttgggcattatatatgctatataaaaaattaccgaggacgctggtataaaattgatgactgcaaggttatggctgttgatgaggaggaagtacatgctcaaggtgcttatatgcttctatatagcaggagaacagctcgccctaggccactaattgcagtagaagaactcatgaaacagcagcaacagttgaaagtatgccctttgaatggacaaaatcatttgatacaagaggatgtgccattagaaggcgtgccatctttgaaaccctcagaagatctggaagttgattttgaatccaacaacatatctttacatactatggacagagagccagacctggattttcatgtgagctttgatag

SEQ ID NO: 22525 - DNA, 416 bp, Oryza sativa
  Clone ID: uC-osflM202054e03b1
atgcgttcttcttgagcttgtgctcatgtcttaatttctttgcagtgatgggcgaggcagagctcgactacggcgaggaggccggtgatgtatatgccgaggccgacaactccagtgaggcaggatgactggacgacgacagacgggcgcggcggacgggcacgttctggacagcgagcgcgcacatcatcaccgacgtcatcggctccggcatactgccactggcttgggcgatcgcgcatctggcctgagtggccggccccgccgagatgctcctattggccttcgccatatactacacctccaccctcctcgtcgagtgctaccgcaccggcgaccctgccaccggaatgctcaactacacctacatggacgccgtgcgcgccaacatttgcggtgccaaggtcaccttttgc

SEQ ID NO: 22526 - DNA, 487 bp, Oryza sativa
  Clone ID: uC-osflM202054e04b1
gcgatcctttcaacgctgccgctgaatctcactttctctctctgttcttggtgcttccgccgccatggctgctcccagcgtcgccgtcgacaacctcaaccccaaggttttgaattgtgagtatgcagtgcgtggagagattgtgatccatgctcagcgcctgcagcaacagctacagactcaaccagggtctcttccttttgatgagatcctatactgcaacattgggaatccccagtctcttggtcagaagccagttacattcttcagggaggttattgctctttgtgatcatccatgcttgttggaaaaggaggaaaccaaatcattgttcagtgctgatgccatttctcgagcaacaacaattcttgcctcgattcctggaagagcaactggagcatacagccacagccagggcatcaaagggctgcgtgatgcaattgctgctggaattgcatcacgtgacggataccctgcaaatgcagac

SEQ ID NO: 22527 - DNA, 479 bp, Oryza sativa
  Clone ID: uC-osflM202054e05b1
tttcctctcacctgaccaccatcacctgctcctcctcctgctcttcctccgcgcgcgcgagatccagggagagggagagggagagatcatggcggggacggtgacggtgccgtcggcgtcggtgccgtcgacgccgctgctcaaggacgagctggacatggtgatcccgacgatccgcaacctggacttcctggagatgtggcggcccttcttccagccctaccacctcatcatcgtgcaggacggtgacccgaccaagaccattcgcgttcccgagggcttcgactacgagctctacaaccgcaacgacatcaaccggatcctcggccccaaggcctcctgcatctccttcaaggactccgcatgccgctgcttcggctacatggtctccaagaagaagtacgtcttcaccatcgacgacgactgcttcgttgccaggacccatctggcaaggacatcaatgcttttgagcagcacat

SEQ ID NO: 22528 - DNA, 120 bp, Oryza sativa
  Clone ID: uC-osflM202054e07b1
tcgtgctgaggagccaggaggaggagcaaggaggtgcctgatgcgacggactgccagccctacaggatcagctggttcaggggaggaagctggaccacccgcccgcacggcgacccgggc

SEQ ID NO: 22529 - DNA, 507 bp, Oryza sativa
  Clone ID: uC-osflM202054e09b1
tctttgtctcctcctagatgcttacatttgggactgcaggctttgtaacataagttcaataacaaaagatggccgtgcttctagaataaagggttcggaagctgaattacaccaggcaattacaaatcacggagaaatgcatcaagagccttctacttgtccacagtgttcttcaggaagtttaagaaaatctctactatctagagagggccattccatggacactgagattatcttgcctgagatagatttgccagttggtatggtggatagttttgtgcatgatataggaggccttgacttggttttcagcaaatttgatgtgtcgggaatagcacagagtctatcaaaagattccatcaagacagaaccagtggagagattaccctcacttgcatctattttatctgataaaatagatatggcatggagtggatcttgtgaattacacaacaacctccctgagagtacaaccaaaggcaatgaaaatccaagttacagtaaagc

SEQ ID NO: 22530 - DNA, 486 bp, Oryza sativa
  Clone ID: uC-osflM202054e11b1
ttttctactagccagtaagctagctaactaactacgtggctatggcccccaccgtgatggcctcctcggccacctccgtggctccattccaagggctcaagtccaccgccggcctccccgtcagccgccgctccaccaactcgggcttcggcaacgtcagcaatggcggaaggatcaagtgcatgcaggtgtggccaattgagggcatcaagaagttcgagaccctatcgtacctgccaccactcaccgtggaggatcttttgaagcagatcgagtacctgcttcgatccaagtgggtgccttgtctcgagttcagcaaggttgggttcgtctaccgtgagaaccacaggtctcccggatactacgatggcaggtattggaccatgtggaagctgcccatgttcggctgcaccgatgccacccaggtgctcaaggagctcgaggaggccaagaaggcctaccctgatgcctttgtccgtatcatcg

SEQ ID NO: 22531 - DNA, 364 bp, Oryza sativa
  unsure (1)..(364): unsure at all n locations
  Clone ID: uC-osflM202054e12b1
tgtctcatggcgttcttctcccatcaccacctccagcagccgcatcctcaggctccgccgccgccgccgccgcagcagcagcagcaaccggtgcccccttccttcaggaacgcgctgccggtgccggtagatgggcagatcccggcgcctcttcccttcttcaacccgccgccggccttccaggaccagcccgcgcagccaccactggtggacgcgatggggcttacggccgcggcggggctagggnnggaggcagcctagggagcaggagctgctaggagagaactcccagatgtcgtccatcgatttcctgcagacgggccncgcggtgtccactgggctggcgctctctctggaggacaga

SEQ ID NO: 22532 - DNA, 498 bp, Oryza sativa
  Clone ID: uC-osflM202054f02b1
agtgcggttcgttgctttctacaatgagcttgacaaacgactgggaggaacatctggctgtcaagcacttctgtgtggagggtcagcttgaattcaaggccatcctgtttgtaccaaagagagcgccatttgacctctttgacaccaggaagaagcaaaacaacatcaagctgtacgtacgccgggtgtttatcatggacaactgtgaggagttgatcccagagtggctcagctttgtcaagggcattgctgattctgaagaccttcccctcaacatctcacgtgagatgctccagcagaacaagatcctgaaggtgatccgcaagaaccttgtgaagaagtgcgtgaagctcttctttgagatcgcttggaacaaggaagactacaacatgttctactaggctttctccaagaatcttaagcttggcatccatgaggattccaccaacatgacccagaattgctgagctcctgaggcatcacatccaccaagagtgg

SEQ ID NO: 22533 - DNA, 510 bp, Oryza sativa
  unsure (1)..(510): unsure at all n locations
  Clone ID: uC-osflM202054f03b1
atctgtttgactgcttatggttttgaccttatccgtggagccaagactcttgaccttatcaagagtgctggcttcccctctggaaagtacctctttgccggtgttgtggatggacgcaacatctgggctgatgatctcgctgcatctgtcactacccttgagtctcttgaggctattgttggaaaggacaagcttgtggtctcgacttcctgctcactcatgcacaccgctgtggatcttgtaaatgagaccaagctcgatagcgagattaagtcatggctcgcttttgctgcccaaaaggtggttgaggtgaatgcccttgctaaggcattggctggacagaaggatgaggcttactttgcagcaaacgctgctgctcaggcctccaggaggtcatcacctcgtgtgacaaacgaggcagtccaaaaggctgctgctgctctgaaggggtctgaccaccgncgtgctaccaatgttagcgctagactggacgcacagcagaagaagctc

SEQ ID NO: 22534 - DNA, 431 bp, Oryza sativa
  Clone ID: uC-osflM202054f04b1
gtcggtatacgccgccgccgcactcatggccagcctcgcgccgcagaccaagttgctgagggacgggaagtggtcggagcaggacgcggcgatcctggtgcccggggacatcatcagcatcaagctcggcgacatcatcccggcggacgcgcggctgatggagggcgacccgctcaagatcgaccagtcggcgctcaccggcgagtcgctccccgtcaacaagatgcccggcgacagcatctactcgggttccacctgcaagcagggcgagattgaggccgtcgtcatcgccaccggcgtccacacctttttcggaatggtcgcccaccttgttgactgcaccaacaacgtcggccattttcagaaggggctgacggcgatcgggaacttctgcatctgctccatcgcggacgggatgctgatcgagatca

SEQ ID NO: 22535 - DNA, 281 bp, Oryza sativa
  Clone ID: uC-osflM202054f05b1
gcggttctttgtgtgcaatttttcgtagtgggagggaacaccgcggaaaatggcgtgccatatgcccctgctgctgccatgggtggggttggtgggctctcgcaggagtgagacataagcctgtgatgtcaggaggggaatcgaaggtggcgcacgattcgattagacagtgtagtgtcggtgtttcaagcttgttgcagctggaatgaactcaagcggaactcgagtattaagtactgtatttgtgttccatcaaagaaaatacattactttggctgctc

SEQ ID NO: 22536 - DNA, 480 bp, Oryza sativa
  Clone ID: uC-osflM202054f06b1
gcgtcttcttcgccgccgccgccgaatccgagacccccatctcggattcacctctcccgcctccggcctccctcaccgtctccccacgcgcgtcagtcatggcgggaatggcaccagagggatcccagtttgatgctaagcactatgattctaaaatgcaggagcttctgaaccaaggtgaaaccgaggagttcttcacatcttatgatgaagttcatgagagttttgatgacatgggtctccaagagaaccttctcagaggcatctatgcctatggtttcgagaagccttcagccattcagcaaaggggtattgtccctttctgcaagggtcttgatgtgattcagcaagctcagtcaggaacaggaaagactgccaccttctgttctggaattttgcagcaacttgactatgctgtggtttgagtgccaggccttggtccttgctcctactcgtgagcttgcacagcaaattgagaaa

SEQ ID NO: 22537 - DNA, 112 bp, Oryza sativa
  Clone ID: uC-osflM202054f07b1
gtcagaagcagagcttagctctcccctcctcctcctcctactactcccatggcggccgggtgggcccgcccagccggctttaacctgcatgaggagactccggaaccacacc

SEQ ID NO: 22538 - DNA, 322 bp, Oryza sativa
  unsure (1)..(322): unsure at all n locations
  Clone ID: uC-osflM202054f09b1
gtgtaaatgtcatgtctcctcccgttaaaccctagcttaagcccccttcctcttctccgcgcctccgcctccgcctccgcctccggtctcccctctcctcacacgctccggctccgacggacgattcccacccagtaatggcgatggatttggacgagccgctcgacgcggagaagggcgaggcggcgntgcggcggctgcgcgacgcccacccggtcctctacctgtacatctcggccgacctcgacgtcgccgtcggtgaggcctacaagcacctctacgactagctcgtccccttctccaccgcgcagccggccccgct

SEQ ID NO: 22539 - DNA, 490 bp, Oryza sativa
  Clone ID: uC-osflM202054f10b1
cctgtgtcaaggagagggtagtagcaccttgctctcctttgccttcagagaaaccggaagcaatggcgtctgctactctcctcaagtcatctttccttcccaagaagtctgaatggggtgccacccgccaggctgccgcccccaagccggtgactgtctccatggttgtccgcgctggtgcctacgacgatgagcttgtcaagaccgcgaaaaccattgcatcaccaggaaggggtatccttgccatggatgagtcgaacgcgacctgcggtaagaggcttgcgtcaattggccttgagaacaccgaggccaaccgccaggcttaccggaccctccttgtcaccgcaccgggcttgggacagtacatctccggtgctatcctcttcgaggagactctgtaccagtcaactgtagatggcaagaagattgtcgacatcctcactgagcagaaaatcgttccaggtatcaaggtcgacaagggtcttgtgcc

SEQ ID NO: 22540 - DNA, 431 bp, Oryza sativa
  Clone ID: uC-osflM202054f11b1
tctctgggtgatagggtttgtaactttcttcttgagttctatccttgacaatttgacttccactattgagatggtttcattgcttcggaaactagtacctccatcagagtacagaaaattgttaggcgctgttgttgtgatatctgcaaatgctgggggtgcatggacaccaattggtgatgtgacgaccactatgttgtggattcatggtcagattacaacgttgaacacaatgcagggcttgcttgttccctcagatgtttcattggcagttccactggctctgatgtccctcacgagtgaagcaaatggatcttctcagaaatcttccagcttgctgtcatcagagcagatggctcctcgaggacaacttgtctttgctgttggccttggagccttagtgtttgtcccagtgtttaaagctctcactg

SEQ ID NO: 22541 - DNA, 427 bp, Oryza sativa
  Clone ID: uC-osflM202054g01b1
atgctggctcgcccgccggcaccggcccggacttactggctggacccacgcatgcgttctaattcagtccgacggccgttggcaagggacgcggagacacagttcgcttcgatcacgtacacctacactagatggcatactgtcctgcttgcttgcgcacgaccatgccttcagagcaagtggaagctgctttcaaggccatcgagttggacggcgagagcgatgtatctaagctcaagccggcacttgctgcatgcactgtacaaaggactgtgacagacgtcttcatcaacgggaagcatattggtgactggaatgatacctcgccatagcacactgacggcaacctggtgcctgtggtgaccgaggctggagcaatctccagccctgcaatgacgacagtcaccgcacaggtgcccgagggaca

SEQ ID NO: 22542 - DNA, 328 bp, Oryza sativa
  unsure (1)..(328): unsure at all n locations
  Clone ID: uC-osflM202054g02b1
gctcgtttcgcctcgacgtctacttccctcccgcctccaagcaacccctctcgccggaggaggaaaccctcctccgcttccaatccccaaatccccatccgctatatcaacccgatcccctccccgatcgttcgatcgttcgatcgatctcgccctcgactccaagccgacgagaggagttgaggagttgaggccatttcggtgcgtgcgcggcgggcggaggtgatcggtggcgtttcgttccgttggcggcgggcggaggctgattgctcgcgcggcgtggagcggggggngagggatcctagcgggagggagagcgcgcgcggat

SEQ ID NO: 22543 - DNA, 323 bp, Oryza sativa
  Clone ID: uC-osflM202054g03b1
atcggtacatgatccatacgagaaagagaggagcagggatgccgcgcgggaagaaccacccggacagccaggaggaggaggcgccggctgccgcgggggcggaggagagcccaagggaaacggacaaggagggggaaataaaggagagtgcacaacactgcaagcgacagaattggaaagtggcgagacacggccggaaagtcccaggaaatgggcaacaaatcgcgcctcagagaaaattgctgaacaagacggcggccaatacgagatggacagaaatgccacacaatgcagcaacttaaagagcgacgtgccgaaccgca

SEQ ID NO: 22544 - DNA, 494 bp, Oryza sativa
  Clone ID: uC-osflM202054g04b1
ccctgtttcggaatgagaaagcaagacggtacttgagcagcatgagaaagaaagatccagtccccttctctcaaaagtttcctaatgcagatcctttggcactaaaactcttgcaacggttattagcctttgatccaaaggaccgtccaactgctgaagaggcattgactgatccatactttaaaggcctttccaagattgatagagaaccatcatgccagccaatcagaaaactggagtttgaatttgagcagaaaaaattgtctaaggaagatataagggagctgatattccaggagatattggaatatcatccacaattgcagaagaactacagaaatggaagagagagagcaacctttctctacccaagtgcggttgatcagtttaagaagcagttctctaatcttgaagaaagcaatggaagtggctcagcaattccaatggaaagaaaacatgcatcgcttcctaggtctactactgttcactctact

SEQ ID NO: 22545 - DNA, 495 bp, Oryza sativa
  Clone ID: uC-osflM202054g06b1
gtcctttacaccacttcccttccctctctgcagccgaggcggcggaggagaagaggagctcgatcgatcccccccaccggcggcggcgggcgagatgaaggtcaccgtgatgaccgccgacgagcagattctcaccgtcgacgtcgaccccgacgaatctgtggagaatttgaaggcgcttcttgaggtggagactagtgtgcctttgcggcagcagcagcttcacttcaatggcagggagatacagaacacggataaacttagcaccgtcggagtccaggatggcgatcttgtgatgatgtgaaaaggttacctctaatgaaaggccatctcaggatattataagattaaaccctgatggatctgcctgttgatcctcaagctttccgacaacatattcgaggtgattcacaacttatgggacaactccttcagaatgacccggcattagcacaagctattcttggtgatgacatcaatgagttgcaaaatacc

SEQ ID NO: 22546 - DNA, 94 bp, Oryza sativa
  Clone ID: uC-osflM202054g07b1
tggtcccagcccgccgcccgttgggaagggagcttcgaggcggccgaccgagacgcgtcggccggaccagcttggccgctggcacgggcccttg

SEQ ID NO: 22547 - DNA, 490 bp, Oryza sativa
  Clone ID: uC-osflM202054g10b1
gtctagcagtccatggccgcgtcaccgatctccgcgccggcgacgctcaggctcttcttccacgactgcgccgtcaggggttgtgacgcgtcgatcatgatcgtgaactcgaacggcgacgacgagtggcggaactcagacaaccagtcgctgaagccggaggggttcacgacggtgctcaacgccaaggccgccgtcgacagcgatccacagtgccgctacaaggtgtcctgcgccgacatattggcgctcgccgcaagagaatccgtctaccagagcggagggcccaactaccaggtggagctggggagatacgacggcagggtgtcaaccagagacagcgtagtgctgccgcatgccaacttcaacctggaccagctcaacgctttcttcgccggcctcggcctctcccagactgacatgatcgctctctcaggtgggcacacgttcggcgcggcggactgcaggttcttccagtacaggatcggcg

SEQ ID NO: 22548 - DNA, 471 bp, Oryza sativa
  Clone ID: uC-osflM202054h04b1
atcctgtacactgcatacgatttgcaacagctggagaagatgatccaaatagcactcctctgcactcatgtggagcctcatcttcgccctgctatgtcagaggttgtgcagatgctggaaggcaatgttgtcccagcggagcaatgggaggagtggcaggtggctgaacttgcccggcggcatcagcatgagatgaaccaacagcgcaggctgttcagcttcagtgaggagtctctcaatatccaggaagccattcagctatccagtggcagataactggaagatcatacaattgtatcacatgagcttcacttgtttcccaagaaagggtgaaggagcgaggagtctctcaatatccaggaagacattcagctatccggtggcagataactggaagatcatacaattgtatcacatgagcttcacttgtttcccaagaaagggtgaagggagacaacagcactcgctata

SEQ ID NO: 22549 - DNA, 493 bp, Oryza sativa
  Clone ID: uC-osflM202054h05b1
ccttgctctcgcctctcctcctcccccgtcttgccttcgcgcgcgccacccccacacacgcgaccatggcggcagtggcaggaggcgcagcgcgggcgctgtcgcaggcggagcaggacgtgcagatgatgctcgccgccgacgtccacctcggcaccaagaactgcgacttccagatggagcgctacgtgtacaagcgccgctccgatggtatctacatcatcaacctcggcaagacatgggagaagctgcagctcgcggcgagggtgattgttgccattgagaacccccaggacatcattgtccagtcggcccgcccctacggccagcgcgccgtcctcaagttcgcgcagtacactggcgcgcacgccattgctggaaggcatacgcctggtacatttaccaatcagctccagacctccttcagcgagccccgtctgctcatcctcactgacccaaggaccgatcaccagccaatcaaggagtctgctct

SEQ ID NO: 22550 - DNA, 495 bp, Oryza sativa
  Clone ID: uC-osflM202054h06b1
cttgcttgccctcctcaacctcaaccctccgcctgctcatctcctgctccccacgacggcctcctccgccgccgccaagagcccgccggtataacaggctcgcggcgtcggcttcggcggcgcgggagatgccgtggccgcacgtgctgacggtggccggctccgactccggcggcggcgccggcatccaggccgacatcaaggcctgcgccgcgctgggagcctactgctcctccgtcgtcaccgccgtcactgcccagaacaccgccggcgtccaggggattcatgtggtgccagaggagttcatccgggagcagctcaactcggttctttcggacatgtcggtggatgtggtcaagacaggaatgctcccttcaatcggagtagtcagagttttatgtgaaagtctaaagaagtttccagtcaaagctttagtggtggatccagttatggtgtccacaagtggagatactctttcagaatcatctactctct

SEQ ID NO: 22551 - DNA, 470 bp, Oryza sativa
  Clone ID: uC-osflM202054h08b1
tctgttgcgccggaggtggaagacggacggggtagagttggggtctcgcggtgagccgattcctctctagtggtcgcgcctggtgtgttcgccgacgacgccggcgtcgcgtcagccatgggtgggctcgaggagatcaagaatgaggccgttgatctggagaacataccgatcgaggaggtgttcgagcagctgaaatgtacgcgcgaggggctctcctccgaggaggggaaccggcgtatcgagatgttcggccccaacaagctcgaggagaagaaggagagcacgatactcaagttcttggggttcatgtggaacccgctgtcgtgggccatggaaatggccgtcatcatggtcatctagctggtcaacggcggcggcaagccaccggactgagaggacttcatcagtatcatagccctgctggttatcaacttcaccatctccttgattgaaaagaacaacgcccg

SEQ ID NO: 22552 - DNA, 508 bp, Oryza sativa
  unsure (1)..(508): unsure at all n locations
  Clone ID: uC-osflM202054h09b1
tctatttagttcatgccacccattatgaatccctgagggaaattgctatgaagatactgcaaaacggtgtttctaccgttccaattatgttttcctcatcaccagatggctcatatccacaattgttgcatcttgcttccctttctggaattttgaaatgtatttgtagatattttaaaaattctcaaggtaatttacctattttgagccaacctgtatgcacaattcctctgggtacctgggttccaaaaattggtgatcctaatggccgtccattggctatgttgcggcctaacacatctcttagcgctgccctgaatttgctggttcaagctggtgtgagctcaataccaattgtggatgacaatgactcactgcttgacacatattccagaagtgacatcacagctcttgcaaaagacatggtgtacacacacattcgnctagatgagatgaccattcatcaggctctgcagcttggacaggatgcaaattcgcccttggattc

SEQ ID NO: 22553 - DNA, 494 bp, Oryza sativa
  Clone ID: uC-osflM202054h10b1
tcctagacgacacactccccccaccttcttgcgccacaagccgaagccgccggaatcctcgacgagacgccccgccgccgccgccgccgccggcgacgccccccctcaccccccgcaggcatcggagaaatataatataaatacagttaaggggttgaagcaacttcacaatgagtagcatagggactggttatgatctttccgtcaccaccttctccccagatggccgtgtcttccaggttgagtatgctggcaaggccgtcgacaacagcgggactgttgttggcatcaaatgcaaagatgggattgtccttggtgtggagaagctggtaacatcaaagatgattttgaaggggtcgaatcggagactccactctgtgcaccgacactctggcttggctgctgctggcttagctgcggatggtaggcagatagtctctagggcaaagtcagaggcagccagttatgaaaaggtgtatggagaacccatgcct

SEQ ID NO: 22554 - DNA, 494 bp, Oryza sativa
  Clone ID: uC-osflM202054h11b1
tgttaagtgcgagctccggatcagcacccccggccgcggcgcgtgggccggcgccggctgcggggtgccgttcccgcacagcccgctcctgctgcggtgcagcaccacccctgtctcgacgaggaagtccccgtccgccatgtcgccgctgcgccgcgccgatgacgacgacgacaacgccgaggcgccgtcgcccgctcccgccagggcctcctgcgaggtcggcatccggtgccaccgctgcggcgaccgcttggccaaccacgacgccctggagtcgtaccaccactccagacacgccgtgaccgagctggtggaaggcgactcgtcaggaaagagtgggagatcatctgcaaggccggggggactaagactgagaacgcgctgtgccgcatggaggtggcggtgtttagcgcacaacgcgaagaggacagtgtctagggcaaaggcagacgcagccagttatgaaaaggtggatggagaacccatgcctg

SEQ ID NO: 22555 - DNA, 494 bp, Oryza sativa
  Clone ID: uC-osflM202054h12b1
tcttccgctgctgctccagcatgcgcatcctccggggaatcctcgccgtctccggccacctcgccggccgccgcgcgccggcgaacaacgcccacctggcactcttctcccgcgccctccaaatcctcgcccagcaggagcccgtccgcctccagaagctctcggcgcccgactccgggatcgtggagatgaggctggagcggccggaggccaggaacgccatcgggagggagatgctccaggggttgcggagcgcgatcgagaaggtgaaggctgacgcgacggcgaaagtcgtgctgctggcgagctccgtcccgaaggttttctgcgctggcgctgatctcaaggaaaggaggttaatgagcccttgcgaagttcgcgaatttgtcaattccctaagatctacattcctgtcctttgaggcattgtcaattcctacaattgccattgttgagggagctgcttttggcggtgggttagaattggctctttct

SEQ ID NO: 22556 - DNA, 496 bp, Oryza sativa
  Clone ID: uC-osflM202055a01b1
attagcatcaaccccgtctccttcctccattcctccgccgctagaaccttctagaagctctcctcctcctcccatggcggcgacgatcgtgtccgtcaaggcgcgccagatcttcgacagcaggggcaaccccaccgtcgaggtcgatgtgtgctgctcagatggaacctttgcaagggctgcagttcccagtggtgcatcaactggtgtctatgaagctctcgaattgagggacggtggatctgattacttgggaaaggggtgtttccaaggctgtcgacaatgtgaactcggttattgccccagctctgattggcaaggaccctacgtcacaggctgagcttgataacttcatggttcagcagcttgatggaaccaaaaatgagtggggggtggtgcaagcagaagcttggtgctaatgcaatcccggctgtgtcactggccatttggcaagctggagctatcatcaagaagattcctctggaccagcacattg

SEQ ID NO: 22557 - DNA, 237 bp, Oryza sativa
  Clone ID: uC-osflM202055a02b1
ctctctatagttcccttcccaaaatccctcccctcgggcccctcttccccttcgattctggcggtttgccgccggcgagggttggaggaggggtccggccacctcccctacactagtatggaatagctagaccagcttctaggtcgacaggtgctgcctatagagaggctttgcccggagttggggtcccagcggaccagcaaccatggtctccgaagctctcgaattgaaggacag

SEQ ID NO: 22558 - DNA, 232 bp, Oryza sativa
  Clone ID: uC-osflM202055a03b1
acggttaaggttcatcgcgtggtgcccattccagagcaacctgctggcatctggtggtggtgggagtgaccggtgcatcaagttctggaacacacataccggcgcatgcctgaactcgatcgacactgggtcacaagtgtgctcgctggcctggaacaagaatgagagagagctgctaagctcacatggattcgctcagaatcagatcactttgtggaagtacgccgccaat

SEQ ID NO: 22559 - DNA, 324 bp, Oryza sativa
  Clone ID: uC-osflM202055a04b1
ttataagttactaccaccacacacaccaacaataaatagttctccaccatcggaagaagagtacatgcctccatctccagtgaaatcaagtccaccactagccgagaagtcccagccaccgccatctccagttgagtcagtacttccaccagtgaagtcttcaccaccacacgcaccggttatttcagaaccaccaccaacaaagtcttcaccgccgcaagtgccagtgacctcggaaccaccgccagcaaagtcttcacctccacatgaaccaattagcccgccagaaacaccagagaagtcttacccgccatcaactcctga

SEQ ID NO: 22560 - DNA, 168 bp, Oryza sativa
  Clone ID: uC-osflM202055a05b1
tgttccctttcttggcaaaaagaaaagaaaaataatatcatcgcactttttgctgaccttttcatcccctcggatattcacgaagcaaatctctctgcaatccttttctttttttgtatgtgatcctgcggagcctctacattgaggaaaggcgagagctttaacatc

SEQ ID NO: 22561 - DNA, 352 bp, Oryza sativa
  unsure (1)..(352): unsure at all n locations
  Clone ID: uC-osflM202055a06b1
gggccccaattcccttttcgttccacgcgcccgctcntgcttatcccccaaattccacccccgcctgctccttctcctttagtcgcgagagaatcccaggcccgcgagcgagaggaaagagagaaggcagagctccatccatgggtgcagtctaaatgcattgcgaggatgcaaattggttagcattccctttcccagtgcatctgctgcaactatgtaagcaagaatggtctgatttgacacgcctgattccagcttctcagatcttaagttctgctgtctgcctggcaaaaggcgagagaaaagaggcctcctttgggtccaagaagagaaaaatggatgaaagcttctt

SEQ ID NO: 22562 - DNA, 187 bp, Oryza sativa
  Clone ID: uC-osflM202055a07b1
gtaacagaaagtactgtcgttggtgcactgaatgcattgctcgtattggagagtgacgactcctccagcgcggaggccaaggcatgacagtgtcgccgcgccagatcttctacagcacttgaggcgcccaccggctcggtcgactgtgcgctgctcacatggaacctttgtaagggctgcagacccc

SEQ ID NO: 22563 - DNA, 345 bp, Oryza sativa
  Clone ID: uC-osflM202055a08b1
attacttccattgcactgcacatcctgtgagttcgttgtctgagtgagagctggacgtgctgcaccgagctcctggccgagatgcttgccgtgtcgccggcgatgtgccccgacattgaggaccgcgccgcggtggccggcgatgctggcatggaggtcgtcgggatgtcgtcggacgacatggatcagttcgacttctccgtcgatgacatagacttcggggacttcttcctgaggctggaggacggtgactgtgctcccggacctcgaggtcgacccggccgagatctttaccgacttcgaggcaatcgcgacgagtggaggcaaaggtgtgcaggaccagga

SEQ ID NO: 22564 - DNA, 214 bp, Oryza sativa
  Clone ID: uC-osflM202055a10b1
taccgtgacgagccgcccttttttttttttttggatagtgatacaccatcaggagacgtgttacgagcctacatctcgagggaagtcacatttccccactagcccgtggagttccatgtattcgccatctccagttgagtcagttctcccaccagtgaagtccttttcaatcttacgcaccggttttttaactatctaccaccaaacatagttt

SEQ ID NO: 22565 - DNA, 292 bp, Oryza sativa
  Clone ID: uC-osflM202055b01b1
ttgccagctccagccacacgagcctagttcaggtagatacaatggcgtacaccgactctttcatgctcgccgacttgctggcggcggccgtcgcggcggcgccggcgagggcggtgcgatgcccgccgagcgacaagcaggcgctgatgagagtgaagcagtcgctgggaaacccggcgacgctgtcgacgtggcccctggcctgggcggactgccgctagcgggaccacgtggcgggcaaccagagcccctcgcgtgagcaacgtccaaagctacggcgccaacgacctcc

SEQ ID NO: 22566 - DNA, 122 bp, Oryza sativa
  Clone ID: uC-osflM202055b02b1
cacgctcgcgttcttttgctctccccaagactccttcggcgtttcctgcctctccccccacatagatgttgctcgtgagccaagccgccaatgttttccctctcttccggcggttgtccctc

SEQ ID NO: 22567 - DNA, 158 bp, Oryza sativa
  Clone ID: uC-osflM202055b04b1
ctcatcattatcattcatcaatcgtcgcctgatcgcctccagcgaaattcttcctccatttctctctccatcgaatctcatcccagcagcagcagcagcagcagcagccgccatggattccaaggcggacgcggagtcagccacggccagggccgcca

SEQ ID NO: 22568 - DNA, 302 bp, Oryza sativa
  Clone ID: uC-osflM202055b08b1
ttgggcggcaaccctctggtagccatgggcgccttatcttagtggcaggtgaaccgccggaagctgctcaccagcaagaagcaagcgctggccacgcggctgtccgccggcggcgaggcgttccccggcagcgagcaccggccggccgaccggaagacgtggatggcggagctcgggccggagcggctgcgcgtgcaccagctggtgtggccggggacgcacgactcggcgacgaacaagatcggcatcccgttcgtgacgcgccccttcgcgcagtgccagtcgctgtcggtgtacgagca

SEQ ID NO: 22569 - DNA, 434 bp, Oryza sativa
  Clone ID: uC-osflM202055b09b1
gtcctcctctcgccttctacgtaccttgccaatggcggtctccacctccaggcgcgggggcggcgtgcttgcggcggtggtgacggcggtggcggcgctggcgatgctgggcggggtggcgtggggcggcaacccggggttcacgtgcgggccggcgtcggcgcagaaggggttcgcgttctgcaacgcggcgctgccggcggagcagcgggcggcggacctggtggcgaggctgacgacggcggagaaggtggggcagctcggggaccaggcgcccggggtgccgaggctggggatcccggtgtacaagtggtggtccggaggcgctgcacgggctggccatctccggggatgggcatccacttcggcaacggccccgcgcgcaccgtcaccagcttcccggatgttattcacaccgtcgtcggcttcgacga

SEQ ID NO: 22570 - DNA, 81 bp, Oryza sativa
  Clone ID: uC-osflM202055b10b1
gtgtaacgcgtactcacccacaagttaggtgcatgccatggcaccatacatggcgtgcgccccaacaccggcacttacgct

SEQ ID NO: 22571 - DNA, 440 bp, Oryza sativa
  Clone ID: uC-osflM202055c02b1
gtcaatcttgaccaaatccaccctagctacaaattttcttggccgcgcgcggcaggcagatcgagcaggcgagcgaagatgtcgtggcagacgtacgtcgacgagcacctgatgtgcgagatcgagggccaccacctcacctccgccgccatcgtcggccacgacggcaccgtctgggcacagagcgccgccttccctcagttcaaaccggaggagatgaccaacatcatgaaggacttcgacgagccggggttcctcgccccgaccggactgtttcttggaccaaccaagtacatggtcatccaaggtgaacctggcgctgtcattcgtggcaagaagggatcaggaggcatcacagtgaagaagaccgggcaggcgctggtggtcggcatctacgacgagcccatgaccccggggcagtgcaacatgggggttgagag

SEQ ID NO: 22572 - DNA, 101 bp, Oryza sativa
  Clone ID: uC-osflM202055c06b1
ttgtaagtttagccgtccagcagagagaccatcactggcatgcatgcgcaggcacgaacgaacgcattacatgcattgtgtgccagatagtttcttacaga

SEQ ID NO: 22573 - DNA, 460 bp, Oryza sativa
  Clone ID: uC-osflM202055c09b1
tctccggttgctgacaagtacaactcggtgcgcaccgagtaagagctgatctttttgtatatggcagaaaatagttggagccgacttggtatatgtgccactggctattctgaggtgaagattcaacccagcattgccctatatttttctggtggagctagtccgaaacactgaacgatacagctgagactaagaggtggtttgaaaatttgcgaacacaaatggctggttggaagctagacttttttttttttgtcttgtacaaagtatggcggcaattcactagattcagtaaagttggattatattttagccgtcttgtgcgtattttttcattgcgtggtactagtaattcttccaatctctagacgccggcctttttcaagttttggtcaagggtgatattggaaattaaaaacttgaaaatcgaattaaaaacgatcaattttttacttgatcg

SEQ ID NO: 22574 - DNA, 335 bp, Oryza sativa
  Clone ID: uC-osflM202055c10b1
ctagaatccccttctacagttcgaccgaggccctcgccggcgccggcgccgccacgcccatctccatccccgaccaccacttcttctccggcgagctcgcctcgggagacgaatccgcagctccagaggcagagaatcgaatgctactaccacccgtgaaaggtacggcgtgtcgtgtaccgccttgaaatcttagctggttcgccggtgatcatgccgtgaagccgccgccgcaggcatcttcccggcgagcgagttggtaggggcgcttccactcgcgtagctacgaatcttggccttcccggcggcgattggatggtgcccctgaccctgag

SEQ ID NO: 22575 - DNA, 135 bp, Oryza sativa
  Clone ID: uC-osflM202055c11b1
taccggtaagttctttctttacggcaaatcaaacctcagctcgtggacagtgcagtggaggctgtagcaaataactgtcatgatttacgcgagttggatcttagcagaagctttaggcttagcgaccgatctttg

SEQ ID NO: 22576 - DNA, 64 bp, Oryza sativa
  Clone ID: uC-osflM202055c12b1
attcgatccccaaaaaccccgatccccgcagacgctcctgcgactcgcaggtctcgccaagcca

SEQ ID NO: 22577 - DNA, 318 bp, Oryza sativa
  Clone ID: uC-osflM202055d01b1
ttctcttctctccgatcgatccttcccctctctctctctctctcaatccagataggaaggcggcgagcgagagcgacacgatgcaggcggtgagggaggaggagcaggtggtggaggaggtggcctggcaccttgctttcgctcaggttgtggtgccgtacaactgggtcgtggtgcactacaccgagggggccgaggttatcgagtccgtcctggaggtggtccgccaggaggccgtttactgccactgtttacaaggattccaaggttgccattgattgggcggaggctctttatcttgttcggggaaccattttt

SEQ ID NO: 22578 - DNA, 596 bp, Oryza sativa
  unsure (1)..(596): unsure at all n locations
  Clone ID: uC-osflM202055d02b1
cgcctgccgtttcctttccttttttcctttttcttccctctcgtccgttttcttctctttccttttctcctctcctccttctttccttcctttcccgtttttttttttttttctttctcctcctctgggtgtgctggggtgtgttgttgtggtggtgttcttctttnctnttccgctccttctattttctctttttcgttttcttttttttctttttctttttccgttgtttttttcttgttttcttctttttttttttttttttgtttttccctttttttttttttttttttctagtttttttttttttctttttttttcttttatttttttttttttttctctttttttttttttttctttttttttttttttgttcttttttttttttcttttatcattttttttttcttttttttttttttttttttttttctatctcttttttttttttttttttttttttttttttttaattcttttttttctttctttttttttttttttatttttttttttacttcttttctttttttttctgttttttttttttcttctttttttcttctatcttttacttttttttttttttcttt

SEQ ID NO: 22579 - DNA, 60 bp, Oryza sativa
  Clone ID: uC-osflM202055d10b1
ttttcctttcctcccctcctaccccactctcgtctcggtgaaggcaacgtcgccctcgcc

SEQ ID NO: 22580 - DNA, 92 bp, Oryza sativa
  Clone ID: uC-osflM202055d11b1
gactccgactcgatccaggcgctgctgaattcgttccccaaggaccagctcgttgagctgctcagcgccgcggcgctcagtcactaggacgt

SEQ ID NO: 22581 - DNA, 218 bp, Oryza sativa
  Clone ID: uC-osflM202055f07b1
aagtaacatccccccaacctccgcctcctcctcctccccctcctcccatgcccgcatcgagatcttagccgcgccggagatcgagagggaggagcggcgacgcgggcgcccccgatccctcctcctcgccgccgccgccgccggcggcgccggagcagcagcagccgacgacgacgacgaccgccgcagcagccgatcgggggaggaggggaggggag

SEQ ID NO: 22582 - DNA, 76 bp, Oryza sativa
  Clone ID: uC-osflM202055f09b1
tgtgtggatcaacgcctctcccgccatgatggacctggatccccgtctttacgagaacaattccaagagagataaa

SEQ ID NO: 22583 - DNA, 130 bp, Oryza sativa
  Clone ID: uC-osflM202055f12b1
tttgcagttttttctacagcctacgactccgcctccccctcgcgccgccgactccgtcccgcgcgaccgcctacgatctacgtctccgtctacgtctatgcctatctatagagccatcaagtacacctaa

SEQ ID NO: 22584 - DNA, 67 bp, Oryza sativa
  Clone ID: uC-osflM202055g11b1
tccgttctagaagcaagcgccccattttacaagagcatatcaaagccaagccaccataacactaaat

SEQ ID NO: 22585 - DNA, 67 bp, Oryza sativa
  Clone ID: uC-osflM202055h03b1
cttgaatttcgataaaaacccacaggacacctgccctgtgctcattatacatggaactgccgatgaa

SEQ ID NO: 22586 - DNA, 130 bp, Oryza sativa
  Clone ID: uC-osflM202055h05b1
gtgtcgctgaacctagacacacacacagaatcaaatggtttccatggtcttctagcctcacaggatacatatatatagaggccccacaccacactggagcctgtcaatgatctccaggaaggcatttctc

SEQ ID NO: 22587 - DNA, 136 bp, Oryza sativa
  Clone ID: uC-osflM202055h07b1
aaagcaaagttttcattactgctcctcttccattccactggggacgtacgagctccgcgcatcccttccattccattactgaccttggctgctgcggctgcagtgcagagggggtctggtggtgcggtttctcctt

SEQ ID NO: 22588 - DNA, 319 bp, Oryza sativa
  Clone ID: uC-osflM202055h10b1
taaaccaagacatacacacagaatcaaataataacaaaggtttcctagcctcaaaggatacatatatatagtttccctacaatacaatggagcctgtcaatgatttccaggaaggcatttcaacagagcatgcctttgaggcagagcctgtgccatcattgtcggaaacaataacgccacgatcaatggtggtgagcttcatccttagtgtaactctcagcatcgtcgccatgaaggtcaccttgagctctggcttcatttcgtctttcagcattccagccgggcctcttgggttttgtgtattcccgtgcgttgatcc

SEQ ID NO: 22589 - DNA, 322 bp, Oryza sativa
  Clone ID: uC-osflM202059a06b1
gttgtttcttttggatctatccattctggtcaccgtggctgttcggtaattttggcggagaggaggaggaggacgacgacgactacgacgtgatgggtctactctacaagttgtgggacgacaccgtcgcggggccccgacccgacaccggtctcggtcgtctctcgaagcacgccgtcgaccgtcccgtcgccgtcaagatcaacgacctgacaggggacgcggcgatggtggccgtaccgccgactactccggtcggggcggaggaggtgcctgtgaaggtgacgcgcagtatcatgatcaagccgcccgcggggtaccc

SEQ ID NO: 22590 - DNA, 430 bp, Oryza sativa
  Clone ID: uC-osflM202059a08b1
tttcgagaccagggacggcgtctacatcccggacaccgacaagctcgaccggctcaagctcgccgagatcaagcacgcccgcctcgccatgctcgccatgctcatcttctacttcgaggccggccagggcaagacgccgctcggcgccctcggcctatgagcaatcaaccccgctctcgctcgccatggatctgacacacagagttgggtttcgcttgcatgcgcgcttcgtgtttgatcgctagctgttgcatcgatcgggcgcgtgcatgggctcggatcgaacgattggaggtcggaggagcagtagcaaaatgtatcttgttgtgttcgtggccgcttttgggttgggtggtgtgcgtgaaccaaatgggggaattaatcaaggagttatttttttttatttttcttccccgtgtatggaccatat

SEQ ID NO: 22591 - DNA, 500 bp, Oryza sativa
  Clone ID: uC-osflM202059a09b1
ttgtggaacgcgtacttacccacaagttaggtgcatgccatggcaccattcatggcgtgcgcctcgccaccggtactcacgctggccctgctcgcgtcgtgcggtgcccttctcgccacctccatgctcccggcgcgtgcgacggcgggcagttgcttggacgtcggcgacatggtgatgatggacaggttccgcgcttggcagggagctcacaaccggtcgtacccgagcgcagaagaggcgctgcagcggttcgatgtgtaccgccgcaacgcggagttcatcgacgccgtcaacctgcgcggcgacctcacttaccagctcgccgagaacgagttcgcagacctcaccgaggaggagttcctggccacgtacaccgggtactacgccggcgatggccccgtggacgactccggtatcacgacgggtgccggagacgttgacgccagctttttctaccgcgtggaacttccggccagtgtcgactggagggcccaggc

SEQ ID NO: 22592 - DNA, 480 bp, Oryza sativa
  Clone ID: uC-osflM202059b03b1
gtatgaggaaggaaggaagctagggttagctagctgtgcatggaggagcctggccctgaggaagagaaggaggaggaggaggcgcgcttcgacttcctcgagtggatcggcccggacacctccgccgccgttttcaccttcctagaccaccccgctgatctcgcccgcgcctccgccgtctcccgttcctggcgccgattcgttgttcggaatggcttcagcaagatccaatgcctgcgcctttgccctgaagcttcaaacttcacccgtattattaccaaacaagccattgcctctgcttctgagtcggatgcggagcaccagcacagggcgtacatgcatctcaactatgcccttctcttggatgacccccaggactgcatcatccgctgcatcggtgcctccaccaccgacaatttcctgaggagaccatacaaaacacccttgtgcccaccgattgggtggccatgatgaggccct

SEQ ID NO: 22593 - DNA, 454 bp, Oryza sativa
  Clone ID: uC-osflM202059b05b1
ttgctctccctttctcgcaatgtgctctgctccaagtgcaatggcaagggctcgaaatctggtgcttccatgaagtgctctggatgtcaaggttctggtatgaaggtccaaattcgccagttggggccaggaatgattcagcaaatgcaacatccctgcaatgagtgcaagggaactggtgagaccatcagcgacaaggatagatgcccaggctgcaagggtgagaaggtggcgcaggagaagaaggctcttgaggtggtggtcgagaagggcatgcagaatggacagaagatcacctttcctggtgaggctgatgaagcgcccgatactgtcactggagacattatttttgttcttcagcagaaggagcatcccaagttcaagagaaagggagatgatctctttttcgagcacaccctgaaccttactgaggccccttgtggctttcagtttg

SEQ ID NO: 22594 - DNA, 228 bp, Oryza sativa
  Clone ID: uC-osflM202059b08b1
cctactccctcgccgttggccaccggattgtcgttgtacgccgccgacagggacagtgtttcagtcatggacaagggcgccctgatgccgctgcccgactagacgtgctgtgtttgtggaggcggtggcttgtcgttctcgagcctgcgcgcgtacgggatgcgcgctggtgcatactctgaggaggctggtggcgcgggcgtgcgcctgcggtcttacctcggtgag

SEQ ID NO: 22595 - DNA, 315 bp, Oryza sativa
  unsure (1)..(315): unsure at all n locations
  Clone ID: uC-osflM202059b10b1
gtacaagaagctatcagaaatcagaaacgctagcttgtagtaggaacaaacaatgaggtcgtccccgatcatcttcctgctcatggccgccgccgtcgccatcgccgctccgtggcaggttgcgcacgccgcgggcaagtgcggcaagacgccggcggagaaggtggcgctgaagctggtgncctgcgctaaggcggcgcaagaccccggtgtccggccgccgnnctcgtgctgcgcggccgtgcgcgacatcggcacgcaccagagtcactcgtgcctgtgcgccgtgctgctgtccagcaccgtgaggcgctc

SEQ ID NO: 22596 - DNA, 484 bp, Oryza sativa
  unsure (1)..(484): unsure at all n locations
  Clone ID: uC-osflM202059c02b1
attttaggacatcaattgcatattatgtatttttttgaaaccaaaccaattgcattgttataggtgtacacgtgtgtgttttcaagaatgcaaagcaggtgaagtttttctataagtaattttgcaggaagcagtaccgttcgcataggagtcctacaaatgtcatctgtatttcggaatagggattaatgtgccactgaataggcacatctttattatacaatgcatgtttgaatttacatgttagcaaacttgtcatgaaaattgtcattttaatgccatcttcagctgtctggggtagttagcgcatacttccctttttgtaagcaaagttttggatgtcctggatcttatttacccatttctttttaaaaaactggntcatgagccatcaaggagagaattcggtctgatgattgtttattatgcccagcgaggtgataagcatcatgctcgtgccacatttgagaacatgagagcaaga

SEQ ID NO: 22597 - DNA, 359 bp, Oryza sativa
  Clone ID: uC-osflM202059c05b1
gtaggagagtggaggaggccctcacctaaaccctcgtcctccaatctcaggatggagcgcgcacgccgcctcgccaaccgcgcgctgctgcgccgcctactcgcggcggcgacggcggagtccccggcggccccgtcccgcggcatctcgaccctggccaaggggtcgcgcccgcgcgcccccccacgcccggcgccccaccagtacaccacggggcggcggcccgtgtcggcgtcggcgctgcagccgagcgacacgttcccgcggcggcacaactcggcgacgccggcggagcaagcggcgatggcgtcggagtgcgggttcggcaccgtcgacgcgctcattgacgccaccgtccc

SEQ ID NO: 22598 - DNA, 391 bp, Oryza sativa
  Clone ID: uC-osflM202059c07b1
ttgaccgagccatggaggaattcaaggctcgctccttcgtcgccttgtctccctcgggtgaaatttcatcaatataggaaaatagattataccatcagtttttgcacacgcggatgaaatttgactaggagaggcaccatggagaaagtcgaggtcgatgggaacttcattggtacgggtaattggaagctgcatggagcactatgtaagcaacttcacaaagtagtttttgaagtattggatgttattcctgtccttgaagctacaaggcctggaaacagttctggacttcttgcattgagttccttgcgcatagctgttgagaaggccaagaatctactttagtattgctcagagtgcagcaaggtatacttggcctttacagcagaaa

SEQ ID NO: 22599 - DNA, 479 bp, Oryza sativa
  Clone ID: uC-osflM202059c09b1
ttagaagcttctagaagcttcttccgagatgaaggtgatcgagaagatccaggaggcggcggcggatgggcggacggtgttctcgttcgagtacttcccgcccaagacggaggaggggctcgacaacctgttcgagcggatggatcgcatggtggcgcacggccccaacttctgcgacatcacctggggcgccgggggatccaccgtcgacctcaccctcgagatcgccaaccggatgcagaacatggtgtgtgtggaaacaatgatgcacctgacatgcaccaatatgccagttgagaagattgatgatgccttaacaacaataaagtctaatgggattcaaaatgttctggcttttaagggtgatcctccacatggtcaggacaaaattgttcaagttgctggtggattcgcttgtgctcttgatttggtacaacacattagagcccagtttggtgaatattttggtattactgttg

SEQ ID NO: 22600 - DNA, 270 bp, Oryza sativa
  Clone ID: uC-osflM202059c10b1
tttgtcgcccggctggcgcgccgccgcatacactagctagcgcgccgtcgacctcccccacgacggccgccgctcctattccccacctcgccggcgcagcttttcccaccgagccgtctctccctctccaccacccagagaactccgacgccatgggctggagcagctctccatgcaggaatcgtgaactgccggtctgtctcgcttggccccccacgattgccatagctccatgatacccgccgatggtgaccgtgtaggatcgaccgg

SEQ ID NO: 22601 - DNA, 421 bp, Oryza sativa
  Clone ID: uC-osflM202059c12b1
ttgttcgccgccgcagatccgatccaggaagagctcgccgtcgccgctgccatggcgctctctgtggagaagacctcgtcggggagggagtacaaggtgaaggacctctcccaggcggacttcggccgcctcgagatcgagctcgccgaggtcgagatgccggggctcatggcgtgccgcgccgagttcggcccctcccagccgttcaagggcgcccggatcttcgggttccttcacatgaccattcagaccgccgttctcatcgagaccctcacccgccttggcgccgaggtccgctggtgctcctgcaacatcttctccacgcaggaccacgccgccgtcgtcatcgtcagggacttcgccgccgtgtttcgcctggaagggggagaccctcgaggagtactgggggtgcaccgagcgc

SEQ ID NO: 22602 - DNA, 350 bp, Oryza sativa
  Clone ID: uC-osflM202059d01b1
gtttatcccagttgcaccaactcgagcaccggtgtgccttccaccaataacgaggttaatgatcctaaagctgatgccgcagatggtgattctgtggagaatggcacacgattgaattcagaagaacctgcgcaggtagacccaaaaccagcctacgttcggtgaggacggaaaagggtggtccgaggcacgagaggaagagcaaagtagaagagcatctactgcacccacaattgtttgtataccactaatattaacggcccaaatgggtgggatgataatgatacctaggttaactagagttagcattgatcggtggattttattgtgcacccactctttgtacccat

SEQ ID NO: 22603 - DNA, 419 bp, Oryza sativa
  Clone ID: uC-osflM202059d02b1
gttttccgccgctggcccctttccccttctccgaccggaccgcgctcctcagatccatcgcagggcagggcaggacgcgcaatccactgcggtcgcatctgtttgctggagacccaaacttttaggcgtcgagactccatcccagtctgacttcctgctccgaccgcgcgcctcaaggaagctttatctcggctcggctggctacatcttctgtttgctgctgctgcttattggagctggaacttgggagttgctgatcgactctgaagatgggcctgtcgcgtcgggctaagaatctcatcgtcgacgtcccctttcaggcgccaaatggctacgctgcgtcgatctggcagggcagctgttcgggaacaccgttacaccacaccaccaacaacaattggacatggatcaaagtcagc

SEQ ID NO: 22604 - DNA, 494 bp, Oryza sativa
  Clone ID: uC-osflM202059d03b1
atgaaaggtttgacgctaaattgcatggatcggaaatctgaagcatatgaacttgttcgccgtggattgaagaatgatctgaagagtcatgtgtgctggcatgtctatggcttgctttatcgatcagacagagaatacagagaagccataaaatgttacagaaatgctctgaggattgatccagataacatagaaattctacgtgacctgtcacttctccaggcacaaatgagggacttgtctggctttgttgagactaggcaacaacttttaacactgaagccaaatcaccgcatgaactggattggttttgctgtagctcaccatttaagttccaattcttccaaggcaatagaagtattggaggcatatgaggggacactggaagatgattatcccccagagaatgagcgatatgatcacagtgaaatgcttctgtataagaattcattgttcgaggatgtgggatgctggacagagctcttgaggagatg

SEQ ID NO: 22605 - DNA, 444 bp, Oryza sativa
  Clone ID: uC-osflM202059d04b1
tcacacgcacccaatcccctatcgatcgagagacatggtctccaccaccgccaccgccgccggcaacggcagcggcagcattctccccacccacaccaccacggagccacccttcagagcccataaggacgccgacctggaatccacgacgcggcggcgccggcgacgctgcctgtgctgctgcctgctcgtcacccttgtggtgctcctcgtccttgccatcaccctcctggtcctcttcctcacggtgctccgcgttcgcgaccccaccacccacctcgtatgcacccgcctcaccggccttttcccgcgcctctccttgccggacacgtgggtccagctcaacgtcacgctgttcatcacacgggcggtgcacaaccccaacccggtcttcttaacctacgccacggggggccacaccgaccttacctacaggggcgcaca

SEQ ID NO: 22606 - DNA, 431 bp, Oryza sativa
  Clone ID: uC-osflM202059d05b1
ttcacccgccgccgcctccctcgccggcttgccgccgccgccgcggtcgcgaggcggagaccttgcgggacgatcggagcgacgtccctctacacccctccccctccgcagcggcgagaagaacaagggggccgcccgccatgctgcgccggtgcgtgcgggatctgtacccgctgcggcctcttaggaggatccctaggccgatctccagcgaggtcccaagtccagcatttcttcgacccagaagcaagtcgacaaaagcttcccaacagagttcaacacagaatactgtccctggccctcaaggagaaccttctcagtcaggaagcaatgttccgaaagttctgcttggaactctgatggtcggcgctgctgctatggctgcttatcaagctggctacatagacgatcaattaaggatataatatttc

SEQ ID NO: 22607 - DNA, 408 bp, Oryza sativa
  Clone ID: uC-osflM202059d06b1
ttatcgttttgttgttgaagaatgcatattggatgtgctacttttcttcaatggatgtcgcaaagaatgtgcattttatctggtcagcttacctgtgcctttccgttatgaatacctgatggctgagaccatattttcacagctactgttattgccgaatccccctttcaggccaatttactataccttggttattatcgacctttgcaaggcattgccaggtgcatttccttcagttgtggtaggagcagtacatgctctttttgacagaattagcaacatggatatggagtgccgcacccgacttatcctatggttttcacatcacttgtcaaatttttagttcatttggcctggcaggagtgggcttacgtcaggacctttcaaaatgggctcacagcgtgtttt

SEQ ID NO: 22608 - DNA, 440 bp, Oryza sativa
  Clone ID: uC-osflM202059d07b1
tatctctcgctcgctcgccgccgatcggatcgcgtggttggatcatcacaactcggcaaagatgagagagatcctgcacatccaaggcgggcaatgtggcaaccagatcggtgccaaattctgggaggtggtgtgtgatgagcatggcattgaccctactgggcggtacacaggcaactcagatctgcagttggagcgtgtcaatgtgtactacaatgaggcctcctgcggtcgctttgtgcctcgtgctgttctcatggaccttgagcctggtactatggacagtgtccgcactggaccctatggccagatcttccgccctgacaactttgtcttcgggcaatctggtgctggtaacaactgggccaagggacactacactgagggggccgagctaattgattctgttttagatgttgtgaggaaggaggctgagaact

SEQ ID NO: 22609 - DNA, 481 bp, Oryza sativa
  Clone ID: uC-osflM202059d08b1
ttaatctgaggagaaaaccgaacctgatcaggatgtcgaagaatcgaaaccagaagaggaggaagatgaagatgaatgggatgcaaagagctgggatgatatagatgtcaatttgcctaagacaagtgcctttgaggaggaagaggcaaaccctgtcgccaagaaggttgctgaacctgttcagaagcaggaaaattctaaagcacaatctacagtggctactgtaaaaaaggttgcaaactccaataaaggtgaaacggaagatggcgaatccagtagtgcaaatgctaggaggaatagaggcgcttcaaagaaaggacctattaaagaggatgagactaagaatggcagtgaccttcgttcaccaatttgttgcatccttggtcatgtcgatactggtaagacaaaactgctagactgtattagacggaccaatgtacaagaaggagatgctggaggttttacccaaccagattggagc

SEQ ID NO: 22610 - DNA, 406 bp, Oryza sativa
  Clone ID: uC-osflM202059d11b1
ttcaaaagacacacattccaaaagcatctgtggccatctcctcctagtcctaggctcgcgtcaatggcggcgtccaccatggcactctcctcccctgccgccctcgccggcaaggcggtcgccaatgccaaggtgttcggcgagggccgcgtcacgatgcgcaagtcggcggccaagcccaagcccgccgcggcgtcggggagcccgtggtacggcgccgaccgcgtgctctacctcggcccgctctccggcgagccgccgtcctacctcaccggcgagttccccggcgactacggctgtgacaccgcacggctgtcggccgacccggagacgttcgccaagaaccgggagctggagggtgatccactgccggtgggccatgctgggcgcgctcggctgcgtcttc

SEQ ID NO: 22611 - DNA, 299 bp, Oryza sativa
  Clone ID: uC-osflM202059d12b1
tcttttctaccattagggtaaggggaggagcggcgatctcgattgagacaacgacgtcgaggtcgaggcggtggccgaagaacatggccgacggacaggaggacgcctcgggtctggacgatgaccttgttcttgaggatgagctgccaggtcgagaagagggcgaagactgcggctgtggttgtggcgaggaagaggaggaggacgacgtcgactgtcttgccagctttcttgaatcggagatcctctctggatctagcggtgacgaccctaccgctcgggaggaaggggatgagaag

SEQ ID NO: 22612 - DNA, 434 bp, Oryza sativa
  Clone ID: uC-osflM202059e01b1
tttttaattgctgagtttgaagtgaaggttgaccgttttgctgttataaaggaaactataataaaggactacgagaatttcaaatttcgacaaccatatgagcaggcattttactattgttcattgatattagaggaacaaacttgggcatgggatgaaaaacttgctgcagtttctcatattgaagcaagcgatctacagatttttttgcctcgtcttctgggcaagacatttattgaatgctattttgctgggaacatggaaccgggtgaagcaaaaagtgttatacagcatgttgaagacaccttatttaatgcacccatcagtttctgcaaagcattacccccatcacagcattttacaaagcgaatttgtaaacttgaaaggggttggggggattattatccaacaattgggcctaaatcaccgggaag

SEQ ID NO: 22613 - DNA, 270 bp, Oryza sativa
  Clone ID: uC-osflM202059e02b1
attaaagcctcccatcaacttcttgcacacaccctccctttggctttcatctgcatctattcagttgcagattgagagccaaagacattatattgattctatcaggagggttgtgctagcgaattcttgttagcaacaaattgacatattgctcggcacatccccaccgagaataccaagatgacgttctctggtacacaggacaagtgcaatgcttgtgacaagaccgtgcatttcattgatctccttaccgcggacaggattccctac

SEQ ID NO: 22614 - DNA, 458 bp, Oryza sativa
  Clone ID: uC-osflM202059e05b1
ttcaagattggatcactgcagatgttcattcagaacaatggaagttgtgaggatatgggtccccgagcatttccagtgaaggaggtccacaaaatagcagtgttagatcttaggttagcaaacgctgatcgtcatgcagggaacattttagtgtgcaaggatgaagaaggtggcaattacaagttggttccaattgatcatggttactgcttgccagagaagtttgaagattgtacctttgagtggctgtactggccccaggctcgtgaaccattcagtgatgaaaccattgcatacatcaaatcactagacgctgaagaggacatcaagcttctcaagttccatgggtgggagctgtctgcaagatgtgcttgtgtcctgtgcatcagcaccatgcttttaaagaaaggtgcagcacgaggcctcacaccgtatgacatcgggcgtatactgtgcag

SEQ ID NO: 22615 - DNA, 441 bp, Oryza sativa
  Clone ID: uC-osflM202059e06b1
ttttgccatgcctaccgtgctctcggtcaccatggccattggttcccacaagttgtcccagcagggtgctatcaccaagaggatgactgccatcgaggagatggctggcatggatgttctgtgcagtgacaagaccggaaccctcacccttaacaagttgagcgtcgacaagaacctcgttgaagtgttcactaaaggtgttgacaaggaccatgttttgttgctggctgcaagggcatctaggacagaaaaccaagatgccatcgatgctgccatggttggtatgcttgctgatcccaaggaggcaagagccggtatcagggaagtgcacttcttgcccttcaacccagttgacaagaggactgctctaacatacatcgatgccgatggtaactggcaccgtgccagcagggtgctcctgagcagatcctgaccctgtgc

SEQ ID NO: 22616 - DNA, 224 bp, Oryza sativa
  Clone ID: uC-osflM202059e07b1
tttgtataatcgactccactcctgcggttgcaggggttactacacttgctgttgcgttcagagcccgtcccgtgtctctactcgttcctccgtgctgccgtttattacgtcctcggcgacaagcgagcgacgcatgccaccgcgcgcggttcgtatttcgagagggaggttcgacgctgaccagctcgtcatggtatttgaacggacactcatccgcacggcca

SEQ ID NO: 22617 - DNA, 395 bp, Oryza sativa
  Clone ID: uC-osflM202059e08b1
tttttgccgccttctccttcttctccgacggcgaacaccgtccatcgcgagaactcttacctcgtcggcgtcggcgtcggcgtcggcgaggaggagcacacatttactgctggcttgcaatcttaatcttttgcagtgttcgtcattcaggaggctcccggccgatccggtggatcggatcggagcgggagcacaaactgcaaattgccacggtccttgcacttgatttccggagccaggaggatgatttgctgcggcggctaggaggaggagacgtacgcttcccgtgcagccagtcgcagtcgcagcaggcgcccgagacctgctacgcagtacaatgcatgcccttgttagccaagaggaccaaatgctcccaggagcgggggtccgccacc

SEQ ID NO: 22618 - DNA, 510 bp, Oryza sativa
  Clone ID: uC-osflM202059e11b1
ttcgagctcggcggcgggcggcggcggcggcgcgatgaaggtctccatcaaaacgctcaagggctccagcttcgagatcgacgtcgagcccaccagcaaggtcagtgatgttaaaaagctcatcgaggttacgcaaggagataatgtctaccccgctgatcagcaaatgctgatccatcaagggaatgtccttaaaaacgacacaacacttgaagagaacaaagttgttgagaacaacttcattgtgataatgttatctaagaagggatcatcaagtgctgcttcaagtacagctaaggagcccacaaaacaggtgcggtagaatagccatgtttcattatatcattgaatctgtttctcagtattatttttcccatttttttaattagtggtctatgtggtttcttagaatatcactgatcaataagtaaatgtgcctagtctattcaactgatctgaaattttattgactcacttcagaggaaatctggtctgccctatatatttagg

SEQ ID NO: 22619 - DNA, 338 bp, Oryza sativa
  Clone ID: uC-osflM202059f02b1
atggctccccccgccgccgccgtcgtcgttccagctatagctttccccgccggcggtggcgatcgatcgatcctctcctcgtcggttgattagggtcaagaattcttccctctcccagcttggttgaatttcttggtttgatcaaggggaggaattaattgagaggtgaattagttcgccggagtttgtttctctctctctctcctcttctctgagctgagagggggaggagagaatcaagtgacgagttatagtatggcgaggagcggcggcggcaatggtgggggagaaggtggcggcggcggcggcaatggcggtggcggggagggttgaagaag

SEQ ID NO: 22620 - DNA, 389 bp, Oryza sativa
  Clone ID: uC-osflM202059f05b1
ttttctcgccgcgcttaaaccctcgccgccttcccgctctgaacgcccctcccttcgccgccgcccccgaccatggcgcacgccctcggctgcggtgccgccaaccgtccccgccggggtgggtctcctccaccaccacgagaaggctggggcgttgtacagtgccgcaggctccatcgttcgggttcagcagctcatcgggaaggggagcaaacgccaagctataagatgtgcaatgccaagtgcaagtgagcatggtggaatttcaaccgcaacagctagtaatagtgatcaaaagaaaggtggactgcgtggcaaactgaataaagtctgttctagcttacagtggtggtttggacacatcagttaatggtccatggctccgggag

SEQ ID NO: 22621 - DNA, 396 bp, Oryza sativa
  Clone ID: uC-osflM202059f07b1
ttttaaagacacacattccaaaagcatctgtggccatctcctcctagtcctaggctcgcgtcaatggcggcgtccaccatggcactctcctcccctgccgccctcgccggcaaggcggtcgccaatgccaaggtgttcggcgagggccgcgtcacgatgcgcaagtcggcggccaagcccaagcccgccgcggcgtcggggagcccgtggtacggcgccgaccgcgtgctctacctcggcccgctctccggcgagccgtcgtcctacctcaccggcgagttccccggcgactacggctgggacaccgccgggctgtcggcccacccggagacgttcgccaagaaccgggagctggaggtgatccactgcccgggggccatgctgggcgcgctcggc

SEQ ID NO: 22622 - DNA, 423 bp, Oryza sativa
  Clone ID: uC-osflM202059f08b1
ttcacgcgtccgcccacgcgtccggtacttgcatcctcatctccatctaaagagcctgacaggcttcaggtgaagtgtatcacgttttctcagccaccagttgggaatgctgcactgagagactacgttcatcgaagaggatggcaagattatttcaaatcctactgtattccagaggacttggtgccacgtattttatcgccggcatactttcaccactataatgcccaaacacctgataacactaacgcaaaatctgatgaagaaaatgacgcaaaatctgtatgttcaaaagagaataatggggagcaacttgttctaggtggtggtcctgttcaaaagtcactctggagactttcaagcttgtttctttggaaggagtgcgaaaaagtttaagtgtgcttcaaaaacaaccaatatttt

SEQ ID NO: 22623 - DNA, 122 bp, Oryza sativa
  Clone ID: uC-osflM202059f09b1
ctcctcttccccaccaccttcctccccacacacacacaacctcgcgcgcgcgcggcgagaacgagaagcatccagggcggcgcggaggcggaggcggaggcggaggtggagggggggggggg

SEQ ID NO: 22624 - DNA, 356 bp, Oryza sativa
  Clone ID: uC-osflM202059f11b1
tttttaaagcgagagagatctctcccgagctcgagccggttcaccgcgacacgaagacgaccatggcgatggctcgctcccagcttgccgccgtgttcctcgccgtcctcgtctcggtggcgccgctcgccggcgcggtggacaacctccaggacgcgtgcaaccggacgctgttccccaaggtgtgcatccaggcgctgacgactaacccggagagctcggacggagaacgcgcggcggctggcggagctgtcggtgtacgtggcggctgatgtgggcacggcggcggcggcgtttgcgcaccacgagctgaacggcgtgaaggaggaccgccttgttcaagtgcgtggacagtt

SEQ ID NO: 22625 - DNA, 236 bp, Oryza sativa
  Clone ID: uC-osflM202059g03b1
tttatgccgccgtcgtcgccgacggccacgacgagcctgaggatgaagaggcacgcggcgtgcgagccggaggcgtgccgggcggaggccaggcacgtggcggcggcggcggcgagcagcacgaggaacggcgcgccggtgctcgtgatgatgccgctggacacggagagcaagagcgggagcgcgctgaaccggaagaaggcggtggcggcgagcctggcggcgctgaaaagcgc

SEQ ID NO: 22626 - DNA, 475 bp, Oryza sativa
  Clone ID: uC-osflM202059g05b1
atcctgtctttggtgtacatgagggtgccgaagaagacgcagagggtgccaacgatgagcgagcgcttgtcgtaggtgtgggcgccgaggagcacgccatcatgaaacaagtgatcgcgacaaagagcgtggagtacatgcccttcacgttgtcgctggtgagcttcattaacggcatatgctggacaatctacgcgttcatccgctttgacatcttcatcacgataccgaacggcatggggacgctgctgggcgcggtgcagttgatcctctacttctgctactacgacgggtcgacggtcaagaacaagggcgccctcgagctgtccaaggacggcgactcctccgctgtgtagctacatatgctatatatcttgccatgcaaagaaccacaagatcgaagctagcttacacaaaccatgcagcattatatgcacattacacatgcagtatcacaacgtacgcatgcttggat

SEQ ID NO: 22627 - DNA, 301 bp, Oryza sativa
  Clone ID: uC-osflM202059g08b1
ttttcctcctcgtctaccttacctagcagcagcagctagctagcttaattagctatagcagccatggcggcgacggcactgagcagccaggtccggttgccgatgtccctgcgggtggcgacggcgccggcgccggcgcgcgtgtcggtgctgccggcgagcaacaagctgggagacaggctgcggatgcaggcgacgtacaacgtgaagctgatcacaccggacggcgaggtggagctgcaggtgccggacgacgtgtacattcctgaccaagcggaggagggagggatcgacctgcctt

SEQ ID NO: 22628 - DNA, 275 bp, Oryza sativa
  Clone ID: uC-osflM202059g09b1
tttttgccctcctccatcgatcgatctatcgatctccttccatagcgttttaattaaattatgtttgattggtcgagagattggggttcgaaccattgcttctgttgttgcagtaggggatgggcgtgatatctcggaaggtcctgccggcgtgcgggagcctctgctatttctgccccgggttgagggcaagatcaaggcagcctgttaagaggtacaagtcgatccttgctgagatcttccccaaaacgcatgatgaagaaacccgatgagag

SEQ ID NO: 22629 - DNA, 272 bp, Oryza sativa
  Clone ID: uC-osflM202059h01b1
gtttttgagcggtctcctcatcgcctccgtttgtgctttttttatttcttttttctcgttgatcggtttgctcgatcagatcggttctatggagagatggagcagtccttcatcatgatcaagcctgacggcgtccagagaggcctgattggagacattcatcagtcaggttcgtcaagaaaggtttttacctgagggggatgaagttcatgaaagtggggagggcctttgcccagcacttctattcccacctttacgacaagcccttcttt

SEQ ID NO: 22630 - DNA, 168 bp, Oryza sativa
  Clone ID: uC-osflM202059h02b1
tttttaggtatataattaagcgcgtatctgctacctatcattgccttcgccgccgctcgcgtgagacaccttacgaggttccgggaaaccttagccccatcccccaccccgtcgcgcgcattcatggggcgtccgctgcgtagccaagggtggacaggagcggggggc

SEQ ID NO: 22631 - DNA, 308 bp, Oryza sativa
  Clone ID: uC-osflM202059h03b1
gatgatatcaccaaggctaaggagtccctcaccgggattttctagaccgtcgtggcctacctcatcgccaacccggacgcttacaactaaatcgtcatcatgcctatgcccccaaaatatgtttgataatatttgatcttttgcgagtgtgtatgatcgaaataaagctgctttcaagcagtgattgagaagtgagcaccaagaagcttggtgggtggtttggttgctgtcggaaaaaggttttgtttgacatgatgctgtcaacaccggatatggtatgtatttatctagcatctacctggtgggtt

SEQ ID NO: 22632 - DNA, 508 bp, Oryza sativa
  Clone ID: uC-osflM202059h04b1
attatcgccaagaacatgccaaatatttcaccaacatcaagataatgcatagcgacatttaaacaggtaagcagatttgcgaattcaaataataagaaggaccaagttcatagcaagatcctagatttggttttacttcttataaaacacgccattcacgaattcagcaccatatgtgtagtattcatacggctagttagcacacatatagatggcttcatcgtcaactaaatcccagctatcatccaaatcaatactgtcatggaaggaagcatcatcaatctcttcatcaccactgaaaactgaatttgattctgcagcagaagaccaagtactcttgaatgttgctggtttctctgagctggccaagctagatgaaggaagcggcagcgactcatcagcattagccctttgctggaactgtgtaatggtgtctgaagcagatgaccaattcttgaaaagtgctggtttctctgagctggctaagctagatgattgcagcatctca

SEQ ID NO: 22633 - DNA, 511 bp, Oryza sativa
  unsure (1)..(511): unsure at all n locations
  Clone ID: uC-osflM202059h05b1
gtgttaagggattcaagcatcccacctctgaccataaacatgaaagatcaccacaaccaacatggcttctcattttagaaatttcaactggtattcttctgcttgtatttgtgatcactggtgcaattactgcttccagaagttgcaagctaaagccatcgataagaatatcctcgtggaacagatcaaaaagttggagtgatgagataacagtgctgatcgattctgatatgctgaaaagcctgccaaagttaagtcgccaagagcttgaagtagcttgtgaggattttagcaacattattggttcatctcctgagacagtagtgtacaaaggaaccatgaaggatggacctgaggtttctgtcatatcattatgtgcctttgaaggtcattggactagccaacatgaactattttaccaaaacaaggttattgacctggcaaggttgaatcatgagaacatagcaaaatntctgggctattgcagagaaagtgacccattctccaggat

SEQ ID NO: 22634 - DNA, 344 bp, Oryza sativa
  Clone ID: uC-osflM202059h07b1
gtgcctctctattcttcgccgcctatttctactccagcattgctgctgcgcgactcgccgtcctccacttccgcagcgggtgggtagcttgccgcagaactcgttcggctttcgcctataccgccgccgccgcctacctagtacaaggtgtcactgaatggctagaacaatgggttcaacacctacctactgctcttaccaaacaaatggtgttggcgctttaaagcaatcacctcatatgcaattccaacaatcgtacaactctggagttaggttcctaaagagggacaccctttctgggcggaataacaaacatatggcccaaagaatagcaacaagcactg

SEQ ID NO: 22635 - DNA, 198 bp, Oryza sativa
  Clone ID: uC-osflM202059h10b1
ttttttctagatcgagacggccgcccttaatgggggggtttttacataggttcatacaccacatatgcattaagttgaacaaatcttaaggaaataaaaacacacattgcctcatacaaggaagcccaaatttgtccgaccaacaacaatgatagatggaaaagagatgtggctctcccccctttggcatccaggacc

SEQ ID NO: 22636 - DNA, 240 bp, Oryza sativa
  Clone ID: uC-osflM202059h11b1
tgtagcaacaatgtcttccccttcctcggcccattggctgttcttggtaggaagtatttggctccagaccatcaacggccccaactccgacttcccggtgtactcgtcgcagctcaaggagctcaagagcatcagccaggtgcagctcaacttcctcgccttcgcgtccgacgcgggcaagctcttcggatggttctccggggtggcggcgctgtacctgccactttggggtcgtcgcgt

SEQ ID NO: 22637 - DNA, 225 bp, Oryza sativa
  Clone ID: uC-osflM202061a06b1
agctctctccccaccggggtccgggtatcctttctccgaacccagccgagagctcgaagcctttccttactctcttgccatgtaccgcgcggcggccagcctcgcctccaaggcccgtcaagccgggagcagcgctcgtcagattgggagtaggctcgccttgcatagaaactatgctgccaaggacatcaagtttggtgtcgaggcccgggccttgatgttgag

SEQ ID NO: 22638 - DNA, 207 bp, Oryza sativa
  unsure (1)..(207): unsure at all n locations
  Clone ID: uC-osflM202061a07b1
gatcgatggcggctactatgacggtttttatatgttgcactcgccgtgctgcccgcggnggtggcgctgacattcctcgccggcggcgcggacgccgactgatacgacttctgcttcaaggactgcatggccagggagaacaacatggtcaactactgcagttacccctgatacaagatgtgccaggcggacaagcccacgctgtac

SEQ ID NO: 22639 - DNA, 351 bp, Oryza sativa
  Clone ID: uC-osflM202061a09b1
ccgccgggcccttaccttcgtcctccgctccgcctcccgccttcgcgccgcctccccttccccgtgcccgcgccgtgcgccgttccacccccaccgtcggccgttccccgtgggctttctcctgaaccgcgccgccgccgtctacgcgtcgtccgccgcggcgcaggcggtccccgcgcctccccccgcgtcgggcaaggccaccgggggcggcaagatcaccgatgagttcacgggcgctggcgccgtcgggcatgtgtgccaggtgattggcgccgtcctggacgtgcggttcgacgagggcctgcccccgatcctgaccgcgctggaggtgttagaccacaacatccg

SEQ ID NO: 22640 - DNA, 425 bp, Oryza sativa
  unsure (1)..(425): unsure at all n locations
  Clone ID: uC-osflM202061a11b1
gctctaaaaccccgaccctatccactgtgccgtcgccgtcgccttcgccgccggcccgccgtcgccgttttagccatgaacgcctttcggttcctcggggacatgacccacctcttctcggtcctcgtgctcctgctcaagatctacgccacgaaatcctgctcaggggtgtcgaggaagacgcaggagctgtacatgctggtgttcgtggcgaggtacatggacctgttcacggactacatctcgctctacaactcggtgataaggtnggttttcatcaccagctcggcggcgatcgtgtggtgcatgctgcgccacccacaggtgcggtgcacgtacgacaaggatcagggcaccttccgccatgaggtgctcgtcgtcgttgccttcttgctcgcattgctcttcaacgagcggatcacctt

SEQ ID NO: 22641 - DNA, 436 bp, Oryza sativa
  Clone ID: uC-osflM202061b01b1
cgggccgcccttgagtgtggggttgttttttttagattggcttgctgttgctacactggcgagcggctgcaacaacgcggagttcatgccgcacgagaccttggcaaagcatctcttccactgggagacaaagccattgagctgggcaatgagggtacgagctgcattctatgtggctcaggcattggagtactgcagtagcaaagggagagctctctaccatgatctgcatgcatacagggttctctttgatgtggatggtaaccccagactggcgtgcttcggtctgatgaagaacagcagggatgggaagagctatagtaccaatttggctttcacgcctcctgagtaccttaagactggcagagtaattccagagagtgtggtgtacagttttggtactaacttgcttgatctcctaagtggaaaacatatc

SEQ ID NO: 22642 - DNA, 427 bp, Oryza sativa
  Clone ID: uC-osflM202061b04b1
ggcggcggcggcaagcgccgcagggtctcctccgacgccgaccctttctcggcgacgccgccgacacccacgacttccaccacggacgcgtacgccgacctcccagccggcttcccgttcctcagtgacggcgccttcctgccgcagttcggcctcgccggcgttgcgccggccgcgttctcttgggcatcggctgtccctgacttgtacaactgcgggatcgcgccgtgggacgatggaacggcggtcaccggcgcggcgtgggacaacttcgccgacatcgccggccttgatctcagctggccgtcgccgggtaactgacgaacagtacacagctggtcgctcgtgttttggggggctccggttttagcaaagcagcctcaagtagtgcgttctcgaacggatgcaggtagtgtgttcttcgatc

SEQ ID NO: 22643 - DNA, 479 bp, Oryza sativa
  unsure (1)..(479): unsure at all n locations
  Clone ID: uC-osflM202061b05b1
cccaaaatcatcagatccgcctgcggcttcttcttctccacctcctcctaccccctcgccgatccagatccatcgccggggaggcgccagccatggccggcggcgggggcgccggcggcatgtcggagtcggtgctccgcaaggtgctcctctcctactgctacgtcggcgtctggatcttcctctccttcgccgtcatcgtctacaacaagtacatcctcgaccccaagatgtacaactggcccttcccgatctccctcaccatggtccacatggccttctgctcctccctcgccgtcgccctcgtccgcctcctccgcgtcgtcgagccgccctcgtcgcccgccatgaccccgcagctctacacctcctccgttgatcccatcggcgcgctctacgccatgtcgctgtggttctccaactcggnctacatctacctctnccgtgtccttcatccagatgctcaaggcgctcatgcc

SEQ ID NO: 22644 - DNA, 343 bp, Oryza sativa
  Clone ID: uC-osflM202061b06b1
aaaaaacaaaacacaccaagccagagtattatttacaatgggatcgcttaccaccaacatggtcctggccgtcgccgtggtggcagcgctggtcggcggcgggtcgtgcggcccgcccaaggtgccacccggcccgaacatcacgaccaactacaacgccccgtggctccccgccagggccacctggtacggccagccctacggctccggctccaccgacaatggtggcgcgtgcgggatcaagaacgtcaacctgcctccctacaacggcatgatctcctgcggcaacgttccaatcttcaaggacggcaggggatgcggttcatgctacgaggtgaagtgt

SEQ ID NO: 22645 - DNA, 259 bp, Oryza sativa
  Clone ID: uC-osflM202061b08b1
catagtacacttgagctcacttcaaacttaaattctcacaccaatggctctccaagttcaggccgcactcctgccctctgctctctctgtccccaagaagggtaacttgagcgcggtggtgaaggagccggggttccttagcgtgagccagaaggccaagaagccgtcgctggtggtgagggcggtggcgacgccggcggcgccggtggcgagccccggcgcgggcacgtcgaaggcggacgggaagaagacgctgcgg

SEQ ID NO: 22646 - DNA, 482 bp, Oryza sativa
  Clone ID: uC-osflM202061b10b1
cgcctcatgccgtccagcaggtgcgactttattgtggcaacggatccttccattccctggaagctgccgccgagcccaccttgcagatcgggtttactccagagcagatgaacaactcatgcgtgactgccttcatgccgacatggctaccctgaactcctgaaggccgatgcgacaaccaataaaaacggatgtgacgacacagatcaagtcgcaccattagattgatcttctcctacaagagtgagactagtaattccgtgtttgtgtgctagcgtgttgaaacttttctgatgtgatgcacgcacttttaattattattaagcgttcaaggactagtatgtggtataaaaggccgtacgtgacagcctatggttatatgctgcacaaaaactacgtatggtacagtgcagtgcctgtacatttcataatttgcggtaaagtttattgactatatatccagtgtgtcaaatataataaaa

SEQ ID NO: 22647 - DNA, 522 bp, Oryza sativa
  Clone ID: uC-osflM202061c01b1
ttccttatatccacgccagagaggctgtttgaactaatagctttaaaggcgattgacatatcaggcgtatcgatgctggtgattgatggtctgaagtgtttcacggaccttaatgtcagcgacaagctttgttctattagggatgccatattgagcaaccctcaaataactatattcagtgacccgtctgaccgaagggtagctgcactggcaacaaaactagtcggtggaaaaaagatcacaaggctttgtacgaatgattcagttacttctagaggtgcattcataacacaaaagatacacatatgcccatcaaaggaccaaaaggcaccgaaggtgaaggaaattcttgaacaaattctaaatgatcatgctagaaagactgcaaaggtcctactggtaaccgcaagtgatcatgaagcacagcatctgtcatcattctttgaattgcaaaattgtaccgtgaccaatgactcgcatggcaactcttttaccatatgcagcagtgttgggctgattaat

SEQ ID NO: 22648 - DNA, 250 bp, Oryza sativa
  Clone ID: uC-osflM202061c02b1
gcaaaagcaaagcaaaccactcttctaactccaactcctcgccgccgccgccgaggaggaggaggagggagcgagcttgacgccggcgccatggcgggcgggggaggtagggagcggcgcggcggggggaggctgctcgtcggggtgctgctcctgacgctggtggtgtccgggcactgcctggagagcacgcaccaccgcgggctgaagcggcggcggcggaagcaccagatccactcgccgatcaaga

SEQ ID NO: 22649 - DNA, 145 bp, Oryza sativa
  Clone ID: uC-osflM202061c04b1
ttctcctgagtcctgacttcttgatccacctttgttcttcgatttcttgcttcttgattcgacgccgctgctgctgctggaggcagaaagggagcacaagatcgagcaatccaagctgcaattagaggaggaggaagaggatgac

SEQ ID NO: 22650 - DNA, 306 bp, Oryza sativa
  Clone ID: uC-osflM202061c06b1
catcggcgagcagaagaagagcagaggctcagttagcaggcgagagagatcagcgagcaggatggctggggctgcagggtcgtcgtggtcctctctgctcctcgcagcggtggcggtggcgctcgccgtcgccgcagcgccgtcgctcgccggcgacccggactacctccaggacatctgcgtcgccgacctcaactccgaggtgaaggtgaacgggttcccgtgcaaggcgaacgcgacggcggacgacttcttttccggcgtgctcgccagccccggtgccgtcgtcaacaccaccaccggcgc

SEQ ID NO: 22651 - DNA, 368 bp, Oryza sativa
  Clone ID: uC-osflM202061c07b1
tttttgtgaaagttgacgcgattgcttcatcaggttttagaacctgcaacatcgcgaaccatgtcagtacgacgtgctgaatttttctatacgtataatgtatacagtttacataacgcagtaacacaatttcctgatcttacacttctaaccgtctgattcctagttccaatcgatcaacatcgtaaggcaacagacaacactagtgattcaatcgatcaacagctcatcagaccttgtacagcatgccgatctcaactcgctgttgcagaggcatcccaagaaccggcagagccgaccggctgatcccatgcaagaactcatagaatccgagcatgagctttatataccagccggcgtacttgccg

SEQ ID NO: 22652 - DNA, 214 bp, Oryza sativa
  Clone ID: uC-osflM202061c08b1
tgccagcgcacctcgtcctcgttgttatatttcctacgcctccgcctccgttctccgcctcgcgcttggtgtcccccaaaaccctaggtggagctctcctcccccctcaccccatgcggcgccgccgggtcgggacggcgggagggttggttcgatcctgactgggctcggcgccgcgggcgagtcgcttgttggagggggattggggaatttg

SEQ ID NO: 22653 - DNA, 291 bp, Oryza sativa
  Clone ID: uC-osflM202061c09b1
ccacgaccacccaataaacgcttttgtggttatactacacagtctcgttcgcatccaccagcgaatacgaagacgaccgcctggcacttgtgtcccgtcgagaacctacgagagcatagcgccgtacttggcgccacgagtactggagacgtgtgaaatgatctctgcgttgggcatgagtacaatcatcaaaccgttgtgaggcaaactgaaattaaatgaagttttttgttacactgatttggtggggcaaaacatatttgagtgggttgatgtactcatctgttgcct

SEQ ID NO: 22654 - DNA, 292 bp, Oryza sativa
  Clone ID: uC-osflM202061c10b1
cctagctaggtagctagctatgttggttcgcttgcatggcgtcgccttccacctcgagctgggttgccgaggcagagatggtggccggggtgctcctcctactgggtgccaccgtcacgtccacccaggtggcgcgcctcctggacgaagaactgcccaccggcgacatgccggcgatcccgggggtccccggagtgccggcggtcgggcccgggatcccggtgatccccggcgtgcccggagtgccggtggttggccctgggatcccgatcgtgtcggtgatccccagagt

SEQ ID NO: 22655 - DNA, 436 bp, Oryza sativa
  unsure (1)..(436): unsure at all n locations
  Clone ID: uC-osflM202061c12b1
acatgagtagaacaacaacatcatggtttttttttatcacacacactatcagggcaggtgatcgaatagctaggaagcaagcaagcagagagtagtagatcgagtgatcggaggatggggtcgcggtacgaggtggaggtgacggtgtcgtcggcgcgggacctcaagaacgtcaactggcgcaacggcgacctcaagccctacgccgtgctctgggtcgacgacggcgccaagtgctccacccgcgtcgacctcgacaacgccgacaaccccaactgggacgacaagctcaccctccctctccccccctcctcccgcctcgacgacgccctcctctacctcgacgtcgtccacgccaacgccgccgagggcgtcaagccgctcgtcggctccgcccgcctcccgctccgngacgtcctcgacgacgccggcgtag

SEQ ID NO: 22656 - DNA, 305 bp, Oryza sativa
  Clone ID: uC-osflM202061d03b1
ttgcccctgctcctccggtgttttttgttatcattcggcagcccgttgcttgccaatcaggccctgtctagggctatcctgcgtgagcggtgggccggcaacttctgccatgtggtctcacagcatgatgttgtcccaaggctcctcttctgcccactcaatgtcatccctgtgcacattgttgttggtatgcagctgcaccagttgccggtgcgcgcgcgccgtgcagcctgtatggtggccacggtcactgcccgcatggttgacaccaaccaggagtcgctgcggtagctgatccaagagca

SEQ ID NO: 22657 - DNA, 329 bp, Oryza sativa
  Clone ID: uC-osflM202061d06b1
atgcctgaacggccaggctgtgcctctttttatctggccaggacccgtttgcgtgttcatgcgggcaggtgtaacatcttgggtggagtggcccattcttcggcgggcatggatttatcggcggaagctgctgctgctgctcgtccttgcgttcggcgagtcagatctggagcccatctgtccttttacaggtccggttggggcatgctccgtacgagctggcgtggatgaatcggccgggtaagggaggtggtttttattcgcctggatctttttcattggggccttatccgaagacgtctttctgtattgataatattggaagaact

SEQ ID NO: 22658 - DNA, 224 bp, Oryza sativa
  Clone ID: uC-osflM202061d07b1
agctcgatccggtccaccgcgtcacgaatacgaccatggtgactgtctctctcccagcttgccgccgtgttcctcgccgtcctcgtctcggtggcgccgctcgccggcgcggcggacaacctccaggacgcgtgcaaccggacgctgttccccaaggtgtgcatccaggcgctgacgacgaacccggagagccggacggcgaacgcgcggtggctggcggagct

SEQ ID NO: 22659 - DNA, 477 bp, Oryza sativa
  Clone ID: uC-osflM202061d09b1
tagcgcggctaaacctcgggcgtgttcttttagcggaagccagcttcaatccaagccccccgctacccaattggccaaactgtctcgagaactgaacacactgatatcagaaatcagtttgtcgaacgactcaaacgctcatcagtgatgcagacgtagctggtgatccgtttgtgagcaacggtcgatatttccacaatgcgcgacaagctaacgggagcatctaggttttccggacgagcagcacgacgtggactcgcacatcgttgatactccgtctacagagtagattccgctttttcgcactcaacactccgaaggagcaaacccgtcagaggtccaaggaaagcctaccgtcgactttgcatcgagccgtatggggcagggttaccgcagagtgccacctgtcacgctccggaagactcgagtgttgatcgatgtccacgaggaagatcacagggagaccttgatgcgatc

SEQ ID NO: 22660 - DNA, 413 bp, Oryza sativa
  Clone ID: uC-osflM202061d10b1
acaacgtgaaggccaagatccaggaggttattttatccccccggaccttcatcgcctcatcttcgccggcaagcagctggaggacggccgcacccttgccgactacaacatccagaaggaatccaccctccaccttgtgcttaggctcaggggaggtatgcagatcttcgtcaagaccctgactggcaagaccatcacacttgaggtcgagtcctcggacacgatcgacaatgtgaaggccaagatccaggacaaggagggcattcccccggaccagcagcgtctcatcttcgttggcaagcagctggaggacggtcgcacccttgccgactacaacatccagaaggagtccacccttcaccttgtgctcaggctcaggggtggtatgcagatcttcgtcaagaccctgaccg

SEQ ID NO: 22661 - DNA, 257 bp, Oryza sativa
  Clone ID: uC-osflM202061e04b1
cgagcgagcagctagctagctgcggttaatgcctccagagcggcgttcgtcgccgtcctcctcctcgacgtggcggcggcgccgcttttcgccgcggcgagcgcgcatggccgaggctaccttggtgccaagtcctggcctcctgacggcagcctgagctcatcaagctccggcgaggctgcagtggcggacgtcgacgacggtcacacggactggaagcgttctccccctgcatgagcaagtgctgtcaccgccac

SEQ ID NO: 22662 - DNA, 334 bp, Oryza sativa
  Clone ID: uC-osflM202061e06b1
gtgtccgccattgccgcgtcgcgcgcccaatttactactccttccttcgcaagctcgctagcttcccacctaccccatccaccgaggagggagagagggatttgatatggagtcgtcggcggggccgatggagctggtggcggcgctgctgcgggggctgacgccgcgggcggagcagctgctgcagctgtcgtccgggggagggggaggccgccgccggtggcgcggcggaggcgagggccgcggtggccacggtggccgccgcgctgctcgggtgcgcgttcttggtgttatggaggcgggtctcggcggtgcggaagcggaagagggagga

SEQ ID NO: 22663 - DNA, 188 bp, Oryza sativa
  Clone ID: uC-osflM202061e07b1
ccgcacgcgacgacctcgccggggctgagacgccgtcgccgccttcatggcgaggcgatccggggggaggaagctgtccttctttgcctcgaacgcctccacgtcgttctccaccaagcggacccgctcggcgcgccgcctcccttagctcaccaggccgtgcgcgtcgagctccccatccacggtgt

SEQ ID NO: 22664 - DNA, 506 bp, Oryza sativa
  unsure (1)..(506): unsure at all n locations
  Clone ID: uC-osflM202061e12b1
gtctctcaagagcggtgcagggttcacaaggcaggagaaaatgggggagatcaccaatgtcatggagtaccaggccatcgcgaagcagaagcttccgaagatgatctacgactactacgcctctggagctgaggatgagtggactctcaaggagaacagggaggcattctccaggatcttgtttcgtccccgcatcctgatcgatgtctcaaagatcgacatgtccgcaactgttcttgggttcaagatatcaatgcccataatgattgctcccagtgccatgcagaagatggctcaccctgacggagagtatgcaacagccagggcagcttcagcagcaggaactataatgacactgtcatcttgggctacttcaagtgttgaaggaggtcgcctcaactggaccaggaatccgtttcttccagctatacgtgtacaaggacaggaatgtggttgagcagcttgtcagaagagccgagagagctgngttcaaggcgatcgcactg

SEQ ID NO: 22665 - DNA, 376 bp, Oryza sativa
  Clone ID: uC-osflM202061f01b1
cccctctcactcccagatacctgctgttgccattagcccactaccatggatccttgcaagttccggccgtcgagctcgttcgacacgaagacgacgacgacgaacgcgggagctccggtgtggaacgacaacgaggcgctgacagtggggcccagggggccgatcctcctcgaggactaccacctgatcgagaaggtggcgcacttcgcccgggagcgcatcccggagcgcgtggtccacgcccgcggcgcctccgccaagggcttcttcgagtgcacccacgacgtcaccgacatcacctgcgccgacttcctccggtccccgggcgcccagacccccgtcatcgtccgcttctccaccgtcatccacgagcgcg

SEQ ID NO: 22666 - DNA, 218 bp, Oryza sativa
  Clone ID: uC-osflM202061f04b1
ccgaggatgaagcgagagttatgcgttgttctctaggcgacctaggatttaacaccaggggtccgaatgacatgctcatagttacaatagagctgtgctactctgtcattgcacctctgattattccatttggcgttgctcactttgctcttggatggactatagtgccaaatcaggttctacaggcttatgttcccccctactagagccaccgggaa

SEQ ID NO: 22667 - DNA, 484 bp, Oryza sativa
  Clone ID: uC-osflM202061f05b1
ttacatgtcaaacatagacttgacagtaaactaagagcacatccggcgtttcttttctgatattggtggtgtgacagcaataaggttgctgagggacaagttcaccaaaaaatcaagggggattgcatatgtggatttttcagacaatgaacatcttgaggcagcaattagaaaaaacaaacataaactgcttgcaaagaaagtaagtgttgctcgttcagatccaagcaagggcaagaaaaaccgtgaagcaggatctttctccaaagaccaagctactagtggcgatcgtggtgaaacggcagaatttgccaataggccagacaaggaaattcccaaagataaacccacaatcacagggaagaacacctttgctgcaccacgatctgtggttaaacctcttggatggacacaaaaggatgaaaaatagatgtgggcgcagaagagttaaaatcaaatgaggagttcagaaaccttttactta

SEQ ID NO: 22668 - DNA, 470 bp, Oryza sativa
  unsure (1)..(470): unsure at all n locations
  Clone ID: uC-osflM202061f07b1
cgcgcgagctgactcttcgtcgggcttctcgttattggcgtacgtactcttgctgccgcacgcgccacgcggtgctgcgcgttctactctggtctccggtggcctcttggccggaagctgccgcggcggcgatgcgagctgcttggtgctgacccaggagatccctcgttcctgctagttatcggcgcgccctcgtgtctgcccgagcggttcttgctccgcgcaggccgagggggnnggggcgccgcgccgacgcccgcaacctgttcgacggaatgtctccgcggaagaaggccaaggaatcgcccggctcgaccggcggcgaccggataggggaccttccggacgaggtgctccaccacgtgctctccttcctaccggcgcaggaagccgtccggacgtgcctgctagcccggcgatggcgccacctctgaaagtccgcacgggggtgcgcattgcgagggcgagac

SEQ ID NO: 22669 - DNA, 482 bp, Oryza sativa
  Clone ID: uC-osflM202061f09b1
gctcaaaagacacacattccaaaagcatttgtgtttcatctcctcctagtcctaggctcgcgtcaatggcggcgtccaccatggcactctcctcccctgccgccctcgccggcaaggcggtcgccaatgccaaggtgttcggcgagggccgcgtcacgatgcgcaagtcggcggccaagcccaagcccgccgcggcgtcggggagcccgtggtacggcgccgaccgcgtgctctacctcggcccgctctccggcgagccgccgtcctacctcaccggcgagttccccggcgactacggctgggacaccgccgggctgtcggccgacccggagacgttcgccaagaaccgggagctggagggtgatccactgccggtgggccatgctgggcgcgctcggctgcgtcttcccggagctcctcgcccgcaacggcgtgaagttcggcaggccgtgtggttaaggccgggtcccagatttcagcga

SEQ ID NO: 22670 - DNA, 561 bp, Oryza sativa
  unsure (1)..(561): unsure at all n locations
  Clone ID: uC-osflM202061f11b1
ctcgccttctcccgtcttctccttcgagttagttacctccttattcaaccatgggtaaggagaagacgcacatcaacatcgtggtcattggccacgtcgactccggcaagtcgaccaccacgggccatctgatttacaagcttggaggtatcgacaagcgtgtgatcgagaggttcgagaaggaagccgctgagatgaacaagaggtccttcaagtacgcgtgggtgcttgacaagctcaaggccgagcgtgagagaggtatcaccatcgatattgccctgtggaagttcgagaccaccaagtactactgcacggtcatcgatgcccctggtcaccgtgacttcatcaagaacatgatcacgggtacctcccaggctgactgtgccgtgctcatcattgactccaccactggtggntntgaggctggtatctccaaggatggncagacccgtgagcacgctcttcttgctttcactcttggagtgaagcagatgatctgctgctgcaacaagatggatgccaccactcccaagtactccaaggccccgtatgatgaaatcg

SEQ ID NO: 22671 - DNA, 512 bp, Oryza sativa
  Clone ID: uC-osflM202061f12b1
tcctcttcccttcgctcccttgccgggttttatttcgacttcgccgcctttcctcccccggcgacgactacgacgagtgacccctccgcgggcaccgggtcgccatgtaccgcgccgtctccggccttgtggccatcaagcggcatggactggatggtcaaatgttgaatgttgcgattaggtgtgctagcacaagtgttgcacagaggtcatcaggtggcttctggacctggctgacaggtgcacggtcaaatgcattaccttctccagattttacacttgcaggggtcaccattccacctccgctacctgaccttgtggagcctggcaagacaaaaatcacaacacttgcatatggtgtaaaaattgtttctgagacaactccaggaccattttgttcagtcggagcatatgttaattgtggttttgaacaagaagcacctgaaacactaagtgccacttatctgttgaagaagatggcctttacaaccacttcaaacaggagccatttg

SEQ ID NO: 22672 - DNA, 491 bp, Oryza sativa
  unsure (1)..(491): unsure at all n locations
  Clone ID: uC-osflM202061g01b1
tctcattctcctaattgtcatcactagcttttatttagcttaattaattaattagccatggcggaggagaagcaccaccaccacctgttccaccacaagaaggacgacgagccggccaccggagtagactcctacggcgagggcgtctacacgtcggagacggtgaccaccgaggtggtcgccggcggccaggacgagtacgagaggtacaagaaggaggagaagcagcacaagcacaagcagcacctcggcgaggccggcgccctcgccgccggcgccttcgccctgtatgagaagcacgaggcgaagaaggacccggagaacgcgcacaggcacaagatcacggagngagatcgcggccacggcggcggtcggcgccggcggctacgccttccacgagcaccacgagaagaagaaggaccacaagagcgccgaggagtccaccggcgagaagaagcaccacctcttcggctgatcgacctatcacaacg

SEQ ID NO: 22673 - DNA, 359 bp, Oryza sativa
  Clone ID: uC-osflM202061g03b1
tggccgtgcgcgcccggcaaggcgttccatgcttgcggacccatgcatatcgcatacaactacaactatggggcggccggcgaggcgatcggcgcggacctgctgggcaacccggagctggtggcaacggacccgacggtggcgttcaagacggcgctgtggctgtggatgaccggcgcggtcgccgagccagccgtcgccgcacgccgtcgtcacggggcagtggactccgactcccgcggacagcgcggacggccgcgcgccaggctacgggcttaccacgaacattcttaccggggggctccagtgcgccggtggcaacggtggcgccgaccgggtcgctgtttacatgcgcttct

SEQ ID NO: 22674 - DNA, 376 bp, Oryza sativa
  Clone ID: uC-osflM202061g07b1
atcatgtgaggtggaaccggattagtttttcatatggccggcctttccatgggatgagcagacaattagtgaaggtactgctcagccttatcttcacgaaggtgcaagaggacaactgcacatcatcaatgtgtgccatttgcttggaagactacaatgtcggagaaaaattaagagtgttgccttgccgtcacaagttccatgcagcttgtgtggacctttggctcacaacttggagaactttttgccctgtatgcaaacgtgatgcaagtactggaataccagatcctccagcctcagagactacaccattgctttcttctgcagttcgtttgccttctcagtcatcttcgttccggtcaagcgtggcagaatt

SEQ ID NO: 22675 - DNA, 196 bp, Oryza sativa
  Clone ID: uC-osflM202061g09b1
aaatcatccctagatgtggcgagctagaaacttgccctttcttgtcgttcccctcggcgatcgacttaggtgaccaccgatgtgcgggaggatgaagtggatagaaggattgctccagtggaggtggaggtggaggcggaggtagaagccaatgttagctttatagtacctaagtgatcacttgatggattttgct

SEQ ID NO: 22676 - DNA, 427 bp, Oryza sativa
  unsure (1)..(427): unsure at all n locations
  Clone ID: uC-osflM202061g12b1
agccatgaagaagctcgcatgtgagatcctggactctgttaggagaggggctaggtctcaaggaccccagatacttcagcaagcttaccacaaacgctgacagtgactgcctcctgaggatcaaccactaccctccatcatgcaacattcacaaacttgaccatgatgaccaatgcaatatcaagagccttgttagcaccaaggctagcaatggtgggaatctgatggcaggtgggcgcattgggttcggcgagcactctgacccgcagatccttagcttgctccgagcaaacgatgtggaagggctacaggtgtttgtgccggaccacgagggcanggagatgtgggttcaggtgccatcggacccatcggccattttcgtcaatgttggtgatgtcctccaggctctgacaaatgggaggctgat

SEQ ID NO: 22677 - DNA, 364 bp, Oryza sativa
  Clone ID: uC-osflM202061h01b1
tgcacgataagtgaagcgccaagttttgttacaactaaaatagttttccagccaacatgaatcagctcgagcgttgatgctttgcagctgggaggcgggaaagtttcttcgagggagatgctacgagcgtcaagtaaaaaacggtgccaacctgcaaaagtatattgaatcatcaagactaatatgtaatggggtaccaaacatttcagcctatgtaatgcacctgccaacgacaacgagcgtcactatcggccgtgacggctggtttttacttccaggaggagtaattgtgcccagatggccgatcctgtatcgtccagaaagcttttttcatcctaatcaccgcatttcagtacctattcat

SEQ ID NO: 22678 - DNA, 451 bp, Oryza sativa
  Clone ID: uC-osflM202061h02b1
ggaggagccggaaggcagccggggcggtttctttggaggtgtttctcagttgggaccccgggctggagatccaagtccctttcgagcaaagaccggtgaacgagtactccgccctcaaggatagcgtactctactcgtgggcagagctgagcccggggtcattcttcctgcgcctaggcagcctgtggctgatcaccttcacggtgctcgccgcgcccattgcagctgcaagtttcagtccaggaaaggatccactcaaattcgtgctagcagctgggattggaactctgctcctcgtctctttggtcgctctccggatttatctgggttggagctacgttggtgataggctgttgtcggcggctgtgccgtacgaagaaaccggatggtacgacggccaaatgtgggtcaagccaccagaggtattggctcgtgacaggctcttgggatc

SEQ ID NO: 22679 - DNA, 508 bp, Oryza sativa
  unsure (1)..(508): unsure at all n locations
  Clone ID: uC-osflM202061h04b1
ttaatttacctcctccacctgctccggtttctttcgancggatcggctcggctcctcctcctccgccgacccaccgtcgccgcagataggagaagatggccgcacttgataccttcctctttacctcggagtctgtgaacgagggccaccctgacaagctctgcgaccaagtctcagatgctgtgcttgatgcctgcctcgccgaggaccctgacagcaaggtcgcttgtgagacctgcaccaagacaaacatggtcatggtctttggtgagatcaccaccaaggctaacgttgactatgagaagattgtcagggagacatgccgtaacatcggttttgtgtcagctgatgtcggtctcgatgctgaccactgcaaggtgcttgtgaacatcgagcagcagtcccctgacattgtacagggtgtgcacggtcactttaccaagcgccctgaggagattggtgcttgtgaccagggacacatgtttggatatgcaactgatgagacccc

SEQ ID NO: 22680 - DNA, 322 bp, Oryza sativa
  Clone ID: uC-osflM202061h05b1
caaagcaagcgagcgccgccctcactgctcttacacactgcaccacacgcctaaccaaccacgcgaacgaagcgcgcgcgcgctgacgtcatcctcctccgccgccatggcggcttcttcctcctccaccactcgcctcatccccctcctcctcgtcttgaccttctgcctcgctctcgcctcggcgtcggcgtgggcggcggcggcgggggatgacgacctcctggcggcggtgcgcgagccggggatggccgagtggctgcgcggcgtgcggcggcggaaccaccggcaccccgagctggcgttcgaggaggtccgcacc

SEQ ID NO: 22681 - DNA, 397 bp, Oryza sativa
  Clone ID: uC-osflM202061h06b1
tatttcaattcaatgatggccagtatgagttcgttgatcaacttcatgctagggcacaacagatatgtgccgttctctatcccggtgatgctacagaagaaggaaagcttctcagactgaagcaacagtatttcctttgcagtgcatcgcttcaggatatttttttcaggtttaaagaaaggaaagctgacagagtttctgggaaatggagtgagttccctgcaaaagttgctgttcaattgaatgacactcacccaactcttgcgattcctgagctgatgaggctactcatggatgtggagggactttggtggggatgaagcatggcatatcacaaataaaacaactgcctacaccaatcacactgttcttgctgaagcccttgagaaatgggcgc

SEQ ID NO: 22682 - DNA, 517 bp, Oryza sativa
  Clone ID: uC-osflM202061h11b1
acgacgacgtcgaggtcgaggcgggggctgattgagcatggccgacggtcaggaggacgccgcgggtctggacgatgaccttgttctcgaggatgagctgcgaggtcgagaagagggcgaagacggcggcggcggcggcggcgaggaagaggaggaggacgacgtcgacggcctcgccagcttcctcgaatcggagatcctctctggatctagcggcgacgaccctaccggtcgggaggaaggggatgagaaggagaagcagttaggagatgatgcgaagaacaataagaggaagcaggagtctgaatctgatggggatagcggcagcggcagcggggaggagcagaacaagagggtgaggagagcaaaggggaaagagaaggacgtggcgtcggtggcgcctcagatcgatagcggcatgttctgcaatatcccgccggagttgttctcgcagatattcaagttcctctcatcggaggatctcatctcctgcgccctcgtctgccgcttcatgaac

SEQ ID NO: 22683 - DNA, 353 bp, Oryza sativa
  Clone ID: uC-osflM202062a01b1
ctcctcctccatccattcccctcctcctccatctcctcccatgcatgggaggccgccgaggccattagcttcctcctcgtcgtcgtcgtcgtcccgcgtcttctccttcttcttggcgccgcgggttttcttgttcttggtggtggtggtggtcgtcgtcttcttgccgggtcggtcgtcttgctggtggctggagggccacggaggagttggaggaggagatggggtttgccggggactgctcgccggtcagcggcggcggcctcaggagcgttccttcgctcgaacttgggccttcttgacttgacccttttttgggctgccgcggccttcgtgttagggggaaaaatcca

SEQ ID NO: 22684 - DNA, 446 bp, Oryza sativa
  Clone ID: uC-osflM202062a06b1
tactaggacagagaggaatatctgtgttattatcggcatgagctgctgctgattgctcggcgcattcactgccatttcaacgccacaaaccacagactgacaagctcatcctgttcccatctcaactgcggtcactcaccaatggctccgccgcttctcctcgtctcgctcctgctcatcggcttggtcagcgccagagccatcacaccctcagctgaagcggcggcggtgttcccgaaggaagccctgccgaccaactccggctacctccccatcacgacaaccaacgccttgctcttcttcgcctactacgaggccacgcacccgctcacgccgccggcctgcacgccgctcctcctctggctccagggcggacccggctgctccggccttcccggcaatttcttcgagctcggcccctacttcgtcaaccgcgacgcgctctc

SEQ ID NO: 22685 - DNA, 481 bp, Oryza sativa
  Clone ID: uC-osflM202062a08b1
ggtcatggaacctgtacaggattcatttaattgacagctgagtttgatacgacacgatgccaaacataaaccacaggtaaatatttttcaacacgttcaccaaccaacaaaccggagctaaattattcactccatatcatgtgatacgcaagcagatgcaagctcacattactgaaccaaatagggagtaaacttagtcccaaatgaccaaaatagcatattgaggacttagcaaccctgctcgatcagataatcgccaagcctctccacaatcatgttgcactggcctggggtcatcggctcatcatagattccaagaatcaacgacaggccagtcttcttgacacatatgcctccagtgcccttctttcctcggatgacaacccctggttcacctttgatcaccatgtattttgtgcccccaaggaaaagaccagttggtgcgagactgccgggttcatcaaaggccttcatgatgcca

SEQ ID NO: 22686 - DNA, 436 bp, Oryza sativa
  Clone ID: uC-osflM202062a09b1
tatcttgacaaaggaagagtttgtgaggattttttttcgatcatctgcagaaagatcgctaaactctcagatagctgcatgtatgagagcttccttatcaaggtgctgatcatggcaagcctgcatttgaacactgaggccagcctacataaatggacagagggatgaggccaagttggcaacatcttgtgcagaaaaaggagaacagcaaaaggagaggaagagcaagtaacaaagtcatgcctatatgatggggccttgagctgctgctgctgcttgaggatatcaagaagttcttcaccatgaagtacatgaagcttgggacaaagcctgacacattttacactgaagaagctgtcaggtctgtacttgcagacgtacctgctgatctcatcatacatgtcaacaccacatagtatcagctacataagttccc

SEQ ID NO: 22687 - DNA, 452 bp, Oryza sativa
  Clone ID: uC-osflM202062a10b1
ccacccacactctccgtctcctcctcttggttttctcgaaggcttggatctcgctgctgctcgcgctcgccgtggtgctgtcggcgccggcggcgagggcggatgaggcggcggctgcggaggaggggggcgatgcggcggcggaggccgtgctgacgcttgacgcggacggtttcgatgaggccgtcgccaagcacccgttcatggtcgtcgagttctacgccccgtggtgtggacactgcaagaagctcgctccagagtatgagaaagctgcacaggagctaagcaagcaccgatccaccgattgttcttgccaaggttgatgccaacgacgagaagaacaagcctcttgctaccaagtatgagatccagggtttcccgacactcaagatattcaggaaccagggcaagaacattcaggaatacaagggcccgagggaggctgagggcat

SEQ ID NO: 22688 - DNA, 230 bp, Oryza sativa
  Clone ID: uC-osflM202062a11b1
ccgccgccggcgacgccctggacgcgttataagtgtttggagcagagcgctgagcatggcggagaggaacctcctcgccgacgcgtcgaggatcgccgagaggtgccgcaagggcggcaagaagaaggccgacgttcgctgcgccgtcgccgacggtctcgccggcctcggctacgacgccgccgtgtgcaagtcgcggggggacaagaccccctcctaccccgcaggcg

SEQ ID NO: 22689 - DNA, 497 bp, Oryza sativa
  Clone ID: uC-osflM202062b01b1
gttcaagaaggtggtcgagtatggtttttttttaaggggaacatggtgtaggtcaccaggaccttccgcgtccgcaagatcgcccgcgcccgcctctccaagagcgccatcgagcgccgctcgtggcccaagttcggcgacgccgtgcaggaggacgtcggcgcgcggctcaccatggtgtccaccgaggagatcgtccttgagcgcccacgcgccccagggagcaaagctgaagaaccaagtgcttctggtgatccactggcaagcaagagtggtgcagttctcatggtttgcagaacctgtgggaagaagggtgatcactggacctcaaagtgcccctacaaggatctagctccccagacagaagcttttgtggacaggcctcccactgctgatggctctggacctccaggtggcgccgtgaagggagcatatgttccttcaagcatgaggtctggtgctgttgatagggttggacatgacatgaggcgtaggaa

SEQ ID NO: 22690 - DNA, 388 bp, Oryza sativa
  Clone ID: uC-osflM202062b02b1
ccgtcgtccatggacagttctaataacattattatacaacaagagggcgcgcgacgccgaggatgaggccgacaaggccaagaggctgcgggcggaggacctgctcgacatgctcgacgatgataccgacgccgggggcgccggcggcgacctggcgttcgacatgcggagcttcgaggaggagattgttgctggggatgtcgccggggacgttgcccccacgacgcagcccgagctcgggttccttctcgaggcctccgacgacgagctcggcctgccgcccgccaccgcgttcttgtcggaggaggaggccggggctggggagcccgaggatgcccatcggttcggcggacagatctgggggttcgaggacgagattggcggaggc

SEQ ID NO: 22691 - DNA, 381 bp, Oryza sativa
  Clone ID: uC-osflM202062b03b1
gcggtggcgccggagatgtcgtcattcttgctctgcgggaggaggcggcggggggcggatctccatggcggaggccgcgtcgcccatcagcagccggccgccgccggcgcagcagcagttcgacgagctcggcgtaggcggcggaggcggaggcggaggtgggtttgacgccgaggcgctggcggcggcggcggtcggcgaggagggagccagcggcggcgcggtggggaaccggtggccgcggcaggagacgctggcgctgctcaagatccggtcggacatggacgccgcgttccgggacgccaccctcaagggcccgctctgggaggaggtctccaggaagctggggaggagggttacccgaggagcgcgaagagtgca

SEQ ID NO: 22692 - DNA, 463 bp, Oryza sativa
  Clone ID: uC-osflM202062b04b1
ggcagcgacgagccatggccacacacttagtgttcgcggcgtcccgcattccggccaccgcccggctgcacagcaaggcggcgtccaagcagagggtggacttcgccgacttctccggactgaggccgggatcgtgctccatcagccacgccgcgagggaggcgtccttctccgatgtccttggctcgcagctcgtcgccagggctaccggagagaacgccgtgagggcgccggctgaggcgaagctcaaggttgccatcaacggcttcggccgcattggccgcaacttcctccggtgctggcacgaacgcgagaactccccgctcgaggtcgtcggcgtcaacgacagcggaggccgtagggacccatcacacctttcttagtccgactcgatgctcgcaaccttaaagccgacgtcaagatcgtcgacgaccagaccatcagcgtcgacggcaagctgatc

SEQ ID NO: 22693 - DNA, 493 bp, Oryza sativa
  Clone ID: uC-osflM202062b07b1
cttctaggtcctcttcatgttaagtctgttatgttagaactctcccgatctgaaagaggcgatgatggagaaaatgtgaagtattcggaattgttttatggtcgcaactttaatggtacaagctgttatgtgttttccattctgttgtgtatttgcgctaaactataaccttatttatgtttggccttgaagtttgttcattacaagtccctttttgctacagttgtttttattggcacaacgctctttgctttacaacagttatccggcataaattctgtgttctatttctcatcaactgtgttcagaagtgtgggtgtgccccctaaccttgcgaacatatgcatggggatagcaaatttatcaggctcaattgtagctatgcttctaatggacaaactaggaaggaaagtacttctttcagggagctttcttggcatggcctttgcaatgggacttcaggctgttggagcaaatcgtcaaccaccttggt

SEQ ID NO: 22694 - DNA, 493 bp, Oryza sativa
  unsure (1)..(493): unsure at all n locations
  Clone ID: uC-osflM202062b08b1
aaagaagagtggttgagtgcatgtcggatagagtgtgtgcctatattcctgaggatcgatgntgnggcaaggtagctgggcaggacaggcatcggttccatgctctagtttcaaggaagacatcgttccaagtgcacggtggctgcttttgctgcgataatcccataacatacatcaacggagctgaccgatgtaagaagccaacattaaacactgctagttaccagcagagccaccctgaaaagctgaaagcaagaaaaaatctgagagaagagcaagctgacatacatcatggagatgatcctggatgcccttgcatcctacctcggcgagcagttcgccaagatggtgaaagacgaggcaaggatgctgcttggcgcttctggcgaggtcgagaagctgacaggcatgctgagcaggctcaagaagttcctggccaacgcggagaggcggcacatcaccgatgccaaggaaggagaatatgtgcatgagt

SEQ ID NO: 22695 - DNA, 395 bp, Oryza sativa
  Clone ID: uC-osflM202062b12b1
tctatagtctcagctcttcttccaccttcacttagctcctcctcctcctcctcgccggtgttcgccaccaccgctcggagagatggcgagccagaccgccgacgccacggggttcgtcgcgagcgacccgctgtcgtggggcaaggcggcgctggagatgacggggagccacctggacgaggtgaagcgcatggtggcgcagtcacgggaggccgtggtgaagatcgaggggtccagcctccgcgtcggccaggtggccgccgtctccgcggccaaggacgcctccggcgtggtggtcgagctggacgaggaggcccgcccccgcgtcaaggccagcagcgagtggatcctcaactgcatcgcccacggcggcgacatctacggcgtcaccaccg

SEQ ID NO: 22696 - DNA, 438 bp, Oryza sativa
  Clone ID: uC-osflM202062c02b1
ctgattgatgttttttttctgatttttttggttaattttctggtggcgttcttggggacgcaggcaagattaagatcggaatcaacggtttcggaaggatcgggaggctcgtggccagggtggccctccagagcgaggatgtcgagctcgtcgccgtcaacgaccccttcatcaccaccgactacatgacctacatgttcaagtacgataccgtgcacggccaatggaagcacagcgacatcaagatcaaggactccaagactctgctcttgggcgagaagccggtcaccgttttcggcatcaggaaccctgacgagattccgtgggctgaggctggtgctgagtatgtcgcggagtccaccggtgtcttcactgacaaggagaaggctgctgttcacttgaaggggggtgccaagaaggttgtcatcttagccccga

SEQ ID NO: 22697 - DNA, 446 bp, Oryza sativa
  Clone ID: uC-osflM202062c05b1
cctcatgcagaagtctccgcgtcgcgagcatttgttttgtaggctctcaccagtggcgaccccgagcccgaggccttcgtgttcttcaagatcaccaagttcgaggaggagctccgctctgcactgacccgggagatcgaggccgaccgcgtaaccgacgacaacgggaccgaccccgatgacaaccggatcagggagagccggtcgttcccgctctaccgattctttcgagaggagctcgcttgcgtattcctcaccggcgagaagctcaagtcccccggcgaggagtgcaacaaggtgttcctcggcatcagccagggcaagctcatcgaccccatgctcgactgcctcaaggagtggaacggtgagccccttcccatcaactgagccaagatcccatcgccattgccattgccatacacccatcatcgtggaggagaggagac

SEQ ID NO: 22698 - DNA, 415 bp, Oryza sativa
  unsure (1)..(415): unsure at all n locations
  Clone ID: uC-osflM202062c06b1
attcttaattcatgagctgttgggggtgttacgtttgtnaccacaaacagacactaaagcaagtgttggatttaaagctggtgttaaggattataaattgacttactacaccccggagtacgaaaccaaggacactgatatcttggcagcattccgagtaactcctcagccgggggttccgcccgaagaagcaggggctgcagtagctgccgaatcttttactggtacatggacaactgtttggactgatggacttaccaggcttgatcgttacaaagggcgatgctatcacatcgagcccgttgttggggaggataatccatatatcgcttatgtagcttattcattagacctatagtgagagggttatgttactaacatgtttacttccattgtgggtaaccgatttggtttc

SEQ ID NO: 22699 - DNA, 472 bp, Oryza sativa
  Clone ID: uC-osflM202062c07b1
gccgtgcaaggcgacgaacccgatcgaccggttttggaggtgccgcgccgactgggtgacggacaggaagcggctggcgcggtgcgcgcaggggttcggccggaacaccaccggagggctggccgggaagttctacctggtgacggacggcaccgacgacgacgtggagaacccgcgcccggggacgctccggtggggtgtcatccaggacgagccactgtggatcatcttcgccaaggacatgatcatcaacctcaaggaggagatgatgatcaacagcgacaagacgatcgacgggcggggagcgcaggtgcggatcaccaatggcgcgcaggtgacggtgcagaactccaacaacgtgatcatccacaacatccacatccacgacatcttgcaaggcaagggcgggatgatccgcgactcgccggagcacttcggcttcgcacccagtccgacggcgacggcatcagca

SEQ ID NO: 22700 - DNA, 472 bp, Oryza sativa
  Clone ID: uC-osflM202062c09b1
gtgcatccaaggaaagcacctcctttttatttggtgctggcaagaagaaggccgcttctggctctgatgaggatcattcaaattcaccaactcgcagccatgatggtgacaatgtggctgcagatgaggatgacgacgatgatgtccagtggcagactgacacttcgctggaggctgcaaaacagcgcatgcaagagcaactgagcgctgcaactgctgagatggtgatgctgtccactgaagaacctgagaagaagaagaagcacgaggcctcacacaaggagggtgcctccaacggaagtgcaaaacatgtggttgaagaggctaaaagcagtccttatgatgatctggtcaaggagatgaaggataacttgagcaagggtgctactgctgttcagctcaagggtctgatgacttcctcagccctgccaccccaggatgctatgaatgctctttttgatgcactctttgg

SEQ ID NO: 22701 - DNA, 422 bp, Oryza sativa
  Clone ID: uC-osflM202062d01b1
cggtggggggctcaaccggtcgtcgttgaggtttcagctgccgccgcaggagcttctcgacgatctctgcagccgcttcgtgctcaacgtgcccaaggaggatttggagtcgttcgagcggatcctgttcttgctggagcaggcgcactggttctacgaggacaactccgtcgagcacaacccctccctcaagtcgctctccttcaaggacttcactacgctcatgttcaatagctgtgctgcgctcaggccataccgcgcgcaccttgatgacatttacaaggatttcactcactataagttccgtgtccctgtctgcggcgccatcatcctcgatgacacctacgagaagtgcttgcttgtgaagggatggaagtctagcgccagctggagttttcctcgtggaaagaggagtaaagatg

SEQ ID NO: 22702 - DNA, 302 bp, Oryza sativa
  Clone ID: uC-osflM202062d05b1
aaagctcgtcagcagggaatcttcatttttatctctggagaccagcacccatgccatgagtggaaatggggcattgacttttgacttagaatacactagatggctcgaggagcaaaataagcagataaatgagttgaggacagcagtgaatgctcatgcaagtgacagtgaccttcgtcttattgttgatggcataatggcgcattatgacgaggtattcaaggttaagggtgtagttgcaaaggccgatgtgtttcatatactttcaggcatgtggaagacacccgcagaaagatgctttc

SEQ ID NO: 22703 - DNA, 305 bp, Oryza sativa
  unsure (1)..(305): unsure at all n locations
  Clone ID: uC-osflM202062d06b1
cgcggcggttgctctccagccatggccggctatgatgacgncgccgtcgcctgccgcactgnctacgnncttacttattcgcctctcgccttcgccgccggcgttttcccacgtgcctctccctcggtctccggctacgtcggcgcgcccgcggcgagtcgtttccgtctccctctccaccgagcctaggccgagggcacgcgccggcggctccgactctccctccaactttggcggtcaaacatcactgatgtcacccattcagccttatggtcgatgaacgctttagatctaaaaagccctat

SEQ ID NO: 22704 - DNA, 478 bp, Oryza sativa
  Clone ID: uC-osflM202062d10b1
tcaatcggggtgatcatcgagatcgtgttgaggtatagatagtttactctaacaacggcgaagatcctgctccatgggacgatgcacgtcaccatcttcgaggcggaatcgctctccaaccctagcaggccaagctcccaagcgccccagttcctccgcaagctggtggaggggatcgaggacacggtgggcgtgggcaaggggacgagcaaggtgtacgccaccatcggcctcgacaaggcccgcgtcggccgcacccgcacgctcgccgacgacaccgccgcgccgcgctggtacgagtccttccacgtctactgcgcccacctcgccacccacgtcgccttcaccctcaaggccaagaaccccatcggcgcctcccttctcggcgtcggctacctccccgtacgggacgtcctcgccggcgacgaggtcgaccgctggctccccctctgcgacgacaccgacgcgcgcaccccca

SEQ ID NO: 22705 - DNA, 434 bp, Oryza sativa
  Clone ID: uC-osflM202062d11b1
tgactccgccgccgcgcctcctcgcgctgtttatatgcgcgctgcgcctcccgacgcttcctcgctccaggccgccgtcgtcatcgcacggtcccgacccctccagtatcccccccatcccgcctcctcctccaccgcgtcgccgatggctccatgtcgtcgtcgtcgtcgcgcggtcccggctggctgtccaccgcgccatcacagatccagccatccctcataccggactcccccatcctgacggccccatcccagcggcgaggaggcgtcgtcgcgcgggagatgactggtggggagaggtgaagagggagaggcggatggcaaccctccctctgtcacgctcgctctccaatcccccttcacagtcgagccctgcgtcgtcgccttcccccgccgatgccaccacatcaaggcacctcacgcatggagct

SEQ ID NO: 22706 - DNA, 475 bp, Oryza sativa
  Clone ID: uC-osflM202062e03b1
gccgccgagaccgccgccgccctcgccgtcgtttccatcgtcttccgcgacgccgaccccgactactccaaccgcctcctcgaccgcgccatccaggtgttcgagttcgcggacaagtacaggggcccatacagcagcagcctgcacgcggccgtgtgcccctgctactgcgactactccggctacaaggacgagttgctgtggggcgcggcgtggctgcacaaggcgtcgcggcgccgggagtaccgcgactacatcaagcggaacgaggtggtgctcggcgccagcgaggccatcaacgagttcggctgggacaacaagcacgccggcattaacgtcctcatctcaaggaggtcctgaggggaaggacgagtattttcagtcgtccgcgtgaacgccgacacttatctgcaccctctcccgcatcttaatatcccagaccagactcccagtgggctgtgtcaagtgggcacag

SEQ ID NO: 22707 - DNA, 211 bp, Oryza sativa
  unsure (1)..(211): unsure at all n locations
  Clone ID: uC-osflM202062e04b1
ttctcctccccctcccggttcggttcggtacggnacggctccggttcgatccccggcnnttccttnggttcgggggttggtgggaaagcatggcggcgacggatgttgagtaccgctgtttcgttggcggcctcgcctgggtcaccgacaaccgctccttttaaggcgcctttttcacctacggggagatcctcgagtccacgatcatcaa

SEQ ID NO: 22708 - DNA, 464 bp, Oryza sativa
  Clone ID: uC-osflM202062e06b1
cactcctaagaagactccaaggatagcttcaatggaggtgaagtgcttgctgctcctggctctcttccttctgctaggaacacatggtggtgaagcgcagccgctcgtgccggccgtcatgacgttcggtgactcatcggtggacgtaggtaacaatgactacctcaaaaccatcatcaaggcaaacttccctccctacggaagggacttcaagaaccaggtacccacggggaggttctgcaacggcaagctggctactgatatcactgccgagacgttggggtttgaaagctacgcacctgcgtatctcagcccagatgcgtcagggaagaaccttctgattggagccaactttgcatctgcaggatctggctactatgaccacactgcacttctgtatcatgctattcctttgtcccaacattggagtacttcaaggagtaccaatctaagctggcagccgt

SEQ ID NO: 22709 - DNA, 484 bp, Oryza sativa
  Clone ID: uC-osflM202062e07b1
atccgcgcgcggtgcgtagtagcgagatgagaattggggggagggcaaagcgatggctccgatgaagctgtacgggtcgacgctgtcgtggaacgtgacgaggtgcgtggcggtgctggaggaggccggcgccgagtacgagatcgtgccgctcgatttctccaaaggcgagcacaaggcccccgaccacctcgccaggaacccctttggtcaggtgccggctttgcaagatggtgacttgttcctctgggaatcacgtgcaatttgcaagtatgtatgccgcaagaacaaaccagagctgttgaaggatggcgacctcaaggagtcagcaatggtggatgtgtggcttgaagtggagtccaaccagtacactcctgcactgaaccccattctttttcagtgcctaatccgttcgatgatgtttggggcaccccccgacagaaagttgttgaggagaaccttgagaagctgaagaaggtgttgg

SEQ ID NO: 22710 - DNA, 498 bp, Oryza sativa
  Clone ID: uC-osflM202062e08b1
ggctctttcgagtcagaatggagttcttgttttataccaaaactgacaagtcacacacgaccttatcaacgcatactaccactgactcgagtggatccagagctggcttgtttagaacacctatatctggtggtgtgcagagtgcgacttttgcccatggtctacctccgccggcattggctgttcgcaacttgatggaacaggcgcggtttgctcatctgtgcactgtcatgtctggcatgcatcatcggcgtactggatacccatttggttcgcttgttgatttttctaatgactcgatgggccatccaatattttcactatcaccgttagcaatacacacaaggaacttgctctctgacccaagatgcacacttgttgtccaggtacctggatggagtggactgtcaaatgcacgtgtcacaatatttggtgatgtatatcctttgccagaagatcaacaggagtgggcacataagcagtatgttgcaaaacatc

SEQ ID NO: 22711 - DNA, 477 bp, Oryza sativa
  unsure (1)..(477): unsure at all n locations
  Clone ID: uC-osflM202062e09b1
cctcccgcggcggcggcggcgagatgttttctttagactnggcggccgtgccgcccagaaagatggctggtggttttcgagtactgcatcttgacaggccctttctggctttcctgccagaagtacagagtgctgataggaaaataccattcagagaaaaagtgatctataccgttatctctctcttcattttcctggtgtgcagtcagctcccactctatggaattcattcaactactggagcagatcctttctactggatgcgtgttattcttgcatcaaaccgtggcactgttatggagctgggtattaccccaattgtgacatctggaatggtaatgcaacttctagtgggatcaaagattattgaagctgacaacagtgtgagagaggaccgtgcacttttgaatggcgcacaaaagctgctgggtatcttgattgctattgaagaagctgtgcatatgtgctggctggaat

SEQ ID NO: 22712 - DNA, 499 bp, Oryza sativa
  Clone ID: uC-osflM202062e11b1
atccaaaccaacctcaccgtcgacgaggattaatgcggcggcggcggcggaggcgaaggcggcgaagatgcagtacaagaacctggggaggtcggggctgcgggtgagccagctgtcgtacggggcgtgggtgacgttcggcaaccagctggacgtgaaggaggcgaaggcgctgctccaggcgtgccgcgacgccggcgtgaacttcttcgacaacgccgaggtgtacgcgaacgggcgcgccgaggagatcatggggcaggcgatgcgggacctcgggtggcgccgctccgacgtcgtcgtctccaccaagctcttctggggagggcagggccccaacgacaagggcctctcccggaagcacatcgtcgagggcctccgcggctcgctcaagcgcctcgacatggactacgtcgacgtcgtctactgtcaccgtcccgacgccaccacccccgtcgaggagaccgtgcgcgccatgaactgggtcatcgaccacggc

SEQ ID NO: 22713 - DNA, 316 bp, Oryza sativa
  Clone ID: uC-osflM202062e12b1
gtttcaagtttctgatgtcaactgggagccttacaagggcgttgatcctgtatccattccgaagcattgcgctgctccggataacctctgcttctccagaacatggttggtcagcttcaacctcaaggaaatctacgccccggaccggttcgctcgccagtttgggcaagaacagcatcgcccgctcaacgatgtccccgcgttccagcggcagctgtggaacccggcagtggactggagcctgatgtacgcttcagagatcgaacggttccagcagctgatcaacgctgcagatggtggtgatcatggtcataca

SEQ ID NO: 22714 - DNA, 494 bp, Oryza sativa
  Clone ID: uC-osflM202062f06b1
cgagtggctatctagattgcgacacattattatttacaactgcacatgttggaagttccttcctcctttaggccagataccatctctcaagaaacttcatattgatagaatggatgcattagaatgtatagacacatctttctatgggattgctggttttccctccctggaaacactagaattgacacagttgccagaactagtatattggtcttctgtcgattatgcttttcctgttcttcgtgatgtattcatcagttgcccaaagctgaaagaacttccactagtctttcctccacctgtagaaatgaaagtgctttcatccaacattgtttgcacacagcatactgatcatcgcttggacacatgcattattcaaaaggttagtttaactagccttgtgggtattttccatctttggcacttggattctgaggaaatcgcagacaccagctttgacagagcaaacatgttgaacaatgggcttagagatt

SEQ ID NO: 22715 - DNA, 441 bp, Oryza sativa
  Clone ID: uC-osflM202062f07b1
tcctgctcactcatgcacaccgctgtggatcttgtataatgagaccaagctcgatagcgagattaagtcatggcttgcttttgctgcccaaaaagtggttgaggtgaatgcccttgctaaggcattggctggacagaaggatgaggcttactttgcagcaaacactgctgctcaggcctccaggaggtcatcacctcgtgtgacaaacgaggaagtccaaaaggctgctgctgctctgagggggtctgaccaccgccgtgctaccaatgttagcgctaggttggacgcacagcagaagaagctcaaccttccagtccttcctacaaccacaattggttcattcccacagactgtggagctcaggagagtccgccgtgagtacaaggctaaaaagatctctgaggatgagtacgtcagtgccatcaagggaggaatcagcag

SEQ ID NO: 22716 - DNA, 67 bp, Oryza sativa
  Clone ID: uC-osflM202062f08b1
ctcgagagggagttggtggagagagaaatagtagagagagatggcctttcctcccccccccgaggag

SEQ ID NO: 22717 - DNA, 427 bp, Oryza sativa
  Clone ID: uC-osflM202062f09b1
gcttctcctccccctctttaccttttcctccttggttcggttccgcggctcgtctagggtttagggggttgagatggcggcgccggatgtcgagtaccgctgcttcgtcggcggcctcgcctgggccaccgacgaccgctccctcgaggccgccttctccacctacggcgagatcctcgactccaagatcatcaacgacagggagacggggaggtcacgtgggtttggcttcgtcaccttctcctccgagcagtcgatgcgcgacgccatcgagggcatgaacggcaaggagctcgacggccgcaacatcaccgtcaatgaggcccagtcccgccgctccggcggcggaggcgggggctacggcggcggcggtggcggctacggcggcggtcgtggaggcggcggctacggaggaggtggcggcggc

SEQ ID NO: 22718 - DNA, 481 bp, Oryza sativa
  unsure (1)..(481): unsure at all n locations
  Clone ID: uC-osflM202062f11b1
tcgccggcggtttgacgtcgaacggtgtacggtagaggcgacggtaaacccccacaccgccgccctccgncgccgtcgtcgttcatccgtgggagggggatacatatgcatgcaagcacgcatatcgactttcattgctcgtagttgcagagattaatctttgtggttacttcaatactgtatcaagtcttagtgaaggataattatcttgaagtatatcatacttcccagaagctagatacaaacacgagttgtcactaccatgggttcctgtgcttccaagtctgtcattgagcagagaccaccagcaaggcactataccaggaaaggaagaagagctcgtactaattcccgatccatcatgccagaggcgcccaagtcacggttgaacgattcaagaggacacatgactgacttctaatgaggaggttgtccattttgagacatcatcaaaccatggaaaatcagagcattcaaaaca

SEQ ID NO: 22719 - DNA, 447 bp, Oryza sativa
  Clone ID: uC-osflM202062g01b1
gttgcattgggagcggcggggtttgttttgttacggagccgttgtgtgctcggcgtcggccgccggtggtgaggatggcgtcgcgaaggcgaagacgaagtcagcggggagctcgaaggcggtcgctgtgcagggcagcacggccaaggctgatcatgttgaggattcagtttcatcacccaaatacgtgaaacctgccgttgcgaagcaaaatggagaggttgtgagcagagctaccaaatctgatgcaccagtgtctaaacccaaagttgacccgtcagttcctgcttccaaggctgaagctgatggtaatgcacaagctgtggaatcgaaagctgcactggacaagaaggaagacgtcggtgttgctgaaccgttggaagctaaagctgatgctggtggagatgcaagtgcagtaagcttttgcgatgatagtgagaacaagga

SEQ ID NO: 22720 - DNA, 268 bp, Oryza sativa
  Clone ID: uC-osflM202062g06b1
gctcgctcgctcgctcgcgctcacccgctctctttccccttctcggctcctcccccgctgcagcgccggtggggggtggcccccacggtcgccggcgaccggaatcccttcaccgccgccgccgccgtcggccgtcgtcgcccgtgttcggtcccgccgcgccgtgacgcgacgcgacatttttggactgggacttgccatgatctagtggagggaattttcggtattggcactggttggtggggtggatggatggatgaataaagaa

SEQ ID NO: 22721 - DNA, 459 bp, Oryza sativa
  Clone ID: uC-osflM202062g09b1
tcgtcgtcgtcggtggcagctgtctttttttgaaggcggaggagatcgttctccagcccatcagggagatctccggggcggttcagctgccagggtccaagtcgctctccaacaggatcctcctcctctccgccctctccgagggcacaacagtggtggacaacttgctgaacagtgaggatgttcactacatgcttgaggccctgaaagccctcgggctctctgtggaagcagataaagttgcaaaaagagctgtagtcgttggctgtggtggcaagtttcctgttgagaaggatgcgaaagaggaagtgcaactcttcttggggaacgctggaactgcaatgcgaccattgacagcagccgtgactgctgctggtggaaatgcaacttatgtgcttgatggagtgccacgaatgagggagagaccgattggtgacttggttgtcgggttgaaacaac

SEQ ID NO: 22722 - DNA, 466 bp, Oryza sativa
  unsure (1)..(466): unsure at all n locations
  Clone ID: uC-osflM202062g10b1
cgcctccgcctccccctcgcgccgccgtcttcgttccgcgcgaccgcctccgcctccgcctccgcctacgcctctgccttcccctcgcgccgccgcgtccacctcatcgccgccgccgtcgcttcgtcgtctcccagcgcctcagcctccccattgcgtcgtcgccgccgctgtcgccccgtcgtctcccagcgcctcagcctccccatcgcatcgtcgccgtcggcgagcgcacccatctccgcctccactagcgtcgtcgcctcgcgccgccacttccaccttcgcctccctccgtccctgccgaccgccgtctccggccaccagcgtccggatctggcccccatgtggtcgggggccgggatctgacatcccccgtgcgccgggcagcatctccgcctccgtcccaccgccgtcgtcgccgagcgccgncactttcgccaccgnctcgccccgttgctgacga

SEQ ID NO: 22723 - DNA, 472 bp, Oryza sativa
  Clone ID: uC-osflM202062g12b1
ctgtgccgctgcacatatatatagctcctaccttcacgagtaatctcacagaataaatcatgggaccagcccacggccacctcgtcctcctcgtcgccgcggtggcgttgctgtcagctggcttcctcccgcacgctgtggcgaagaagggcggtgccgtgccaccggcggttgctgacatatgctctcgcactccattcccagacacgtgcaagagcaccgccgggcggcacgcgtccaagtacccggtgatcgacgtcgtggctgtgctcaacatgcaggtggacgcgttctccaagcgcacggcgcatgcgagggagcgcgtgaccaaggtgtcccgcggcgcacagcctcagcagacgcaggcgctgagcttctgcgacaccatgtacatgaacacccaggacaccatcggcgccgcggagcgggcgatcaccttcagagacaaggctacggcgaggatcatgctgca

SEQ ID NO: 22724 - DNA, 337 bp, Oryza sativa
  Clone ID: uC-osflM202062h02b1
cctctcactcccagatacctggtggtgttatttgcccactaccatggatccttgcaagttccggccgtcgagctcgttcgacacgaagacgacgacgacgaacgcgggagctccggtgtggaacgacaacgaggcgctgacagtggggcccagggggccgatcctcctcgaggactaccacctgatcgagaaggtggcgcacttcgcccgggagcgcatgccggagcgcgtggaccacgcccgcggggccttcgcaagggcttcttcgagtggacccacgaacgtaccgacattacctgcgccgactttcttccggtccccgggcgcccagaccccc

SEQ ID NO: 22725 - DNA, 448 bp, Oryza sativa
  Clone ID: uC-osflM202062h04b1
aacccctctcactcccagatacctgctgttgccattagcccactaccatggatccttgcaagttccggccgtcgagctcgttcgacacgaagacgacgacgacgaacgcgggagctccggtgtggaacgacaacgaggcgctgacagtggggcccagggggccgatcctcctcgaggactaccacctgatcgagaaggtggcgcacttcgcccgggagcgcatcccggagcgcgtggtccacgcccgcggcgcctccgccaagggcttcttcgagtgcacccacgacgtcaccgacatcacctgcgccgacttcctccggtccccgggcgcccagacccccgtcatcgtccgcttctccaccgtcatccacgagcgcggcagcccggagacgatccgcgacccgcgcgggttcgccggcaagttctacacccgcgagggcaactggga

SEQ ID NO: 22726 - DNA, 443 bp, Oryza sativa
  Clone ID: uC-osflM202062h05b1
gacgaaggagaggagcagccatggcgtttttttgttgcagcggcggccagcacgttcctggggacgaggctggcggacccggcgccgcagagcgggaggatcgtggcgaggttcgggttcggcggcgggaagaaggcggcggcgaagaaggcggcgaggccgtcggcgccgacgacggacaggccgctgtggttccccggcgcggtggcgccggactacctggacgggtcgctcgtcggcgactacggcttcgacccgttcggcctcgggaagccggcggagtacctgcagttcgagctggactcgctggaccagaacctggccaagaacaacgccggcgagatcattggcacccggttcgagaccggcgaggtgaagtccaccccgttccagccctacaccgaggtgttcggccttcagcgctttcgggagtgcgagcttat

SEQ ID NO: 22727 - DNA, 497 bp, Oryza sativa
  Clone ID: uC-osflM202062h06b1
gtctcgccgaggcgattagccgcctcttcttcccttgcgccgccgccgccgccgcgcactgaaccggagacgaggtctttcccaacccctgtcttcatcgtgcgcatccttgccgtgcgccatgtttagttgtcttaaccctcgacgcctcggagccggacgcccgctgcccacctccacaccaccggacaacctctatccctgccgccctcctctccatcgtgtgcttgccttctttgttatctacacgcccgagaagagaggattcctaccgcgtctttctgttgtgccagtatcctcatcgatgaatgattttaccacagcagcaaagtggttgccaaatgctggtattatcccaggtttgcttttccgtctcctcttctcaaatcctttatgtgcccttgttcagattgcatttactttctttttctcctttctgctatcaaataggatcaatgaattgttccgtgaatgcttattatattatgagaattttt

SEQ ID NO: 22728 - DNA, 394 bp, Oryza sativa
  Clone ID: uC-osflM202062h08b1
aggaggagaggaggggggcaaggcatgctaattttcggcgccgctccggcgtattttggtggaatagtaacttaatatagagttctgggacagaaaattatggagagggaaatttctgccttatatgaaccaaaaagaaacaatgaaataagaatttttgagagttcagatgagatgtcaacagatctggctgagtatatctcgcaagtttcagaaatatctgtcaaagaaaggggatactttgctattgccctttctggaggtcccctagtcagttttttggggaaactttgtgaagcgccatacaacaagaccttggattggtctaaatggtacattttctggtctgatgagcgtgctgtagcaaagaatcatgcagagagtaattatagga

SEQ ID NO: 22729 - DNA, 483 bp, Oryza sativa
  Clone ID: uC-osflM202062h09b1
tgaaatagccttgtttgtatgcaatatgtatttagaaccctgcacggaacttgccatgcaactcatggaattaggtcaacaacactctccgacaaggaagctgggcgtggacatgctgagagagcggggcttgcaccatgactacgtcactgcgttactgcaagacggataccacctggaggctcttcgctacgctagaaaatacaaggtaataactgtgcagcctgtcctgttcttggagaaagctgtggccataaacagcgcgcagaacctcgccgccatgctgagcttcttctccgagttcacgccgaccttcaagacgacgtcggactacgggagataccggcatatcttgtctgagatgatctgaacaaatttcagtagacagggtgaactgcctgaaacgatttggcacgttttatgcaaatcccgtacagaagaaacttgatacgaggaatggtgtaaagttcagacgatttaagt

SEQ ID NO: 22730 - DNA, 470 bp, Oryza sativa
  Clone ID: uC-osflM202062h12b1
cgtccgatcaaaccctagctagctagcttgttattgctagcacgcacccatggcgtcgtcttccaccttgagctcgctcgccgcggcagcgatggtggccgtcgtcctcctcctcctgggtgccaccgccacgtccacccaggcggcgcgcctcctcgacgaagaactccccaccgccgccatcccggcgatccccggcgtccccggagtgccggcggtcggccccgggatcccggtgatccccggcgtgcccggagtgccggtggttggccccgggatcccgttcgtgccggtgatccccggcgtgccggtgatcgtgccgatcatccccggcgtgccgatgatcgccggcatgacaaccctgccagtgccgccatttgtgccgccgattgatcccggcgccggtgccggattccccggcgtgccgccggcgtcgtcgccaccgtgcaggagacccacagtcgtcgatg

SEQ ID NO: 22731 - DNA, 437 bp, Oryza sativa
  Clone ID: uC-osflM202066a02b1
ttattctcttcttcctctgcggccgactccttgctggccatgtcgctcgcgctggggtgccccgccactgcctcggcgtcgtcagccaagagcaccttcccgccctcctcctccccaccggcgtagaggctcccgaggaggccgcccgccagctgcaggtgctactactacggcgacggcgggggcttccgcaagaactacgaccacatccccaagcagttccgcgaggagaacctcaaagatggcctgatggataattacaagaatgttcctcaattcctttatggctcaagccctgctcagatcgaaacgtttatgaacgatgataatccatatgatcggcaatcacagagagttacagaggaaagcatttctgcttctaggagctatgatgaatttggcatgtacaacttgttccgtctgcatgaaggccctgc

SEQ ID NO: 22732 - DNA, 376 bp, Oryza sativa
  Clone ID: uC-osflM202066a05b1
tttcttttggacaccagaaacatagtacacttggggggactccaaactcaaacggtggaccaaaggctctccaagttcaggccgcactcctgccctctgctctctctgtccccaagaagggtaactcgagcgcgggggcgaaggagccggggttccttagcgtgagccagaatgccaagaaaccgtcgctggtggtgagggcggtggcgacgccggcagcgccggtggcgagcccctgctcggacacgttgaaagcggtcgggaagaagacgctgctggagggggtggtggtgatcaccagcgcgttctctgggctcgggctcgcggcggcgaacgcgctagcagagaccgggaaatggcacgtggtgatggcgtg

SEQ ID NO: 22733 - DNA, 528 bp, Oryza sativa
  unsure (1)..(528): unsure at all n locations
  Clone ID: uC-osflM202066a07b1
tcgtctaggtacaaagatactcctggtatttgggcgaaggatcaagtggaagcgtggaagccaatcgtagacggcgttcatgccaaaggaggaatatttttctgtcagatttggcacgtaggaagagtctctaataacacttttcagcctaatgggcaggctccaatttcgagcaccaataagtcactaaaacctgcaggttgctgctagaaatgcaattgaagcaggatttgatggtgttgaaatccatggagctcatggttatttgatcgatcagtttctaaaagaccaagtcaatgatcgttctgacaaatatggtgggagcttagagaatcgctgccggtttgcgctagaagtggtccaagccgtaactgatgaaattggagctgacaaggttgggataaggctgtcaccctttgccagctattcagaggcagcaaactcaaacccagaagctctaggcctatacatggcatatgcactaaacaagttttgtatnctctattgtcacatggtggagccacggat

SEQ ID NO: 22734 - DNA, 468 bp, Oryza sativa
  Clone ID: uC-osflM202066a10b1
ttcgttccgccgaccaggcgccccctcctccggcgggcgccggtgatcccgcgagccgctccctcggcctcgatcaagccgacgcaaccgtgggcggcggcggcggcgacgaaaccctaggggctcctccctcgaccctcgcctccgtcgctcaggacaccctggacgcctattcggccgccgacgcgctgcagagcctcaccgtgggcggctccgctgcggagccggagcgtgctctcggcgaacccgccgtcgacgcaggagatgctaaagagtcctcgaaggagagcagtgtggtggagcaggtggaatctatggccgatcagaaggggagtggtgagcagaagcgcaaggtcgtgaaaaagagcaaggtagagaaggacagagagctgtttgaacttgcgcaggcgtaccaccaggtggtagcagagagggatgcagctattgcaggtaaagagaaactagagt

SEQ ID NO: 22735 - DNA, 233 bp, Oryza sativa
  Clone ID: uC-osflM202066a11b1
tcggtttacgggaccaagccggcatcctcacgcagggtctgcttacccgctcggagggagaagataacacgaagaactaacaccaggaggaagaagccacgctaagacgaagctgattgaggaccacctcactgacgaccatagacgacgagttcaaggaggccttcagactgctggaaaagacatggcatggttggatcacaaccctacaatttggaacacaaatacctgca

SEQ ID NO: 22736 - DNA, 433 bp, Oryza sativa
  Clone ID: uC-osflM202066a12b1
tcgttaattccattcctcgcgattcctctcccctggcctcctcgtcctccccgtgctaggggatcgccggagaggaatcgcgcggaggaaaaaaaaagaaaagggcttgctcgtcgtctaagctaaaaggaagccatggagcacaaggagactggatgccagcaggcagaaggcccgatcctttgcatcaataactgcggcttctttggcagtgcggctaccatgaacatgtgctcaaagtgccacatggagatgataatgaagcaagagcaggccaagctggcagcctcctctatcgacagcattgtcaatggtggtgatctcgggaaggaaccaattattgctgggcacgctgaattagctgttgctcaaggcgaggtgaagacgcttgttgcgcagcctgctgagattgctggtcctagtgagggggtca

SEQ ID NO: 22737 - DNA, 457 bp, Oryza sativa
  unsure (1)..(457): unsure at all n locations
  Clone ID: uC-osflM202066b03b1
cttccttcttcttcttggaagcagccttcctaggcttgttcctcctctcccctcttccttccttcctgtagtaattaagcaaaccgaattccatcagcgctggctcgttggcgatctgaatcctcctcctcctccttgtcacctccttccgattcaggggcaggggcagatgcagatgcagcagcggcggaagccaccgcctgcggcggcgccggtggccgccaagcagccttccccgcgcaggacgcccgggcctctctccttcgccggcgccctgctctccctcctcgtcgtcgccacctttctctacatcaacgaccacggcaacatgatgccaccccacgcgtcccccgaccccgacctccgccttctgcaggaggccgcgcaccaaaaggtcaacttcatactnctcttccgccacgcccctggcccttccccgngcaccaacaccaacacg

SEQ ID NO: 22738 - DNA, 456 bp, Oryza sativa
  Clone ID: uC-osflM202066b04b1
ttgttttctcggacactgctcaagggtctgtatgctagattgttaggctgtgactttctgaaatttcatgagccatgttcaattgccttttgacggttcaacaatctttaaagatcaaatgtttcctgtatgcatgcaaggtacaaagatactcctggtatttggacaaaggagcaagtggaagcgtggaagccaatcgtagacggcgttcatgccaaaggaggaatatttttctgtcagatttggcacgtaggaagagtctctaataacacttttcagcctaatgggcaggctccaatttcgagcaccaataagtcactaaaacctgcaggttgctgctagaaatgcaattgaagcaggatttgatggtgttgaaatccatggagctcatggttatttgatcgatcagtttctaaaagaccaagtcaatgatcgttctgacaatatggtgggagc

SEQ ID NO: 22739 - DNA, 524 bp, Oryza sativa
  Clone ID: uC-osflM202066b05b1
tttcgttggggaaaggaaggaaggagatctcctatctctcctgggtggtgggtccccgtaggcagccaccaatggagggctcgccagcgacgcgcctcccggaggccgactcgctccccgacggcttcgtggagagctccgccgccgaccaggcgccccctcctcccgccgacgccggcgatcccgcgagccgctccctcggcctcgatcaagccgacgcaaccgtgggcggcggcggcggcgactaaaccctaggggctcctccctcgaccctcgcctccgtcgctcaggacaccctggacgcctattcggccgccgacgcgctgcagagcctcaccgtgggcggctccgctgcggagccggagcgtgctctcggcgaacccgtcgtcgacgcaggagatgctaaagagtcctcgaaggagagcaatgtggtggagcaagtggtatctatggccgatcagaggggagtggtgagcagaagcgccaggtcgtgaaaaagagcaaggtagagaaggacagagagc

SEQ ID NO: 22740 - DNA, 511 bp, Oryza sativa
  Clone ID: uC-osflM202066b06b1
ttaagctcatccgatccccacccttccccccctgccggtgccccctcttcagcgctggaggcggcggcggcggcgtcccctggatccctcggcggcggcggtggcgcacggttatgccgagaggcacccaggttccaacaccgtgcactgccagggctctagcattctcattaaggatatggagtacaccctctacaccacaagttcctctgtattgcacatttcgctgctcgaggaagttcttggctggaggtttctctttacggagacttcctcgttatctcttttgtcaactgcacctgaagatcacacctcattcagcagccgtcttgcctggtcccatgctattgcacattagagtcgactattgattacagtgcaactgtagcacatttcttcgagcatggtgcatcttatcctcttgcatccttccggtagtttttggtgtggcactgatcagccagcaaaagttaccatcggaacttctttggacaatcggatctgacattag

SEQ ID NO: 22741 - DNA, 564 bp, Oryza sativa
  Clone ID: uC-osflM202066b07b1
ctcaaatcctcctgctcacctcaccttatcctcagctctcagcacctcttcctccctcccccaagcttccctctaatggcgtccgccaacgccatctccaccgcctccctcctccgctctttctcctcccaggggagggtgaggagggccaagaatgggcgggcgcagcggctagtggtgcgggcggacgccaaggacatcgccttcgaccagaaatcccgggcggcgctccaggccggcgtcgagaagctcgccaacgccgttggcgtcaccctcggcccacgagggagaaacgtagtgcttgatgagtacggcagtcccaaagtggtaaatgatggagtcaccattgcccgggctattgagctatatgatccgatggaaaatgctggcgcagcattgatccgtgaggttgctagcaagaccaatgactctgctggcgatgggactacaaccgcctctgtacttgctcgtgaaatcatcaagctgggccttttgagtgtaacttctggtgcataccctgtatcactcaagaaaggaatagacataacagtgcatggtcttatg

SEQ ID NO: 22742 - DNA, 498 bp, Oryza sativa
  Clone ID: uC-osflM202066b08b1
ttagaagaggaatttaattataagaggaagagggagaagaagagcttaggtacaggctccagtacaagagatcgatcgagagacagaggatcggagaggaggaagaaggagaatccaagtactgggaggcaattaatttgagttgagatcgacttgagagctagcagaggctcatctcatctaggccagcagaggctcttcgctcgcttatttcatccatggcttccaaaggcacagaaggaggccatggtggcgtggagagaaaggagcagcagcagcagaggggttaccagctgccccgtgactcccggggatcactcgaggtgttcaacccctcatccgcttcctccttccgcactgctgctgccgcccccaagtccgcctcccccttccttgctattcccgacagggaagaggataatgtggtggcacagcagcgggcagcagagtggggcctcgtcctccagaccgaccaccacacaggcctcccccagggcg

SEQ ID NO: 22743 - DNA, 497 bp, Oryza sativa
  Clone ID: uC-osflM202066b11b1
tcggtttgctatccataaggttcagttgaaccaggtacgccacttggtggaagatatatcctgtctgttcaaggatctggacctgaggctgatgttgtctaccaaaagaatccttaagaacttagatgctgaagtggaaaatgcaataaattgcttggtatcttctgctgttattgatcctgatgtcaaaggtggacttagatggcctcttgggaaagaatcgattgatgagaggttcagcatagttggagtgtggcatacaaactacaaagctttcagaaatgagaagttgaggctcaagctaaggcatgctgaccggtttgaccatcgaagctcaactggagaggtttctaatgaagttacctttaaactaattggcatatctgcaagtctggaggctgttgatcaggaagcgaattctctgcaggagatgctggagtctgtggtaggaatgatctgggagagcggtttgagctacaagaaggcgccctgagcac

SEQ ID NO: 22744 - DNA, 381 bp, Oryza sativa
  Clone ID: uC-osflM202066c01b1
gtagtgtgaggctgccccggggggagagagagatcacccgcctcgccgcccgcccgcgccgcggcggatcgatggagctgttcgagcgcgcgaggacggtgcggctgcgcggtcaccatgacaagtacctgtacgcggaggaggacgagtcgcgcgtctcccaggaccggagcgcctcgtccccgaacgcgcggtggtccgtcgagccggtcccccacgcccccggcgtcctccgtctccgcagtcactacggccgatacctctgcgcctccaacgagcccttcctcctcggcgtcaccggccgcaaggtcctccaggccctcccccaccgactcgactgctccgtcgagtgggtccccgtccgagacggtgcccacgccc

SEQ ID NO: 22745 - DNA, 497 bp, Oryza sativa
  Clone ID: uC-osflM202066c03b1
ttctcgtggtcgcatgatctcatcaggagcgcagatgctacggcgtccttgagaattgcagagaggcaaaagaagaacaagcagagagcaagaacaagcagaagcagaagcaaagaggcgatggacggcgacacgctgtcggcggcggcggcggaggacgggaaggtgctgcacgcgttccagacgagcttcgtgcaggtgcagagcttgctggaccagaaccgggtgctgatcaacgagatcaaccagaaccacgagtccaaggtccccggcgacctctcccgcaacgtcggcctcatccgcgagctcaacaacaacatccgtcgcgtcgtcgacctctacgccgacctctcctccctcttcgccgactcctaccccggccccgccgcctccgagggcgcctccgtcggcaccgtcgtccgccacgccggccacatgcgtgtcaggtccacccacctcgactgaacaagaaccattctcattttctcaattaacca

SEQ ID NO: 22746 - DNA, 439 bp, Oryza sativa
  Clone ID: uC-osflM202066c05b1
ttacgtgcgccagccggtacagctcggcgatgtaccggatgaacacggcgcgatcaccgtgccgtcacctagtcaagcggctgcgggagcaggaggcgctgcagctggtgtgcggcccgggcacggaggagtactggagggcggcggagcggctgggctcccggcggaacggcacggtcggcgccgacgactaagggtgcaagtacctcgtgcttgtgccgtacaggggcctagggaacaggatgctggccatggcgtcggcgttactctacgccatgctcaccgggcgcgcgctgctcgtcgacaggggggagtcgctggccgacctgttctgcgagccgttcccggtcacgtcgtggttgatgacgccggagttcccgatcaagaacctccaggacttgaccggcgaggcgctcgagagctacaggatacctgtgca

SEQ ID NO: 22747 - DNA, 486 bp, Oryza sativa
  unsure (1)..(486): unsure at all n locations
  Clone ID: uC-osflM202066c06b1
gtatattgtaggtagatatatatggagatcgtgggcgagtgctagtaccggggcgaggcggtgttggtgacgccgagctcggccacgccgtggcgctccctctacctctccaacctggacgaccagcgattcctccgattctccatcaagtacctctacgtcttcccgccctccgccgccgtggccgccgacgccctcagggccgcgctcgccagggccctcgtccactactacccactggccggaaggctcaggcaccacgccgacgataagcttgtgctcgactgcaatgccgagggcgcgctcttcgccgaggccttnctgcccaccctcaccgtcgtcgactttctccgtgccggtgccaccgccaagccgcacaagtcctggaggaagctgctctacagagtccacgccgtcaccttcgtcgccgttccgtcgctcgtcgttcaggtgacacaactggggtgcggaggcatggtagtgtgt

SEQ ID NO: 22748 - DNA, 554 bp, Oryza sativa
  Clone ID: uC-osflM202066c08b1
ttcttcagccgtcgccgccgcagcctcctcctctcgtcttctccttcgagttgttagctccctccttattcaaccatgggtaaggagaagacgcacatcaacattgtggtcattggccacgtcgactccggcaagtcgaccaccacgggccatctgatctacaagcttggaggtatcgacaagcgtgtgatcgagaggttcgagaaggaagccgctgagatgaacaagaggtccttcaagtacgcgtgggtgctcgacaagctcaaggccgagcgtgagagaggtatcaccattgatatcgccctgtggaagttcgagaccaccaagtactactgcacggtcatcgatgcccctggtcaccgtgacttcatcaagaacatgatcacgggtacctcccaggctgactgtgccgtgctcatcattgactccaccactggtggttttgaggctggtatctccaaagatggccagacccgtgagcacgctcttcttgctttcactcttggagtgaagcatatgatctgctgctgcaacaagatggatgccaccactcc

SEQ ID NO: 22749 - DNA, 341 bp, Oryza sativa
  Clone ID: uC-osflM202066c09b1
tcgttccgcggcggccgtgagcaccaacactgaggcattccttcctactccgcgagatctccggattcgtttcggtgttttgcgagtcgcgcccggagaagaggagaggaaatccggtcaatcgcggcgtcggcgtgccgtcgcttggggtggtgttggtggttctgaattttgattgcttcgtgcttttcgttcgggggagggcagcggccgccatgggattggggaacgtggcgagctcgtcgtcgccgcggctgctggatcctgcgcctctgctgcctcaccacggttcaagattggcgcccgtaagctttcagtgcatgccaagagcttagcgatcg

SEQ ID NO: 22750 - DNA, 466 bp, Oryza sativa
  Clone ID: uC-osflM202066c10b1
ttgttccctctaccagtacataaacaagaaagatagctccaaaaaattagctagctcgccaatggccttgttgtcctccttccggctcgccgtggcagaggcggcattgttggtcgtcggctcatgcgccactgaggtcaccttcaaggttggtgagggctctagcggaaaaagtctagagctcgtcaccaacatcgccatctctgaggtggagatcaaggagaagggcggcaaggactgggtggcgctcaaggagtcagcgactaacacctggtcgctcaagagtgaggcgaccctcaagggccccttctccgttcgctttcttgtcaagaacggtggctaccgtgtcgtcgacgacgtcatccccgaaagctctacggccggcactgtatacaagagtggcatcaacatctaatttatagacctgcgtactcttgcattgggctgcatggggatcattaacatc

SEQ ID NO: 22751 - DNA, 484 bp, Oryza sativa
  unsure (1)..(484): unsure at all n locations
  Clone ID: uC-osflM202066c11b1
tcgttcgccgctagctaagctaggaattgaaatggggatggagaggccgcaagagaaggtggccaccaccaccaccgtcgccttcaacctcgccgagtccggctacgccgaccgccccgacctcgacgacgacggccgcgagaagcgcacagggacgctggtgacggcgagcgcgcacataataacggcggtgatcggctccggcgtgctgtcgctggcgtgggcgatagcgcagctggggtgggtgatcgggccggccgtgctggtggcgttctcggtcataacctggttctgctccagcctcctcgccgactgctaccgatctcccgaccccgtccatggcaagcgcaactacacctacggccaagccgtcagggccaacctaggtgtggccaagtacaggctctgctcggtggcacagtacgtcaatctcgtcggcgtcaccattggctacaccatcactacngccatcagcatgggtgcg

SEQ ID NO: 22752 - DNA, 426 bp, Oryza sativa
  Clone ID: uC-osflM202066c12b1
tcgttcggcggcggcggcaaaggcgacaagaggaggattgaatagaaagttgggccgggtgccatagacgtcacggttgtcactccctatgaatcccaggttacactcaaggggatatctacggaccgtgttctggacgtgaggaagctgctgggctcgaatgtggagacgtgccacctgacaaactactcgctctcgcacgtgacgcgagggcagcggctggaggacggcgtggaaatcgtgtcgctgaaaccatgctctctcaccatcgtggaagaggagtacgcgacggaggcggcgagcggcggcgcaagtccggcggctgctggacatcgtcgcctgcaccaccacgttcatgaacaagccccgcgacagcgccaagcacaagtcgttcaagcacgcgcgcccggtgacgtcttcgtcacc

SEQ ID NO: 22753 - DNA, 418 bp, Oryza sativa
  Clone ID: uC-osflM202066d01b1
gtcaagtgcgggagcgcgctgaaccggggggaggctgtggcagcgagcctggcggcgctaaacagcgccggcgtggaggggatcatggtggacgtgtggtggggcatcgtggagagcgagggccccggccggtacaacttctacggctacgtggagctcatggagatggcccgcaagaccggcctcaaggtccaggccgtcatgtccttccaccagtgcggcggcaacgtcggcgactccgtcaacatcccgctcccgaggtgggtggtggaggagatggagaaagacaacgacctctcctacaccgaccaatggggacgccgtaacttcgagtacatctccctcggctgcgacgccatgcccgtctttaagggccgcacgcccgtcgagtgctacaccgactttatgcgcgcctttc

SEQ ID NO: 22754 - DNA, 532 bp, Oryza sativa
  Clone ID: uC-osflM202066d02b1
ctgattagttcatgttggttcctaatcctgatcaaattacactggaaaggctttttagagttgatgatatcagggttggcgcaacttccagaaaatctattcctcttcttgttgacctactcaaacccattccagaaagacctggtgctcctttcttggcgttgggtcttctgacacaattagctattgattgccccccaaacatgatgctaatggctgaagctggaatcctagaggcacttaccaaatacttgtcacttagcccacaagatgcaacagaagaagctacaactgatttgttaggcattctttttagttgcgcagaaataaggcacaatgaagcagcacttggtactgttaaccaacttgtggcagtccttcgtctaggaggaagaaattcacgctacagtgctgcgaaggcattagagagcttatttattgcagaccatgtcaggaacagtgagtcagctcgccaggctattcaaccacttgtagaaattctgagtactggcatggagagggagcagcatgc

SEQ ID NO: 22755 - DNA, 355 bp, Oryza sativa
  Clone ID: uC-osflM202066d03b1
gttgtcttctcctccccctcccggttcggttcggttcggttcgggtccggttcgatttcggtttttccttcggttcgggggttggtgggaaagcatggcggcgccggatgttgagtaccgctgcttcgtcggcggcctcgcctgggccaccgacgaccgctccctcgaagccgccttctccacctacggcgagatcctcgagtccaagatcatcaacgatcgggagacggggaggtcgcgcggattcgggttcgtgacgttctcgagcgagcaggccatgcgcgacgccatcgaggggatgaacggcaaggagctggacggtcgcaacatcaccgtcaacgaggcccagtcgcgc

SEQ ID NO: 22756 - DNA, 517 bp, Oryza sativa
  Clone ID: uC-osflM202066d04b1
tttgtgtactggtgtccaattcttcggcatgctgctggttacgatgatttttgcagttctgggtttcctttctccatcaaatcggggaggattgatgaccgcgatgcttcttgtctgggtcttgatggggttgcttgctggttatgcttcttcacgcctctacaagatgttcaagggttcagagtggaagagaataactatgcgcacagccttcttatttccagggattgcttttgttatcttcttcatattgaatgctcttatttggggggagaagtcatctggtgccgtccctttcaccactatgttcgccttggtcctcctttggtttggtatctcagtgcctcttgtgttcgctgggagctatcttggattcaaaaaacctgccctggaacctccagttaaaaccaacaagattccaaggcagatccccgagcaagcttggtacatgaatccaatcttcactattctacatggtggcattctaccatttggtgctgttttcatgagctattct

SEQ ID NO: 22757 - DNA, 513 bp, Oryza sativa
  Clone ID: uC-osflM202066d05b1
ttcatttcagctcaccactgctagcttgggaagaggaggaggagcttgagcttggagagagacaacaatggcggctcaggctcttctctctgggaggcagctgctggggaggccattgcaatcttcagtctccaggtcttcttcctccaggaaggcacccttcatggtcagggcagaggccactccccctgccaagcaaggtgctgacaggcagctgtggttcgcatccaagcagtccctgagctacctggatggcacgcttccgggagacttcgggttcgacccgctggggctatcggacccggaggggaccggtgggttcatcgagccacggtggctggcctacggcgaggtgttcaacggccggacggcgatgatgggcgtcgtcggcatggtcgccccggagctcctcggcaagctgggcctcgtccccgccgagacggcgatcccgtggttccagaccggcgtgatccccccccgaggcacctacacctactgagccgacccttacac

SEQ ID NO: 22758 - DNA, 472 bp, Oryza sativa
  Clone ID: uC-osflM202066d06b1
ttgacttccgctgtagtgattggtggtgcaactgtcatatggatcttgtttgaagtgcttgattaccatctcttgactctgctttcccatgtgatgattggtgccttggccatcttgttcctgtggtcaaaagctaccacatttatcaagaagagttcaccagatattcctgtagtacagatacctgaagatgtcgccgtgaacgtgtcacgagcattacgcagtgacataaacagagcacttcacctgtttcgggagatcgcgttggggcatgacctaaagaagtttctgggcgtgattgctgctctctgggttctctcagaagtaggaagctgctgcgacttcctcaccttgatatatgttgccgtcctgatgctccacacggtgccgatcttgtatgacaagtaccaggataaggtcgaccactctgctggaagggctcactctgaggcctgctagcactatgaggtgc

SEQ ID NO: 22759 - DNA, 471 bp, Oryza sativa
  Clone ID: uC-osflM202066d07b1
tcttctgccaccaccttcagctcctctccctgcgaggttactactgccaaactaggaggaggcgtcaccagatcttcctcgccatacacgcagctcaccttctgctcgaggcatcacttccagaaggcggcgacgacagcggcgggcttccaccacaagcctcccccggccgagctgtcccttctgctctcgccggcgaggagcaagcatgcaagaacgtgcccggccgccgacaacgaccgcgcggtgcccgcggcacaggaagcaacaaacacgcctccgccgccggccgcgcccagcgccaacggcagcccgccccaagagccgtctaagcgggcgccactgacggcacgggagctgctgctcgcggcgcgcgtgctgggcaagtacgcggagcctgtgggctcgtctccgcagggcaaggcctcggcggcgtcagctgcggctggggcggcagggaagaagccggag

SEQ ID NO: 22760 - DNA, 199 bp, Oryza sativa
  Clone ID: uC-osflM202066d08b1
agcagttctgttctctctctctctctctctgcccatacactcggcgcatcgactcctcaggcggcaacagcggcgagcggagcaatggaactataccaaaacctattgatccaattgcgaaatgttgctgctgttgataccttaattttcaactaactgctactagatttagcttcttagatgacgcatttacggattg

SEQ ID NO: 22761 - DNA, 445 bp, Oryza sativa
  Clone ID: uC-osflM202066d10b1
ttccaacatggtggggggatgtcgattggcaagtcagattcacaaagaggtgtgtttcattttggttgatcctattccttattaaaataaactagaaaggaaaatagctgtgaaactttattacgtgtccacccattacaaagtcatttgctgtggtgaacgcacaactttggaacattgcagaaagcttatgacttgcatccagcgcaaaagggggtgcaaccagactctgtacaccaacctcggaactatgctttccatttgataagctgtctcatgaccaatttcattgctgattacagtgggctatggggaaactattgaagcggacaagtcatcttctgatatacgcgaagttagtaaaatgatcctgggaaagcaaccacctaaaggatcagccatacgcgaagtgagagatatgttcttcccatacttgaaatcggtg

SEQ ID NO: 22762 - DNA, 535 bp, Oryza sativa
  unsure (1)..(535): unsure at all n locations
  Clone ID: uC-osflM202066d11b1
ttacagccaccaactcctctcaacttcttgatccggcggcggcggcaagatgttcggcggcggcggcggcggcgggaggaagccgctggactacgaggagctgaacgagaacgtgaagaaggtgcagtacgcggtgcggggggagctgtacctgcgcgcctccgagctccagaaggagggcaagaagatcatcttcaccaacgtcggctacccacacgcgctcggccagaagccgctcaccttcccccgccaggttgtggcgctgtgccaggcccccttcctgctcgatgatcccaacgttggtcttatcttccccgccgacgccatcgcgcgggccaagcactacctcgccatggcacccggtggactaggtgcttacagtgattcccgaggtatccctggtattaggaaggaagtcgccgagttcatcgagaggcgtgatggttatccaagtgatccagtacttatttaccttacagatggtgccagcacaggtgtgatgcanatgctgaataccattatcagaaatgagaga

SEQ ID NO: 22763 - DNA, 494 bp, Oryza sativa
  unsure (1)..(494): unsure at all n locations
  Clone ID: uC-osflM202066d12b1
tcgctctccgcgacggtctcatgttccccagccggggccttcttgcgcgctcggcgagagaagcgacgaagaagaagaagaggaggaggaagaagccaggctaagcccagcggcatgggggaccagctcaccgacgaccagatcgccgagttcaaggaggccttcagcctcttcgacaaggacggcgatggttgcatcacaaccaaggagctgggaaccgtgatgcgttcgctggggcagaacccaacagaggccgagctccatgacatgatcaacgaggtcgacgcggacggcaacggcaccatcgacttcccggagttgctcaacctgatggcacgcaagatgaaggacaccgactcggaggaggagctcaaggaggcgttcagggtgttcgacaaagaccagaacggnttcatctccgccgtcgagctccgccacgttatgaccaaccttggcgagaagctgaccgacgaggaggtcgacgagatgatccc

SEQ ID NO: 22764 - DNA, 434 bp, Oryza sativa
  Clone ID: uC-osflM202066e02b1
tgttaatccattaagtgagcgcaaggatgttccacatgaagtagctccaaatgctaatgctcaggtacctgcagcagcattggtaaatcatgctcccaatgtggaccaaatccaagagtctggcttacaaggccagcaatttggcaatgacgacccctggaaagtagtgacaaatacacatgctttgccaccgagacctaagagggtagcaagcagggaaaacatcagcccgaaggatccacattctcacaactctttattaaattgcaaagggccagatctgaatattccggctgaagatgttgctctccaccaacaatcagatcacaaggacgcccatacagagcatggtcgattcatcaaaggtgatgatatgaccagcccagatttggtaagtgtcgaggacagtttacctacatctaatacaaagtcat

SEQ ID NO: 22765 - DNA, 480 bp, Oryza sativa
  Clone ID: uC-osflM202066e03b1
tgtgctctctctctctctctctctctctccccctccctgccgctgctgccgccaccgtcgcggcggcgccccgattcggtgatcccccgctcgcccatctccgccgtgacgtatcggcgacgcggagggagccccccaccccccacctccggatctagggtttcgaggcccaggtggcgttgcgctgcgcccccgctcctccgtctctcctccgccgccgagggttcgcgtgaggtttctgcgtattaccagctctgtacttaatttactagtgagaagcaaaatgaagtgcaatgcttgctggcgggagttggaagggcaagctgtatcaacaacctgcggtcatcttttatgtacagaggatgctaagaaaatactgagcaatgatgctgcatgcccgatttgtgatcaagtgctctaaaaagccatatgagacctggtgatacaaattcaaatgatgattggacacatatgtcaatg

SEQ ID NO: 22766 - DNA, 500 bp, Oryza sativa
  Clone ID: uC-osflM202066e04b1
ttattctcccactcccagggttttagctagggttctgtgtcccccgcatcgccgccgccgccgccgcgagccatggccgacgccgccgcccccggagaggacgacgccgcgtgggagcgcgccatcgcggcggccgtcaagaacgcccccttctccgcccccaagaccctaaccctcgacggcgccgtcaagtccaccaccggccgcctcccctcgccgtcgctcctcggccgctacccgtccctcgaggagctctccgtcgccggcgcccgcctctcctcgctcgcgggcctcccgcgcctcccggcgctccgccgcctctccctccccgacaaccgcctctcgggggccgcctccctcgccgccgtcgccgagtcctgcggagccacgctccgtcaccttgacctcgggtacaaccgcttcgccgacgtcgccgagctggcgccgctcgcgccgcacggagtcgagtcgctcgacctgtaccagtgccccgtcaccca

SEQ ID NO: 22767 - DNA, 449 bp, Oryza sativa
  Clone ID: uC-osflM202066e05b1
ttcgttgctacgcggcgccatactggaggcggcgcacgtgtcgtgcctcgaggatcgctacgcgctggggccccagctcgggtggggccagttcggcgtgatccggtcgtgctccgacatggtcaccggcgaggcgctcgcctgcaagtccatcgccaaggaccgcctcgtgtcccccgacgacgtgaggggggtcaagctcgagatcgaggtcatggcgcgcctctcgggccaccccaacgtcgttgacctcaaggccgtgtacgaggacgaggcgtccgtgcacctggtcatggagctctgcgccggcggggagctcttccaccgcctcgaggagcgcggctgcttctccgagcacgaggccgccgagctcttccgctacctcatggaggtcgtggcgcattgccatagcaaggggatcgtgcaccgggacctcaagcccgagaaca

SEQ ID NO: 22768 - DNA, 484 bp, Oryza sativa
  Clone ID: uC-osflM202066e06b1
ttacttcgcagcagcaaaaccgcgagacacatgacgacggcgacgacgacgacgaccttgccggcggcggcggcgctgctgctgctgctgctgtcggcggcggcgcagctgtgctcggcgtgcccgccggcggcgagccagacggcggagaacaacccgcggctgcagcgggcgtacgtggcgctgcaggcgctgcggcggcgcgtcaccgacgaccccaagaacctcaccggcgggtggtgcggccccgacgtgtgccgctacttcggcgtctactgcgccgccgcgccggacgacccgtgcgccgtcaccgtcgccggcatcgacctcaaccacggtgacctcgccgccaccctccccgacgagctcggtctcctcaccgacctggccgtgctccacctcaactacaaccgtttctccggcgcgctccccgacaccctccccaagctctccctcctccacgagctcgacgtcagcaacaacc

SEQ ID NO: 22769 - DNA, 454 bp, Oryza sativa
  Clone ID: uC-osflM202066e07b1
ttgttccattgcatgcactcatcatttcttgggcttcttcctcgccgccccgccccgcccgcacgccatattcttcttgcaaatcaattagcaacagagctgcagccaaattgtgcagattaattagctgtggagcgagctgttgctgacattgattttgttttgttggatttgctgtgcaggcggccactcgacatcgactacatacacagcagcagcagcagcaagagggcgccgcccaaggacaaacccgccacttccgactgccctgcgccgccgcccccagcgtattacttcaagaataagcccgacgacaatgccgccgtcgcatccgccgcctccgctggcgccgtcaactacaagctcttcagcgagctggaggccatctacaagcccggcagcggaggcccccagacgggctccggctccggcctcaccggtgacgacaatgcca

SEQ ID NO: 22770 - DNA, 477 bp, Oryza sativa
  Clone ID: uC-osflM202066e08b1
ttgttcatctccatcgacaaagctagctaagcccagtcatggccgcctctcccgcaatgccgtcactcctcctcctcctcctcctagccgttctcgtctcggcggccgatgcctacgactccgccgccagcgccaacaccaacgccggcgccatccccgaccccaacatcttgaacatggaggccatgtgccccaagacgacggacgtgaaggcgtgccagcaactggtgaagaacatgccgtccaacatcgtcgcggggaagaaggacgccaggagcatcgcccgggggtgcatcgccaccgcctggttcgtggcgagggacggcgccaaggactgcaccgccgccgtggacgagtgcaaggacaaggtcgaccagtgcctcgacagctgccgtcacgccttcgccgtcgtgaacgacgccctggagccccagggcaccggcgacgacgccgtcaaggtccccgaggacgagaagc

SEQ ID NO: 22771 - DNA, 509 bp, Oryza sativa
  Clone ID: uC-osflM202066e09b1
tcgtttcactcccccatctctgtaccaaactggaggttagaattcagagatccaataaccaaaagcaagaacaccatgagagccccatccttcttcttcctctccctcctcctcctcctcctcctcatccacatctccatccattgcaatgctgcagattcccagctaggttcagagaaggtcaccaacctcctcttctacctgcacgacaccctcagtgggaaggatccaactgctgtcccagttgctcgtgctgagaacgctgtacccaagcctgataatccggtacccttcagcacgatctatgtggtcgatgatctgctgacagaggggcctcagagagaatccaaggtggttgggaatgcgcaggggatgtacatttcgacagccaagaaagggctcacgcttgttcttgggatcgatttcgagctcactgatggcccctacataggcagctcgttcgtcgtgtactcgcggaacccggtcatgcaggggaatggcagggagct

SEQ ID NO: 22772 - DNA, 262 bp, Oryza sativa
  unsure (1)..(262): unsure at all n locations
  Clone ID: uC-osflM202066e10b1
ncttcggctcgcgtctgtccactggtcaacaactcgtgattcgcacggccgcgcgcgcgcgcgcgcgccgcgcgttccgcattcgtacatggccgtcgcgaggctggtggtcatcacccccgccgtcctcctcggccgcaccgcccgcgtctcgccgtcggcggtgccgcggctgcggcccatcgtcgccggccgccgcgccgtggcggcgcccacacgcgccgtcctgggagacggggcgggtgtcggcggcgaggaggat

SEQ ID NO: 22773 - DNA, 434 bp, Oryza sativa
  Clone ID: uC-osflM202066e12b1
tcgttccgattcttccggcgaggccgacccgacacgaccatgctcgcctccgggcggtctctccgccgcctctcctcctcctgctagtcctagaccttgtcccccgcctcgctacgccgactcctcctcctcctccaccgaccgccgactacgcccccgccccctcggactgctctaccgcccttccaaaccctagcccgaggcctcctgccgcgcatcgcggcgcggcctgtgccccgccaattctccaccgcgtgctgctcctgcacgctttgacgcgtgggggaatgcggcgcccccggcgccaccgccatacccgaggcggagcgaggcgaggaggaagagcgtgagggggaggatggaggcgaggccgacgcggcagtggaggtggcggccgcgaggcatgacacggacgcgtacgcagcgggggagct

SEQ ID NO: 22774 - DNA, 273 bp, Oryza sativa
  Clone ID: uC-osflM202066f01b1
tttgctttaaacctcactctcggcaagaacaggggggggtttataagataatgcgggggaccacccaccccacgggacctaaaacgccatattgaaccacacaaaaaactcacccgaacaaccttagacacgacgccgagcactgcaggacaatcacacctgacagcgaaagcctccatgtggactactggaccaagctagcatctggctagaccacagagaacacgattcaattgcacgagccagcctccctcattgagaagacctagaaaa

SEQ ID NO: 22775 - DNA, 260 bp, Oryza sativa
  Clone ID: uC-osflM202066f03b1
ttttgtgccgttcacaccaccaccgtctcgtcggctggtcggcggcgtcttctccgcgcgagggtccccccccaaaccctagccgccgccattgccacgcgcgcgccccccaccccacgaatggaaggaggcggaggcggaggcggaggcggtggcggaggtggaggtggaggaggcggaagcagagcaccttacgccacgcgcacggaggaggacgccttgcaagacctccgaagccggcgagcggacatgatcaaggc

SEQ ID NO: 22776 - DNA, 353 bp, Oryza sativa
  Clone ID: uC-osflM202066f04b1
ttctatcttgataccgagagatcctcatggtgccaatgatttatggttccacaagccatgttgagaggacctgaattctgcatcaattcaataacagctcacatgtgactacaaccttacttgcaaaggtggcagataacatgactgatattcgagaagccaatgtgatcatacaaatattatatcatgctggctcacgggagccacgaagctcaacggctgggacgtattgttacgcctagagggacgacatgaagacaggatggctggcggaaaagaagaatgccatgtgctcttctactatattgtgtggactgacactcaggagatgttctactcttctaaaaggcaac

SEQ ID NO: 22777 - DNA, 519 bp, Oryza sativa
  Clone ID: uC-osflM202066f05b1
tttgttggtgctcctcctgtccaaatgggagaaagatatcctcacatgttcttgatcctcctactttttcatggagcccatgcggctttgaaagatccagtacagaaatggcagactcttggaggtcagcgtcctcttgtcattgctcgtggagggttctccggcttgtttcctgattcaagccagttctcgtaccagtttgcaatgtcgagtagcttgcatgatgtggctctgtactgtgatctgcaattgtccagtgatggtttgggcttctgcaaaactggattgacattagagaactcgacgcttatcgccgaagccttccctaagagggccaagacatacaaggtgaatggagaggaaatccatgggtggtttgctttggatttcaccgcagacgagctgtatcagaatgtcacattgatccaggacatcttttctcgcccaagcacatttgatggagccatgggaatgtttacccttgaagatcttgtcggactcaagcccccacatttatgg

SEQ ID NO: 22778 - DNA, 441 bp, Oryza sativa
  Clone ID: uC-osflM202066f06b1
tttgttgagaggagaggagatcagggggaggaagggtggccggtgcagcagatcggggcgggcggatttaggggaggagcgcgctagccgcgagcggcagctatggatgaggagcacgacgtgatcgtgctggggacggggctcaaggagtgcatcatcagcgggctgctctccgtcaatggcctgaaggtccttaacatggacaggaacaattactatggaggagaatctacatccctcaatctcactaagctctggaagagattgacaggcaacgagaccgctcctgaacatgtgggtgtcagcaaggaggacaacgttgacatgggtcccaagttcatgatggccaacggtgcactgatgccgagtctcatccacacgagcgtgacaatgctatgtgattgcaaggactgctactgcagcctcatgtacaacaatggc

SEQ ID NO: 22779 - DNA, 532 bp, Oryza sativa
  Clone ID: uC-osflM202066f08b1
tcggtcggatctaacaaacacacctactacacctgctcctcctacacccgatcggatgggcccagatcctcctgctacgccgacggcaccgacggcgtagataggagatgatggccgcacttgataccttgctctttacctcggagtctgtgaacgagggccaccctgacaagctctgcgaccaagtctcatatgctgtgcttgatgcctgcctgagcgaggaccctgacagcaaggtcagttgtgagacctgcaccaagacaaacatggtcatggactttggtgagatcaccaccaaggctaacgtcgactatgaagagatcgtcagggagacatgccgtaacatcagatctgtgtcagctgacgtccgcaccgatgctgaccactgcaaggtgcttgtgaacatcgagcagcagtcccctgacattgcacaaggtgtgcacggccacttcaccaagcgccctgaggagattggtgctggtgaccagggacacatgtttggatatgcaactgatgagacccctgagttgat

SEQ ID NO: 22780 - DNA, 481 bp, Oryza sativa
  Clone ID: uC-osflM202066f09b1
tcgttcctctccaacatgaagatgccattgctgctgcttatctccatcgtcgccgtgtccctctcccgtggcaacggggagcagaccgacctcacgcgggagacgttccccggggtcttggtgttcggcaccgcgtcgtcggcgtaccaggtggaggggaacgccctccagtatggccgagggccctgcatctgggacaccttcctgatgcaacctggtgtaactcctgataatgcgaccgcgaatgtgaccgtggacgagtaccaccgctacatggatgatgcggacaacatggtgagagtgggctttgacgcgtatcgcttcttgatctcctggtatcgcattctcccgagaggacttgggaagattaacaaagacggcggggaccatcaccacaggctcattgatgacatgcttgcttacaacattattccataaggtgtgctctaccactacgaccgtacacaggtggctcatgatc

SEQ ID NO: 22781 - DNA, 472 bp, Oryza sativa
  Clone ID: uC-osflM202066f10b1
ttgagcttcagcccggtgctgaggcggcggcacccggcgccggtggccgtcgcggcggtcaccctgcacggctgctacggcgtcgtgctgaggcagtacctcggcaaggtgaccatcctcacggaggagctcgtgcgcgtgctccagtcggcgagcaggatggagaaggccatggcgcacatgacggcggaggacgccgccgactgccgcgacgaccgggccaaggccatcgtcggcgacatggagccctacgaggtggattccgtcgttatgggcttgctcaaggtgtggatggacgacaggttcaagatcaccatggactgcctcgccagagccaaagaaaccgagagctggataccaaaatccaaagatgaaccttttgccgggtcagcgatggagatgatgaagctggctaagtataccgtcgaagagttctccgagatcccggcgagcgcgaaagacgaggtggtgc

SEQ ID NO: 22782 - DNA, 487 bp, Oryza sativa
  Clone ID: uC-osflM202066f11b1
ttgttgagagtctggatagttttactctcatttatacaaatattctggaacatcaaccagattgcccgcctgaggttgttgagaagcttgtgggaatgagggaaggcattccaaggaaggaagccaaagaggttgcacaagagtgcaaggaaatatacgagaactctcttgtagacgggaaccctcaaaagtctggttttgtgtttggcaaattgaagtgcctaacagcacggaaaggcatatggagcaagcttggacagtaaatgatgctgcgactttcgagtagagtgaattcacgccctaagagaattgtttcatgttcatgtgataattcttttgttcatttgttaagcttatggtattgtcaccatgcccttgtgtgattttttgcacgggaagagcttatggtgtatattctcgttggtagtaacagatgatctaagtgcatagatctaatccttttgaaattctatttttatctattccc

SEQ ID NO: 22783 - DNA, 323 bp, Oryza sativa
  Clone ID: uC-osflM202066g01b1
attagtgtatatggcaccagagtcttgtcatggaggagatatctcaactacgtgagacatatatagtctgggtattctaatcctagaaattgtgacaggagaaaaaaaccaccaaagcagtgccgatctttctggtcagcggattattcatagcgtacgtaacaaatggtcaaggatgtcgaaaataacatcaaggtatccattgctggatacacataggcttcaacaagttcattcatgttctaaaattgagctgaattgtgtggggatagatcctaaaagaccgacctccgcatgaaaaactgtcaatatgctatcatggg

SEQ ID NO: 22784 - DNA, 464 bp, Oryza sativa
  Clone ID: uC-osflM202066g03b1
ttgattatataagaagcagctgcagaagatgctttatgactgcaatgagcaattgcagcagttcagtcatgtcaacaaaaaagctcttgaccagtatgttaacttcaccgaacaacgtgaacaactacagagaagacgggctgaacttgatgctggtgatcagaaaatcagagaactaatatcagttttagaccaaaggaaggacgaatcaatcgaacgtacatttaaaggtgttgcaaggcacttccgtgaagtgttctctgaactagtgcaaggtggccatggacatttggttatgatgaggaaaaaggatggtgatgcagatgatgatgataatgatgaggatgggcctcgtgaaccagatcctgaagggagaattgagaagtacattggtgtaaaagtcaaggtttcctttactggcaagggagaaacacagtctatgaaacagttgtctggtggacaga

SEQ ID NO: 22785 - DNA, 553 bp, Oryza sativa
  Clone ID: uC-osflM202066g05b1
ttgcgatcatggaaagcctcttctgtttgtgttatatggaaaaaatacagacagcggaaattattcaaagcctgctagttttgaggggatggagaagttcgattccgatctaagtacacttcaccctattttaactgaatgccgtgttatcaaatctgacatggagcttgcccttattcagtatgctaatgatgtgagctctgaagctcacattgaggtcatgagacgagcaaaaccaggcatgaaggaataccagttagaaagcatctttcttcatcatgtttatatgtatgggggctgtcgacattgctcttatacatgtatatgcgctactggagaaaatagttctgttcttcattatggacatgctgcagcaccaaatgacaggaccctgaatgatggagacatggcactaatggacatgggaggtgaataccattgctatggatccgatataacatgctcataccctataaatgggaaattcaacagcaatcagacaatagtatacaatgctgtccttcaggctcataatgctgtcatagcacacatg

SEQ ID NO: 22786 - DNA, 537 bp, Oryza sativa
  Clone ID: uC-osflM202066g06b1
atatgttctctctctctctctctctctctctctctgggcaccacggacactcgtacagctgccgcctgccggagggttggtggtgtgtttcaggttccagaaaaatcctccagcgttttgtggtcgcttgaggagctgagctgtgtgagccttgcaaggtttgcatcaacaagcttgggggtttttcctatcttgttgctctgagggaattcaagaaatgctccatatggtctgaattcgtaggtctttttgtgttggaatctctcagagggtttaagaggaaaaaggaaagaggagaaattgtaaggacaagtagagaagaacatggctgacctggaagcaggcatggttgctgctgccacagaccagggcaattcaacatggtcacatgatgacgcagccacactgatcccgaacagtggcaatctgggctcgagcaacaggagcaccaagacggccaggttcaaggacgaccacgagcttgtcgagatcacccttgacgtgcagcgcgattcggtggcactccaagaagtgaga

SEQ ID NO: 22787 - DNA, 504 bp, Oryza sativa
  Clone ID: uC-osflM202066g07b1
ttcgctgccatccgtgccccgcccccccgcgtgaaccaaaccctaactcgcccaaatccgcctctcgatctcgcctccgccgtccgccgtcgtcgccggcgtcgtcggccgccaaaaccctaccgcctctcgtcgcctccgtccgccgcagacgcgcccggtatacaacagggtgatcgtcggttgaaaatgccatctgcatccaaatccaagtccaaagacaggtcagctgccaaggcaccaaaagagcaacctaaggttgcagcatagcctatggggaatggcacagttgcaagtgcctataacaacttctctggaaaattccatctgttggagccatcatcttctatgctggttagccagggcaatgacaaattaaggaatacagacgagatagatgaacattctcgtagcttccatggtacaggagactctgattgtgcctctaacaatggtagctgttctggtgagtcagaagatccacaggtaaaatcaacgagtact

SEQ ID NO: 22788 - DNA, 336 bp, Oryza sativa
  Clone ID: uC-osflM202066g08b1
tcggacgcgcgcgccgccgtctccgcctccgcctgcgtctctatcccatcgcgcgctatggactccggcggcggcggcggcggcggggcgctgaggccgtcagcgctggacctggtggcggcgctgctcacggggcggggacgaccggaggaggaggggtggccgccctcactcgccgagaaccgacagctcatgagcctgctcaccacctccctagccatgctaggaaggtggagagacccgctgctcgtccgacgatgctacatctccgggcccggcgtgagggcgcatgagctctagaggaagacccccgaccccgcgaagaggcagcaagag

SEQ ID NO: 22789 - DNA, 404 bp, Oryza sativa
  Clone ID: uC-osflM202066g09b1
tcgtttaactccttgggacagcttgacactgcatggcagagggtgggtataggtggggacagaaagaaatgggctaggaggccaattgcatcgtggggatggagtccgactgtgcccaaggagaacggtcacaccaccgttggcgccggggcggaggccaaggccgtcgacgactgggctgagatcgccgtcaccgacgccgctggggatgccaaagccgacgccgccgcctgcggccgtagacgtcgaccccctgcttcagggcatctccgacgccatgcgagtggaccaccacttcctcaaggaaggcatcatgttcaacgacattacgccactagtgctgggcccggcagatgttaaggacaccgtcgacatgttcgtcgagcgctaccgcagaatggtca

SEQ ID NO: 22790 - DNA, 537 bp, Oryza sativa
  unsure (1)..(537): unsure at all n locations
  Clone ID: uC-osflM202066g11b1
tttgtgcactctcgcccttcacctctcctccctctgacccttccattacatggatcagggagggaggaaggaggcctgaagtggcgcagagtaggcgcttgtaaacaaatccccccatttgcttcttttgcactgaagaatccctgaagaatccagcaggatggagaagaaggcgtccatcctcatgaaccggtatgagctcggccgcatgctcgggcaaggcaccttcgccaaggtgtaccatgcacggaaccttgcatccaaccagagcgtcgccatcaaggtcattgacaaggaaaaggtattgcgtgtcggcatgattgaccagatcaagcgagagatctccatcatgcgcctcgttcgccaccccaacatcgtccagctgcacgaggtcatggccagcaagagcaagatatattttgcaatggagtatgtccggngtggtgagctcttcagcagggtagccagngggcgactcacggaggatgctgcgaggaagtacttcagccagtgataggagctgtggacttctgtcac

SEQ ID NO: 22791 - DNA, 290 bp, Oryza sativa
  Clone ID: uC-osflM202066h01b1
ttctatgtttctcccccaccattcccacatctgggcggcgtcttggtactctctgtggtggcacatctccctctcgcttgcacgcctcctccggtttggcggcttcttctgtagggttggtctcgactcgactcgtcgaagggaagctgctcccatgaccgcggccgacgctgaggcgtgcgcggtggccgcggcggcggacatcatctgctcgctccgcggggccgacctcgccgggtggacgccgccgtgggggacggctgccgcgaaggggaaagaggtggtggtgg

SEQ ID NO: 22792 - DNA, 360 bp, Oryza sativa
  Clone ID: uC-osflM202066h02b1
gctgatggagcggcacacgatacgcgccgcgcggatgggctcccttccctcctgtgcgggctccgccttcgccgccgccgccgacgccgtcgattactcgcttccgcctccgcctcaaccccgttcgtgcccaaccaaccaaccggagagttccttcatacacacaccactcgcagtctcagcagcagcagcagcagcgcagtccgtagcaaagctgctgttatcttcctacatgcggatgcagcccagctagctaagctaggttagctgctgctgctggtcttggaggccaactagtgtaatatgtgccgtaccgactgcctttttttattaaccaaacccctgtcaccacttaacccg

SEQ ID NO: 22793 - DNA, 456 bp, Oryza sativa
  Clone ID: uC-osflM202066h03b1
ctctctttgatcgccgccgccgccgccgccagggaaggtcttctctcgccatggcccggatcaaggtgcacgagctccgggggaagaacacggcggagctgctggcccagctcaaggacctcaaggcggagctctccctcctccgagtcgccaaggtcaccggcggcgcccccaacaagctctccaagatcaaggtggtgcgcacctcgatcgcgcgcgtgctgacggtgatctcgcagaagcacaaagcggcgctgagggaggcgtacaagaagaagagcctgctaccgctcgacctccgacccaagaagacccgcgccatccggaggcgccttaccaagcaccaggtatagaaacaactcgtgactcttctctttctttgtaccattcgaatgcatctaccttatactaattggatgtgaattacctcacttatcggttagggctagatgtgct

SEQ ID NO: 22794 - DNA, 541 bp, Oryza sativa
  Clone ID: uC-osflM202066h05b1
tcgtctcttccacccccaacatctccctgaattggggtgctttcgtggcacagatggagtgcgcaagccataaagatcgagccttagcttcgagctggaatttatcggcggatcggctggcattttttcagtttgtgcgcgcgcctcaagctcaagaaccgggagagagatgagctgcttcccgtgctcggggtcgtcggggaagggcggggttgacgccaagagcgtggcggcgctctcgccgggtccgcggcccgcggcgagcgcggcaccagatcgatcaaactcatcacgtggttcaggcattaagaaggacgattctgtccgaagaggaggaagctctgcgaatgatggtccagccaaaattttcactttccgagaattggctgttgccaccaagaatttcagataagactgcctgctgggtgaagggggctttggtcgtgtctttaaggacagatggagaatggacaggtttttgccgtgaagcaacttgacagaaatggcctacaaggataccgagaatttctcgtggagggtc

SEQ ID NO: 22795 - DNA, 538 bp, Oryza sativa
  Clone ID: uC-osflM202066h06b1
ttgcttccctctccctcctccaccgcctccgggtgcgccttctctcgtgccgcggatctccatcgccggcgtgcggtgcaccgagatccacccgagatgtggcgcggctgcgtctcgcgtggcctcaggagcctctccaagggcaagggctcctcctcctccgcccccgtctccgccgccgctaggctcttctccaccgcctcgtcgtcgtacacggtggtggatcactcgtatgacgcggtcgtggtgggagccggcggcgcggggctccgtgcggcgatcgggctctccgagcacgggttcaacacggcttgcatcaccaagctcttccccacgcggtcgcacaccgtcgcggcgcagggtggcataaatgctgctcttggaaacatgacggaagatgactggagatggcatatgtatgacactgtcaagggtagtgattggcttggtgaccaggattctattcagtatatgtgcagagaagcaccaaaagcagttatagaacttgaaaactatggggtgccatcttcaagaactg

SEQ ID NO: 22796 - DNA, 278 bp, Oryza sativa
  Clone ID: uC-osflM202066h07b1
tcgttcatcccaaccgccgtcgcatctcccgggggggaactttggcactatcgggggtgtaccaaaccaccagcttgctcggcaccgacccttgcctggatgagctcgtccgctcggtttgtaactccagtggccagattaccatggcgccgaccgatcaagagcgcgccccagagcatctggtatggacctgaccgatccaagtacctgaggccggtttcagagcatacaccatcggacctggacggagaggttccgggagactacgggggggacac

SEQ ID NO: 22797 - DNA, 488 bp, Oryza sativa
  Clone ID: uC-osflM202066h09b1
tcggtatgacccaagtgactgttgagtaccggggggggttctttgccagggtccgtgtgcgtgtccacaccgtcctcatctctacccagcatgatgagacagtcaccaacgatgagattgctgctgacctgaaggagcatgtcatcaagcctgtcattcccgagcagtaccttgatgagaagacaatcttccatcttaacccatctggtcgcttcgtcattggcggacctcatggtgatgctggtctcactggccggaagatcatcattgacacttatggtggctggggagctcacggtggtggtgccttttctggcaaggacccaaccaaagttgaccgcagtggagcatacgtcgcaaggcaagctgccaagagcattgttgctagtggccttgctcgccgctgcattgtcccagtattatacgccatcggtgtcccagagccactgtccgtattcgtcgacacatacggcacttgcaggatccct

SEQ ID NO: 22798 - DNA, 468 bp, Oryza sativa
  Clone ID: uC-osflM202066h11b1
tctttgaagctcagctcctcctcctctcgcgggggggccttggccaccaccgggtccagcctcctcaagacctccttcgccggcgtgcgcctccccgccgccgaccgcaaccccaccgtctccgtcgcgccgcgcaccggcggcgccatctgcaactccatctcgtcgtcgtcgtccactcccccctacgacctcaacgccatcaggttcagccccatcaaggagtccatcgtgtcccgcgagatgacccggcggtacatgaccgacatgatcacctacgccgacaccgacgtcgtcgtcgtcggcgccggctccgcggggctctcctgcgcgtacgagctcttcaaggacccctccgtcagcgtcggcgtcatcgagcagtcggtgtcccccggcggcggcgccgtggctcggcgggcagcttgtcttcgccatgggggtgcgcatgccggctcaccttgtcctcga

SEQ ID NO: 22799 - DNA, 481 bp, Oryza sativa
  Clone ID: uC-osflM202066h12b1
tgtttcttaacaagcaaggcaccaaatccccccagggtggatcaccgtctcctcggggtgggtctcctcctcctctccccggcggtggccgccgcctcagtccccggcgaggaggagccgctgatccggcaggtggtcggcggcggcgacgacaacgagctggagctgaacgcggagcgccacttcgccagcttcgtccagaggttcgggaagtcctaccgtgacgccgactagcacgcgtaccggctctccgtgttcaaggacaacctccgtcgcgcgcgccgccaccagctgctcgacccctccgcggagcacggcgtcaccaagttctgcgacctcaccccggccgagttccgccgggcctacctcggcctccgcacgtcgcgccgcgccttcctgcggtggctcggcgggtccccccacgaggcgcccgtcctccccaccgacggtctgcccgaccactttgactggagagaccacg

SEQ ID NO: 22800 - DNA, 388 bp, Oryza sativa
  unsure (1)..(388): unsure at all n locations
  Clone ID: uC-osflM202067a01b1
gccgtcgttgccgagcaggcagcggcgaagcgtcgggccggcgatggacgcgctgggctcgctccccctcgacgtcctcgacaacatcctctcccgcctccacatccacgacgtggtccgcacctccgcgctgtcccgagcgtggcgccgccgctgggagtcgctccccaccgtcggcctcctcaacagccccggcatcggcgcctccgacgtggacgccctgctcctccgccgcaccgcgcccgtccgctccttccgcctcgccacgcgcgaccgctcctggtcccccaccggcttccacgactggctcctccacctccacctacgnggcggcctccgggacctggagctgaccctccggtacgagttcatgtaccagaagctcaac

SEQ ID NO: 22801 - DNA, 370 bp, Oryza sativa
  Clone ID: uC-osflM202067a02b1
gcgtatgcttcagcgacgagaggagaaacgagagagagaaaaagaagaaagagaaaaatgctgcgccacgccgcccgccgcctggccaccacccgcgccgtcgccgccgacggtcgcagcagcagggcgctctcgacggcggaggtgccggccgaggcggccaccgactccgccttcgcggaggcgtggaagaaggtggcccccaacatcgaggcccccgccacgcccatgtcggtcatgcagccccgcccccccacgccggcggccatcccctccaagctcaccgtcaacttcgtgctcccctacaagtccgagatcgccaacaaggaggttgacatggtaattgtaccagcaacaactggtcagatgg

SEQ ID NO: 22802 - DNA, 412 bp, Oryza sativa
  Clone ID: uC-osflM202067a03b1
ggcgtgctttagacgcacactagaaaacaagagaaggacagctgcttctagcacgagggtagactacctggaggcgtacaagatgagactctagttgcgtgtcgagatggccagctaggtgggcctctacctcaaggagttcatctggggctgcgtctccaagcgcaagaacgaggcggacttcaagggcgagtaccaccacttgtgctccccgtaccgcgccaagaacgccatcgtcaacatcaacggtgtcgccggaaacctggatggcccgggcctcatcggctccggcaagctcgccttcggcgccaccaaggccgaccgctacaacagtgttaaccttcccgtcgacaacaacaacaacaacaagttctacggcggggccggcaagaacaacaacaacaacggtaac

SEQ ID NO: 22803 - DNA, 377 bp, Oryza sativa
  Clone ID: uC-osflM202067a05b1
gtcttaattatgtttcttttgtggctctagatgaaggtgatcgaatgctggatatgggttttgaacctgaagtcagatcaatcttaagccaaactgcatctgtacgtcagacggttatgttcagtgctacatggcctcctgctgtccaccagctagcccaagagtttatggatccaaatccaataaagggtgttattggatcagaagatcttgctgctaaccatgatgtgatgcacattgttgaagtattggaagacaggtcaagggattcaagattagttgctttgctcgataaataccataaagcacagagaaacagggtgttggttcttgtgttgtacaagagagaaggtactctagtagaaacaatgttacaa

SEQ ID NO: 22804 - DNA, 401 bp, Oryza sativa
  Clone ID: uC-osflM202067a06b1
gtctactctcacaccaaaaccagtaaaaaaatatggtcaccttcgccggcgagatggcccaccgccgcatcatcctcctcctcgccgccgccgccgtcgccgcgacctccgccgtcgccgccgcgtcctccggcttcgacgactccaacccgatccgctccgtcacggaccacgccgcctccgcgctcgagtcaaccgtcatcgccgccctcggccgcacccgcgacgccctccgcttcgcccgcttcgccgtcaggcatgggaagaggtacggcgacgcggcggaggtgcagcggcggttccggatcttctccgagagcctcgagctcgtccgctccaccaaccggaggggcctcccctaccgcctcggcatcaaccgtttcgcggacatgagctgggag

SEQ ID NO: 22805 - DNA, 356 bp, Oryza sativa
  Clone ID: uC-osflM202067a08b1
tatgtatatatgaaacactaatatgtatggtgtacttttattctcaagttaactgaacattgtcgggttccaattgcaaaactaataaatttagtatgctaacgcaggatgtaggtctagaatatacaagggacagctcagttactggacaattgttgttttcttcccggtataaatcactgtaagaaaaaacgaagacaaatttctgaggtcttcacgcaacacctcaaggttgttatgagccaatatgagcttctgaaggtcaactccctggattacaaaaggtagctagattgccaaatagccggagagggcaataccataatttttgggggaaagctaccttttgaattaat

SEQ ID NO: 22806 - DNA, 208 bp, Oryza sativa
  Clone ID: uC-osflM202067a09b1
tcatttatctcgaagcgagagtgcgttgcgttgcgagcgggaagcgaaaactcgaaaccatggccacggccggcgacgagcagcagcagcaggcggcggcggcgcagacggcggaggtgacggaggcggcggcgaaggaggtggtgtccgcggagatgccggcgccggaggggtggacgaagaagtttactccccagagaggggggag

SEQ ID NO: 22807 - DNA, 222 bp, Oryza sativa
  Clone ID: uC-osflM202067a10b1
tggctttctctctctgtttgaagccacggagagggaagcttgggtgatctctcggaagcgaagagtgaggggagacgaagaagacgaagaagaagaagaggggggaggaggaggagcagcatcccttagctcaaggaggagcaccctgcgattgataagcctctcctagatgcctgcctgcgactcctcgtcttcttcctcggactctgacgactacaagaa

SEQ ID NO: 22808 - DNA, 140 bp, Oryza sativa
  Clone ID: uC-osflM202067a11b1
tgcttccctccggctcgagccaatctctcgctgtgtctctctcgcgctctccactagcaccggctcggctcggctcgcgcggcggcggcggcggggcggcgtggcgccgagggaggggaacgccggcgtggggagggcgg

SEQ ID NO: 22809 - DNA, 291 bp, Oryza sativa
  Clone ID: uC-osflM202067b02b1
ctgtccattaccacacgctgctttctttctcttgttcttactcatcgcgacacctcctctagttcgcaactcgcatctgctttcttttgagttggtgttcgtagtaagaggaggaagctgaagatgagcgatcccaagtacgcgtacccttacccggcgcagggctactaccagggcccgtaccaggggcctccggtgatggcgccgacgcagtacgccgcgccggcgcccaggcgggagcctagtttcctcgaaggctgattggctgcgctttgttgctgctgcttgatc

SEQ ID NO: 22810 - DNA, 285 bp, Oryza sativa
  Clone ID: uC-osflM202067b07b1
ccctcgcgtccgcggacgcgtggggccgaagcctcccaagccagggccgaagccgaagccgaagcctccaaagccagggccgaagccgaagccgaagccgccgaagcccgggccgaagccgaagccagggccgccacagccctggtggcctataccattcccgaagccgccgtgtccccccggcgccgacgggtcgtcgtcggcggtcgacgacaagaacaactgatcacacatcatacctaaattatacatatgattaatttgagatcaaagaatttacagagt

SEQ ID NO: 22811 - DNA, 303 bp, Oryza sativa
  unsure (1)..(303): unsure at all n locations
  Clone ID: uC-osflM202067b08b1
ttgcgtctattagctatctagcttagctactcgatcatcagatcatcgatcatccgacgatcaaatcagtaatcttgaatatggcggctttgaacggtaaggtggtggtggcggtgatggtggtggcgatggtggtggcngcnncccgggcgttggctgccatcgcgagcgctcgggttctctcggtgggcgcgccgcgcatgttgtgcatgtctggccggagcggagtggctcagatgtgcggctgcggcgtcaacggggtcaagaacactgtacataccgctactgtctcacaggctgcct

SEQ ID NO: 22812 - DNA, 485 bp, Oryza sativa
  Clone ID: uC-osflM202067b09b1
tgcgtccatggcgcctctccctctcctcaccacgacgtctctgctgctcttcttgttcctcgcgtcgtcgttcgccgccgacttcgtcgtcgcgggcggcggcggcggcggcggctacgacgacggcggcgacagcgaaggcggcggcggcggcggagccaagatgccgcacgtgaaccacggcaggtacaagtgcgggccgtgggtggacgggcacgcgacgttctacggcgggcgcgacgcgtcgggcacgacggagggcggcgcgtgcgggtacaaggacgccgacgggtacggcgcgatgacggcggcggtgagccccgccctgttcgacaacggcgccgggtgcggcgcgtgctacgagctcaagggggattccgggaagaccgtcgtggtgacggccaccaaccaggcgcccgcgtcagtgaacgggatgaagggcgagcacttcgacctcaccatgccggcgttcctctccatcgccg

SEQ ID NO: 22813 - DNA, 533 bp, Oryza sativa
  Clone ID: uC-osflM202067b10b1
tttgacattgctgagcatttaagggtatgtgttgttttgcattctcactcctccttgggccaatttcctcgataccacgattggaaaataccatcgcatgtgtcaacacacgtgggcccaggccccatgggtcattctcatatgtggtgatattttacaatctgcatatctttacgatggtatttcctggttttctcccttttaatgtcatggacttctgatacagtttggatgataaactgtggattttcaggtaaggttgaagaaagaacaagaagagaaagaacacaaaaagaaagagaaggctgaagctcatctttataccatcataaaggtggctcgagatgagaatttgaaggagcaaattggcaaggatatatattttgacctggtggaccatgaaaaagttcgtagcttccgaattcagaagcagttactgtttaccactttcaaggaggaagttgcaaaggagtatggcatccctgtacaatttcagcgcttctggttgtgggctaagaggcagaaccacacat

SEQ ID NO: 22814 - DNA, 442 bp, Oryza sativa
  Clone ID: uC-osflM202067b12b1
ttgcttcgtctcctcctcatggcgatctcgaaggctgggatctcgctgctgctcgcgctcgccgcggagctgtcggcgccggcggcgagggcggaggaggcggcggctgcggaggaggggggcgatgcggcggcggaggccgtgctgacgcttgacgcggacggcttcgatgaggccgtcgccaagcacccgttcatggtcgtcgagttctacgccccgtggtgtggacactgcaagaagctcgctccagagtatgagaaagctgcacaagagctaagcaagcacgatccaccgattgttcttgccaaggttgatgccaacgacgagaagaacaagcctcttgctaccaagtatgagatccagggttttccgacactcaagatattcaggaaccagggcaagaacattcaggaatacaagggcccgagggaggctgagggca

SEQ ID NO: 22815 - DNA, 409 bp, Oryza sativa
  Clone ID: uC-osflM202067c01b1
ccagaataaacacaggctttgcttcgtttcaaggatgaacacacacagagatagaggtgaagagcgagagagggtaattaaccgttgtgtttcactgggggagggaatgatgtccgaaggcgatgagcacgggtcgctgctggagaagatcaacgacacgatccatgagttcaagaagggatcgtcgtcatcctctgactaggactgcgacgacgacaagaagcaccaccacaagtgcatgtgcaagaagaagcggctctttggtcggacgaacccgctacatcacgtactaggaggaggcaaagctgctgatcttgtgctgcggagggacaagcagacgtcaggtggcatcctggcgggagtgaccgcgatctggttgctgtatgaggggatcggctactaccttgtc

SEQ ID NO: 22816 - DNA, 456 bp, Oryza sativa
  Clone ID: uC-osflM202067c02b1
gcctatgtcggggccaaaagatctaccgctctgcatcaataagctgcccccgatgatcgatcgtgagcctgcgggtagtagtaggcacggaagtaatatggatccatccatcaacataccggtcaacagagatgccatcaccgaagaagtcgccgccgcgttcgcggaatccgaggtgatccccgagaggtattgccgacctgatgaggtccatgacggcatcgtcgttggccatgacgatgacgaggcctacgagcttgcggtggtggacatggagaagctgcttgacccggagcttgcggaggcagagattgcaaagcttggttctgcatgtcaagattggggtttctttcagttaggaaaccatggagtcgtcgaacaagtggtgaatgacatgaaagacagctcggtcaaattttttagcttgccactagaaagcataaggacaggtgaaat

SEQ ID NO: 22817 - DNA, 449 bp, Oryza sativa
  Clone ID: uC-osflM202067c03b1
gtcgttgctgccgcagagccagctgcggcggatcggcggcggcggcttcggcggcgcggtcttcgggaggaggcgcggggacggacggcgcacgacggggccggctgcgacggcagtccgggatctggagatcgcggcacggcccgcgctggtgttctacgacacacccgactgctggctagcctcgctctacctcgggttccgcttctccaggctgctcttcttcctgctctctatcaccaccgcgctatacatctccacctcgacgtttcttctcactcgacgtgctccgagccacgacgacgactacgaccaccaccacaaccaccatgaccaccaccaacaccttaatccttctacttacaagccaaaccaaacctcttccccatttaacctttccaaccacactgccctggacgcgggcagatgcggccggacacacccagagc

SEQ ID NO: 22818 - DNA, 504 bp, Oryza sativa
  Clone ID: uC-osflM202067c04b1
acatcactatcaacccccgcatccgccgccgccggcaccaccccctaactccgatttgaagcgaccagaggccgcggctaaggtccgggatgtcggggcgcaaggagacggtgctggacctggccaagttcgtcgacaagggcgtccaggtcaagctcaccggcggcaggcaagttacagggactttgaagggctatgaccagcttctaaacttggtgcttgatgaagcggttgaatttgaaagagagcaagatgatccattgaaactatcagggaaaaccagacagcttggtcttattgtctgtaggggtacagcggtgatgcttgtatcgccaaccgatggaacagacgagattgccaaccccttccaatctgatggtgcataaacctgcaggagctgatggctctcctagtcaagatccatgctctcccagtagagaggcctttgattaactcatgtaatctggtgccacagtcttttatgactcgtgtctcttatgaaca

SEQ ID NO: 22819 - DNA, 502 bp, Oryza sativa
  Clone ID: uC-osflM202067c05b1
gcatctggctttctctgctgctcttggtgtcacccttgggatctttccgatatgtggtaaggagcctctcaagcctcagcatgtcttcattgtaccagatttttctcatagtttaactgaacaaaagaagatatccaaattaactgagttaagtggccttagacagccaaggaggttatgattagatacaaatttgcgcatttaagctgtgtagtttcattgtggcttttgataagctggggcactaacttttttttattcttgaaacaatgacttcctgctccatggtcttgaagaaatagcacacaatcctttttggtaaattacagatacatgtagagtacgtgtatttaatctgttgtgaaattcgaagttcagtgttgctgcgatgcaatggtaatagtgttctggttctagaaagattaattctggctgttatcctagaagtttggaggatcccgtttatattctcgagcacttgtaaatatgatgtggagtagct

SEQ ID NO: 22820 - DNA, 192 bp, Oryza sativa
  Clone ID: uC-osflM202067c06b1
cactcactcattgcagaggagaggcgacaatggaggggaaggaggaggacgtgcggctgggggcgaacaggtactcggagaggcagtcgatagggacggcggctcacggcatcggatactacaaggactacaaggagccgccgccggcgccgttgtacatgccaagggagcttaagtcgtggtttttttacc

SEQ ID NO: 22821 - DNA, 469 bp, Oryza sativa
  Clone ID: uC-osflM202067c08b1
tgttttctctattatgcaattttgttgctaatttcccgatccgttgagcatgccttcttgtacaaaagggagagacacaccagtcgtcacatcatcaccgtttcaggcacacgccaatccgcgagcctgacgctccgatcgagcacgaaacatatagtcgtacacaattaacgcagctagccaactaatgaaacgcataaaacttgggggggaaaatcatatggacgatccacgagggcgctcaaaatcgaccttcgtcgtccatctcacgctcgaccgccgcgtcctccaccgtgtcgccaatgtacaagtacgggttcttcgccaccggctggaagttgtagaaaacgaacaggtagaaggcgaggctggcggcctcgatggccacgttgacgccccactggtacttgtagctgagcaaggcgaggaacgccgacgcgatgatccgggtgaagtagaggtagccgac

SEQ ID NO: 22822 - DNA, 514 bp, Oryza sativa
  Clone ID: uC-osflM202067c09b1
tcttggtttcccccccctgaatccaagtcacctcctcctcacacctcaccttccccctctctcctccgatcgcgcgcgcatggcgatgtcacgagccgccgccgctgccgcggggactcccgtggcgcggcggcgattgatgggggccgcggcggcgaggtcgatggcgtcgtggttcggccacgtggaaccggccgccaaggaccccatcctcggcgtgaccgaggcgttcctcgccgacccctgcccggacaaagtcaacgtcggcgtcggctgcgtaccgggaccgacagcgggaagcccgtggtgctggagtgcgtgcgcgaggcggagcggcggatcgccgggagcatgaacatggagtaccttccaatgggtggaagcataaagatgattgaagaatcacttaaactggcctatggggagaactgtgagttcatcaagggcaagaggatcgcagcagtgcaggctctttcaggaactggtgcatgtcgcccttttgcagatttccaga

SEQ ID NO: 22823 - DNA, 492 bp, Oryza sativa
  Clone ID: uC-osflM202067c11b1
tcgcttatcgcatcgacttcgattcgcttcgtttcgttctcgctgttgatttgttcgtgagatttgaattctagcaatggctcctctcggtgacggagcggcggcggcggcggcggcggagcccaacctggtggtgtcgttcggggagatgctgatcgacttcgtccccgacgtcgccggcgtctcgctggccgagtccggcggcttcgtcaaggctcccggcggcgcccccgccaacgtcgcctgcgccatctccaagctcggtggctcctccgccttcgtcggcaagtttggtgatgatgagttcgggcacatgctggtggacatcctgaagaagaacggggtgaacgcggaggggtgcctgttcgacgagcacgcgcgcacggcgctggcgttcgtgaccttgaaaagcaacggcgagcgcgagttcatgttctaccggaacccgagcgccgacatgctcctgacggaggcggagctcaccctggacct

SEQ ID NO: 22824 - DNA, 409 bp, Oryza sativa
  Clone ID: uC-osflM202067c12b1
tgattataatagtgccaataattttgtcctgagtacgggttatacaagctgacgacggaggtatgggcccaattggtgccatatgggccaatagaactgaacccagcagctggagtgttgaattatggccagggtttacttgaaggtctgcgagcacatagaaaagaggatggatcagtccttctatttcgtcctgatgaaaatgctttactgatgagagtaggcgcacaccggatatgtatgcctgcaccaagtgtagagcagttcctagaagctataaagctaacaattttagcaaacatgcgctgggtaccccctactggcaaaggttctttatatatcagaccgatgctgattggaagtggggctatcctcggggttgcaacaaggccagagtacacaattgttg

SEQ ID NO: 22825 - DNA, 353 bp, Oryza sativa
  Clone ID: uC-osflM202067d01b1
ctgttgtttacgatagaatgtgtacccagctacggttcgatgatgtaaccattacagccggttggtccctggctcgagccactaatggatttcaccaggccggccaccgtcggcgaggatcttccggacataccccgtataactgcgttaccccttcgagatgcagacatttgtctagcgctctgtgcatgtgggaaagcttaaagactactacatggacttaaaggagaacactactgggccagacaagtagttggacgccgcctaacacaacgggttgtgattgccacctacttacctgcgaacacgttgtgacgcatgctatgcaaaaattgatggcccgtctgacatgc

SEQ ID NO: 22826 - DNA, 517 bp, Oryza sativa
  unsure (1)..(517): unsure at all n locations
  Clone ID: uC-osflM202067d02b1
gttattcatagcgatcgatcgattgatcgaggagtttgaggggggaataacggggaggagcatcgatctcgatcgccggcgaccatggcggcggcgcttgttcgctctttggcgagcaggagtaggatcggcacccggcgctctcacccagctacagcctaagccggcggccaccgtcatctcgccaaggttgcttagccatggcgggctcctccgccgggaagccctgccgccgccgctctcgccgtatcgcttcttctcttccggcggtttcgagtcacctcgcacgggtccctcgccttctagtacagaacctggtacggacacagagtcttgtaccaataagcaagggccagtggctgctgaagagaataataaaaaatgttgtccaagaaagcaagcttcaatggcactcgngacgggaattgcagagaggaagaaggagcttttcagctaatgttgcagatgaagaatattccacattgtgatgagtgttttcccgataaggaggagcagt

SEQ ID NO: 22827 - DNA, 420 bp, Oryza sativa
  Clone ID: uC-osflM202067d03b1
gacttgcatcaagacaaacatggacatggtctgtggtgagatcaccaccaagggtaacgttgactatgagaagattgccagggagacatgccgtgacattggctatgtgacagatgatgacggtattgatgctgaccactgaaaggtgcttgtgaacatggatcagcagagctgtgacattgcacatggtgtgcacggacacttgaccaagatggctgaggagattggggctggagaccagcgacagatgtttggatatgcacatgatgagactcatgagttgatgaccctcagcgcatgtcttgctaccatagctggagctggtcttactgtaggttcgcaagaatgggacctgtgcgtggctgatgcctgacgggaagacccaagagactgttgagtacctgactgagagcggtgtca

SEQ ID NO: 22828 - DNA, 489 bp, Oryza sativa
  Clone ID: uC-osflM202067d04b1
cacttaatgcgctgctggtgggaactcagcaacagaaccatacattgttgctcataattttctcttatcacatgctgcagctgttgcaagataccggactaagtatcaggcagctcagcaaggcaaagctggaatagttctggacttcaattggtatgaagctctttccaactcaactgaagaccaagcagcggctcaaagagccagggacttccacattggttggtatcttgatccattgataaatggacattacccgcagataatgcaagatcttgtgaaagataggctgcccaagttcactcctgaacaagctagattggtcaagggctcggctgactatattggcatcaaccaatacacagctagctacatgaagggccagcaattgatgcagcagacaccgacgagttactcagccgattggcaggttacctatgtttttgcgaaaaacggcaaaccaattggaccacaggcaaattctaattg

SEQ ID NO: 22829 - DNA, 521 bp, Oryza sativa
  unsure (1)..(521): unsure at all n locations
  Clone ID: uC-osflM202067d06b1
tgttcccagctgaaaaactagtaaacccccctgtccaactgctccacctcccacttccaccagtccaccaccctgcggcatacggcgcgtcacgagcatcggcggcggaagcgtcgccgtcgttgttgccttgcctcgcgacgccgctcccgtccctctcactctcccgtggaccgtgcgcgctctagctcgtgccttcttgcggagtttgcagtgcgcgcgtttcgtttgcccgcaacagcaaggcgaggggggagagagcaaggatggcgagggcggaggcggcggcggcgctggagttcacgccgacgtggatcgtcgcggcgatctgctccctcatcgtgctcatctccctcgccgccgagaggtgcctccattacctcggcaagacgctcaagagaaagaaccagaaggcgctattcgaggctctcctcaaggtgaaagaagagctgatgcttctggngttcatctccctgctgctgacggtgtcccaagggattcttcagaagacatgcgttcct

SEQ ID NO: 22830 - DNA, 502 bp, Oryza sativa
  Clone ID: uC-osflM202067d09b1
ttgatgatgttcggattgtacagccatttagtcctacgaatgatattgagccaactccaatttatctatcccaatttgctatgaacagcattgcccaaaagtttccttacttggtcagaaagaaactaaaggaaggggaagaggctcggcgagttgctcagcttgattggagagtaatcgagagtgatcttcagaaaccatttgtgacctcagggctagagtttgttcccctgccggtgatccatggcgaggactatgtttgtctgggtttcctttctggaagaaaatcaaaagttgcttatatatcagacgtttcacggtttcctccaagcacagaacacgcaatttcaaagtctggagagggtcagctggatttgctcatcttggactgcctttataggactggttctcataatgtccatctttgttgggatcagacactggatgctgttaagaggatttgccccaaaagggcattgctcattgggatgactcatgagat

SEQ ID NO: 22831 - DNA, 539 bp, Oryza sativa
  Clone ID: uC-osflM202067d11b1
ttgtttttaagcaaaagaagaagaagaagaaagaagaagaagaagatgcagaccgctgctagcagtgtcgttggattgtcggccgtgttgcccgctgctgtgaaggggcgcagcctgcagattcaggctcctcgccgtgttgcgttgcgcgttcgtgcggcggcggcggcggtggcagtggaggctgcggaggtggactacagctctaacatctcggtgtttccgatggaggcgtgcgacctcatcggcggcgaggcgtgcaacgtgcagatgtacccagaggccaagctctcatcatcggctgctgttgctgcttctcgtgcggcggcggaggaagttgacagggactacctatcctacgacgagcccaccacggtgttccccgaggaggcgtgcgacgatctgggcggagagttctgcaaggccacctgatcccattcccatccatggagaattggagtcttctatcatcccttcttctctgctccactaccttaatttcatgtagctacagatttatatgttaatcatcatgtaat

SEQ ID NO: 22832 - DNA, 419 bp, Oryza sativa
  Clone ID: uC-osflM202067d12b1
gaaaaactagtcaacccccctgctcaacggcttcacgttctacttcaaccagtacaccaccctgcggcacacggcggcgcaacgagcatagcgccgcggaagcgtacccggcggtggtcaactgcctaggtgacgcgcgctcgatgtccgtctcactctacagtagaccgggcgcgctttagctggtgctttcttgcagcaaccgcattgcgcgcggcctgcttgtccggatcagataggcgagggggctgagcgcatggaaggccagggggaacgacgtcaccggacccatgccgatgtccctggggtgcctggggctcatcgaggagctcaacctggtcaggaaccagctggacgggcggatcctccacgtgctttgcgcgctggtcaagagcgggaagctgaagaaccttttcctg

SEQ ID NO: 22833 - DNA, 406 bp, Oryza sativa
  Clone ID: uC-osflM202067e01b1
gatgctgttaccgaggagcatatgtccatggcttgcacgaaggtgtggagaagcacgatgtacacacccaggcggctgaagcgaacgacaccggcgtcaagagtatcaagcacggtcatggcggcggcgaacggcgatgccagccatggcgccaacggcgggattcagattcagtccaaggagatgaagacggacatccacagcaacgatagccccaagaccctgctgaagagtgaattcctccacgagtacatgctgaacacgatggtgtacccgcgggagaacgagtttatgcgcgagctccgcctcatcaccagcgagcacacctatgggttcatgtcgtcgccgcccgaggaagggcagctgctgtcgctgctgctgaacctgacaggcgccaagaacacca

SEQ ID NO: 22834 - DNA, 467 bp, Oryza sativa
  unsure (1)..(467): unsure at all n locations
  Clone ID: uC-osflM202067e02b1
cattattttaggttggagcttttgctcgggcgattgattttggaatcggaggaggggatgtcaggaccactcgatcgatttgccaggccatgttttgaaggttttacgcataatgatgaaaagaaagagatcagatctgacgcagacaactccgaaggagagaagaagactaaaattggttctttcaagaaaaaggcgattaatgccgggaacaaattcaggcattccctgaggagaagaagcaaaaagaaaaatgaaccttcggggttccattgaggacatagnggatgttcaagatcttaaagctgttgatgcatttcgacaatgtttagttgatgaggacctgttgccgcaacagcatgatgattatcacacaatgcttaggttcctcaaagcacggaaatttgatgttgagaaagcaaagagtatgtggtcagatatgcttaaaggagaaaggaatttggggc

SEQ ID NO: 22835 - DNA, 214 bp, Oryza sativa
  Clone ID: uC-osflM202067e04b1
cactgttttcatctcgccattcctccgatccccacgtccgcctatggcgctctccatctccacgccgccgacctcctcctacctcctgccggcctccctccaggtcggcaggcggagctcgtcggcggcgatggcggccaggcctgtggcctttagcctacggaggccggttcttgcggcccgtgcatgctgcgctggcaacctgccgaagagc

SEQ ID NO: 22836 - DNA, 186 bp, Oryza sativa
  Clone ID: uC-osflM202067e05b1
aaatatatcttaaaggcagtgaaccaccggccacgtcggcagcagcttccccccattctcctcgtcgcgccaccgccgccgacggggaggcgccgcacgatatatacggtggcgcaagcggcggtgagctagctaggcgggcggaggagaggggggcgtggagggatggccggaggagggggaggg

SEQ ID NO: 22837 - DNA, 479 bp, Oryza sativa
  Clone ID: uC-osflM202067e06b1
tttgtaccacggctcgccggcggcggtggcggcgtgggcggctgtggcggagatgaggttcacgacgggggggtcgtcgacgcggtcgtgggagccgacggtgacggcggacacgtcggacctgcactactggatgcagtggcgcgccgcggtgtgcgcgctgtccgtgctcgcgtgcatggccgtcgcggcgtgcctcgtgtggcgccacgagggccccggcgccgaacgccgccccggctgcgcgtccggcggcggcggcgggagcaaggagcggcggtggccgggggtgctgtacgacgacgaggcgtggcggacatgcctccgggacatccacccggcgtggctgctcggctacaggctcatctccttcttcggtctcctcagcttgctcatcgtcattgtcatgtccgatggtggcaccatcttctactactacactcagtggaccttcattctggtgacgatttacttcgggc

SEQ ID NO: 22838 - DNA, 368 bp, Oryza sativa
  Clone ID: uC-osflM202067e07b1
tctcgtctccgcctccgccgacgccgctggaatcgccgaggggctcaggtcgctctgcgccagcatggactcggccgggttcttcaccttcgtggtcgcgaggcgcaaggaggtggacgcgctccgcgccgagctccccgacgcgctcaagcgctgcgtcgatccggcgaggttcgccatggacgcggtctccgaggtgttccccatcgacaagcgggcggtgaggtcccccaccgacctggcgtgggcgtgcgtgctcatcctggaggcggtggtgccgtcgctggccgatccggacccggagacgggggcggcgcgccccatggtgccgcatgcagcgcgcgagagggctcgcggaatggcgaggg

SEQ ID NO: 22839 - DNA, 502 bp, Oryza sativa
  unsure (1)..(502): unsure at all n locations
  Clone ID: uC-osflM202067e11b1
tggtcaaaccccttccttccgccaatggccgccggcgccgcccttcgccggagcctcgctgctggccccgccccggccctcctcctccgccgccaactcctcatgcgcttcctctccacccagacacagtcacagacgcaaacccccgccgacctcgccaccctcaagaactccattcgcagcgccgcccacaccccggaagccctcgccgacctcttcatctccggcctctcccacccggccttcctcgccgaccgccccatctttaccctctccgtccaccgcctcgcctctgccggccgccgcgacctcgtcgcctccatcctctcctcctccctcacctgcctccccgcgccccacccctccgagggcttcctcatccgcctcatctccctctactccgacgccggcatgcccgaccactcccttttcaccttncgcatngtcaccccgcccttcgaccgggccctcttcgntctnctctccgactaccacgacaacc

SEQ ID NO: 22840 - DNA, 430 bp, Oryza sativa
  Clone ID: uC-osflM202067f02b1
ctcttcttcgcgcctcgcctcgccgcctcggcatccgcgcccactcgtcgccgcctcgccgccgtcccttcgcgtgcgccggcgcgcggcggcggcggaggccgcctggggagcgtttccgcgggacgcggccagactgcaagggaaacaatggcgcgtagtatgaggacatgtttgcacagtggaagacttgcgcttattgcaatactggtttctggtggaattgtattgcagattctggcctgtgctctgtataacaactggtggccaatgctaacagttcttatgtacctcatactaccaatgcccctcatatttttcctgggctccaacagcccctcaatgatgtctaatgatggcgatacttgggtgagcttcacaaaatttttgacgggcgcatcgatagtggggagcatcgccatccgtcgat

SEQ ID NO: 22841 - DNA, 434 bp, Oryza sativa
  Clone ID: uC-osflM202067f03b1
atctgtgttccactctacgatacgttaggtgcaggagctgttgacttcattattgaccatgctgaaatcgatgttatctttgttcaggacaagaaaataaaagaaatactgtccgcaaattgcaagtctgctaagagagtgaaaggactggtggcatttacttcgggaacaagcgaagaaatcacaagtgctgatcagattgggatgaagttgtactcgtggaaagatttcttaaaaatgggaaaggaaaatccagcccaaccttgtgctccaaaaccaaatgatacatgcaccatcatgtacacaagtgggacaagtggagagcccaaagggtgtcatgcttagccatgagagtcatgccatatatgtgaaagggtgtggacctctttatggagcagtttgacgataagatgacaacagatgatgggtttctt

SEQ ID NO: 22842 - DNA, 488 bp, Oryza sativa
  Clone ID: uC-osflM202067f05b1
cattggtgtgcctcctacaccggtccatccctgagagctcaaagtccatggaaacttttgactcgcttacggttttcagagcaaagaactataatgccaccattgagttctactgggctccctttctagctgaatcaaattctgatgatgctgttgttcaccgtattgcggatagaattgtaagggggacagcccttgaaaagcatgccaggttttggaagggagctgacatcttggtattcaacagctacctttggtggatgactggacaaaagatgaaaattctgcaaggttcttttgaagataagagtaaggatattgtagaaatggaaacagaggaagcctatgggatggtactgaatgcggtcgtgaggtgggtggagaacaacatgaaccccagaaattcaagggtctttttcgtcacaatgtcacccactcataccaggagcaaagattggggtgatgattcggatggaaattgctacaac

SEQ ID NO: 22843 - DNA, 548 bp, Oryza sativa
  unsure (1)..(548): unsure at all n locations
  Clone ID: uC-osflM202067f06b1
cactacgccacccaaaccgcgatttctgatcgatcgatcgttagctcgatccaagaacccatcttttctttgatccccaatcctcttttgccgaggattaattgggagaagatgacgatgatggggtgtgccgtgctgctcgtggtggtggcgtccatggcgggggaggcggcggggaggttcgtggtggagaagaacagcctgcgggtgacgtcgccggcggggctccggggcgtctacgagtgcgccatcggcaacttcgggatgccgcagtacgggggcaccatgcacggggtcgtcgtctaccccaaggccaacaagaaggcctgcaggtccttcgacgacttcgacctctccttcaagcccaagcccggcggcctccccatcttcctcctcgtcgatcgcggagactgctacttcacaacaaagggatggaatgctcaaaccgctggagctgcagctgttcttgttgccgatgatagattggagcctttgataacaatgganctctcagagtctaagtgcacagattacatatgagaaaatac

SEQ ID NO: 22844 - DNA, 162 bp, Oryza sativa
  Clone ID: uC-osflM202067f07b1
taaataaatcaattcgaagctcacagtagctcgcggcggcggcggcggcggctcgggctccgacttcgtgggcgatggcgggggcaggaggagggggagtgcaccacatggcctctccttgaggcgcagccctcactcctgatgaagacctcggagctcctc

SEQ ID NO: 22845 - DNA, 360 bp, Oryza sativa
  Clone ID: uC-osflM202067f08b1
tggcttttgcaacacacacttgaagaaaaaaaacacgacgaacacgttaaaaaaaggtcgaagagaagtgggagacccaaaccgcgaacaatgtgtggaggcgccatcctcgccgagttcatcccggcgccgtcgcgcgccgcggcggcgaccaagcgggtgaccgccagccacctgtggccggccggctccaagaacgccgcccgcggcaagagcaagagcaagaggcagcagaggagcttcgccgacgtcgacgacttcgaggccgccttcgagcagttcgacgatgactccgacttcgacgacgcggaggaagaagacgaaggacactttcgtgttcgcgtccaatctcgtgtcgtc

SEQ ID NO: 22846 - DNA, 465 bp, Oryza sativa
  Clone ID: uC-osflM202067f10b1
tccgatctcccctctcctcgtcctcggcctcctccacccccacggagaggtctcctcgcgacttcacccgccgcctccgcgccgatctcatctccatccccccgcgagcagcggcggtgccggtgccggcgtcctgctgcttccgccgccggtgagcaccccgtagacctgtggtgtggtgcggtgcggggaggatggcggagccgtctaaggtgatccacatccggaacgtcgggcacgaaatcgctgaggctgatctgctgcagctattgcagccgtttggcaatgtttccaagatcgtcatgctgcgtgccaagaatcaggcacttctccaaatgcaagacttgcataattcagtgagtgcgctgcaatactacagtactgttcaacctagcgtaaggggaaggaatgtgtacatgccaatttcgtcccaccaagaacttaccactgaccaaaactcttatg

SEQ ID NO: 22847 - DNA, 516 bp, Oryza sativa
  Clone ID: uC-osflM202067f11b1
tatctttggacaagcaaccttgatcttcttaccggacttcggaaatttgcagatgatgaaaagcttcatgctgagtgggcatcagctaagttggctagcaaaaaacgcctagccaagcatgtgttggatgtgacaggtgttacaatcgacccaaatagcctttttgatatacaaattaaacgcattcatgagtacaagagacagctgctaaacattttgggagctgtttacagatacaagaagttaaagggaatgagtgcagaggagagacaaaaagttacgccacgcactgtcatgatagggggaaaagcattcgcgacttacaccaatgccaaaagaatagtaaaattggtaaatgatgctggtgctgtggtgaacaatgatcctgatgttaataaatacctaaaggtggtgttcattcccaactacaatgtatctgtggccgaggtgctcattcctgggagtgaactgtcacagcacatcagtaccgtaggcatggtagcaagtggcacgagt

SEQ ID NO: 22848 - DNA, 506 bp, Oryza sativa
  Clone ID: uC-osflM202067f12b1
ttggttttgcctctctgggtgttcttggctatcgggcgattgttataggcaggaagcctgaatctctacgccctgccagttctgtaaggacggggactgattcttgacttcctgactattgccttgtgttgcgtgcttctagtcgagttggcttgcataaccattcatatttgattcgagaagacttcaggatagaaacaaactcaaggggccatttctcatgctggcttgtcatgtctctgacaattgacacaaatattacgatatgcttctgttctgcatgacaattctgatttggttaatgaacactcagagagactcaaaatgcgccaataaacttgagtcatcaggcgtaattttttatttcggcctgttgcaccatcttatacttaaaaacaaaattaaccgtgctgttttaatgaatcatttctgtgatctactcaaggcggttggacaagggctaatcttggaggcttactctgattgaaccctggagactggggact

SEQ ID NO: 22849 - DNA, 375 bp, Oryza sativa
  unsure (1)..(375): unsure at all n locations
  Clone ID: uC-osflM202067g03b1
tgcttatttatagcctcccatcaacttcttgcacacaccgtccctttggctttcatctgcatctattcagctgcagattgagagccaaagacattatattgattctatcaggagggttgtgctagcgaattcttgttagcaacaaattgacatattgctcggcacatccccaccgagaataccaagatgacgttctctggtacacaggacaagtgcaatgcttgtgacaagaccgngcatttcattgatctccttaccgcggacagtattccctaccacaagtcttgcttcagatgcagccactgcaaaggcacactttcgatgtgcagctattcgcccatggatggggttctttactgcaagacccattttgag

SEQ ID NO: 22850 - DNA, 516 bp, Oryza sativa
  Clone ID: uC-osflM202067g04b1
gatttattcgaatgatggatgtgctacttacaacgtaaccatcaggagtccattgcataacgtcccattttattgtgatgttcccatttggatccagcgaatcataagcttctgcaagaaaaaaaagagagagaatatgaattaagcattaagttacatcccgattccgatttaaaaggtacacaccacacaactaataagaaattcgcggtgaatattatttctaaaaaaaaaatctgaattagaagtagtaagaaatttgcactaatttctctgtcctgaactgaacagatccatcaccgaaatgcttgagatgaagattcagcgaagatagcaaagactggtgctggtaaggaagctctgtgtgtgctcctcccaattgccctaagctacctaattcgacctcagaattcgtgcaagcatgagagaaatggaagtccctagtgaatttggagcccaaccaggagtaccaaaaacagaaagaagccaatgacgccgaactggagccaccgcact

SEQ ID NO: 22851 - DNA, 147 bp, Oryza sativa
  Clone ID: uC-osflM202067g05b1
ccctatgttctttgtgttgcgttaattgggccggattggtcggccggccacatagatgtgtaacatttgtatttttttcccaattcatttttggtcttctatcagtgtacgcaccttcaaaatggtgaatttttacagaagtttttg

SEQ ID NO: 22852 - DNA, 380 bp, Oryza sativa
  Clone ID: uC-osflM202067g07b1
ttgtttttgattcaagggagcaagtcatcaaggaaggatcacctaaacaaagtgcaaatgcaccaggcaaagaacgagcggaacttaagtcacgtgaatcattatctcaaaaggaacagcctgagatatgttctactcatactgcaataggagacgcatgtgagaataaattagaatgcatagatggcacacataatcaaagtcttggttgcagttgtgtgcatgctgacaggacaactaatcaggcagaagattctagtgcctctgtttctgtgggagtaaattctcatcagcagccgaataattctaccaggcctagccaatctaagagtagatttagtcctatgcttacatttcataggcgagttaaaaacaaaata

SEQ ID NO: 22853 - DNA, 459 bp, Oryza sativa
  unsure (1)..(459): unsure at all n locations
  Clone ID: uC-osflM202067g09b1
tttacttctcccgccgacgctgaaggccgcctccgcgagaggcttgcgcggtggcccgcggcgtgccggacgtggcgagggagctcaccgcggaggtgcagcagtcgggcgtcaccggcgccgcgcgcgtcgcgtacgccaaggtcgagcccgtggccaagggcgtgtacggcaggatccagccggcggccaaggacctctacgtgcgctacgagccggcggcggagcacctcgccgtctccacctggcgctcgctcaacaacctgccgctgttcccgcaggtggcgcagatcgccgtgcccaccgtcgcctactgggccgagaagtacaacaaggtgatcgccgccgcggccgacaagggttacaccggagcacagtanccttcccgcatccccaccgagcgcatcgccaaggttttcggcgagttattcgcggaggcccagcccgtcgagagcgagt

SEQ ID NO: 22854 - DNA, 487 bp, Oryza sativa
  Clone ID: uC-osflM202067g11b1
tttcttgtagaaacaaacccctctcactcccagatacctgctgctgccactagcccactaccatggatccttgcaagttccggccgtcgagctcgttcgacacgaagacgacgacgacgaacgcgggagctccggtgtggaacgacaacgaggcgctgacagtggggcccagggggccgatcctcctcgaggactaccacctgatcgagaaggtggcgcacttcgcccgggagcgcatcccggagcgcgtggtccacgcccgcggcgcctccgccaagggcttcttcgagtgcacccacgacgtcaccgacatcacctgcgccgacttcctccggtccccgggcgcccagacccccgtcatcgtccgcttctccaccgtcatccacgagcgcggcagcccggagacgatccgcgacccgcgcgggttcgccgtcaagttctacacccgcgagggcaactgggaccttctcgggaacaactttcccgt

SEQ ID NO: 22855 - DNA, 154 bp, Oryza sativa
  Clone ID: uC-osflM202067h01b1
ctctccgtctcgccaccaccgcaaccctcgcctcgtgccgtacgggcgcgccgcgggagccaccaccccacgtccgtcgcgtcgcgtcgcgcggcacgcctcgccgagagaagcggtggtggtggtagtagtagtagcagtagaaggagggggg

SEQ ID NO: 22856 - DNA, 347 bp, Oryza sativa
  Clone ID: uC-osflM202067h02b1
cgatttgattagtactactttattcatgccatgaccatgcatacatatgggctttcacagatccatgaagaattcctcgcccgaaaccgaaaaatacataaagcaaactcactcactctggctgcagagcgaccgtgcgaagtgcgtactcacacgcaattttattcgatcgatcggggccggcacggcggcgcacacgtctacttcgccgcagacgccgacatgatgtcgccgtcgaacggcgcctggccgaagcagtccaagttgggcccgtagccgacgccgagcacgtcgcagtagcgcttgtagaacgcgacctgtcggcgccgccgttgccgccggcgcac

SEQ ID NO: 22857 - DNA, 292 bp, Oryza sativa
  Clone ID: uC-osflM202067h03b1
cactcacttaggtagcataggcatagctagctcaccagcgtggtctccaacaagaacgccatgtcttcctcggttctcttcctcgccgcgctgctgctgctctcgtgcagctccatgagcagcgcggcacggtggctcgaggaggagtacccgccgcaccccgccgtgccggagctgcccaagcatgaggagccgccgcaccccgtcgtgccggagttgcccaagcacgaagagccgtcgcaccccgccgtcgagccggagttgcccaagcacgaggagccgtcacaccccg

SEQ ID NO: 22858 - DNA, 492 bp, Oryza sativa
  Clone ID: uC-osflM202067h04b1
ggatccggtgtcttttgtcaggggaagaaatatgccatctgactcacataagatcctaaatgaagacaatcatttcatgtcctatagcatgccacgggagcatcggaagttcttcgaggttcctgtcactaatatgggagaacttcatttgcattgtgatgatctgtcaactagcgaaactagttcacgtggcagaatgttgcccgaggattttcttgctccaagaacaagaagcctctcccctggaccgaaaggccatacttttgctgtaaataatgtaaattcaagggaatttggttttagtccaaggtcaccagtaaaaatgatggatggattgaagagcccacctcatcctttacctcttcctccaggtcctgctacttgttcacctcttcccccatctcccactgcttactcgcctcaccctctaggtcccactacttgctttgcatccgaatcacaatggaaaaaaggcaaattgttagggagcgg

SEQ ID NO: 22859 - DNA, 232 bp, Oryza sativa
  Clone ID: uC-osflM202067h05b1
cgcatgtttcagcacggcacaggcagccgagcacgtgtcgcgcgcgcgcgcatggcggctccggtggcctccgcctccgcctcctgcttcgcgccgcgcagcgaccatggcggcggctggtcctacggcgggacgagaggggtgccgtcgccgcggcgtggcgcggcgaggcggcttcggcgcgtcctggcgcgaagcggcggcggcggaggaggaggaggaggaggagagg

SEQ ID NO: 22860 - DNA, 335 bp, Oryza sativa
  Clone ID: uC-osflM202067h06b1
cgctttcctcgacaccgatcgagagagagagatcgcaccgatcgacgtacggtacgagacgaccatggcgcgtcctcgcttcgccaccacggcgccattgttggcgctcgccgtcctcgccgccgtggtgttcgtcgtcgtcgccaccgctcccgccggcaaggaccccggcggcttcgtcgtcaccgggcgcgtctactgcgacccctgccgcgccggcttcgagaccaacgtcttcaaaagcatcccaggggcgacggtgtcggtggagtgcaggcactactgggcggggagggagagcctgaaggcggaggcgacgaccgacgagaaggggt

SEQ ID NO: 22861 - DNA, 196 bp, Oryza sativa
  Clone ID: uC-osflM202067h09b1
ttctctatccctcctcccctcgcaaacgcaaccttctgtctccttttagggagaagggaaaaggggtttcgatttctccgcgatttccccgcggattcctccccccaccggcctgatcgagctcgcgcgcggcccccccggattcggttcatccctctcacttgcccccgcctgagaagcatggacaaggatcacc

SEQ ID NO: 22862 - DNA, 513 bp, Oryza sativa
  Clone ID: uC-osflM202067h10b1
tttctataacacttttcagcctaatgggcaggctccgatttcgagcaccaataagtcactaaaacctgcagtaagagccaacggcatagatgtggctactttctcaactcctaggcgattagagactgatgagatcccttttgtcgtgaatgattacagggttgctgctagaaatgcaattgaagcaggatttgatggtgttgaaatccatggagctcatggttatttgatcgatcagtttctaaaagaccaagtcaatgatcgttctgacaaatatggtgggagcttagagaatcgctgccggtttgcgctagaagtggtccaagccgtaactgatgaaattggagctgacatggttgggataaggctgtcaccctttgccagctattcagaggcagcagactcaaacccagaagctctaggcctatacatggcaaatgcactaaacaagtttggtattctctattggcacaaggcggagccacggatggtaaagcttggtgaaaagtttga

SEQ ID NO: 22863 - DNA, 468 bp, Oryza sativa
  Clone ID: uC-osflM202067h11b1
caccgcctccaagaacagcaaacccagctggtcccccctcctctcctcgcatttcttcgacctgccattccacacccgcgcgcgcctcaaactctatgtgagggaagggaaacaatcgacttcccagctgagaaaccaagaagcagcagcagcagccatgcgtccgtccttcctcctcctcctcgtcgtgtttgccggcgtcttggccggcggggcgcgcgcggggccgccgctggcgggcgagaatctgccggggcagctgttgccgggcgagaagccgccggggcagccgttgccggggcagccgttgccggggcaaccgttgccagggcaatcgttgccggggcagccgttgccggggcagccgctgccagggcaatcgttgccggggcagcctttggtgggcgagaagccgccggggcaaccgttgccggggcagccgttgccagggcaatccgtgccggggca

SEQ ID NO: 22864 - DNA, 428 bp, Oryza sativa
  Clone ID: uC-osflM202067h12b1
tgccttctccagccacacgagcctagttcaggttgagacaatggtgtccaccgcctctttcatgctcgccgtcttgctggcggcggccgtcgcggcggcgccggcgagggcggtgcgatgcccgccgagcgacaagcaggcgctgatgagagtgaagcaggcgctgggaaacccggcgacgctgtcgacgtggtccctggcgtccgcggactgctgcgagtgggaccacgtccggtgcgacgaggccgggcgcgtgaacaacgtcttcatcgacggcgccaacgacgtccgcgggcagatcccgtccgccgtggccgggctgactgcgctcatgtcgctgtcgctgttcccgctcccgggcctcttcgggcccatcccggcgtgcctcaccggtgctctccaaacttccaggttcttaacattttgcc

SEQ ID NO: 22865 - DNA, 150 bp, Oryza sativa
  Clone ID: uC-osflM202068a01b1
tttatatacgccaacgatgcggcgcgaaggtggagggattgattgaacaagacggtggtggaaggcacgcgcatggcggcagtatggccagccgcggacctgagggagctggctgtggccacggtcgccggcgtcgtgctggaccacccg

SEQ ID NO: 22866 - DNA, 374 bp, Oryza sativa
  Clone ID: uC-osflM202068a04b1
gagtgatacagggcttctgcaactggccactggggggataggttcctgacaccgccgctgacgattcgtgatgctactggtgaaaagacattattcacaagtagactaaaggttggagaatttattaagacatgagtttcagatatggatccgaacacattcttttctatgtttatttggaagatccctgctaaaggacactgtattcaaagaggaggtggacaaaagtagaaggaatttttgtcttatgcaagagcagactgaccattttggccctgcaaggacaggaataacttgtgtaaacttgagagagagggaatcattgaatcatctactgcacaagattgtgacctctgctgcaaaaagtctgattt

SEQ ID NO: 22867 - DNA, 357 bp, Oryza sativa
  Clone ID: uC-osflM202068a05b1
gcctgttgcaaggcgaggtgcacaggagggggtttttctaagcgttgggcgaaaccacaaacactggtgtgtgctactttactgaagtcacattttcttaccacgaagtcttaaaggtgagccaccctccaggctgccgtccccaagccggtgactgtatccatggttgtgcctgctggtgcctacgacaatgatcttgtaaagaccgcgaaatccattgcatcaccaggaagggggatccttgccatggatgagtcgaacgcaaccttgggtaataggcttgcgtcaattgggctatacaacaccgatgccaagcgccatgctttacctgaccctgcttgtcacctcacctgactt

SEQ ID NO: 22868 - DNA, 272 bp, Oryza sativa
  unsure (1)..(272): unsure at all n locations
  Clone ID: uC-osflM202068a08b1
tcgctgacgcgtgggtttcccccctctcctcctcagccctatttcaccaccacctccaccgctgccgcggcgagaattcgatcggttcttggcagccgtagtgcagttttgtgcagttttcttctctcttgttgttgaggatgaagtttgggaagagcctgagtagccagatcgtggagacgctcccggagtggcgggacaagttcttgtcgtacaaggatctcaagaagcggctcaagctgattggtgggggtggggtggggngaggtcac

SEQ ID NO: 22869 - DNA, 534 bp, Oryza sativa
  Clone ID: uC-osflM202068a09b1
tttgttcgaagcttgacgacgagcagtggctggcctgctggatcctctactccttcatcaccctcgtggagatgcttctcgagtccctcatctactggataccgatctggtacgagctgaagctgctgttcatcgcgtggctggcgctgcccaacttcaggggagccgcgttcatctacaacaggttcgtcagggagcagctcaggaagcatggcctcgccggcgccggcgccggcgccgccgccagcgtcggcaagaaggacaagtcgtcgccgtcgtcgtcacccaaggacaaggagaagaccaagagcaagttcctctccttcgtcactcccaagaaggatcatgaagcttactgagccaagaagtgctgatcagtcggatccctgaagatagttttttagtgtgtgtactgttccatttgtgtttgtccctcttcctctccttcagaagaggcagctagctagcttcatgtttggctggtctttttggccatctgtgcatgtctgtaaactttattggagtgaggggaaa

SEQ ID NO: 22870 - DNA, 386 bp, Oryza sativa
  Clone ID: uC-osflM202068a11b1
tcgtgataattcgaagcaaaaaaaggagaacaaaggggatggttaaaaagaataggtaaacaaaccctagccgcaccgatcgaagccagtgagacgccgccgacggctatgcgtgaggcgaacgtcggtgaccacgatcgccgccgccggcgcacccgcatccagtgaaaccctgcactgtcgtctcgttcggttgtgaggagatgagggcggcggcggcggctgcggggcaaatcgatccgtcccctggggcgccggctaaatccctgggtgaagaggctgttcgagaggcagctgctgcgggtgtcgcctgcggagaggctcccgactgtcgcggttgtcgacgagaaggatgagtccgcggactcgaacttcgtgtgcctgga

SEQ ID NO: 22871 - DNA, 564 bp, Oryza sativa
  unsure (1)..(564): unsure at all n locations
  Clone ID: uC-osflM202068b07b1
tctgtttggccaggcgagcatccaggatatggtgccgtgagtagtacagtttgtcagaatccgctagtacttgaaagttggttgaaggatttcaactcttcaaacaagggtgtctcccctaccttgtcagagatttctcagaaaatttttcaggttaccagcaatgaagcaagaattgctacatggcctgcacgttctgcttaccaagctgaggagcccacttccaagttgtcttcgaacaccgctgcctgtggttaccgaactgaagaagttgctccaaatgcgtccaaggttgttgaaggaaaaaaggaacctgccatgtttcgtctgtttggtgtggatttgatgaaatgtaccagcatatctactaccactgatgacaagtcaagtgtgggagcaggagaagcttcagccaaaggtactggttctcacgaagactctggtcagctgtcagcattctcaaaagtgacataagagcatattgctgcngatgaaagcccccaagagatccaaagtcatcagaattacaccgctagaactcgcataaaggtcaaatgcatggaa

SEQ ID NO: 22872 - DNA, 280 bp, Oryza sativa
  Clone ID: uC-osflM202068b09b1
ctaaaagaaaaggagagaagaaattgagaattttttttcttggatagtgtttaatgtgttgttgtgaatgatgatggcataggggttgttttgggatgaggggtggtaatagctggatctctctttcttggcctctgagctgcacttcacggcggttcgctccaaccccctatgtcatcctgcctcctccccactcctcttcttctcctgtgacggcagatatgtccgatttctgttcttcctgtcggtttgctctcccgatgctttgctcaccattgcc

SEQ ID NO: 22873 - DNA, 490 bp, Oryza sativa
  Clone ID: uC-osflM202068b10b1
tcgtttcttcgtctctctctctcaacttccaccaccgcatcggggattcctcctcccctcacctcatcgccatgttccgaaccttctcgaagcttcgggaggcggcggcgccactcaccgccgcggcggtgcggaggtgctgctccggaggcggcggcgggcggatccgcgcggaggccaattgcccgcgctgcgcggcccacatgtcggtccaattctccctccagccactctcgacgcccccgccggccgccgcggctggtggcggcggcggagatgggtcgcagagccatcaccatgacggagcgagcgtgtgccccgcgtgcagcgcggcgttcctgttccgagcgcaccggatcgagcccctgcgcggcgcgttcctcgagatccctcctggcgtcgggggcgaggacgaagacgccgctagggaggggttcgccgatcggatcaggaagatgatatcggagcgcccgcccgacgattttccgat

SEQ ID NO: 22874 - DNA, 392 bp, Oryza sativa
  Clone ID: uC-osflM202068b12b1
ttgttttttttttttttttggaacccataagcaaaaaggacattaagttaatcgtctgaccttctacagatttactgttacacaatcgatcaccaggaggcctccctcgctcgctttctttctactgttacactctgctcgcgttacaactaacgggttgtttggctgaggtctcaccctttgctattaagaagaagatgaacacaaaggctctagcagctacataaatttaatcaaccatgggcaattctcaaaacacatgatagttctatgttgtatgcacttgattgtcctatgcttacccaagggggtgtcagtaataattctccagcaatcccaactgctatgaggcaccattattgttgccttctgttgctgctgctggtggtggt

SEQ ID NO: 22875 - DNA, 506 bp, Oryza sativa
  Clone ID: uC-osflM202068c01b1
tttctccctccttcacttggtttcttgttgtgcaactctcgtcgtctcgttcatccccgggctggcatcgcaggagctggcgtctcgacaggatcagcagccgcagcagctgctgctgcaccaacaacaacgacaagaagaagaagacttggagtcggagcagcagcggaaccagtggttggtgatccggctgtacgaggccatcaacgcccgagaccacaccgccgcgcacgccctcctcgccccggacctcgagtggtggtaccatggcccacccgccagccaccacatgatgcgcctcctcaccggctgcgcctcgccctcctcttcctccttccgcttccgcccgctctccgtccacgccctcccggcctacgacgtcgtcatcgccgagggcatcaccggccgctaccacgacagctactgggtgcacgcttggaccgtgggacccggccacaatggggatagggtcatcacccacctccgcgagtacctcaacaccgatc

SEQ ID NO: 22876 - DNA, 533 bp, Oryza sativa
  unsure (1)..(533): unsure at all n locations
  Clone ID: uC-osflM202068c02b1
ttttctttcggcatctctcctgcgcgggcgaggcgtcctcctcgtcctcgtcgtcccctttctctgctcccgcgagatctcacccccgctgcggcgacgcggccatggcggggaggaactaccacggctacggcggcggcggcggcgggggcatgtccatggtggtggcgagcacgccggggcaggagctggccctcaccaactgcgcgtacgtctcctccgccgacatccgccgcttccccaacgccctcgccctcgtcggcgacgccttcgtcttcaccctgcgtgcccatgatgctgtttctgctggaagcatcgcattgaatgccattcagcgtcgccagacgaaggtttcagctggggattcaatcactgttagcagttttgcccctcccgatgatttcaaattggcattgctcacattagaactagagtataccaaggcaagaaccaaccgaaatgaggagctggatngctgtgtgcttgcccaacacttcgaaggagatttcttgatcaggtcatgacatctgggc

SEQ ID NO: 22877 - DNA, 484 bp, Oryza sativa
  Clone ID: uC-osflM202068c04b1
tgttacctctctctctgtgtctccgccgccgccgcctccgtcgctcgccgcatccgtcggaggcgagatgggcatcaagggtttgacgaagcttttggcggacaatgcgcccaaggcgatgaaggagcagaagttcgagagctacttcggccggcgcattgccgtcgacgccagcatgagcatctaccagttcctcattgtagttggaaggacggggatggaaaccctcacgaacgaggccggtgaagtcaccagtcatttgcaaggtatgttcaaccggacaataaggttgctggaggcaggaatcaagccagtatatgtttttgacggcaagcctcctgatctgaagaaacaagagctcgcaaaaaggtactcgaagagggaggatgccaccaaagaactaacagaggcagtagaggaaggagataaagacgcaattgaaaaattcagcaagagaactgtgaaggtcacgaagcagcacaat

SEQ ID NO: 22878 - DNA, 515 bp, Oryza sativa
  Clone ID: uC-osflM202068c05b1
gtgttattaaaatcatcatattccagcaaaaggcctccaggagatgatgcttgtggtacgagctcttctactgaagcagcatattatgctaagtttggatttgattttatagagaagagcaaccaaataggcccactgttccacaacatcgcgctgcagcaatacatcctgctttgcgcacaggtgctggatggagggttgagggataagcctgggaagaacagagatcactaccactcgtgctactgcctgagtggtctgtcagttagccagtacagcgccatggttgattctgatgcgtgccccttgccgcagcacgtgcttggtccttactcaaacttgctagagccgatccatccgctctacaatgttgtactagacaaataccatacggcctatgagttcttttcaagctagtgatacaactgtctaggacatgtatgatatgtatgagctctacaatgttgcgccttacaagttacaactgtctaagacatgtatgatatttcattctt

SEQ ID NO: 22879 - DNA, 505 bp, Oryza sativa
  Clone ID: uC-osflM202068c06b1
ttctttccccactcccactcgcctgaaaccctaggggggagctcccggcggatggacgagggaggcggcgctggtgctgcggctgccgccgccgggaacgcggcgggggcggcggtgcaccacaacgcgcggtccgcggaggacgtcttccgcgacttccgcgcgcgccgcgcgggcatcgtcaaggcgctcaccaccgatgtggagaagttctaccggcagtgcgaccccgagaaagagaacctgtgcctttatggattgcccaatgagacctgggacgtgacccttccagctgaggaagtaccttctgaacttccagaaccagcactgggcataaactttgctcgtgatggaatgatcgaaaaagattggttgtcgctggttgcagttcatagcgatgcatggctactgtctgtagcattttaccttggggctcgctttggatttgataaggaagccaggagacggctcttcaccatgattaatggtctttccactgtatatg

SEQ ID NO: 22880 - DNA, 509 bp, Oryza sativa
  Clone ID: uC-osflM202068c07b1
acgcgtgggtccagggcaacacgggaggcgacttgttgaggcggctccggtgactccgacggtcagaggcagcagagccagcgtcgctgttagcggatctggccccctagcagccagatcgggacgaagtggcgcctgccgcgctgcatcaggacgaggcgctggctggggcagtcttggctccggcggagaaggccgctggatggggcagccgcggctcgggcggaggcgacgttgatggcggcggggacgaggcagcgagcctgggcgccgctggatctggctctcccaggccggatccaacgcccgcagctgggccacgaaagaggccggctccggggcggcggcggcggcgatgaccacgagacggcggaggcagcgctgacggcgggagaggcatgggtctggttacgcacagcgccttcggctatggcttcccctatttcgacaccggctcccccagtccggatttggtctctcttgcgagggaggccggatcccctacggtg

SEQ ID NO: 22881 - DNA, 514 bp, Oryza sativa
  Clone ID: uC-osflM202068c08b1
tcgtccaccctctcgccgtcgcagatccgatccaggaagagctcgccgccgccgctgccatggcgctctccgtggagaagacctcgtcggggagggagtacaaggtgaaggacctctcccaggcggacttcggccgcctcgagatcgagctcgccgaggtcgagatgccggggctcatggcgtgccgcgccgagttcggcccctcccagccgttcaagggcgcccggatctccgggtccctccacatgaccatccagaccgccgtcctcatcgagaccctcaccgcccttggcgccgaggtccgctggtgctcctgcaacatcttctccacgcaggaccacgccgccgccgccatcgccagggactccgccgccgtgttcgcctggaagggggagaccctcgaggagtactggtggtgcaccgagcgctgcctcgactggggcgtcggcggcggccccgacctcatcgtcgacgacggcggcgacgccacgctgctcatccacgagggcgtcaa

SEQ ID NO: 22882 - DNA, 543 bp, Oryza sativa
  Clone ID: uC-osflM202068c09b1
tcgttcatctcctccgatcccttcctttcctgccatctagtagcaaagatgatctccccggacgcggctcgcaacgtcgtcggcatcatcggcaatgtcatctccttcggcctcttcctctcccccgtgccgacgttctggaggatctgcaagaggaaggacgtggagcagttcaaggcggacccgtacctggcgacgctgctcaactgcatgctatgggtgttctacggtatccccatcgtccacccgaacagcatcctcgtcgtcaccatcaacggcatcggtctcattgtcgagggcacctacctcttcatcttcttcctctactcccccaacaagaagcgcctgaggatgttggctgtgctgggcgtggagttggtgttcatgctggcggtgattctgggcgtgcttctgagcgcgcacacgcacaagaagcgttccatgatcgtcggcatcctctgcgtcttcttcggctccatcatgtacttctccccgctcaccatcatggggaaagtgataaagacgaagagcgtagagtacatg

SEQ ID NO: 22883 - DNA, 561 bp, Oryza sativa
  Clone ID: uC-osflM202068c10b1
tttttgacgcgtgggctccctcttccaccttcctcccgccggaacttgacgaaatctgggaagcgagccaaggaggagggggaggagaaccccgccgccaccgcccgatctccccgtgcggcgccgggcgggggggtgcggagcgggagcctcgaccgcgccgatccggacaggggccaccagattcgccccgcgcgtgtgccggcgccgagcgcccaggcggcgttagatcccgccgtccggcccccccaccctcccccgtggcatgcaaagggatcagaggccacggctatagagtgatacatatatcttgctgctgtgcttttggggcctccggtcctgcttagttagaggagatgcagaggaacggagtgatggaatgcagtgtatgccactccaaggtggtggcttcgagccccaagagtgtgtcgagggcatatgacaagcacccgagcaagatatcgttcaagtaccgcgcgcttaacttgcttcttgagtcacgggactgcattttggttgccttcagcctattctagtatttatgtccacgttgatgggaag

SEQ ID NO: 22884 - DNA, 468 bp, Oryza sativa
  Clone ID: uC-osflM202068c12b1
tttttcgcgccgcggaacgaggcgctcgagcgcgacctctacccggagtttcgccgcttcctcctcgagccccgcaacctccgctcgctgcagcggctcctcctcttccacgtcctccccgcccgcctccacgcctccgactcctcctcccccgacttcccctcctcccaccccaccctctccggcgagcgcgtcgacctctccgcctcgccgatgcgggtcggcgccgcggcggtcacgcggcccgacgcggtggtgcgccccgacggcgtcatccacgggatcgagcggctgctggtcccgcgctccgtgcaggaggatttcaaccgccgccgcagcctcgccgcgatctcggcggtgctcccgacgggggcgcccgaggtggatccgaggacgcaccgtctcaagaagcccgcgccgtccgttccccccggtgcgccgtcggtgctgtcgaactgggacgcgatg

SEQ ID NO: 22885 - DNA, 566 bp, Oryza sativa
  unsure (1)..(566): unsure at all n locations
  Clone ID: uC-osflM202068d01b1
ttttcattcaaccccctaaactttataataccgtttatataacccctaagatggttttgcatagtggggtttttatctaatttatatataagttggatgagtttgatcacatatcatactctttagagtaaaattttgacttaaatatttatttttctacttatgagctctcacaaacaagtacctacatgataatagtataatattactgaataagaataaattgatgagttgcaactgatgatatgcaaatgtgttatattacttatttaaaattgttcgtttaagcttccaaaatatacaaaaccatcatccaaaaccaccttagggggtgatatggatgatatggcaaagttcggggggttggataactgattttaaagtttagggtgctagacggattttcatctaaagtttatggatgtatttggactttntcctattatttatttattgtgtgtgttgattcgatcgatagtacatgaagatccattcgttgacacgtctcacctctattattactcttcctatcgntnttcataaaaagagaagatggtttgaatact

SEQ ID NO: 22886 - DNA, 563 bp, Oryza sativa
  Clone ID: uC-osflM202068d02b1
tttttgctttgatgaacagagactgattcagcattgcaatcgtcagtccagttggagttcttgaagttgcaagttttcttgatgcgctcgtaaacttgatccgacacaattgcatggctccaggcatactcagccaaaccttttgaatcatagtaatcatcggtgagagggttgcctacctgcaagcagattttttgactgttatgttcatgcaggaaccaattttatgagtttaggatggtttaaatggaagttaatcgtgttccaattgggtgttcctgtgagcattacaactgagaaactattgttcaaaatactccctccgattcaaattacttgtcgttttagttttgtcctaagtcgaatatacctaactttgaccatcaatttctgtaaattcatatagcttaagaacatgtgaattatatattatgaaagtatttcttttgttcaatctaaaaacataaatcttatgagtaaaagtttatggcgtaagttgtaaggaatgtttgacttaagacaaagcttaaatgacaagcaatatgaaaacggtgagagtaaac

SEQ ID NO: 22887 - DNA, 561 bp, Oryza sativa
  unsure (1)..(561): unsure at all n locations
  Clone ID: uC-osflM202068d03b1
ttggttaatcccattagtggcatgcagttcaatcttcccccaatcggacgaagggccttctccaaggccatgttgcttgacatgaatgacacaaacttcactgttgctgtcatcttacgtgaccagaaaggatataaggtaacgcgtaaaggaagcaacagctggtcatcagtggaatcaaagcatgatctagtggatatcttcaagcacaggagacagctttacaccgttgatatatatggcacagttcagttgtgggcagaaccgccccgttcatggccagatgaagatgccccgcaggtgaatgacccgtatcataacctcattcactatccgcatcaacatggaaagcttaactgtttggtggagtccccagctggtgatctaatgagggtgaagcggcaatcaaatgataagtttgtggtctggattctggacaaggggacattttcctgggagaaggttgataacatcggngactttgcgctgtttgtcagctactacagcntcgtctgttaccgggcgaagatcatctcaacctgaagtcgaattgtgtctact

SEQ ID NO: 22888 - DNA, 525 bp, Oryza sativa
  Clone ID: uC-osflM202068d04b1
ttgttcagaaaaatgccacacgcacaagaaaaacgccaaatatttacatcggctctccctctccttctctctctctctttctctagtatccttgtgttcctcgtcgtcggcgacgaggacaactgcggcggcggcggcggcggcggcggcgatggccgtgtaattccttctagggccgtctcaaatcgtccctcggacctactcgattttcgtggctttcgcgaccagcctctcgtgtcgcggtgatgagagagaggggcgaaatggaaggccgagagggctctaggttggacaattcgctcacgaggaagcgccggagcagcagcacggcgaggcggcggccgaggccggagagcaatcatgtcgtggatgtggagcagcagcagcagcagcagcagcagcagcagcgagacggctactcctcgtcttcttcgtcggcgattggctcggatgaggatgccaactccgatggggaggagcaccagaggcgagagatccatcttgatgccccttctcccgatcgtg

SEQ ID NO: 22889 - DNA, 517 bp, Oryza sativa
  unsure (1)..(517): unsure at all n locations
  Clone ID: uC-osflM202068d06b1
atttcacccatgcataccgcgtagtgtgcgaacactgacaggacaaacgccaccgacgggggttgagatcagtaccaccttatcgggctgcctttgtctgagctcatgctctagcctcgcatacaggcgttaacataatacctactgtcctactactcagtaaggcggctgaccaactactcatatggaacagactgggggaccaaccaacagcaacgccaacaccatgtagcnggtgtacagcaacaccatcttatggcactacaccaacaccatcttacggcactacaccaacaccatattacggtacgacaccaagcaccctcagcacacctgatgtccctgaagttccgacaaagcatgatttctgtggatcctgccattactggaagaaccattcagatgttatcatctcagctattgggtcccttggcgacattggcaagacactcggtactgcttgcagtttgatcactggccagagctagaaaaatctcatgatgcactttcaaacact

SEQ ID NO: 22890 - DNA, 547 bp, Oryza sativa
  unsure (1)..(547): unsure at all n locations
  Clone ID: uC-osflM202068d07b1
tcttttcagttagcagagaaagagataggatcaacgaatgcatgagaatgctgactcctgatccaaatgctgcggcaagctcttcagattttacttgtcaatctgctcctagagttcctgctggttctgaccttgttttggacacacctcccgggtttcctcatgatgaccctccaggcctcacaaaagcccattgtctcctccatacaggagaaaccactgagccttacatagactcatctccaagccttaatttgggcgtacctccagggctttctcttgatatccctcctggctttatgaaagctcattatctccctcatacaggagaaactactgagtctcacataaacccttctcacagtcacagcctttcttgggacacccctctaggattttctcttgatgttcctccgggatttactaaagcccatcgtctacccatagtatctactgctggatctgaaactgntgtttctgaaaagaaacccctcattaagttcactctgaatgttccaagggttgcacaaacagaagccattcctgg

SEQ ID NO: 22891 - DNA, 563 bp, Oryza sativa
  unsure (1)..(563): unsure at all n locations
  Clone ID: uC-osflM202068d09b1
tcgggtcaacacacatcaatcaattaaccatcggcgagcagaagaagagcagaggctcagctagcaggcgagagagatcagcgagcaggatggctggggctgcagggtcgtcgtggtcctctctgctcctcgcagcggtggcggtggcgctcgccgtcgccgcagcgccgtcgctcgccggcgacccggactacctccaggacatctgcgtcgccgacctcaactccgaggtgaaggtgaacgggttcccgtgcaaggcgaacgcgacggcggacgacttcttctccggcgtgctcgccagccccggcgccgccgccaacaccaccaccggcgccgtggtcaccggcgccaacgtcgagaaggtcccgggcctcaacacctggggcgtctccctcgcccgcatcgactacgcccccggcggnctcaacccgtcgnacacccacccgcgcgccaccgaggtcgtcttcgtcctctacggcgagctcgacgtcggcttcgtcaccaccgncaacangctcctctcccgcaccatctnccagggcgacgtcttcgtcttcccccgc

SEQ ID NO: 22892 - DNA, 512 bp, Oryza sativa
  Clone ID: uC-osflM202068d10b1
tcgtgttgaacatggcactgatggggaattatgcatacctgatggactagcacagttcagaatgaacttggaggagcttcttgttgatatttgcttgcttctaggtgctcctgcatatattaataagcttttttctggtggatggggtttggctagccaatcaattccttggaaagaggtagaagttcgaatgtatgcacttagcatggtcgctgacacaattttacaagatggaagccccttcgatttttcaatcataatgcattttgtgaacattctgtccagcagagcacacagcgaacttaatggatgcctatccttggtatacaaatcatttggtgatgtcattggttcttactcaaagttgttggcatcctctcaaagtaatattaaaccattactcctgttctgtgcttcagggatttcaaaatccatatcatcaaatgcttgctcattagctttgcgtaaactttgtgaggatggttctttattcatgaacgagcctcagaatc

SEQ ID NO: 22893 - DNA, 483 bp, Oryza sativa
  Clone ID: uC-osflM202068d12b1
tcgtttctcccccttgttcgatgcctccggatccctaacgcttgcttctcccatgccactccactcccacctcctccttctcctgctggctctctccacgtcggtggttgctggctctgtctcctcctccccctcggtttgtgccggcggcggtggcggtggcggcgacgcggccatcgtcgcggcggcgttccggggcgtgcgcaacttccagctgcctccatgcggggctgtgcgggagctgcggctcccgtcgcggaacctcacgggcgccgtggcgtgggcggcgctcgccaacctgtcgggcctcgccgtgctcgacctgtccgggaacgcgctccagggcgccatccccggggggttctggcgcgcgccgtcgctccggcacgtcgatgtctccgggaaccagctgggtggggctctccgggtggtggaggctagcccgcggctcgagtcgctcaacgtgtcctgcaaccggttcac

SEQ ID NO: 22894 - DNA, 291 bp, Oryza sativa
  Clone ID: uC-osflM202068e02b1
gtgtgcgcctccgcgagaccagacaccaacctgtctctctctctctcccatgcttcccctcctcctcctccgcctcgccgccgccgccacacgccgcacggtctctctccccgagattcgtgggcggcaggaagtgcatggggagaaaggatgccagagttgcgtagtggagtccggcaagctcggttgaaggcaaagaaggttgaggaccttgcagcacaggacccagctgagaacttggtagtggtggcaccgacggtggcaggaagacgtggtagaggaaggggtgga

SEQ ID NO: 22895 - DNA, 504 bp, Oryza sativa
  Clone ID: uC-osflM202068e03b1
ctaaacctcgcccttcgtctccgcctccgtcgcctccatctcgccgcgatccctctccccggggccagtgccggggtccgcgaggaagctggtgcaggggctgaaggagatcgtgaaccggcccgacgcggagatctacgcggcgctgcgggactgcggcatggaccccgacgaggcggtcagccgcctcctctcccaagatacgtttcaagaggtaaagagcaagcgcgacaagaaaaaggaggttaataaggaggcgcttgagccaaaatctagaggagcagttaactccaatagtcgagccactagagctggtgcagaccgtagtggacgaagcagttcagttcagtctggatcaagtggtgctgataacatgtcctcaaggtcatcaatattgggacctggcgtgctagcaactaattctacacagaagcaaactgttccaagttctactgtaaacagggatgttctttacgatggatcttttgagcaatgcaccatcgt

SEQ ID NO: 22896 - DNA, 530 bp, Oryza sativa
  Clone ID: uC-osflM202068e04b1
atcagctctagctagctacaggcatcagtggtcagtagagtgatcagttgcaactagctagctagttagattatatcttcagtgatggctccggcctgcgtctccgacgagcacgccgtcgcggtgtcggcggagcggctgtggaaggcgttcatggacgcgtccactttgcccaaggcctgcgccggcttggtcgacgacattgcggtcgaggggaacggtggtccgggcaccatctacaccatgaagcttaaccctgccgcgggtgtgggaagcacatacaagacccgggtggcggtgtgcgacgccgcaagtcatgtcctaaagtcggatgtgctcgaggcagaaagcaaggtggggaagctcaagtcacactcgacggagacgaagcttgaggccaccggcgatggctcctgtgtggccaagctcaaggtggagtacgagctcgaggacggcagcttactgtcgccggagaaggagaaggacatcgtggattgctactatggcatgctcaagatgatcgaggacta

SEQ ID NO: 22897 - DNA, 541 bp, Oryza sativa
  Clone ID: uC-osflM202068e05b1
ttcatctctgggaagatacctccggccatctctggaatgaggatactcaactatctcaacctgtcccggaaccatcttgatggagagatacctccatccattgcaacaatgcagagcttgaccgcggttgacttctcatataacaacttgtctgggcttgtgccaggaactggtcaattcagctacttcaatgccacatcttttgttggtaacccaggcttgtgtggaccgtacctcggaccatgccgccctggtgttgctggcaccgaccatggtggtcatggtcatggcgggctatccaatggtgtcaaactgctcattgtcctaggcttgttggcctgctccattgcatttgctgtcggggcgattctgaaggctcggtcgttgaagaaagccagtgaggcacgtgtgtggaaactcacagcattccagcgcctcgacttcacctgtgatgatgtgcttgactgcttgaggaagaaaacgttatcggcaaggtggtgctggaattgtgtacaagggggctatgcctaacgagatcatg

SEQ ID NO: 22898 - DNA, 480 bp, Oryza sativa
  unsure (1)..(480): unsure at all n locations
  Clone ID: uC-osflM202068e06b1
ttgttagtacgtgcagttgccgcctctagccacaccctcttgcagcctccacagaaagccatagtagcatcacaacttcacaaggtagaagaagaggagaagggagatcggcaaatatggctaagggtcacgtcctcgtgctgccgatgccatgccagggccacgtcatcccgttcatggagctctcccaccgcctcgccgacgagggcttcgaggtcaccttcgtcaacacggaggtggaccacgcgctggtggtggccgcgctgccgccgggcggcgccgcggagctccggcagcggcggatccacctcgccgccatccccgacggcctcgccggcgacgaggaccgcaaggacctcaacaagctcatcgacgcctactcgcgccacatgccgggacacctggagcggctcatcggngagatcgaggccggcgccggcggcgggaggcccaaggtgcggtggctcgtcggcgacgtga

SEQ ID NO: 22899 - DNA, 492 bp, Oryza sativa
  unsure (1)..(492): unsure at all n locations
  Clone ID: uC-osflM202068e07b1
tcgcgtgtactggagaagcgaatggggaagcgtcagcagcagcggcggctcgtccgcttcgccgtcgccgccgccgtcgttgtcgcggcggccctcatcctgaccgcttcggccaagaagtccggagatgtcacggagcttcagatcggtgtgaagtacaagccagagtcatgcaccctgcaagctcacaaaggagacaaaatcaaagtgcattatcgtgggtcactcactgatggatcagtgtttgattctagctatgacagaggtgacccctttgaatttactcttggaaacggccaagtgataaaaggttgggaccaagggttactaggtatgtgtgtcggtgaaaagaggaagctaaagatacctgcaaagatgggttatgggagnaggaggctccccaccgaagattacaggtggagcaacactaatctttgacacggagcttatcgccgtcaatggaaagacaaccggtggtgctagcaatagtga

SEQ ID NO: 22900 - DNA, 555 bp, Oryza sativa
  Clone ID: uC-osflM202068e08b1
tttttagacttgctcgcaaagagtgttgagattgcacgttaagcgcgtgacatgtttctgaaggaacattcagatcgtcccatacaacatcctatcctggttgcagcttccattgcaagttatggggcctatcttgctgacggctctgagtacagtggggattatggcgaagctggcacgttagaattcctgaaagattttcataagcgaaggctggaggttcttgcggaagcaggtcctgatttgatcgcctttgaaacaattcccaacaaattggaagctcaggcttacgttgaacttcttgacgaatgtaacatcagtatccctgcatggatctcatttaattcaaaagatggagttcacattgtgagtggagactcgctaattgaatgtgctactattgctaatgggtgctcgaaggttggtgcagttggaataaattgcacacctccaagagttatccatggcctgatactctccattcgaaaggtcacagataagccaattctgatatatcccaacagcggagaaagatatgatgctgagaaaaggagt

SEQ ID NO: 22901 - DNA, 521 bp, Oryza sativa
  Clone ID: uC-osflM202068e09b1
gagaagtgatattcgttggttgtcatggttgcctggaagggaattacaacatttgattttaagctttaatagcttaggcagcgtttgggctcactaaagtgcttcctttttcttatcttttagacttccactatgaattatttaacacccataaaagaactttccttgcatgattttctttattatgaaatcaacatttatattgacaaacctgcttagcttcagttggacaatgatacgctgcagtaaggcatctcattgaaggacattggtggattctgcactgctgttctattacttaacttcagtagagaatatatttgcccttttgcttgacttcatatggtgttatatttctcattttagatggacattcgtctaatttatctgtaccgtgatctttttctgaaaatattctctgcaaagagaggtcatctgaagcattgttaaaaacagtaagtagcaaaaaaaatcatggtacaggcgtcaatggtacgcagtagtgaaaacatagttaggag

SEQ ID NO: 22902 - DNA, 460 bp, Oryza sativa
  Clone ID: uC-osflM202068e10b1
tttttcgaattcccaagcaacccccccacacccagctgagtagctgacgcagcaccagcagtcgcggggaaagggacacgtctcgccgccccagcttcccgcctccctcccatcccgccgccgcggacgcgtccaagccacagcaacagcaaccactccgacgaacacctcgcctgcgcgatggtggcggcggcgctggacgcgatggcggggacgaggtgggggaggtggctggggctcgtgacggcggtgtgggtgcagtgcatctccggcaacaactacaccttctccaactactcccactccatcaagacgctcatgggcctcacccagctgcagctcaacggcctctccgtcgccaaggacgtcggcaaggcgttcggtcttctcggcggcctcgtcttcgaccgcgttcccacctggcttttcctcgccgtcggctccctcgagggccttctcg

SEQ ID NO: 22903 - DNA, 528 bp, Oryza sativa
  Clone ID: uC-osflM202068e11b1
tctttatgggaggcaccatcataattatatgatccagcattatgaagtaaccatcaactgatctaagctgggagagtactgtaagctgtggcaccggggatggccaacctcattggctactgctgcgacagcgacgagcggcttctcatcgccgagttcatgcccaacgacaccctcgccaagcacctcttccactgagtttcctccctccctccagtcccctgcaatttaactccgggtctctatattcccctcccatttgatgatcctaccaacgattggatccttttggtcataatggatgttgctgtgcttcgtgtgctacctcttcagttctgtagttacgcagccaatggtgcagcgagcttggatttttatgatgaaatggctagcttcggtagctgatttagaattttgcagcggcaaaataaaaagtgatagctgaaggaaaatcttggattcatggtagtattcatgcacatcaactggcattagacaatctcacatttttgctgcttatttacacac

SEQ ID NO: 22904 - DNA, 442 bp, Oryza sativa
  Clone ID: uC-osflM202068e12b1
tcggtggctcctcttcttcttcttcttcttcttcttcttcttcttcgccgtcgccgtcgtcttgttctcctccgtctccgtcgcccagatacctgggttccagagcatcgactgcgggggctccggcaactacaccgacgaggtcgggctggagtggacgggcgacgaggcgtacgtgggcgggggcgcaggcacgacggcgagcatctcgtccatctcggggcaggggcggcggccttacaggacggtgcggtatttcccagcggacgggcgcaagtactgctacagggtgagcgtgaaggccaggacgaggtacctggtgcgtgcgagcttcctgtacggcaacttcgacggcagcagggtgttcccggagttcgacctgtacgtgggcgcctcgcggtggtccaccatcgtcatctacgacgagtccaaggtggtgacg

SEQ ID NO: 22905 - DNA, 474 bp, Oryza sativa
  unsure (1)..(474): unsure at all n locations
  Clone ID: uC-osflM202068f01b1
accttccagctcgaagatttctgtctgaatcgatcggatcaagatcaaatcaaggagggaggaggttgagcaattcctgacagggacagatcgggaaagctctcacagctttttctttgtttttgtttgatttgttcctgcttttcgattggaaaattgggaggggaggaaggtgatagccattgaggtggtggcatttgctgtcaccacctttagctatcgccttcctcttcctcgtctcgctcgccccccggtctagcttctttctgcagggccggacggaaaaaacaaaacaaaagaaggcaccagccagccatggcgatggtgctggactccttcgtcacccggtgcacggcgtcgctggaggacttcgccgggcaagaggcgtgccggcgccctcggncatcgngacgacgtgcggtgccttctggccacgctccggcgcgttcaggccgtcgtcttccaccaggagcg

SEQ ID NO: 22906 - DNA, 544 bp, Oryza sativa
  Clone ID: uC-osflM202068f03b1
ttagatcgcgagggccgcccttttttttttttttttgatagacagtggctttttgatcccatatatccaaaattattacaaaattttggaatttgtgaagccaagcagtttggatgttaaaagcaaaacagaacttaaatgtgaatcgcctttgtgaaggtttgcaggcaggcctccttcaaggcttcgctcacggtgggatgagcgtggcatgtacgagctatgtcctcacttgatgctccatactgcaaagcaaggacagcctcatgtattatctctccagcaccgggagccatgatatgcacgcccagaatcttgtcagtttccttctcagccaccaccttcaccaagccctcagcatcgtcaatggcctttgcacggctgtttgccaacagcggaaatttgccaacacggtagggaattcctaaagctttcacctgctcttcagtctttccaacagacgcaacctctggatgtgtatagaccacaccaggcactgtgtcatagtcgacgtgcccctccttgccagcaatgaactcaacac

SEQ ID NO: 22907 - DNA, 508 bp, Oryza sativa
  Clone ID: uC-osflM202068f04b1
tgtttgttgtagagagcacaacaacgtacgtacacagcagcaaagactgagactagctagcttagctgacatggctccaaggtgcgcgacgctggcggtggtggtggtgctggtggcggccgtggtggcgccgccgacggcggtgcgcgcggcgatctcgtgctcggcggtgtacaacacgctgatgccgtgcctgccgtacgtgcaggcggggggcacggtgcccagggcgtgctgcggcggcattcagagcctgctcgccgccgccaacaacacccccgaccgccgcaccatctgcggctgcctcaagaacgtcgccaacggcgcctccgggggcccctacatcacccgcgccgccgcgctccccttcaagtgcaacgtctccctcccttacaagatcagcaccagcgtcaactgcaacgcgataaactagggcggccggcctgatgcgtacgtgtgtgcccgcgccttccgtacgagaggagaataaaatgtcattagtaccatc

SEQ ID NO: 22908 - DNA, 486 bp, Oryza sativa
  Clone ID: uC-osflM202068f06b1
tggacgcgtgggattttttttcccaaatccatttattttcctctcttctctctctcgaatcgaatcgaatcgcctcgcctcctttgttgaattgaatccaagctcgattcgccgccgccgcacgccgccatgggcaactgctgcggcacgccggcgacggcggaggagggcgggaagaggaggaggagggggaagcagaagaaggcgaaccccttcaccgtcgcgtacaaccgcgcgccgtcgtcggcgggggcggcggcggggaggcccgggctgatggtgctgcgggacccgacggggcgggacctcggcgcgcggtacgagctcggcggcgagctggggcgcggcgagttcgggatcacgtacctgtgcacggaggcggagacgggggacaggtacgcgtgcaagtcgatatcgaagcggaagctgccgacgcccgtggacgtggaggacgtgcggcgcgaggtggagatcatgcgccacatg

SEQ ID NO: 22909 - DNA, 504 bp, Oryza sativa
  Clone ID: uC-osflM202068f07b1
tttttaatttacctcctccacctcctcctcctccccccgatcggatcggcccggctcctcctcctccgccgccgccaccgccgccgcagataggagaagatggccgcacttgataccttcctctttacctcggagtctgtgaacgagggccaccctgacaagctctgcgaccaagtctcagatgctgtgcttgatgcctgcctcgccgaggaccctgacagcaaggtcgcttgtgagacctgcaccaagacaaacatggtcatggtctttggtgagatcaccaccaaggctaacgttgactatgagaagattgtcagggagacatgccgtaacatcggttttgtgtcagctgatgtcggtctcgatgctgaccactgcaaggtgcttgtgaacatcgagcagcagtcccctgacattgcacagggtgtgcacggtcacttcaccaagcgccctgaggagattggtgctggtgacccaggacacatgtttggatatgcaactgat

SEQ ID NO: 22910 - DNA, 448 bp, Oryza sativa
  Clone ID: uC-osflM202068f09b1
tcgtttagcgcctacagcgcgcataacaccaggagctagatataatgatacggggaccgatcaccacatacatcgccttctccggcttcgcgaccagagagacgagggcgtgctggtgctgcagttcgcccaaggcggcaacctgcccgaacagctcgaccaactgcagcggcccgtgggtgacgcccagggcgacctggttcgggcaggccttcgggttcgggtgcaccgtcagatggccgcgcctgccggagcaagaacgacaacctgcctgcctacaacaggatgatctactgcgtgatcgacccaatcttgaaggacgagatgtgatgctgctcatgctactaggcgaagtgtgagcagtcggtgcagtgctcgaagcagccggcgacggtgctcatcacggacatgaactacgagtccatctcggcgtaccacttcgacttct

SEQ ID NO: 22911 - DNA, 410 bp, Oryza sativa
  Clone ID: uC-osflM202068f11b1
ttcttgtaacttaaatagatctggtagacatggggaggagctttctgtgacatctcgtatatatgctccttcttggagtggtggaatcggcgattgtagatctttggttatgaagaagaagatagcggttacggactaggggcatggcgcccgcctcctcagtaggcgaggccgtacagcatacgattaagtgaacggagccagagggaaaacctgcgttagagaaggagccgataaaggcttcttactcacgcgtaaagcactgggccaaaagaggatcataagccctgactcagaggtaatgtctgggtagcagcctgaggagaagccggaaacttactcggagtttaagaacggatcaatggcagaggctggattacaaccagagccaaaggcaagatccacaccac

SEQ ID NO: 22912 - DNA, 538 bp, Oryza sativa
  Clone ID: uC-osflM202068f12b1
tctgtttagagctcatcaccacgcctctcgcctcacatcataccaagtgtcctccttcctcctcatcctccccaaccactgcatccgggtcggcgtcctcctcctcctcctcctcctcgcagaatgcaacgggcaattcaagctatcgggtcacatggcagtctcctcaagtctgctgttctgcgacacatcagtgctccaaaaccatctattttacctgctgtatattcacgctccatgtcagtttcatctgctcaaatagaggagagtggatttgagactgccactgtggcagatattttgaagtctaaggggaagagtgctgatggatcttggctctggtgcactactgatgactctgtctatgatgctgtcaaatctatgacgcaacacaatgttggagctctggtggttgttaaacctggacaggataaatcaattgctggtattgttactgagagagattacctcatgaaaatcatagtgcagggacgatctttcaagtcaactaaagttggagacatcatgacctgagaga

SEQ ID NO: 22913 - DNA, 459 bp, Oryza sativa
  Clone ID: uC-osflM202068g01b1
cttctacctgtagcccgcttcagtccgacgaccatggccactcctttgctcgccgcgctcctcgccgccgcgctgctcgcctcgccggcggcgccggcggcgtcggccagcggaggcaccatcgtcttcaccaccctcggccgcagccgctacgagttcgacatcttctccctccccctcgcgccctccccccataaccccgccgccgacgccgagctccgcctcaccgatggcgtctccgtcaactacaacggcaacttcgcccccgactacgattccatgctcttcgtctccgagcgcaacggctccctcaacctctacctctgcccggatccctactcccgccgcgaggcgctcgaggcggcgtcgtcgtcagcgtcttcggcggcggcgacgatctcgccggtcctaccatgggagccaatcgcgctcaaggaccggtcgtcgctcacccccgac

SEQ ID NO: 22914 - DNA, 458 bp, Oryza sativa
  unsure (1)..(458): unsure at all n locations
  Clone ID: uC-osflM202068g06b1
cttttccccatccatcctctcctccgactccgagctcccttaaccgcagcgccggccgatccgccgccaccgccaccgccaccgccggcagctcgatcccccgcactcgggggggttttggaattggcgaatggtggcgaacgaggtggttgcggcggcggcggtggtggaagaaccggcgcccgcgtcggcgggggcggttgacccgatgaggctggcgtcgcggtggcggtcgccggcggagtggggggccgcggcggccgagatggaggcggagccggcgccgtccgagctcaacaccaccaacagctcgggcctcttcgccgtcgtctctaccgaccggatgtccgtcaggtacctcggcgtcaaccagcacgngcacgacgtcggcgtcgtgcaggccaaccgncccgccctcacgcgccgtgccgtctactacttcgagatgggcgtcaaga

SEQ ID NO: 22915 - DNA, 493 bp, Oryza sativa
  Clone ID: uC-osflM202068g07b1
tgttaagatgcaggagcactttgaggatttctatgaggatatctatgaggagctgagcaagtttggtgaggttgagaccctcaatgtctgtgataaccttgctgaccacatgataggcaatgtgtatgtccagttcagggaggaagaacaggcagtcgctgcgcataatgcccttcaaggtcgcttctactcagggcgcccaataattgttgagtattcccctgtgactgatttccgtgaggcgacctgtaggcagtttgaggagaacagctgcaaccgtgggggctactgtaattttatgcatgtaaagcagattggcagggagctcaggaggaagctttatggggggcgatccaggaggagccatgggagaagccgcagcccaagcccacgccacaggaggggcaatcgtgaccgtgatgatttccgccgtgaacgtgatggttatcgtggtggtggtgatggttaccgtggcggcggcggtggcggtggt

SEQ ID NO: 22916 - DNA, 522 bp, Oryza sativa
  Clone ID: uC-osflM202068g08b1
gtagagagagagagagagagagagagacgcaggtctgttcttcttctcctctctggaaatttctggatctcgcgagagatcgggaggacgatggtgggtgggcgcgcgctcctgccgctgcttctgctctccgcgctgctcgtccagatccgcgcctccgatccgctgttctatgagccgttcgacgagagcttcgaggggaggtgggttctctccgggaaggacgactacaaaggtgtatggaagcacgaaaagagtgatggacatgaagactatggcctgcttgttagtgagaaggccaagaaatatgccataatcaaggagcttgatgagcctgttactttgaaggatgggactgttgtcctgcagtttgaagtgaggcttcagaatggccttgagtgtggaggtgcatatcttaagtacattcgtcctcaggatgctgcatgggatgccaaggagtttgataatgagactccttacactattatgtttggtcctgacaaatgtggatcaactaacaag

SEQ ID NO: 22917 - DNA, 559 bp, Oryza sativa
  Clone ID: uC-osflM202068g11b1
tgttaaaaaccccctcgaaacccaaggcggcgggcgtggtggtggactggactgttttcacctcactccgcctcgtccccgccccaaaggccacgctcccctccctcccaccaacccaccaccagcgtcacccatggcggcccagcgactcgccgccctccacgccgccgcgccgtcggccttctcctccacctcctccgcctcgcatggccgccccgcggcgcgatccagcaccaccgctctcctcccggtggccctcccgcgcgcctccgccaccctccgcgccgcaccttctcggctcctcccccaggaggcgaaggcggcggggagcggcaggtcggtgatgtgcatggcgtcggcgtcggcgtcggcggcgtcggcggcggtggcgtcgggcgcggcggagctgaaggccgctcgcgaggacatcagggagctcctcaagacgacgcactgccaccccatcctggttcgtcttggatggcatgattcccgtacgtatgacaagaatattaaagagtggccacaacgaggtggagctaatggagcttgagattga

SEQ ID NO: 22918 - DNA, 327 bp, Oryza sativa
  Clone ID: uC-osflM202068h04b1
gatacttgacgccaccgccaggggaagaaagggggggtttattaacataagagcgcgggatgaaaacacccattcaatgtactacagcatgccacgggagcatcggaagaccatcgcggtacctgtcactaatacgggacaactccacacgcaatgagatgacctgtcaactagcgatactagcacacgcggcaaaatgtagcccgaggattttactgatccaagaacaagaagccgctcccctggaccgaaaggccatactattgctgaacaaaaggcgaaaataagggaatacggtatgagtccaaggtcaccacccaaaacgat

SEQ ID NO: 22919 - DNA, 539 bp, Oryza sativa
  Clone ID: uC-osflM202068h05b1
ttattttgcaagggacaatgaaatctgctactcattgttctcaccatcctgctgcaactggcactttcttcactgcaatgctcctggggctgaaattttgctcatgccagtctcagtctaacttgcagaaatgtaatatgggacttcagttattagaggacagggtataccgtgctgctttgggatggtttgcttatgcacctgagtggtatgaatctcaaaacaaaagttttgctcagagagaggcccaatccgtgtcaatatttgtccattgtctacaaaatgagcgccccagtggttctgctgattctgctccgaagtcacagggacgtgaaggtgaacccaatatgctggatcagaaccaccctgtctggggctcagtggataactatacaactgtacgggaaaagcgtaaacaattactttttatgctttctcagaatgaggcagacagacttgaagtgtgggcacaaccgataaatacaaaagatgcagcaacatttcgtggtaaaattagcttagataaaaggattgatcat

SEQ ID NO: 22920 - DNA, 461 bp, Oryza sativa
  Clone ID: uC-osflM202068h07b1
tttgtgacatgggagggtttgtcaagacccaggagagccatgtctacttcaagcgtgggcaagacaagctcaagagacggaggcagggcaagactgactacagggccaggattaggctcaccaaccaagataagaacaagtacaacacaccgaagtaccgctttgttgtgagatttacaaacaaagatatcacagctcaaattgtctatgctaccattgcgggtgatatcgtgatggctgctgcctactcccatgagctgcctcgttatggacttgaagttggtctcaccaactatgcggcagcttactgcactggcttgcttctggctcgccgtgtgctcacgctccgtggatcggaccaggagtacgagggcaatgattaggccactggggaggactacctatgtgaaccagctgatgaaaggaggcctttcccggctctttgggatgtggcctcatta

SEQ ID NO: 22921 - DNA, 558 bp, Oryza sativa
  unsure (1)..(558): unsure at all n locations
  Clone ID: uC-osflM202068h09b1
tttctgtcgcgtggggccgtttgtgtgcccgcaacacagacctcggagaaagctgcaccactctctagtcttctcagttccctggttgcaaagggattgatttcttcgccttctgcagattcaactgtagcgatcccacaacagccctgtaaatcagaactgaacacaccagatgacactgcttcagctccatctctgccttttgtccagccttcagttaaaaaggaaacatccaatcaaaactcatctgccccatctaaggtgctggtgcatcaacctgttgaaatcaagaaggaacctgcagaaatcaagatggtagaccttattggctttgacttcaagcctgagatgctccgcaagtaccatgcacatgtgatcagcaccctctttgatgaccaaagtcatcaatgtaatacatgtggtctaagattcagtcttgaagaagagctctctgtgcacactgcgtgccatggatcgaagcanagtgagactagaaagactggtatcgcacctgaaaaatgtaccctagcaaaataattgggtcgaagatcacatgag

SEQ ID NO: 22922 - DNA, 506 bp, Oryza sativa
  Clone ID: uC-osflM202068h10b1
ggtgtctctcactcgctctgtacgtacgttgccgtctgcccatggcgtcgcggtcgctgttcgcgttgctggtagtggcggcggcgatgtgtgcgtcggtggcgtcggcattgcggagcagggcggcgaccgacccgaacatggaggtgaagttcgacttcacgccgtttctgatccagtacaggagtggcagggtgcagaggctgatggggacgacggtggtggcgccgtcgctggacgtgcgcaccggggtggtgtccaaggacgtggtcgtcgaccggagcacggggctcgcggtgcggctgtaccggccgaagcaccggggcgggaggctcccggtgctcatctacttccacggcggcgcgttcgtcgtcgagtcggcgttcgacccggtgtaccacaactacctcaacgcgctcgcggccaaggccggcgcctcgcggtgtcggtgaactaccgtctggcccccgagcacccgctccccgcggtgtacgacgacgcgtgga

SEQ ID NO: 22923 - DNA, 557 bp, Oryza sativa
  Clone ID: uC-osflM202068h11b1
tttttcggcggcggcggtggtgatgccaatggcggtggattcagtggaggagcagaagaagggctgtaccggctctcctctgttggagaagagattgataatctgagtaacttgtccgatattgatgatcttgcgagcacttttgcaaagttgaaccgaaccattagtggaacacggaatcctggtgttattggtgacagacgatccatctcaagaggaagttctctaactgttgattgggctgaagatgtagaatttcctaactgggtagatcaagacattttagaggatgaggaatttcaggaaagtaaaagatggtggtcacagtcacacactctggtgcagcaaggggatgccaaaccattgagccgaacatcttcctatcctcagcaaccactgcagcaccgggcaagtgaacctatcattccaccaaaatctccttcatttacgtcctttccaccgccaggtggtagatcaccttatacttctcaaggccttacacgccatgggagcattccatcacttgggtgctgcctgcaaatgggttcttcaagcat

SEQ ID NO: 22924 - DNA, 537 bp, Oryza sativa
  Clone ID: uC-osflM202068h12b1
tcgttgaagtgaaacagcaaaaaaaatcaaacagaaagaaaaaatattccccatctgtgaaattcgcaaaaccctagcgcggcggcgatgtcgaacacgagggtgttcttcgacatgaccgtcggcggagctccggcggggcggatcgtgatggagctgtacgcgaaggacgtgccgcggacggcggagaacttccgcgcgctctgcaccggcgagaagggcgtgggcaagagcggcaagccgctgcactacaaggggagcaccttccaccgcgtgatcccggagttcatgtgccagggcggcgacttcacccgcggcaacggcacgggaggggaggtcgatctacggcgagaagttcgccgacgaggtgttcaagttcaagcacgacagccccggcatcctgtccatggcgaacgccgggcccaacactaacgggtcccagttcttcatctgcaccgtgccctgcagctggctggacgggaagcacgtcgtggtcggccgcgtcgtcgagggcatggacgtcgtcaaggccatcga

SEQ ID NO: 22925 - DNA, 583 bp, Oryza sativa
  Clone ID: uC-osflM202071a02b1
ttatttctctccgatctccaccaccaccaccaccacgcgggcgcgcgcaccaaccgggggggcttcgatgcgggcgatctcgtcggcagcgggggggatgctgcgggcgcggttgtttctgttttttcgtgtactgtttttttttttttttttaatatttttttatctttttatctcttttttttttttttttttttttttttttcttttattttttctactttttttttcctttttcttcttatttctttcttttcttatttattattattctatactcccatattttattcttttacttttttcattctatttctcttcttttcctatcttcttctttttactctttctctccattgttttttttctcctttcttccccaatttttctttttatattttgtcttctctttattctttctatatttttttaattttttatcctccttttctgtttcatttctcttttttttattctatctttttaatttttttttattttctatcttttttttttcttttctttttcatttttcatcatttatttttttctcttttttactcttcttttttcctcttttttt

SEQ ID NO: 22926 - DNA, 103 bp, Oryza sativa
  Clone ID: uC-osflM202071a04b1
ctacattgggcaggccggtatccaggtcgggaacgcgtgctgggagctctattgcctcgagcatggcatccagcctgatggacagatgcccggtgacaagacc

SEQ ID NO: 22927 - DNA, 73 bp, Oryza sativa
  Clone ID: uC-osflM202071a05b1
ttcaatagcaatggcccaggcagggatacgctcatagacatagttattgatcctctcctttctcacacttttt

SEQ ID NO: 22928 - DNA, 70 bp, Oryza sativa
  Clone ID: uC-osflM202071a07b1
tcgtccgcagccgcccgattcgaccaaatccgcactacgcgttccaattccgggccaatttgaccctacg

SEQ ID NO: 22929 - DNA, 130 bp, Oryza sativa
  Clone ID: uC-osflM202071a08b1
tcgttttaatccaatccatcttttcatacacgatcgggctctttaactcactacagaagctacataagccagcaaatatatttgttcgatcgatacacccaatgccgctccatgaacgacaataaaacta

SEQ ID NO: 22930 - DNA, 471 bp, Oryza sativa
  Clone ID: uC-osflM202071a10b1
tcgttataactcaaaaggttgagggtcagctatcaaagtctcagaaagagtttttgcttcgccagcagatgcgggctatcaaagaggaacttggcgataatgatgatgatgaggatgatgtagcggcattggaaaggaagatgcagaatgctggaatgcctgctaatatttggaagcatgctcaaagggagttaaggcgtctaagaaagatgcaacctcagcaacctggatatagcagctctcgaacctacttggaacttcttgctgaacttccttggcaaaaagtcagtgaggagagggagcttgaccttagagctgcaaaggagagtcttgaccgtgatcattatgggctgaccaaggttaagcaacggattattgaatatttggctgttcgtaagcttaagcctgatgccagaggtccaggcctgtgttttgtgggaccacctggtgttggaagacatcattagcatc

SEQ ID NO: 22931 - DNA, 93 bp, Oryza sativa
  Clone ID: uC-osflM202071a12b1
acgtttctctctctctctctctctcggagggggcgcttcggtcttatcgaccgccccttatctcctccaccatccgcctcaccggtgtacggc

SEQ ID NO: 22932 - DNA, 51 bp, Oryza sativa
  Clone ID: uC-osflM202071b02b1
aactttcatgtgtgatggccccaaggacaacggaggggcgtgttatttaca

SEQ ID NO: 22933 - DNA, 166 bp, Oryza sativa
  Clone ID: uC-osflM202071b07b1
tcttacgctccaaatccttattcgaatcccgttcacgccgccttcccccagccgaggcacgcgccgggacgcatccgtcgagcagcgaccatgttgtcgttttggggtgcggaggtgatgacctataagccctagacccacacccacatcctgcgccttggatggc

SEQ ID NO: 22934 - DNA, 166 bp, Oryza sativa
  Clone ID: uC-osflM202071b10b1
ttcttttaaaaacctcaccatcatcgacccacttgttcctagcgatctagaacgagagacttggcaatggcgggaagcggtgagctgaagctgctgggcgtttggagcagcccgtacgcgatcagggtccgcgttgtcctcaacctcaagtcgttgccgtacgagt

SEQ ID NO: 22935 - DNA, 483 bp, Oryza sativa
  Clone ID: uC-osflM202071b11b1
tatccgcttcgcttcctcccctctctaagccggggatgctaagccatggcgtccgtcaccgcccgcaccccggtcgcagccctccgctcgtcggcgtcgctcaagtctaccttcctagggcaatcctccacccgcctcgcccgcgcaccgactacgaggcgtaatgttcgggcggaggccaagggagagtggctccccggcctcccttctcccacctacctcaacggcagcttgccaggcgataacgggttcgacccgttgggtctggcggaggacccggagaacctgcggtggttcgtgcaggcggagctggtgaacgggcggcgggcgatgctgggggtggccgggatgctgctgcctgaggtgctgacgaagatcgggttgatcgacgcgccgcagtggtacgacgccggcaaggccacctacttcgcgttgtcgtcgaccgctgttcgtaatcgagtcatcctgttcactactggagat

SEQ ID NO: 22936 - DNA, 137 bp, Oryza sativa
  Clone ID: uC-osflM202071c01b1
tgcttactgatagcgctcccatggatccatgcttgtccttcctccgcctccgcgggcacgacgcaaggccgcctcgcgccgcccctggtcgaggatcgatctccccttcccctcctcggctcccgtattcttcgccc

SEQ ID NO: 22937 - DNA, 172 bp, Oryza sativa
  Clone ID: uC-osflM202071c04b1
tctaaagttggagccctttgaaatggattatactgttgcaaacactaccattgttgacaatgtctgcaatattgcggcttgatcaaaaacagagggatattggtgttaacaagaaaagagcgatgatttctgattcttgtatacttttaagatatatacggagtaatttcat

SEQ ID NO: 22938 - DNA, 80 bp, Oryza sativa
  Clone ID: uC-osflM202071c05b1
tcaatacctgcattatccagagtccctcatattggaagactaactaatcttcgtgagttgaatgggttgagcctcaccaa

SEQ ID NO: 22939 - DNA, 74 bp, Oryza sativa
  Clone ID: uC-osflM202071c08b1
tcgtgctcatatccacaattgatgcatcatgctttcctttctggaattctgaaatgtatttgtagatatcttaa

SEQ ID NO: 22940 - DNA, 426 bp, Oryza sativa
  Clone ID: uC-osflM202071c09b1
tcgtgatcgcgctcaccattatgcgggactgcctgacgtgcaaccccagcacgttccgcacgatgaacgagaggcttgtcggaggctgcgtggagaccaccacctgtgtcaagaggctctaccagatgcaggagaccgtcgccctcctgttccgctccatcaacagtaacgactccgtgaccaagagcaagtttgacaacctgtctgggtgccgccactgtatccctgaaggactcatgagggctaccgatgttatgaccgttggcaaggttgccgtgctctgcggctatggagatgatatcatgggctgcgctgctgctctcaagcgagctggggcccttgtcattgatactgagatggaccccatatgtgccctccatgctcttatggagggtttccaggttcttaccttggaggatgttgagt

SEQ ID NO: 22941 - DNA, 284 bp, Oryza sativa
  Clone ID: uC-osflM202071c12b1
tttggcggctggacgcctcctccaatcctactggacttgcgccaacaagccgactcgcgatctccatcgggcaagaagagcagagcagagcatgggaggggatcctgcagatctggaagaagttcttaatgtcagagccttaacctctctcaataccacaagaaacaacagctgtgatgtctggctccccaccccaaaaagtgtaggcgcacgcatcgtccatggacaccttcgagctctaccggaggtccaccattggcatgtgcctcactgagacactcgac

SEQ ID NO: 22942 - DNA, 78 bp, Oryza sativa
  Clone ID: uC-osflM202071d01b1
gtacttcgagaatttgttggtacaggaaggcctgtctggtgaactagagctggactcatcttcctagctaacaaggca

SEQ ID NO: 22943 - DNA, 70 bp, Oryza sativa
  Clone ID: uC-osflM202071d02b1
gacacttcaggaccctctctcaacatcctcatcaagctcatggcggacgaatccctcgttttcgccccct

SEQ ID NO: 22944 - DNA, 306 bp, Oryza sativa
  Clone ID: uC-osflM202071d08b1
tctataaaacaccactcgctcgctgacatatagtgagagagagagagagagagccagatagatttcgttcttttcgtttttttttcctcccccccccccctttctcccctcttcctctctctttctttctccccctccttctctctctttcttctcctccccctcctctctctcctttccctcttcttcttctcctccctctccctcctctctcttctctcttcttcctttcctctctcctcccttctcctcctcctcttccttcctttctttctctctctttccccccccctcctcttccttctc

SEQ ID NO: 22945 - DNA, 381 bp, Oryza sativa
  Clone ID: uC-osflM202071d09b1
tcgtagagagccagacctggattttcatgtgagctttgatagagataagttcactaacaatgatattatgcacccaccagtttcaacggtatcgcatgcccttgatgaaaatactagaggagattcaggttttccattggaagaatcgaacaccatgggatctgtgcaatttggcaactccacatatgaaacatctttagtgcattcccctgcagagcagtgtgaagaacctgcgtcatgtattgattcagttgactacatggaaattgacactgaagctggcgttaaagttgaaagatggagcaggcctgccttaggtgattcagttggagtgatggggaatggtacattggtcccggcattggagaatggcttggcggt

SEQ ID NO: 22946 - DNA, 495 bp, Oryza sativa
  Clone ID: uC-osflM202071d10b1
tcggcacatccttccttcctagcaccaactcgccacccaattaggccattaccttccaaaattctcccatccaatggcgctacgcctctccgtctcctcctcgcacgggccggcttcctcgccggccatctccacatgccgccccgccgcctgcgggcgcttccccgccttgctcggcggcggtgtggcttctcagaggaggagcctgacggtggtgtctggccctgagacaagggcggtgatccccgtgaggtcgagcggctcggacaccgccactgttggggccgaggcggaggcggtggccgtgaccgggcaggtgacggaggtgaacaaggataccttctggccaattgtcaagtcggcagggcccaaggtcgtcgtcctcgacatgtacacccaatggtgcgggcctttgcaggtgatggcaccgaaattccaggagatgtccgagaggaccaggacgttgtgttcctaaaactcgactgcaatcaagac

SEQ ID NO: 22947 - DNA, 308 bp, Oryza sativa
  Clone ID: uC-osflM202071d12b1
tcgttttgacgaagcctcctactacattagggatagccatccataacaccgacttgacggtaagcagctagggctatggatctagtattgcatctcaggctacatccatggtggtagaagagctggcacctaacttaaaagggatggcacataggaccggacgctctggtacgaacaactttctggacttccacatgcgtgtgttggcggtcaccattgttgttgcccataggaactgcccttgactggatggatctacgcactatgaagctgtggtgaaggcatggacgtatcaaacattctactat

SEQ ID NO: 22948 - DNA, 116 bp, Oryza sativa
  Clone ID: uC-osflM202071e01b1
tttgatgcgagcgactcccttactcgataaggattcttctagagtcagcaatcagaaactgtgatgagttccaggtcaccgggaaggacgctgagaaaatcctgtactggttgaac

SEQ ID NO: 22949 - DNA, 462 bp, Oryza sativa
  Clone ID: uC-osflM202071e05b1
ttggatattgttatgcttgtcatatcatggcacatgaaagctgccacaatgtgtgaatttactcgccaggaattcattggtggactgcagtcaattggggtggattcaattgaaaagctccgtgagaaattgccatctttacgggctgagataaaagatgaccataaattccgtgagatatacaactttgcttttgcttgggctagggaaaagggtcaaaaatctctcgcactggagactgctcttggaatgtggcagttgctctttgctgaaaggcactggccccttatcgaccattggtgccagtttttacaggtgaggcataataaagccatttctagggacacatggtctcaactgttggaatttgtcaagacgatcgatccacagttatccaactacgacgaagaaggtgcttggccctacctaatagatgaatttgtggagtacctaaccgagaat

SEQ ID NO: 22950 - DNA, 241 bp, Oryza sativa
  Clone ID: uC-osflM202071e07b1
tcgtgacgatccagaggttctggttttgtttctttcagaaatcagcaggacgcacataatgccataaatgaactgaatgggaagtggctcggtaactcgcaagtgtcgtgcaattgggcggcaaagggggctaatgcatgggaggagaaacctgactcatacttcacgggtctgatacgtttttgactaatgcgcacggctcattgttttatgggtgtcactgattgagatggtcgtggat

SEQ ID NO: 22951 - DNA, 205 bp, Oryza sativa
  Clone ID: uC-osflM202071e09b1
tcgtttcaaaccacgcgaccctcaaacttctctgtgtctcctcatcttcagggttggcggcggctccatcgaatgctggttgggggtgattggatcacgcgcgggctctgcagctgctgctggccctaatccgcttcgcgggttgtaatgagcttatgcggaaactaacgatcagaggtaagcgctgtccagcgagggatgctgg

SEQ ID NO: 22952 - DNA, 234 bp, Oryza sativa
  Clone ID: uC-osflM202071e11b1
tttagtggagataggctatgttaagtttctcagttgatattaggaataacccaagatgtctgcttatgtattattttagctcctttggcaattcactagttgataatttgctgtaacatgaccaataagcagactaattgtcaacatatattgtattcctgctattggttagaagttttcaggttccacgctattctctcctctctttcttttttatgtacctttttcttttca

SEQ ID NO: 22953 - DNA, 317 bp, Oryza sativa
  Clone ID: uC-osflM202071e12b1
tcgtgtcaaaccaaaaagcacctgcagtgcttcttaaaggaagggaccttgtgaacaggggacagtatgctaaagccacggctgttgcttatggcctatctggtgaccaaacacaggtataccagcctcttggtgatattgatctggcctttgatgaacacgtggaggacacaaattataaaagaaacctagatcttcgaacagcaactgttaatgtctcttacaccattggcgaggtggtctacttcctggctctcatatcatcctatctatacttagttttctcttatttttatactactttctattcctttttt

SEQ ID NO: 22954 - DNA, 458 bp, Oryza sativa
  Clone ID: uC-osflM202071f07b1
tcgttagttttccaagatagaagatgatgtacagaaaacatcatcacagaataaacatgcaaaaaagatggtgctagacaaaggagcacaggatgtcatggtgtctgattctacagcatcagattacgacagcatggatgcaggaagttcttggagcttatcagatggagatgatgttgaatccttttcggacgctgagattttcagatattgtttagatggtacacatgagcggtcaaagtttctcagagctgtagctacttgtgttaacgaagatgacttgataaaacttgcaaatcaggtctttttgtatagtggatgcacccatcacagaaacccaatattaatatcaaaagcactgctccatgaaggtgctgacatttggtgtttaatctcaaagaaccattgaacgtgcttctttggtcattgcagttcctgaaatgaaaagcaaatttttt

SEQ ID NO: 22955 - DNA, 393 bp, Oryza sativa
  Clone ID: uC-osflM202071f09b1
tgttctgttatcccttccaccgaaaccctagggatggcgtcgtcggtgtctcggtgcgttctgctggatccaggtgtgcccgactacgtgttctccatcggtccaacagaacaagggtgggcgtgtatcgacttgaagaagaagaggtaccaagggtgcgggaggtacggccccttgttggcggagagcgtgaagctctatgtgcgcctcgccgaggagcacccggctctttatcggttggccatctgcgccgacaagaatatcatccgcaacatcgtggtggaagaactcatgaagaagaaagctttcaaggccgccgaatcttcatcccccggcctcatggtgccggatctggcgattcgcgctcatcagttcgacaagatcgatgagatc

SEQ ID NO: 22956 - DNA, 487 bp, Oryza sativa
  Clone ID: uC-osflM202071f12b1
tcgttgccaagcgccatgtcgaccagagcaccaccattctcgacgtctccggcgttgggtacaagaacttcaacaaggccgccagggatctcatcggccgcctccagaaggtcgatggtgacaactacccagagactctgtgccggatgttcatcatcaacgccggtcaaggattcaggcttctctggaacaccgtcaagtccttcctcgatcccaagaccacagccaagatccatgtcctaggcaacaagtaccagagcaagctgctggaagtgattgatcccagcgaattgcctgagttccttggtggcacttgcacctgcgaaggcggcttgatgcgctccgacaaagggccatggaaagatcctgaaatcataaagatggtccaatgtggcatgggaagatgcggatttaatagctcgggtcaatactgaggctgatgagaagatgatcactgaggatgacatagtggcacttcccaagaagc

SEQ ID NO: 22957 - DNA, 61 bp, Oryza sativa
  Clone ID: uC-osflM202071g01b1
ccactttgcatcgcacgcgcaaggcgcagatccccatcctcgttggggaggatgctctttt

SEQ ID NO: 22958 - DNA, 267 bp, Oryza sativa
  Clone ID: uC-osflM202071g08b1
tcgtttaaaagaggagaaaaggagataaaaaaagaataaaaataaggcggtggttcgcgatatataaaatcgcgtttggagtggaccttttttatgcatctttctacctctctccctttatctgttacacattctctgtcgggctttgtctgtcctatctcttcctttctcttctctttctctctccttctcctttcttctcaccttttttctcttcttctttttcctccttccttcttctcctcccctttcctctctctttcctcc

SEQ ID NO: 22959 - DNA, 94 bp, Oryza sativa
  Clone ID: uC-osflM202071g09b1
tttcgtccattccttcttcgattcattcctgtctccaattggaggtcacaattgcagcttgcagctagctcaaatttccattttttgtttggtt

SEQ ID NO: 22960 - DNA, 434 bp, Oryza sativa
  Clone ID: uC-osflM202071g11b1
tcttccaaagttggagccccttgaaatggattatactgctgcaaacactaccattgttgacaatgtcttcaatattgcggtttgatctaaaacagatggttatttgtgttaacaaagaaaatgtgtagatgcaagaataatactcctagtcaattctttctaggagaatatatgattgttttaatatgctgtcaattacttactcattcattctttgaattatccattcatgctgttctttctgccactagtgcatatggattaatactctttgaattaatactctgttcattctttgaattaatagtcttatccattcatgctgctgtttccgccactagtgcatatggatttgatctcaatctattataacttttactataaatttactaccaaatggaaatttgctttgttcaactttgtttctcctttac

SEQ ID NO: 22961 - DNA, 327 bp, Oryza sativa
  Clone ID: uC-osflM202071g12b1
tcgttgatcaggccttgtcagtggcaagaacaacagcattgacaggagcatccaagatgcatacatccacgcaattcgccgcgccaagaacttcatctacatcgagaatcagtacttgcttggcagctcatttgcatggaaagccgatggcatcagaccagaagacattgaggcgttgcatctgattcccagagagatttctctgaagattgtgaacaagattgaagctggtgagcgttttgcagtctatgttgtgctgccaatgtggcctgaaggacctcctgctagtggatcagtgcaggcaatactggattggcagaggaggac

SEQ ID NO: 22962 - DNA, 84 bp, Oryza sativa
  Clone ID: uC-osflM202071h05b1
gtaatgcatggtccgagctgttgttcgagaatgtaatgtccacctcacagcgctcgattcaatatctgagcataaaccacacgc

SEQ ID NO: 22963 - DNA, 389 bp, Oryza sativa
  Clone ID: uC-osflM202071h12b1
tcgtgcaggatcaggctgctgctgagtctcataggagggctgctgcagccacagctgctgggaaattcaaagatgagattgttccggtgcctacaaagattgttgaccccaagactggagaggaaaagaaagttgtgatatcagctgatgatggaattaggccagggaccacagcatctggattggcaaagcttaaaccagttttccggaaggatggtaccacaactgcaggcaactctagtcaagtgagcgatggtgctggagctgttcttctcatgaggagggacgtagcgatgaagaagggacttcctattcttggtgttttcaggagctttgctgctgttggagtagatcctgctgttatgggtgttggtcctgcagtagcaata

SEQ ID NO: 22964 - DNA, 433 bp, Oryza sativa
  Clone ID: uC-osflM202075a02b1
cgccaaccttctctctcccgatctgcgccgccgccgcagccgccgccatcccaccgccggactccggcgaagcaggcccccccccggagccaccccacagcgcattccacctcccctcccctccttccttccccgtcgcgcgcgcgcgcgaagctggtctctaggaggggggcgactttagcctgcctctccccccacacccaatcctcgactcggatcaagctgaagtgtgctagatgatgaagaggaggtgcctcaagcagaccacgatattgtagcttatggttccttgatgagcagtgaaaatgctgctggctgtggaaggagggggctctttctcgtcgtcggcttcagggtacagccatggccttgcccttctgcttcttgggaggaaagatgaagagaagcctgtcaaggtatccccgtggaatca

SEQ ID NO: 22965 - DNA, 258 bp, Oryza sativa
  Clone ID: uC-osflM202075b03b1
cttctgtctcaagctggagaccagtgctctcggccttcgcaccaagagggtgagcacgtcgtcggtggccatccgcgcgcaggcgtcggcggcggtgtcgtccccgacggcgacgccggcgtcgccgtcgggcatgcagacgctgctcaagggcacggtggtcatgaccggctcgtcttccggtctcgtgcctctcgactgcgaaggcgctggcggagactgtcagttggcacgtcttgatggggtgccgcgactttc

SEQ ID NO: 22966 - DNA, 81 bp, Oryza sativa
  Clone ID: uC-osflM202075b07b1
agcgtttgctagcatcaagtggaattttatggctttatcggcatcaaacagggaatgaggacgctcatcttattccactat

SEQ ID NO: 22967 - DNA, 147 bp, Oryza sativa
  Clone ID: uC-osflM202075b09b1
tcggttacaacgtcaccgggcaggagggcacgctgtggtggctctcccatttttccttcctccgcgccaccgtctatggcgcgctcatcatcaaacctcgcggcggcgccaaggcctacccgttccccgcgcccgatgaggaggcgg

SEQ ID NO: 22968 - DNA, 281 bp, Oryza sativa
  Clone ID: uC-osflM202075c02b1
gtcgtctctggcgcatttcctcaggaagactgctgctgtgcctgatgctaccgtcatatcagagcaccctgttgtcagggttggtgttgtttttagcctttgtcttacctcctccacttttctttttatcttttttttttctttttttactttttttcttcttttattattctttcttttttctcctctttcacttttttttttcctcttcttttttctttcccttcttttttcttctcttttcttttcctctcttattttttttctttctttcttttttt

SEQ ID NO: 22969 - DNA, 144 bp, Oryza sativa
  unsure (1)..(144): unsure at all n locations
  Clone ID: uC-osflM202075c12b1
gcgtcaacctccgacactgtncccctactctgggggggcttccagaactactccgccggcttctccatgacgacggatatggccgacgacccccttgacccgccgacggagccgcagccgcagacgctgccggcggaagcagcc

SEQ ID NO: 22970 - DNA, 215 bp, Oryza sativa
  unsure (1)..(215): unsure at all n locations
  Clone ID: uC-osflM202075d10b1
tanctcatccatcgatcgccctacctagctactctcgatcgatcgaccgtccgcccgccatggacgtggagtacgacgtgatcgtgctcgggacgggcctcaaggagtgcatcctcagcggtctcctctccgtcgatcgcctcaaggtgctgctcatggacaggaatgtcttctacggtggagactttatatctcttatcctgattcagctatgg

SEQ ID NO: 22971 - DNA, 163 bp, Oryza sativa
  Clone ID: uC-osflM202075e01b1
atcgtcctgaagggcaccgagctccgcctcggcctgcccggctcccactcgccggaccgctccccgcccgccgccacgctcgaccttctccccgctgccaagggcgccaagcgcgggttctccgacgaggcgcgtccgctgccggcgtccgccgccgccgtcg

SEQ ID NO: 22972 - DNA, 304 bp, Oryza sativa
  Clone ID: uC-osflM202075e09b1
ctaagccaagatacaggagcgataggctccgcggcgttcgtcgccgaaactccactgttcatcttcaacctccagccatttttgtgtgtgagagaaagagagctctgttcttgtgttcctaggctgattccaacaattggtatcagagccggatgacgaagatcggagatagctcgccaccgaagatcggagaaggctcgagctcgggtgccgccgagcgcgtcatggccaactccagcgtcgtggagctcccgctattgacaaggaccaactaccacgagtggtctttggtgatgcaggtgag

SEQ ID NO: 22973 - DNA, 417 bp, Oryza sativa
  unsure (1)..(417): unsure at all n locations
  Clone ID: uC-osflM202075f01b1
ctccttcccaccatcttccgctgccactttcgccgtcgtcgtcggcgccagccaccgcccttctccccaaccaaccacgcgcttcccctctccgcttccacctcctctcgggttccctcccgtcgatgccaccgcgccattcctcttcttctcctcactcgccctgcggctgaagcaatggagctcccgtgcccgaggctgctgctgcttcttcgtcttcttgtgttcttggttgcggtttcttggccgctctgcggcgcagggactgaaggcctcggagttggagaggaggggttgagcagcattggtgcttcttctggttctaggaacgttagaagacttctgcagactggtggagtaaaccaaggtgcaccagctcctctaccactggaacattctncatcagcatcaggaccg

SEQ ID NO: 22974 - DNA, 258 bp, Oryza sativa
  Clone ID: uC-osflM202075f09b1
ctcctttgcaaattctggttgatgctagcgatggtgcttctgactatgggaataagtttggtgaacctctaattcagggctttactagaaattttgggatgaggctgcttaatggggaacggcgtgagtggctgaagccaataatgtttagtggggcaatcgggcaaatcgatcatgcacacatatctaagggggatccagagattgggatgctagttgtgaagattggtggccctgcatacagaattggtatgggtg

SEQ ID NO: 22975 - DNA, 420 bp, Oryza sativa
  Clone ID: uC-osflM202075f11b1
gtagatggagatggattcagaggctcacagcaggatgctgtgggagtccagcagcagcaacggcaggaggtacatcagctacgacgccctgaggagcgacgtggtgccgtgctcgaggcagggtgtcccttactataactgcaggatcatgaccaccgccaacccttacacccggggatgcgagaccatcaccaggtgcagggatgtggatccgtgattactactgcactgcctgcttgttttgctggatgatcttgccatgagaggaattgcaggagtggctacctgagatgcaaatcttggtttttattttttttttgtttttcttttaccctctcttctgttctttcttcttctttatgttctgcatctgctgaatcattggaggtgattcatggatgatttacatgttcaaagatc

SEQ ID NO: 22976 - DNA, 405 bp, Oryza sativa
  Clone ID: uC-osflM202075g01b1
gtctatcaaattgcttctagacttggtagctcaaaagatgcgcagggctcaacaaacttccagaatgcgctagcttctcttctgaagaaaatggccattgatcatccttatcatacaatatttcagcttttggctctagcaaatggtgaccgcgtcaaagacaagcaaaggagtagaagttcttttattgtagacatggacaagaaacttgctgctgaaaatctgttaaaggatttatcttcttctcatggagctttgattcgtcagatgaagcaaatggttgagatctacattaagttggctgaactagagaccaagaaggaggacacgaacaaaagaattccactacctagggagatccgcagcatttgtcagctggaacttgttcctgttggtactgctagt

SEQ ID NO: 22977 - DNA, 70 bp, Oryza sativa
  Clone ID: uC-osflM202075g03b1
ggaattcataagggagaatgatatgttattctgtggggttgatttcaaggaatgccccctctaccagctg

SEQ ID NO: 22978 - DNA, 214 bp, Oryza sativa
  Clone ID: uC-osflM202075g09b1
ataattatttttaataattttagttttttttttttggctttagatatattcccaatccccaacctcccaataatccgatctctcccagttctgttcggatcaaggctgtgtcgatcgcaaaaaagaaaaaaaaaaacaatttccttttggggtggttcatctgttgaccacttttttgtttcctaccctcttgtctgcttttcctttttatatt

SEQ ID NO: 22979 - DNA, 111 bp, Oryza sativa
  Clone ID: uC-osflM202075g10b1
ttctttcctctcgccagtgccaccacagctcaagcgtgatccagcgtcgggccgcgcgtgcgagcgagcgagcgtgcgagatgtcggccgccggggaggaggtcaagaagc

SEQ ID NO: 22980 - DNA, 178 bp, Oryza sativa
  Clone ID: uC-osflM202075g11b1
tctggtttcaaccaacgatattatctgtgtgtgtgtgcgccgcgcgggcatgcaccaacgcgcgcaacggatgaaccatccgcctgcatcgatcttcctgcgatggccgccgcgtcgacgttccctctggctctgctgctcgccattgttgccgcatgctgcgtcgccgggggcgagg

SEQ ID NO: 22981 - DNA, 416 bp, Oryza sativa
  Clone ID: uC-osflM202075h01b1
tttcattaaagaatttactacgtgaggtgtgtgttttaggtattgcgcatcttaggtgcattttagcgcaaacgtgtataatatatatcccatggtactaactcatgtcttaaccataattgcacaccaacacataacatacactactatagagataagtatcgaagaagacatgcccaccggtgcggaagggacggtgattgtgccccacacaatggagcagttcgccctccacatgagccaagccaagcaatcccacatgctcgtagtcatccagttcactacttcccggtgccctgcttcacgctacatcgcgccagctttcaccgagtatgcgaaggagttcgctggtgcggttttcattaaggtcaatgtcgacagcgatgagctggagagtgctacggactggtatgaca

SEQ ID NO: 22982 - DNA, 290 bp, Oryza sativa
  Clone ID: uC-osflM202075h02b1
gctaggtcaaatcgatcgatctcgatcgatcgggtggtcgatccgatcagcagccatggagtaccaccaccggccgcattcgccgccgccgtcggacgacgacgtcgtcgtcatccagatgaacgccgccgtcatcgccgccgtcgacgagtggagctccaccaacgaggtggacgacgccgccgccggcaagggcggcggtctcacccgccggacctttagccaggccttcaagatgaagcaccggacgccactggagttcacgtggaggcaggtggcgttgctgagct

SEQ ID NO: 22983 - DNA, 152 bp, Oryza sativa
  unsure (1)..(152): unsure at all n locations
  Clone ID: uC-osflM202075h03b1
cncgtcantaacctggtgttactcatgtcttagtaacagtaggtgctggctatattgggtcacatgcttcattacgcctgttaaaggacaataatcgagttaccattgtggacaatctttctagaggaaacacgatagcagaaaaggttctc

SEQ ID NO: 22984 - DNA, 120 bp, Oryza sativa
  Clone ID: uC-osflM202075h04b1
agtgccgctccgaaccccctctctcccatcggcgtcgtcttcgtcgccgtcacagccgctgtcctcgccgccgccgacgccgatggagatggccgtccccgtttcccccgcgccgtgctc

SEQ ID NO: 22985 - DNA, 363 bp, Oryza sativa
  Clone ID: uC-osflM202075h07b1
ttcgttacgcgtccggaattccacttcccatggttaaggagatatgccgacatgtgctcattggccttgactatctccaccgcacactttcaatcattcacactgaccttaagcctgagaatatattgcttgaatccactattgatccctcgaaggacccccggaaatcaggtgtgccgctggtggcaccttctgcaagaactgatgatcctcctccaaaggcacatgcaccatcagtgaatggtggtctcaccaggaaccaaaagaagaagattcggaggaaagccaagcgtgcagccgctgcaacttcagaaggaagtgggactgttgcatctggggagaccgatgggtcagatgataggg

SEQ ID NO: 22986 - DNA, 198 bp, Oryza sativa
  Clone ID: uC-osflM202075h08b1
tctttcagcggctccggcgggacacctcgctccatgggcggctacatggagtccggcagtgtcaaggacctgcagactcacctcttcagctacgaggagctcgaggaggccaccgatttcttcaacgagaacagagagctcggtgatggcggctttggcaccgtctacaaagggatactttgagacgggcgcgtggtg

SEQ ID NO: 22987 - DNA, 444 bp, Oryza sativa
  Clone ID: uC-osflM202075h10b1
ttcagatgaatgtccggtccatctagataatgattggaatattagtgttgttgctggtctccttgtccagaatgctctgaaatatttgttgaagtttggacaagtttccccttacttgggatataattcacttaaggattatttcccaacaatggaaatgaaaccaaatccacagtgttcaaatccagcatgtgttcagagacagaaagaatatatgcagtcaaaacctgctagagatgcagcagcaaaagctaagatggaagctgaagcatcagcagcagatgaatgtccggtccatctagataatgattggaatattagtgttgtcgatgacagtgacacagtgacacctagcattctaagcactggagctgatagcctcccagatggccttgtccgcgaactcccaactgcagattcctaccatgaaccagttgctccagt

SEQ ID NO: 22988 - DNA, 140 bp, Oryza sativa
  Clone ID: uC-osflM202076a09b1
tgagcctttgtggagagatacagagagaggcggaggagcacaagccgtcactcacctcacctgccttcttcttcatcatcatcttcttcttcttcctcccgcttcgccgattcaggatctccttcgctgcagatgagaag

SEQ ID NO: 22989 - DNA, 594 bp, Oryza sativa
  Clone ID: uC-osflM202076a12b1
ttgtgctgcgtcacgatgcgcaagtcggtggccaagcccaatcccgccgcggcgtcgggtagcccttggttcggcttcctcctctttcttttctttggtttgcttttcggtgagtctgtttctctactctttttttctttcttattcttttttcttcttctttttctttcttcttatttttttttttctttttatcttatctttttatttttttctttcttttttctttttttttctttctctctattcctttctctttttatttccttttcttctttttctttttctattgtttcttttttttcttttttttttatttttttcttctttcttttaccttttttttttcctttttttcttatttatctttttttttttccttttttcttttttttcctttttttccttttttatcttctcttttctctttttttcttttttttttattcttcttttctcttttttctccttcttttctttttattctttattctctcttttatcttttcttttttcttttcttttttcttttttttttctttctttcttctttttttttttcatttctctttttctttctctttctctttttct

SEQ ID NO: 22990 - DNA, 124 bp, Oryza sativa
  Clone ID: uC-osflM202076b01b1
atcactcctccggctcttcttcagtatcgaatggtctcttctcctcgtgcccaccaccaccaccgtagcaatggcgggcaacgggccgatcaacaaggaggacccgttcaactggggcgcggtg

SEQ ID NO: 22991 - DNA, 138 bp, Oryza sativa
  Clone ID: uC-osflM202076b04b1
gtcggtctctcgttcgcgcaaagcacgctgcggttctccgctatgcgagcaccatagcctagcccaccatgtgcggcggcgccatcctctccgacctcatcccgccgccgcggcgggacactgtcggcgtcttttggc

SEQ ID NO: 22992 - DNA, 77 bp, Oryza sativa
  Clone ID: uC-osflM202076b05b1
ataactgcttgcgagcttgccaactccgcaagggggcatatatacaccgatcgagatcgatcggagtagagccacac

SEQ ID NO: 22993 - DNA, 354 bp, Oryza sativa
  Clone ID: uC-osflM202076b07b1
tttttagcggaagtgaacaaccgcgccacgccatggggcgaagcgagtcggcgtccgcaggatttccctctccgcccgtgccctaaaccgctcgccgccggcgacgttgcgcccccgaccgcgagtgggccggcggcgatgtccggccccgtcgttcccctcgcctcgacggctcaagggccctgcgagccctcccctggctctggcccgctccccgtttccgccgccgctagcgatccgccggcgccctgcctgtcggtgcccgccggcggtcgtgagcccttcgctagcgggctgcctcccgcggtgactcctcagcttggggatcatgatcaaggtggtttacctaactgg

SEQ ID NO: 22994 - DNA, 321 bp, Oryza sativa
  Clone ID: uC-osflM202076b10b1
tctagaagttcgccgacgaggtgttcaaggggaagcacgacagccccggcatcctgtccatggcgaacgccgggcccaacactaacgggtcccagttcttcatctgcaccgtgccctgcagctggctggacgggaagcacgtcgtgttcggccgcgtcgtcgagggcatggacgtcgtcaaggccatcgagaaggtgggatcccgcggcgggagcaccgtctagccgtgttgtcatcgtcgactgccgccagctttcttagacctgtgtctgtttccccctcattattccccattctattttcgccctttagtccttctcc

SEQ ID NO: 22995 - DNA, 57 bp, Oryza sativa
  Clone ID: uC-osflM202076b11b1
tgcaggtgtcgctgcccatggcgaggaggaggggcagcagagcgtgcgcggccatgg

SEQ ID NO: 22996 - DNA, 254 bp, Oryza sativa
  Clone ID: uC-osflM202076c01b1
tttaaatcatgttttctctagtccttgggaggcagaggtaatttttcgtgttgatcagactggattaacactatgaggtacatgtaactctcaatacctcccaaggaccaaaggaagactctgatagaacatagaaatagggttcattgaaatatcataagcttctattgttgtaaaaagggagtcggatattttctttaaatgaatggcaggaaaaactgacctggtagttcttactacctgaccatacatat

SEQ ID NO: 22997 - DNA, 66 bp, Oryza sativa
  Clone ID: uC-osflM202076c02b1
ataaaatctccccgtctcgtcgtctcctccggtcgttgctccatctagcggttgaacaggggaggg

SEQ ID NO: 22998 - DNA, 141 bp, Oryza sativa
  Clone ID: uC-osflM202076c05b1
gctcccccccccaagccctcgctagctttctcggtgaattcttcgttgccagcatctccagtcgattcatagctagcgatcgaaatggcggccaccctcaagctcaggatcctcgccgcggctgacaccgccgtcgtcgtg

SEQ ID NO: 22999 - DNA, 153 bp, Oryza sativa
  Clone ID: uC-osflM202076c06b1
agtgacgcctctcctcctcctccctaaccccgggggtttcagaaccttctggaagctcccgctccccccccctagcgctccaatggcgaaggaaccgatgcgcgtgcacgttaccggctgcggaggacaaaacggataagcttttgaccccat

SEQ ID NO: 23000 - DNA, 80 bp, Oryza sativa
  Clone ID: uC-osflM202076c07b1
tgagattattagtcctagtagtagcagcaatagcaatttacctgttcttgcaacatttcttgtggttcttgtagagtatc

SEQ ID NO: 23001 - DNA, 100 bp, Oryza sativa
  Clone ID: uC-osflM202076d03b1
catgggcctgttcctggtgcctggtgctcaggcaggaagagttgattcagcgagccatgttcccagtggagtgaagagaacaatgtcaggcctgtaacat

SEQ ID NO: 23002 - DNA, 86 bp, Oryza sativa
  Clone ID: uC-osflM202076d04b1
ctggatcacgtacctgtgcacggaggcggagacggggtacaggtacgcgtgcgggtcgatatcaaagcggaagctgcggacgcttg

SEQ ID NO: 23003 - DNA, 110 bp, Oryza sativa
  Clone ID: uC-osflM202076d05b1
gtaagaacctctctgcagtgctgctgctgctggcttgcataaaaaaaaaactctcatcttttgcaggaagagacatcactgtttctgcatttcgtgtgcatttggattta

SEQ ID NO: 23004 - DNA, 65 bp, Oryza sativa
  Clone ID: uC-osflM202076e02b1
tggtgcaaatcacaaaaccattagtgtatttgaggggaatgtgcaccggccacacggtgatacac

SEQ ID NO: 23005 - DNA, 199 bp, Oryza sativa
  Clone ID: uC-osflM202076e08b1
tatcaaagcgaatctagttcgattcgatagggttcgttatcgctgcggagccaccttctagactcataccaatgagttgattgcactcttctataggtatgttaaccagggaaagggaatgctccagtcttaccagttgattgcggagctcgatgccttgatcgaagctgacaatgagaattatgcttcatttgaagac

SEQ ID NO: 23006 - DNA, 122 bp, Oryza sativa
  Clone ID: uC-osflM202076e10b1
taactcatcccagccgccgccgccgcagccgggggcttttgccatctcccgcgcgctccttcaagacagctacctgcttaatcaaccatgggcaaggagaagccccacatcatcattgtggt

SEQ ID NO: 23007 - DNA, 162 bp, Oryza sativa
  Clone ID: uC-osflM202076e11b1
tccaagctcgcgggaaaagccaaagcagcagccaaagaaatccaccttttctagacaaaaattttagacgaaccgcgagactgatggccggcttccaaatccggcagccgggcgctttccctctcgattccccgctgcagatgagatgagatgagaggagag

SEQ ID NO: 23008 - DNA, 264 bp, Oryza sativa
  Clone ID: uC-osflM202076e12b1
tgaaccgtgtcgagagtggacatggggaggcggcgtcgtggatccaactgctcctcctccgacgacgccggcatggatccgaagctggtggaggtgacgcagctcttctcccgctttaaggcagccttcgccaggaacgacttcgacacctgcgtagacctgctgtcgcagctcaaggtccgccttaccaagttccccagcctttcttcattgttttagcagacaccgaatgcagtggatgagctgaaaattgtgagggtcttt

SEQ ID NO: 23009 - DNA, 59 bp, Oryza sativa
  Clone ID: uC-osflM202076f02b1
tgtacttgaggggaagaagcttcgcagctcgggctctcacttccctgaggcttccggag

SEQ ID NO: 23010 - DNA, 101 bp, Oryza sativa
  unsure (1)..(101): unsure at all n locations
  Clone ID: uC-osflM202076f07b1
gtaccgattgaccaaatcngaggtttgtcgaggatttttgacctaacctgggtgcccccctctccatggctgccatgggaagaactgtactaccttactat

SEQ ID NO: 23011 - DNA, 240 bp, Oryza sativa
  Clone ID: uC-osflM202076f09b1
tcgtctgaactgagagtgagctctattgtactccatactgcgaacactgcagatcacgaggtgcggtgttgtagcttcgaccgtggaatgagcttgcattgctgtctggtgtcccgctccctctccctccgcgccgatcccggcgccgccgtgtccaggatcgccttcggctcctgcgccaaccagagcgcgccccagcccgtgtgggaggccgttgtggggtttgtcccgcaggttgtt

SEQ ID NO: 23012 - DNA, 262 bp, Oryza sativa
  Clone ID: uC-osflM202076f10b1
tggcacagttatggctagggtcacatttatgtgagaggaacagtactctcgcatggatgctgccaaccacctcctactcgtaaaagactatgtcactcttctgggtgcaaccatgaagaagtatggataccaaaccacattattgtttgaaattcttgagaagaatagggacaaattctatcaacttcttctttctgattgccggaaaaagatagatggcatcttcactaaggactcatatgagctgatgatcattaagtaa

SEQ ID NO: 23013 - DNA, 145 bp, Oryza sativa
  Clone ID: uC-osflM202076f11b1
tgcaatcctcatcacacagcaaacccaaaccgcgagcggaatcctcagcctgctgagagagcctgagaccaagagggggattcttttttggttattgacgatggttcagcgcgacaagatggatcaggagtcctttgagctttat

SEQ ID NO: 23014 - DNA, 51 bp, Oryza sativa
  Clone ID: uC-osflM202076f12b1
tcgatgttggctatgcagagcgagcggatgcgggcggttctcgaggaggct

SEQ ID NO: 23015 - DNA, 289 bp, Oryza sativa
  Clone ID: uC-osflM202076g02b1
ttgactcgtgggaaataactatctcctcctcctcctcctctccccatcagctccgccgctcgccgccggccaccctccccccttccatggtacaccatgcttctggcggcggcaactgccacagcagcgccggtgtcgtctagctctagcttcttcgccgcgacgacaagagccaccaccaccacccgcttcactgcccagctccagctcttgctgccacgccggtgccgatcctggtggggcaatgggaaagcgcgccggagcagccgccggcgcagccaccattgct

SEQ ID NO: 23016 - DNA, 102 bp, Oryza sativa
  Clone ID: uC-osflM202076g03b1
cgtaccagtagtagtgagtgctcagtgcgttccactccactccgagctaagcagcgaacagctcgccgccgacgctctctctctttctctgcagatatggag

SEQ ID NO: 23017 - DNA, 84 bp, Oryza sativa
  Clone ID: uC-osflM202076g06b1
gctgcagcagcagcatcaggggaagggtctagaagcttttagaagcttttttcgagatgaaggtgattgagaagaaacaggagg

SEQ ID NO: 23018 - DNA, 206 bp, Oryza sativa
  Clone ID: uC-osflM202076g07b1
ttgatgttattaagcatgcttatgtcgaacgggggggctcttttaaaaagcgccgccgctcgccgacggccaccctcccccctatcaaggaacaccaatgcttctggcggcggcaactgccacagaagcgccggtgttgtctagctctagatttttcgtcctgacgacaagagccaccaccagcacccgcttcactgcccagtctc

SEQ ID NO: 23019 - DNA, 333 bp, Oryza sativa
  Clone ID: uC-osflM202076h05b1
ttttctctccttctccgactccgacgatctttttgccggcgaggtgcggggagcatgtacctgtcggccttctcctcctcggcgtcttcgcacggcggcggggacagcgaggccagggacagctccacggtggtcgccgtcgaccgggacaagaacagccagcaggcggtcaagtgggcggtggaccggctcctcgccaggggcagcgttctccagctcgtccatgtcaagccacagcaaaatgctgaagcaggagcggatgcagagatgcaacagatgttcatctaatacagaggctattgtgctcgtaaagggatgcaattgaggaaggtg

SEQ ID NO: 23020 - DNA, 276 bp, Oryza sativa
  Clone ID: uC-osflM202076h09b1
tctgtaatcgaccactctcttggtatctcagaataacaagaggatcattggtggtgatgatacgagatgtcatgtctaactttaggtgcagctgggatgttgttttctcttgtttttgtggaaacctcagtttgttttaaaccgtagcttgctacgttgttgtatctgataagttagcaaaccaggtacataatttctcgatagtcatagtcacattcatttgtaaagagaggaaaactgaaaggagagaaataaatgtcacctgcttcttgtcaa

SEQ ID NO: 23021 - DNA, 67 bp, Oryza sativa
  Clone ID: uC-osflM202077a06b1
ataagaagaactttcacaggaatcattagaaagacttgtggatactttcctggaatattgacacaac

SEQ ID NO: 23022 - DNA, 119 bp, Oryza sativa
  Clone ID: uC-osflM202077a08b1
tgagagagagggcgagagggcgccgcgcgcggtgcttaataatacactgccgcgtcttgcgtgccacgtaggccaccctaccaccatgcgccgccgcggtaggatgacccctgaggtgc

SEQ ID NO: 23023 - DNA, 94 bp, Oryza sativa
  Clone ID: uC-osflM202077a12b1
tccttactccactcgactcctcactcatccgactcggtaactaactctgctctgctgcactgcaacgccaaggaggcagaaatccaagaaaggg

SEQ ID NO: 23024 - DNA, 171 bp, Oryza sativa
  Clone ID: uC-osflM202077b02b1
tcctgatgatgataaccaaatgaagagcgagaacgcttcctgcatagcagacacactttgctgcactgcctattatctcctatatgtatctatttatatctctctatctcgaatctccttgaagaagaacagagagaggattgggaggagtagtaggtagttgatttatct

SEQ ID NO: 23025 - DNA, 90 bp, Oryza sativa
  Clone ID: uC-osflM202077b03b1
tagtagggggagaaatcggcatgctatcagaggggtttaacagactactcaacagaagcaagtgacaatgaacaactcacagaggatgta

SEQ ID NO: 23026 - DNA, 159 bp, Oryza sativa
  Clone ID: uC-osflM202077b06b1
gtccctccgcatcgcttcctccgccgccacgggcatggtcatcaccaccaccaccttctcctcctcctccaattcccaaaaccctaaccccttcaacctcccgccatggctccgcagcctccgctgccccttcaccttcctctgcccgcccccaccgtc

SEQ ID NO: 23027 - DNA, 340 bp, Oryza sativa
  Clone ID: uC-osflM202077b08b1
tcttcccaccaatcctttgatccattcatcccaacttcttccatagtacaaatctcttgctcccctccctctcatctcctatctgtatctatttctatctctctatctcgtatctccttgaagaagaacagagagaggattgggaggagtcgtaggtagttgactcacttctgacgcgccgcgcgagacagcatctgtcccggctcgtgattcgatttccgctgccctgagcgctccttgtggctactgtgccacgctggcctctcgttcttgagcctttgtcgattcgattcccgccaacaggaggcgcctttctgtgagtcaggtgcggtgccttctt

SEQ ID NO: 23028 - DNA, 87 bp, Oryza sativa
  Clone ID: uC-osflM202077b10b1
tgcgaaacgagaaagcgccgtggtatcagaggggggcttggaggtacacaagggaagcaagagacatagaagaacctacagaggctg

SEQ ID NO: 23029 - DNA, 255 bp, Oryza sativa
  Clone ID: uC-osflM202077b12b1
ttccgcctctttcttcttgggggggcgcgggggcttatttaaaggaaccggcggatataccattgtgctcctcgcggccgtgctgctccaagccctccttcccgcttctgcggcggagggtttggtgcggaacgcgcttaaaaaacgcccgaacgaagaaaacaggcgcgttgacgcgcgaattttcggcgaggaaagggccccccggctgggccttcgcagcgccaactccctttggcgcggccggggtgaggg

SEQ ID NO: 23030 - DNA, 193 bp, Oryza sativa
  Clone ID: uC-osflM202077c04b1
aaactaaataccgcttagatcctaagtgtgctaatgtaaagacacctgacagacatgtccggacaaggctttatttcacatcagaatcttacatacactccttaatgaatgtccttcgctattgcaacttggatgaatgtctacaaggggaggattgccttttattgtcaaagacgcattatactttcttgca

SEQ ID NO: 23031 - DNA, 157 bp, Oryza sativa
  Clone ID: uC-osflM202077c09b1
tctgatcgaatcctctcttctcctcgtgcccaccaccaccaccgtagcaatggcgggcaacgggccgatcaacaaggaggacccgctcaactggggcgcggcggcggccgagatggccggcagccacctcgacgaggtgaagcgcatggtggcgcag

SEQ ID NO: 23032 - DNA, 201 bp, Oryza sativa
  Clone ID: uC-osflM202077c12b1
tgcagcagcagcagctgagcttgaagcagcagagcgaggtagacatggccgccgccaccatggccctctcgtccccggcgctggccggcaaggccgccgcgaaggttgtctttcagttttttatatctcttttccatattttcttttattctatttttctttttcttcttttatttttactcttttccctttttcttccct

SEQ ID NO: 23033 - DNA, 52 bp, Oryza sativa
  Clone ID: uC-osflM202077d01b1
ttactcgagcgagcagctagctagctgcggcgatggccttcagagcggcggc

SEQ ID NO: 23034 - DNA, 194 bp, Oryza sativa
  Clone ID: uC-osflM202077d02b1
ttatctatgtttatatgtcctatctgcaacacaaagacctgagctcatccgtgctacactggctacacttcatgctttcttatcatggataccagtgggcttcatatttgagtcacctttgctggagacattactgaagttctttcctatggctgcttattggaacccttacattccagtgccttacagaggtc

SEQ ID NO: 23035 - DNA, 87 bp, Oryza sativa
  Clone ID: uC-osflM202077d04b1
tcgcgactcggctttcctcgagttcaaagagagaggtttaggtacagtttggttccttactcctgagtacggaagaattccttaaaa

SEQ ID NO: 23036 - DNA, 288 bp, Oryza sativa
  Clone ID: uC-osflM202077d10b1
tctaggcaagcttgaatacactgacttctgaggtacagcgtctgtacaagttatgtgctgagtggaaagaagcggaagattccttgaagaaaaagtggaagaaaatagaagaatttgatgctcgtagatcagaacttgagtgcatttacaatgctcttctgcgggccaatatggaggcatcaacattttgggagcaacagccattatctgcaagaggatatgcgtcaagaacaattatccctgcttgtaatgctgtggtagacatgtcaactaactcaagggatctta

SEQ ID NO: 23037 - DNA, 100 bp, Oryza sativa
  Clone ID: uC-osflM202077d11b1
tcgccaaggccaggtacgtcaagttccactggaagcctacctgcggcgtcagctgcttgatggactactaggccacgctcgtccacaataaagaaccaca

SEQ ID NO: 23038 - DNA, 78 bp, Oryza sativa
  unsure (1)..(78): unsure at all n locations
  Clone ID: uC-osflM202077d12b1
tantctcttctcatctggtcccttccttccggtgctttgcttgctcagctagctgatcgcacgtgggtagggtgagac

SEQ ID NO: 23039 - DNA, 278 bp, Oryza sativa
  Clone ID: uC-osflM202077e01b1
tcgaaatgctaaatagaggtagatgatcctggggaatgctgatggagaacaaccctaatgagagccaagcaaagagggcccgacaggtgcagcaacagttgcagtggaaagaaggatagttgtgagctgaactattgactacagaaatccatttgtcgtctgtggtgccacatatgtttccaatttgccatgtttcataatgaagattcctgcccatactgtggaaccaattggtgaagaacatgtcgaaggactatatttttatttaatataggatc

SEQ ID NO: 23040 - DNA, 473 bp, Oryza sativa
  Clone ID: uC-osflM202077e03b1
ttttggagataatcggataggggacaacgagacaggaaggcagcatggacgccgcactcaagtccatgagtaaagcatggggcagcagctggcaagatttgtttcacctgactggaacctactctctccgttttgttcagatttattgtactaagtaatatctcaacttatcttaggttggtttattttaagacggacggagtaaacgtcaacacagacatcgaggatcttgactcggatttgtcactgaacaattgtgtgggtgtgaaaattccatgaattcattgtctttgcattaaagcaccaacagtaagaaaatgatttcgatcttaaaccttgatgactgaactacaactctatactatgcagtatttcgtgctttcagaactgtattactaatagcttattaatctttttagctctatatggcactcataaataaacttgttaatcttgatcagggagatatatgc

SEQ ID NO: 23041 - DNA, 151 bp, Oryza sativa
  Clone ID: uC-osflM202077e08b1
actgatatatatgtcatccatccaatgcatgcagtcgcttcgctagctatcgatcgatcggtcgatccaagctgcaggcacaatattaattcaattcaattgaattcttcgaccatccatggcgactgcacattaggagagtatcatcatt

SEQ ID NO: 23042 - DNA, 476 bp, Oryza sativa
  Clone ID: uC-osflM202077e09b1
ttgttaccatttcatgaaagatcctaatcaaaatcagcagattcagaattttggagatccatttttgctggttatccgtgaaggtgaaactgcagcagagatattagaacgaattcagaaaaaacttcgagttcctgatgaggaattctccaagtggaagcttgcattcatatctatgaatcggcctgaatacctccaggatggcgacgttgtatctgcacgttttcagaggagagatgtttatggagcttgggaacaataccttggcttggaacatactgacacaacaccaaaaaggtcttatacagccaatcagaatcgtcacacttttgagaagcctgtgaaaatttataattgagaagattattagctgggcttgaagccctgaacaaaggcctcgtctggatagcatgccatgccacagagagatcacaaagttagacaacctcaacagaagaaacatgggcacaaacata

SEQ ID NO: 23043 - DNA, 168 bp, Oryza sativa
  Clone ID: uC-osflM202077e11b1
taaacaaacccctctcactcccagatacctggtgctgctcactagcccactacgcatggatccttgcaagttccggccgtcgagctcgttcgacacgaagacgacgacgacgaacgcgggagctccggtgtggaacgacaacgaggcgctgacagtggggcccagggg

SEQ ID NO: 23044 - DNA, 97 bp, Oryza sativa
  Clone ID: uC-osflM202077f01b1
atcaggaccaatttgtatggttgggaagaacggggatttacaagaacaaggagcgcatagaccggatttgaaggatatcttattaacttgttgcatg

SEQ ID NO: 23045 - DNA, 73 bp, Oryza sativa
  Clone ID: uC-osflM202077f02b1
gtgaaatattccccatctcgaagcgtagaaaactccttgctctcaagaccagccgtggctgatcaggggaggg

SEQ ID NO: 23046 - DNA, 193 bp, Oryza sativa
  Clone ID: uC-osflM202077f07b1
aaccccgccgataattccaaacgaatggccgccgccaagggggcatttataaacctaacgtggcatcccctacgccttccatggctgtcattggaagaacttgcctaccttcctatgacctttggaccacaacgctcgatcggaggaggaagccgtcgaggaggagtcggtgcgggcggccatggattgcgcg

SEQ ID NO: 23047 - DNA, 126 bp, Oryza sativa
  Clone ID: uC-osflM202077f08b1
acctaacaaatccccaaatctaaccggagaaaaccccaatctttcgccgccgccgccgtgatgtctcgccggtacgacagccgcacgacgatctattagccggaggggcgtatttaccaggtggag

SEQ ID NO: 23048 - DNA, 86 bp, Oryza sativa
  Clone ID: uC-osflM202077f11b1
taatgaacggtggaacgcgtacttacccacaggttatgtgcatgccatggcaccattaatggcctaacgcctcttcacaaatactt

SEQ ID NO: 23049 - DNA, 387 bp, Oryza sativa
  Clone ID: uC-osflM202077f12b1
tgtcctctgcgacgacgactcaaccatggtgtagtactgatgcaagacgcgcggcccaaccaagtcctccaaggccatgggccgggacttgcgtgtgcactttaagaacacctgtgagacagcttttgctatcaggaagttgcctctgttcatggccatgaggttaccttgaggtttttttagtttcattattttattttttcctttttctctttcctttctttttattctctttttttactttttcatagtcttcttttttctatatatatttctttcctactttctctctcctctttttctattatttttctttcttactattacttcttcttttttttcttatcactctcctttttacctcttcctttttactcttatcttttt

SEQ ID NO: 23050 - DNA, 87 bp, Oryza sativa
  Clone ID: uC-osflM202077g05b1
atacttccacctgttccgccaccaccacctggggcaattactcagactggacagtcgcagcgaacattaccaatggcatctgatcca

SEQ ID NO: 23051 - DNA, 126 bp, Oryza sativa
  Clone ID: uC-osflM202077g07b1
ggtgtagcttcttgctcgcttgctctctactagtgctctttttgagtcgtggccaagctgcagaggaaacccaaattttcaagtaaagcaacaggtcatgaaagagggaaagtttaggtgagagga

SEQ ID NO: 23052 - DNA, 146 bp, Oryza sativa
  Clone ID: uC-osflM202077g08b1
acctcaacccacccaccctctcgccgtagcagatccgatccagtaagagcttgccgctctctattccatggcgctctacttgtattatgactttatcctttattttttttttttatttttctctaatatatattatatcatatttt

SEQ ID NO: 23053 - DNA, 74 bp, Oryza sativa
  Clone ID: uC-osflM202077g09b1
gctgcaaatatttcttcctataacagaccaagagcagattgatcattacctttggatttttgattacaaaagta

SEQ ID NO: 23054 - DNA, 83 bp, Oryza sativa
  Clone ID: uC-osflM202077g10b1
actctggatttcagaaaatttgacctcaacttgtccagtttacctgcatcggaagatatatactttccctgccagtatgctga

SEQ ID NO: 23055 - DNA, 119 bp, Oryza sativa
  Clone ID: uC-osflM202077g11b1
actggtccaacttcgcaaactaccccaagggtgacgagtacgccgagatcttcgacgtccttggcaacggcattttcaacgccgacggcgagtcgtggcgcattcagagggcgatggtc

SEQ ID NO: 23056 - DNA, 95 bp, Oryza sativa
  Clone ID: uC-osflM202077g12b1
ttcgattcttctcactactgccgaccagtgtgggctactacactgaactgaacaccaaccgaagcagctgcctcaataatcattgagcaaactag

SEQ ID NO: 23057 - DNA, 54 bp, Oryza sativa
  Clone ID: uC-osflM202077h01b1
caagcaccccccgccggcacgcgagcccggacagtccccggctgcgaccccacc

SEQ ID NO: 23058 - DNA, 91 bp, Oryza sativa
  Clone ID: uC-osflM202077h04b1
atactatcatacatacgatctcgaattggtagggaagtattagtagccagcagattaatctatcgatccgtacaatggcggccctgaagat

SEQ ID NO: 23059 - DNA, 465 bp, Oryza sativa
  Clone ID: uC-osflM202077h06b1
ctacttttcctcgtcgccggccagagctcttcgtcttctccaactcgaccggaagcaagcgcgcttccgatccgccatggtgctctcccacggcgtgtcgggctccgatgagtccgtccactccacgttcgcctcccgctacgtccgcacctccctccccaggttccggatgccggagcagtcgatccccaaggaggcggcgtaccagatcatcaacgacgagctgatgctggacggcaacccgcggctgaacctcgcgtcggttcgtcaccacgtggatggagcccgtgtgcgaccagcttattcaggccttcgttaacaagaactccgtcgacatgggccaagttccccgttaccctgaactccataacctgtgtgtgaacatgattgtccccctcttcaatgctcctcttggggactctctaccgcctctcttttcctcttctttcgcttttcttgagttct

SEQ ID NO: 23060 - DNA, 95 bp, Oryza sativa
  Clone ID: uC-osflM202077h07b1
acctgaatctctctacccccccaccctcccttcggctatatgctgaagcggcagctcgtccgaggccgctgcggctgaggaggaggaggaggagg

SEQ ID NO: 23061 - DNA, 316 bp, Oryza sativa
  Clone ID: uC-osflM202077h09b1
ttttcaaagtggggacggataaggcgctttgagatggaaatggggcaagctctgctgcggatctaccttctaactacctaatgaattctaaggttgttgggctcgagaaagctgtggccttcctttggcgtggcacacactccagatttgaagctgctatggatgatgcaagaatccggacgactgatatagcgacacatgctgacgttgctatatattggacctctatctgacttgaactatgacacatgaggatgattggcactggaccacagacgtttgttgagattgcagagggtcgccatgccttctgttc

SEQ ID NO: 23062 - DNA, 420 bp, Oryza sativa
  Clone ID: uC-osflM202077h12b1
tttatgtcaacgagttccagaccaacctggtgccctacccgaggatccacttcatgctttcctcctacgccccggtgatctcggccgagaaggcctaccacgagcagctctccgtggcggagatcaccaacagcgccttcgagccgtcctccatgatggccaagtgcgacccgcgccacggcaagtacatggcgtgctgcctgatgtaccgcggcgaccgtggtccccaaggacgtgaacgcccgggtggccaccatcaagacgaagcgcaccatccagtttcgtggactggtgcccaccggggtttcaagtgcgggatcaactaccagccgcccagccgtcgtcccgggggggagaccctggccaaaggtgcacagggcccgtgtgccatgattctccaactccacccgcgtcgttcta

SEQ ID NO: 23063 - DNA, 72 bp, Oryza sativa
  Clone ID: uC-osflM202080a09b1
tctttccatctctctcagctctcacagctcactggatcaatgttcagaggccaccatggcacatcaaatcca

SEQ ID NO: 23064 - DNA, 56 bp, Oryza sativa
  Clone ID: uC-osflM202080a11b1
tccggaagtcagaaagggggggaaaaggaactggaagtttttaacggatttggcat

SEQ ID NO: 23065 - DNA, 113 bp, Oryza sativa
  Clone ID: uC-osflM202080b03b1
ttgttatatattattattaataatatttagctctttttctatttggctttaagatattattccccaattttccaaccttcccaataattctgattatcttccaagttacagtt

SEQ ID NO: 23066 - DNA, 145 bp, Oryza sativa
  Clone ID: uC-osflM202080b08b1
aaagaagagagaagaaaaaggggaaaggaaaaaaaacaagaaagaaacgaggacaaaagaaaagaaaaggaagaaacaaaaagagaaaaggaaaagagaaacaaaaggaaggaagtaagagaaggaaaaaaaaaaaagaaagaaa

SEQ ID NO: 23067 - DNA, 165 bp, Oryza sativa
  Clone ID: uC-osflM202080b10b1
ttttcactaatcacagctcacttcagctcgctcgctctcactactactcgctggcaccattcaggcggatccaatgcccgccgcctcctcgcctcttcccctcccccttctcctcctcctcctcctcgccgtcgccggcgccggcgccgcgggtgcgggggcggc

SEQ ID NO: 23068 - DNA, 75 bp, Oryza sativa
  Clone ID: uC-osflM202080c04b1
ttcatatagtgcatgggcaccacacgttagccctggcggtactcctagccctaacggacctaataatcactctct

SEQ ID NO: 23069 - DNA, 55 bp, Oryza sativa
  Clone ID: uC-osflM202080c06b1
ttcagtctactcccatgagctgcctcgcaatggtcgggaagttttaaaaacacaa

SEQ ID NO: 23070 - DNA, 65 bp, Oryza sativa
  Clone ID: uC-osflM202080c08b1
tcgatacaaggcccccgccgcacctcctcccgtactcctggctgactagaccttctcacggaggc

SEQ ID NO: 23071 - DNA, 345 bp, Oryza sativa
  Clone ID: uC-osflM202080c09b1
ctgaaatacaatgttgatgactagtgttttattgaacatcttgaggaccatgatctgatttattctttttacacgttttttagatgcttctatagaatttgtaggctatagcagaaagagggtacctgggcaaactgtcctggctatacttttgcggcgtatatgtcaacaaaaagtaactagatgttaatttgaattttaatatttctttaactgcaagagcagtgctgtgtaacttgtgttcctaaagtttttatgtgcaccacctgcatggggtaaaagtacaaatgactctcccccttgtgttgtcttggttgttttgacaataaattgtgtcattcattc

SEQ ID NO: 23072 - DNA, 158 bp, Oryza sativa
  Clone ID: uC-osflM202080d05b1
ttcatctctcttcccccccgcgtccagttccatctaatcagcttctcgtcgagatgggccgcaagttcttcgttggaggcaactggaaatgcaatgggaccactgatcaggtggacaaaattgtcataatttaacttgagaacagatcgcttctacag

SEQ ID NO: 23073 - DNA, 92 bp, Oryza sativa
  Clone ID: uC-osflM202080d06b1
agtaaaccctcgctgctctcctccccctccccctggtcctattgtcgccacctaagatctccatatccccgccaccaaattcccccctaaac

SEQ ID NO: 23074 - DNA, 106 bp, Oryza sativa
  Clone ID: uC-osflM202080d07b1
ttcttcattgaacagatatatcagcagccatggcagcgacctcagactcgacgccggctgctgctgctgctgctgctgcttcttcttcttcttctacacttcacat

SEQ ID NO: 23075 - DNA, 484 bp, Oryza sativa
  Clone ID: uC-osflM202080d10b1
tcgtgtaaatgacaagtctttctactgtttggtgaaggaatgtgagcatcctgttgcaccaagacagcggaaatttgttcgagtgcaacttttgagatcaggatggtgcattaggaaaatccctggaagggatgcatgccgaattacagtgctgcatcatgaagacaacggcatgaacatagagatggcaaaactggcatttgccaagggcatttggaattacatttgtaaaatgaacagtgcactacgtcgctatcctcaacgtaacatttcatcaatatcaattctgaccatgcaaagacttaccaagaagtttcctcaggccttggagactgatgtagatgcaaatcatcatcctcaaggaaatacaagagcaaatgttgttcctacacattttgcaagaacttcatcacgccaacagccagggaagaagtcatctcgggcaacgattgcaagtggacttctgcttatcggaagcattgtt

SEQ ID NO: 23076 - DNA, 445 bp, Oryza sativa
  Clone ID: uC-osflM202080d11b1
gtgatcatcatcatcatcaagtcctattaaacatctggagaatggctgaagaaaagaagaccccatgcctgaatgagcggatcctgtcgtcgctctcgaagcgatccgtggctgcgcattcctggcatgatcttgagattggacctggagctcctcaggttttcaatgttgttgttgagatcacaaaggggagcaaagtgaagtatgagcttgacaagaagactggaatgatcaaggttgacagggtgctatactcatcggtggtgtacccgcacaactacggtttcataccgcgaacgctgtgcgaagatggggatccaatggatgtgctggtcctgatgcaggaaccagtgattcctggctgctaccttagagccaaggccattggcctcatgcctatgattgatcagggtgagaaagatgataagatcatcgcggtttgcgt

SEQ ID NO: 23077 - DNA, 437 bp, Oryza sativa
  Clone ID: uC-osflM202080e02b1
gttttccagggtcttgaggatcacttgggtgatatggacttcaaaattgcaggaacaaggagaggtattactgctattcaactggatataaaacctgctggaataccgttggacataatatgtgaaagtttggaacctgcacgaaaggctcgaaatcaaatccttgaccgtatggaccaggaaataagttctgcacgtgcttttaatgatgggagctctcctcgattagctacactgagcttcagcagtgattctcttaggaaactgcttttccacaggaaaaaaattgagcaagaaacaggtgcacgggtatctgttagtgatggtacagtcactattgtagcaaaaacccaaccaattatggataaggctatcgagaaggtagaatttcttggggtcgtgaaatgaagttgcagaacgaccaaggtgttgttcct

SEQ ID NO: 23078 - DNA, 209 bp, Oryza sativa
  Clone ID: uC-osflM202080e07b1
tcgttcctccccctcccggtaaggcggacgaccgagctgaggctgagctagggctagggcacccacctcctccccttccgtatcctggatggctgctggccggggcattaaccagctcctactgagaacactccataatcagaccttaggctcatctctgctatcctcgttcctgataaagcatgaagaatcctacgctggactgagag

SEQ ID NO: 23079 - DNA, 468 bp, Oryza sativa
  Clone ID: uC-osflM202080e10b1
gtagctatatcgtcgtcattaattggagctagctaggtatggcagcaggcagagcgcatgtgggcggccgttctgcgagggatctatgtgcaaaggtgctatcattttcgcttccacttgttctttttgttgtttttttttattatattttttttattttactattttttttttttttttttttattttttttctttttttttttttttattatttctttttttcttttttatttttcttttttatttttttatattttatgtcctttttttctttttttttttctttaccctatctatcttttttttttttatttttcttaaatttttttttatttgtttaattttcttaatttcttatatttcttttttttatttttttttttacaatttataatattatttaatttcttctattattatttttattttttttctttaaactttatcttatttttttttttctttt

SEQ ID NO: 23080 - DNA, 133 bp, Oryza sativa
  Clone ID: uC-osflM202080f01b1
ccactcctttcttgatgctctaatctcaatcagggaagaaattgcataaatcgaaagtggcaaagcagatgcgaacaccaatgtcctcaagagtgcctctttatccttcccaacttctgatgagcgactcatg

SEQ ID NO: 23081 - DNA, 59 bp, Oryza sativa
  Clone ID: uC-osflM202080f02b1
ccgggacctacccacgccgttcgatagaacacagagagataacgggagagaagccggat

SEQ ID NO: 23082 - DNA, 309 bp, Oryza sativa
  Clone ID: uC-osflM202080f07b1
tcgttgatgctctaatctcaatcagggaagaaattgcagaaatcgaaagtggcaaagcagatgtgaacaacaatgtcctcaagagtgctcctcacccgccccaacttctgatgagcgactcatggactaagccgtactccagggagtacgctgcgttccctgcagcgtggcttcggggcgccaagttctggccaacaacatgtacttgcttgcttctgtgtctccaaaagattgctctttgctcaacacaatttgacaccaacctaatctctattttgccgagtctgtgctcttactaggtcgcgttgg

SEQ ID NO: 23083 - DNA, 418 bp, Oryza sativa
  Clone ID: uC-osflM202080f11b1
ctcgtcacgatttctcctcggggtcctcttcgattcgtaagatatgatgagatttttgcttcatccgtgttgctcactttgcaactggtggcctgtgtgcgtaattgatcttttggatgctttccttccttgcaatggtgccatgagcattccttcatctaggaatcgtgatggtgatgatgtttcttgtttgatgattgatgtgctgctaattagatgatgtatgtccatatctcccaaccagaagataaggtaatgacctcggtaagctaatgcacatgtatgtgcatgttgtataatcatgttgtactatatactatgtatgatgtatctagatttagggtaggaaggcctttgccatgttgggtgcgctcgcttggcaggccacaagacaataaaaagatattttccttatgtt

SEQ ID NO: 23084 - DNA, 456 bp, Oryza sativa
  Clone ID: uC-osflM202080f12b1
ttctaggttgatcgcccgatatggagatggcgaagatactggttttgcaccggtggatttgttgatctacacaggggatgcactgggagagtcttctttaatcactgagcatactgagctattactacttgccggaggctatggagctgagatgatatgaggtcacgcgtcagacgatgggtcggctatgctcacatttgaatcactggtggaaacagcataatttgctaggagatgggttccattttgcaagaagtactccattgaggcacgtgcccctgagttctacttctgacagaagattgactacttgaaggacaagatacacccatctttcgtcaaggagcgtcgggctatgaagagggattacgaagaatacaaggtgaggataaatgctttggttgctaaggctcaaaaaacacctgaggaaaggctggattatgcaagatgggacac

SEQ ID NO: 23085 - DNA, 288 bp, Oryza sativa
  Clone ID: uC-osflM202080g12b1
ttcgaattgagggacggtggatctgattacttgggaaagggtgtttccaaggctgtctacaatgagaactctattattgtcccatctcttattgttaagttttctactatatcttgctcatctatataacttcaattttcatctttctaacttgttccaaatactatgttcttttttctactatcttttaattcttttttttttattcatctctatttttttttcctcttctatttcttttatccttttttatttcatttctttcttactatttcactctattctttt

SEQ ID NO: 23086 - DNA, 506 bp, Oryza sativa
  Clone ID: uC-osflM202080h01b1
gttagtacccaatccgctggagtccccttgcagatgtagaggatgggtattctccaacacttcctcatctcaagggtctacagaatggagacactgccacaagtgccattaagcaggttgcatctggacgctttggggttacaccaacatttttagtaaatgctgaacaaattgagataaagattgcacaaggggcaaagcctggtgaagggggccaacttccagggaaaaaagtcagtgcatacattgctcggctgagaaactccaaacctggagttcctctcatatccccaccaccccaccatgacatctattcaatcgaggatctagcacagttaatttatgatcttcatcagatcaatccaaaagcgaaggtatctgtaaagcttgtagctgaagcaggaattggaactgcagcttctggagtatccaaaggaaacgcagacataattcagatatcaagtcatgatggtggcactggagctagccccattagttcaatcaag

SEQ ID NO: 23087 - DNA, 68 bp, Oryza sativa
  Clone ID: uC-osflM202080h04b1
aaatagcttcatctgaagaagctaagaaggcgcttgaattgcatggatgtgatctggatgcccacaca

SEQ ID NO: 23088 - DNA, 582 bp, Oryza sativa
  Clone ID: uC-osflM202080h05b1
ctcactgtagggctggctcgcacgcctgcacgcggcccggccttcctggctggacccacccatccggttactctcgactagcagaagccgagcgaccgccttctcgatccatatcttccggtcgagttcttggtcgatctcttccctcctccacctcctcctcacaggttcttggtgtagcttgccactttcaccagcaaagtttcatgtctgatctcgacattcagatcccaactgccttcgatccctttgctgaggccaatgctggagactctggtgcggctgcaggatcaaaggactacgttcatgtacgcatccagcagcgtaatggccgtaagagcctgaccactgtccagggattgaagaaggaattcagctacaacaagatcctcaaagatctcaagaaagagttttgctgcaatggtactgttgtccaggacccagagcttggccaggtcattcaacttcagggtgatcagaggaagaacgtatcaaattttcttgttcaggccggcattgtgaagaaagaacacatcaagattcatggtttttgagcaactgccaaaaccattgcaaagacta

SEQ ID NO: 23089 - DNA, 150 bp, Oryza sativa
  Clone ID: uC-osflM202080h08b1
ttggtcgatttgctccccggtggtggccgcccacgacgaacccccgcgccgcgcgcgattcgatcgctccttccggattctgctcccggactcggatctcctcctcctcgtcgagctcctcccgccactgcccgtgtaggtctacctgag

SEQ ID NO: 23090 - DNA, 83 bp, Oryza sativa
  Clone ID: uC-osflM202080h09b1
acctccagcagcagcagcagcagcagctgagcttgaagcattatagcgaggtagacattgcctctcccaccatggccctctcg

SEQ ID NO: 23091 - DNA, 386 bp, Oryza sativa
  Clone ID: uC-osflM202080h10b1
tcgcaatggctgcaattcgattggatgaggatggtgacaacattgagaacaccctgtcccttgctctagttgacacagcaaggccagggactacagataggagcatccaatcgttcgatccacttgcctctagctcatgggaaagggttccagaggagaaaactttaattacacctgtccagtgcaaatctttatggaggcaatttaaggctgaaactgaatatactgtcacacaggccatagctgctcaggaggcaaataagaggaacaacaactggctgccacctccatgggcacttgccgcaatggctatcctcggattcaacgagttcatgacattgttaaagaatccccttcacctgggagtcatatttgtcgtcttcctt

SEQ ID NO: 23092 - DNA, 237 bp, Oryza sativa
  Clone ID: uC-osflM202080h12b1
tttttatatcaacccgctccacaccaacctggtgcggggccttttgaaccacttcacgcgtacctcccaccccccggagatctcggccaataaggcctaccactagcagccctccctactggagatcaccattagcgccttcgagccttccttcattatggccaagagcgacccgcgccacagcaaagtcatggcgtgcttcctgacttaccgctgccaccatgtcccccatggtac

SEQ ID NO: 23093 - DNA, 424 bp, Oryza sativa
  Clone ID: uC-osflM202081a03b1
actatgtccaatttcctccactggccagcaactgggactaaccaggcccctgaaaaaacatatttcttacagttcagtccctccgccgccgctggctcgcttctccggccaccgcgcaccgatcaaccttggcctgaccaaccgccgccgccatcgccgccgctttctagctcagctccggctcgccggccggtgcccgtctgcctccgtgtttcgagaggaggcggacgagcttatagctaatatacgtagagagattatatatatatatatatatttacagtttgacaacgaggtggagtagagaggtgtgtacatgtgcagcatggacgactactccggccgcctcgtgttcagctccgccggcgccgcgccgtcgtgcagcgccgccggcgcgggaggcgggcagatgctgctctttggc

SEQ ID NO: 23094 - DNA, 464 bp, Oryza sativa
  unsure (1)..(464): unsure at all n locations
  Clone ID: uC-osflM202081a04b1
cgtgngttctcgcagctggactgcgtcgacctggcggagctgttcgctcgtgtgcgggtcagtgagcaaagcacgacgcgattcccggttcttgcacgcggcgtgttcgacgtaatgcccacccggacgcctcgagctcgctcgatgcagtgaatcgaatccggtttgctcgatctctccgtgtcaatggctctgacgtagcttgctgtctattggtatctgccttttgcttacaggctggatcatagctctgctcttaacaccggtgagttgaattgatgatggatcatcgctggtgaattagggagatccctaaatccgatttattttcgtgttttaagaacatttcggtcaagcaaacggccatcatatttcttggtgaattttttgaccaaagcgaaactaccgataggttaattggtgcttgatcaggtggttaaaaaaggggatactttttttttttt

SEQ ID NO: 23095 - DNA, 153 bp, Oryza sativa
  Clone ID: uC-osflM202081a06b1
tttgtgaaaagatcccaccaccggcagaaatcatgggagtcttgctaccgcaaagccagctgaccaaaacccaaggcggacctaaagcctaagccttccaagcctgggccgaagccgaagcctcccaagccagggccgaagccgaagcccaag

SEQ ID NO: 23096 - DNA, 334 bp, Oryza sativa
  Clone ID: uC-osflM202081a08b1
ttcccacgccgcgggagatgtgccggaggctcggcgagttcgtcatcgggcaggggaaagctaaaaaggtcttgtcggtagctgtatacaatcactacaagagaatatataacgcgactgtacagaaagggtgttccaccaattctgggtggctagacgctgcaagtgatgatcaaaataacatagaaatagataaaagcaatgtgcttctaatgggtccaactggctcaggaaaaacattactcgccaaaacactagcacgcattgtaaatgtaccattcattatagctgacgcaacatcattaacacaggctggatatgtaggtgaagatgt

SEQ ID NO: 23097 - DNA, 389 bp, Oryza sativa
  Clone ID: uC-osflM202081a11b1
ctaacccctctcgcacccaatccaacccaatcgcctcctcatccactccgctctgcggccatggccgcctgctgctcctccctcgccaccgccgtctcctcctcctccgccaagcccctcgccggcatcccccccgccgcgccgcactccctctccctcccccgcgctcccgccgccaggcccctccgcctctccgcctcctcatccagatccgcccgggccagcagcttcgtcgcccgcgccggcggtgtggacgatgcgccgctggtcgggaacaaggcgcccgacttcgatgcggaggcagtcttcgaccaggagttcatcaacgtgaagctgtccgactacatcgggaagaaggacgttatttctttcttctacccgttggactt

SEQ ID NO: 23098 - DNA, 377 bp, Oryza sativa
  Clone ID: uC-osflM202081a12b1
gttaaatgcttccaccacggcccgaagcctgggcccaagcccaagcccaagccgagcccaccaaaacccaagcctggaccgaagcctaagcctcccaagcctgggccgaagccgaagcctcccaagccagggccgaagccgaagccgaagcctccaaagccagggccgaagccgaagccgaagccgccgaagcccgggccgaagccgaagccagggccgccacagccctggtggcctataccattcccgaagccgccgtgtccccccggcgccgacgggtcgtcgtcggcggtcgacgacaagaacaactgatcacacatcatacctaaattatacatatgattaatttgagatcaaagaattacagaagtaataca

SEQ ID NO: 23099 - DNA, 91 bp, Oryza sativa
  Clone ID: uC-osflM202081b02b1
ggatggtagcggcggccatgtctctcacgggatgggtccttattaagacgccacgcgtcgatgaggaggagaaccagtggaggaggagcct

SEQ ID NO: 23100 - DNA, 350 bp, Oryza sativa
  Clone ID: uC-osflM202081b03b1
ttttctagaaaggcaactgatctagcagctttggaattgttcatcgcaagtatcccaaatatctcaatgtctgtgtagtttaatgtgttcatcagacctgtgcattgtatgtctgtaatttgttcctttcagatcgtgcaattgtgcgttgccccctcttttctttgcattgaaggtcaagtcgggctcttgtccgcttatttctctaaatcctagtcagttcaaaaattatccatcatgacacatgaactgatggtggataatatggcaagaagcttttctaatcattcaagcttgaacctcttgtgtgttctactactatattacatgaaagaaaatgtctaatgtct

SEQ ID NO: 23101 - DNA, 122 bp, Oryza sativa
  unsure (1)..(122): unsure at all n locations
  Clone ID: uC-osflM202081b05b1
ggtantgatgctcctcgcctcctccaagatctggggtcgtaggtcgtcgcccacgacggctttgccatctgctatcccgtacccagacgttggatgcatgatctcctccgtcggcacaatcc

SEQ ID NO: 23102 - DNA, 378 bp, Oryza sativa
  Clone ID: uC-osflM202081b07b1
tcgatgggacagactcccgtgttccctcggatcttcggccatgaagctggaggtattgtggagagtgttggagagggtgtgactgatcttgcccctggtgaccatgttctccctgtgttcactggggagtgcaaggagtgtgcccactgcaagtcagcagagagcaacatgtgtgatctgctcaggatcaacactgacaggggtgtgatgattggtgatggcaaatcacgcttttccatcaacgggaagcccatttaccatttcgtcgggacttcgaccttcagcgagtacactgtcatgcatgttggttgcgttgtgaagatcaacccggcagcttcacttgataaagtttgcgttcttagctgtggcatttctact

SEQ ID NO: 23103 - DNA, 385 bp, Oryza sativa
  Clone ID: uC-osflM202081b08b1
ttctttctaccgcaactgcgtcatctccggcaccggggacttcatcttcggcgacgccgcggcggtgttccagaactgcgtcatcgtgctccgccgcccgctcgacaaccagcagaacatcgccacggcgcagggccgcgccgaccgccgcgaggccaccggcttcgtgctccagcactaccgcttcgccgccgagtcggcgctcggcgacgcctcccgccccgccgtccgcagctacctcgcacgcccgtggcgcgagtactcgcgcacgctcatcatgaactccgacatccccgccttcgtagacaaggccggctacctcccgtggagcggcgacttcgggctcaagacgctctggtacgcggagtacgggaacaagggcgcc

SEQ ID NO: 23104 - DNA, 347 bp, Oryza sativa
  Clone ID: uC-osflM202081b09b1
tctttggcgcgcggagcctgatccatcacactggggcgaatataatcctctccaatgcctgcagaagagagcaagatgttcgggttcgggcactcactgccatcatggccaagagcagacagcccatcaccacgtgcgcggatgatgcagcgcgcaccattccaccttcaagatcttctgacccgcctacgaggggtactgcgtcgccaggcgcgaggggaacgtacttctatatctgaccaacccgagagacgagcaccagcactgttacaaggacatgcgctttagcgccaagatcaaggacttggagggcaacccggcgttcgcgctcgtcaacaaggccaccg

SEQ ID NO: 23105 - DNA, 438 bp, Oryza sativa
  Clone ID: uC-osflM202081b10b1
tttttgatatccacgcacgatagtggcatctattgcttcaacacagtgagccatgtgtggagcacagtggccaccggctggaccctgccatttgttggtctcgccgagtattgccaggagcacggcctttggtttggcctctcacacactagagacaggaggagcttggtcctctccgctttggaccttgatagcagccatctgccagtgcttctcagccttcctctggagttcacgccacccgatgccctcaagcttgtcagctcataccttgtgaacctaggctctgccaagttctgcatcgccaggttattccagactgatgaggaccagcgtgatggcgaggagctgtttgcagtgttgaccgccgtcgaggtggaacgctgcgatgacgacgatgctggtgccaatggtggagggctccgcatgctgaaacac

SEQ ID NO: 23106 - DNA, 461 bp, Oryza sativa
  Clone ID: uC-osflM202081b11b1
agaaaaggcctgtgtcaaggagagggtagtagcaccttgctctcctttgccttcagagaaaccggaagcaatggcgtctgctactctcctcaagtcatctttccttcccaagaagtctgaatggggtgccacccgccaggctgccgcccccaagccggtgactgtctccatggttgtccgcgctggtgcctacgacgatgagcttgtcaagaccgcgaaaaccattgcatcaccaggaaggggtatccttgccatggatgagtcgaacgcgacctgcggtaagaggcttgcgtcaattggccttgagaacaccgaggccaaccgccaggcttaccggaccctccttgtcaccgcaccgggcttgggacagtacatctccggtgctatcctcttcgaggagactctgtaccagtcaacttgagatggcaagaagattgtcgacatcctcactgagcagaaaa

SEQ ID NO: 23107 - DNA, 483 bp, Oryza sativa
  Clone ID: uC-osflM202081b12b1
tttttcggcctgggcatggccgctcgtcttcctcgtgtcgtgctgctgttcttggacccagcggcgaatcttggttgctgcgaccactgacgccaatgatgttactgtcctcaatgcgctattcaccagcctcaattcgccggggcagctgcgcggttggcaggtgaatggcggtgacccatgtggcgcctcatggcagggcatcacctgctctggatcatcagtcacagcaattaaattgccgagcttggggctttcggggaatctggcctacaatatgaacaccatggagtccctagttgagcttgacatgagccaaaataatcttgggggtggccaaaatattcaatacaatcttccaaataagaagcttgagaggctcaatcttgctgggaaccagtttgtggaaatgtgccatactcattttcacaatgcctaaccttagtatctaaccttaatcataaccattacaggaaatatgac

SEQ ID NO: 23108 - DNA, 392 bp, Oryza sativa
  Clone ID: uC-osflM202081c01b1
ttattctcctttaccccaatctcgtgagcggcgacgaactttgccaccgatttcgatccttttttttggcagcgtgtagtgacgcgagagagaaatggcgagcaagaggagcgtgggcaccctgacggagtcggatctgaaggggaagaaggtgttcctccgcgccgatctgaacgtgccgctggatgacagccagaagatcaccgacgacacccgcatccgcgcgtcggttcccaccatcaagttcttgatggggaagggcgccaaggtcatcctggccagccatctgggtcgcccaaaaggtgtaaccccgaagtacagcttgaagcctcttgttccgcgcttgtctgagcttcttggtgttgatgttgtgatggccaatgactgcatcg

SEQ ID NO: 23109 - DNA, 442 bp, Oryza sativa
  unsure (1)..(442): unsure at all n locations
  Clone ID: uC-osflM202081c03b1
ttctccaccctctcgccgtcgcagatccgatccaggaagagctcgccgccgccgctgccatggcgctctccgtggagaagacctcgtcggggagggagtacaaggtgaaggacctctcccaggcggacttcggccgcctcgagatcgagctcgccgaggtcgagatgccggggctcatggcgtgccgcgccgagttcggcccctcccagccgttcaagggcgcccggatctccgggtccctccacatgaccatccagaccgccgtcctcatcgagaccctcaccgcccttggcgccgaggtccgctggtgctcctgcaacatcttctccacgcaggaccacgccgccgtcgncatcgccagggactccgccgccgtgttcgcctggaagggggagaccctcgaggagtactggtggggcaccgagcgctgactcactggggc

SEQ ID NO: 23110 - DNA, 197 bp, Oryza sativa
  Clone ID: uC-osflM202081c04b1
cctttgtctacctccagcagcatcagcggcggcgggagctggatcctccctcccgagactgagagcacggcaagatttgcaaaattgcaaggcgagtagttgcgtgagactgagtttttgagtgagcgagttagccatgctggtaaggagcgcctccacgccggttctcggcgcgctcctcctgttcgggagccact

SEQ ID NO: 23111 - DNA, 439 bp, Oryza sativa
  Clone ID: uC-osflM202081c07b1
tcgtgtctcctttcccctccttcctcctcccctgtcgtcttagcctcagctcgccgcgagacgaatcctcccctcgccgccgccgggtccgatcgacggcggtatcgagggacggagggggcgcgcccgttctctcgccgtacaccgtcgtcgccgaccggctccctcgacggcacgagtttgaagttggaaatcaaccttgttgttctctgtagcgctttcctttggattgcggagaatttcaaacaaaaccaacaaacctttgcatctgactgacttgaggtaactatgccaaaggacaggagcacccgtgccgtgtcatacgagcgccgccggtctcgtgtttcgccgtacccctccaatgggaagggctgtgctcgcaggtcagaggagtctgctgctgctgcccgtgccgctgccgcgaagcaggctgcggaat

SEQ ID NO: 23112 - DNA, 292 bp, Oryza sativa
  Clone ID: uC-osflM202081c08b1
tcgttttttttttgcatcctgaagcggccaagccagaccaacaatgttactcatttaggcctcgcgatttcgcaagcatatgtagccggggtgaaacaacaatgtgacaatgactcaaaaagaagaagaaaaatggcaatctaacacgcatacgctaatacgctatcagttgacgcgtgccagacatcagtgcacacatctcaccatggtctacaatcatcagactggatcagctaatggtaattctacagctgcacttttgatggaccatatcgattcttcacttggttct

SEQ ID NO: 23113 - DNA, 457 bp, Oryza sativa
  Clone ID: uC-osflM202081c11b1
tcgttcacactctccgtctcctcctcatggcgatcgcgaaggcttggatctcgctgctgctcgcgctcgccgtggtgctgtcggcgccggcggcgagggcggaggaggcggcggctgccgaggaggggggcgatgcggcggcggaggccgtgctgacgcttgacgcggacggcttcgatgaggccgtcgccaagcacccgttcatggtcgtcgagttctacgccccgtggtgtggacactgcaagaagctcgctccagagtatgagaaagctgcacaagagctaagcaagcacgatccaccgattgttcttgccaaggttgatgccaacgacgagaagaacaagcctcttgctaccaagtatgagatccagggtttccccgcactcaaggatttcaggaaccagggcaagaacattcaggaatacaagggccccgaggaggctgagggcattgttga

SEQ ID NO: 23114 - DNA, 467 bp, Oryza sativa
  Clone ID: uC-osflM202081c12b1
tcttagaacaagggcgcgaggaggctgccactgcgccaagaggaggaggatgatttcgaggccgacttcgaggagttcgaggtggattccggcgagtgggaggtggagtccgacgccgacgaggccaagccgctcgccgcgccccggagcggcttcgctaaaggtggattgaaaaacactactgttgctggtgctgatgggcctgcagcaaggtctgctaaaaggaagagaaagaaccaattcaggggtatccgccagcggccatggggcaaatgggctgcggaaatcagagatcctcgcaaaggtgtccgcgtctggcttggcaccttcaactctcctgaggaagctgccagagcttatgatgctgaagcacgaaagattcgaggcaagaaagccaaggtcaatttcccagatggggcttcagtggcttctcagaagagtcatgctgagcccttcttcatgaacat

SEQ ID NO: 23115 - DNA, 490 bp, Oryza sativa
  Clone ID: uC-osflM202081d01b1
tgtgatctgagctctggtcagccgagccaagcctgccggtcgccggaggaggcaacgacgaccatgatggcgccgtccttgtccaccgccgtctcctctcttctcctcctcctcctcctagccgctgctatctccgtctcctcctcaccgccgatgccggaggacagcatccgggtcatctccgccgagaaaaggatcgacctcaccagccccatagtcaaagttttcctcacactaaagctcgagaatgatgccactgcccctgaagcatctcaagttctactcgcattcacacccacagaggttgaacatcttgcgattgtcaaggcgaccagagcggaggggaagcgcaagaagaagatatatgtgcctctctctgtgaaagcctctgatcttgctgccgctccaaatggtgctcgccttgactccattttgctgagcacttcattgaaacctgctgaggtgaccacgctggaagttttttttgctt

SEQ ID NO: 23116 - DNA, 146 bp, Oryza sativa
  Clone ID: uC-osflM202081d04b1
gtggtacacccccctgtactaagctcaacttatgatgcatgctcgaaactacggactgaatgctaaggaaaaggagcacatcgaggcgaaagcatatagagcatttcctaagcacaggcagcttgggatggagggggacctgacca

SEQ ID NO: 23117 - DNA, 207 bp, Oryza sativa
  Clone ID: uC-osflM202081d05b1
attattttaagtgtttgccggagattatggggtcggtggctgcggaggaggtggtggtgttcacgtctatagctgcggacattgagattgacaacagtatcactgctcagtgagtacatatttctcaagaattgtcaattaccgacatactgcttctccagatctccttacagaccttgtcatccctccctatctctttcttttctg

SEQ ID NO: 23118 - DNA, 96 bp, Oryza sativa
  Clone ID: uC-osflM202081d06b1
ggataatatggtgtttcttgacgtggtttagggcttcaagaacgccgccatgatcgggacaaggtgtgagacgacatgggtttgggtggtgatggt

SEQ ID NO: 23119 - DNA, 104 bp, Oryza sativa
  unsure (1)..(104): unsure at all n locations
  Clone ID: uC-osflM202081d07b1
tcnggactacctggagctgcagcccgacctgtgggcgctggtccgcggcgcgcacacgttccggtgccccaaccttggcctcaccagctgggtccgattgccga

SEQ ID NO: 23120 - DNA, 393 bp, Oryza sativa
  Clone ID: uC-osflM202081d08b1
tcggtggagaagaagaagaagaagaagaagaagaggggggaggaggaggagcagcatggctgaacacaaggaggagcagtcggtgatggagaagctctccgagaagctgcacggcgactcctcgtcgtcttcctcggactcggacgacgacaagaagggttcctcctcgtcgtcggcggcggcggccatgaaggccaagatctaccgcctcttcggccgcgagaggcccgtccactccgtcctcggcggcggcaagcctgctgatctcgtgctatggaggaacaagaagatctccggtggggtgctcgccggagccacggccatctggctactcttcgagatcatggagtaccacctcctcaccttggtgtgccaatggctcattctctcctg

SEQ ID NO: 23121 - DNA, 106 bp, Oryza sativa
  Clone ID: uC-osflM202081d09b1
tcttcatcgcatctccggctgagagagatcctaattccgagatggccacgacgcgggggcagctgcccgtcgaggacgtgctgcgcgtgaactggagccggcgatt

SEQ ID NO: 23122 - DNA, 448 bp, Oryza sativa
  Clone ID: uC-osflM202081d10b1
tgttagagaaatagcaccaacaaacaacaacgcctattgtctagtagagcctagagagagaaagcgcgaggagaggagaggagatggtgctttttttttttttttttctttttcttttttctttctcttcttttttcttttttttttttcttttccttttttttcttttctcttcctcttttttttttctttttcttttttctttctttttttttttttctcctttttttttttttctcttttttttttttttttttttcttctttattttttatttttttcttttttttctttctctttctttttttttcttttttctttttttttttttctttattttttttttttcttttttttttcttttttttttttctttctcctttttttccttttctctcttctttctttttttcttttctctttttttttcttttttctctcttttttt

SEQ ID NO: 23123 - DNA, 197 bp, Oryza sativa
  unsure (1)..(197): unsure at all n locations
  Clone ID: uC-osflM202081d12b1
tcgttccgctgcacgagccgtcatctctgcgcctgggcttcccctcgcgccggcctctgcctccaccaccaccgccgccgccgncgcagcagccggaggacgaaactcgccgtgcgcgcgatggcaccgacgttgtnctcggtgtcgacggcggaggcagctcccccggggctgaaggagggcatcgtggggatcta

SEQ ID NO: 23124 - DNA, 170 bp, Oryza sativa
  Clone ID: uC-osflM202081e02b1
gctacaagaatgtgattggtgcccgccgtgcgtgctggcgtattgtctcatccattgaacagaaggaggagggtcgtggcaatgaggaacatgtttctctgatcaaggagtaccgtggctagattgaagcttctctgagcaagatctgctgatggtattctgacgatgct

SEQ ID NO: 23125 - DNA, 252 bp, Oryza sativa
  Clone ID: uC-osflM202081e03b1
gtgatacaaacccctctcactcccagatacctgctgctgccactagcccactaccatggatccttgcaagttccggccgtcgagctcgttcgacacgaagacgacgacgacgaacgcgggagctccggtgtggaacgacaacgaggcgctgacagtggggcccagggggccgatcctcctcgaggactaccacctgatcgagaaggtggcgcacttcgcccgggagcgcattccggagcgcggtggtcacgc

SEQ ID NO: 23126 - DNA, 424 bp, Oryza sativa
  unsure (1)..(424): unsure at all n locations
  Clone ID: uC-osflM202081e05b1
gtantgcacacacggcggaagcaacgccactagcgtgacgtacgtacggcagcaatggccatcgccaccgagtcgcagcaggcgcaggtgcaagccgccgccaccgacgccgtcgcggcggcggcggtcgggcgcaaggtggtggacgaggtgtccggctggctgcgcgtgttcgacgacggcaccgtcgaccgcacgtggacgggtccccccgaggtgctcccgctgatgcagccggtgcccgcctacgccgagccgcgcgacggccacacgctgcacgacctccccggcgagcccaacctccgcgtgtaccttcccgaggtcgccctcgccgagcggcgccttcccgtcgtcgggcagcttcacgggggcggcttctgcatctcccacccgtcctggctcatgtaccaccacttttacgcgc

SEQ ID NO: 23127 - DNA, 119 bp, Oryza sativa
  Clone ID: uC-osflM202081e06b1
agtagtatgcagcgccaccggtcgcgagatctgctactcctcgtcgccgacgagccgcctcctcctcgtcgtcgccggaggcagagcaccggagcagccacccaatggcgtccccggac

SEQ ID NO: 23128 - DNA, 405 bp, Oryza sativa
  Clone ID: uC-osflM202081e07b1
tctgttgctgctgctcctcccgttttccgatcgcagccatgggaacccgcagcgtggccttggtgctcctcgcggccgtgctgctccaagccctcctccccgcttcggcggcggagggtttggtgcggatcgcgctgaagaagcgcccgatcgacgagaacagccgcgtcgccgcgcgactctccggcgaggaaggggcgcgccggctgggcctccgcggcgccaactcccttggcggcggcgggggtgagggcgacatcgtggcgctgaagaactacatgaacgcgcagtacttcggggagattggcgtcggcactccgccgcagaaattcaccgtcatcttcgacactggcagctccaacctctgggtgccgtcggccaagtgctacttttcgattgcgtgct

SEQ ID NO: 23129 - DNA, 147 bp, Oryza sativa
  Clone ID: uC-osflM202081e08b1
tgcgcgatggccgacacggcgtcgccggcggcggccagggaggcgatgatcgagcccgcgtcgacgccgctgctgcggcggagggggtcgtacacgaggtccatgtcgcacgcgcgcgacgagctgggcagcttccggtcgtgcctg

SEQ ID NO: 23130 - DNA, 136 bp, Oryza sativa
  Clone ID: uC-osflM202081e09b1
tgccgcgcccccacacctcgcctcctcctcgggggggatctcgccgcatcatgtgccgccgacgacgacgaagaggaagacgaccgccatggggacggtgagcggggaccagacggcggagcaaaggcgtggaacg

SEQ ID NO: 23131 - DNA, 399 bp, Oryza sativa
  Clone ID: uC-osflM202081e10b1
tttttaagctgggacatatgaccctaagcgcctttggggtgtgacgacacttgatgtagtgagagccaatacttttgtggcagaagttcttgggcttgatcccagagatgtaaatgttcctgtcattggtgggcatgcaggagtaacgatattaccactcctttcacaggtgaatcctccctgctcatttacctcagaagagattagttatctcaccactcgcatacagaatggtgggacagaagtagtcgaggctaaagctggagcagggtctgcaactctttcaatggcgtatgcagctgccaaatttgcagatgcctgcttgagaggattgcgcggagacgctgggatagtggagtgctcttttgtagcttctcaggtgatagagctgcctttttt

SEQ ID NO: 23132 - DNA, 369 bp, Oryza sativa
  Clone ID: uC-osflM202081e12b1
ttttatctctttagctcggatcatctctgcattgggatttgcagctgctcgtcacggcaatggcatccaccaacagctggacccacgagatcgagtcgccggtggccgcgccgcgcctgttccgcgccgccgtcatggactggcacacccttgcccccaagatcgcctcccacatcgtcgccagcgcccaccccgtcgacggcgacggcagcgtcggcagcgtcaggcagttcaacttcacctcagccatgccattcagccacatgaaggagaggctggagttcctggacgtggacaagtgcgagtgcaagtcgactctggtggagggcggcggcatcggcaaggcgatcgagacggcgacgtcgcaca

SEQ ID NO: 23133 - DNA, 91 bp, Oryza sativa
  Clone ID: uC-osflM202081f01b1
aataatttcttcatctcctggtcgccggacacgtggaatgttatgagcaagacgctcgactcaagctacaaggaccgtttcaagaggtaga

SEQ ID NO: 23134 - DNA, 58 bp, Oryza sativa
  Clone ID: uC-osflM202081f02b1
aatggcgcctatataccggaggccgggtacaacccggggaagttgtgcgacaacgcgg

SEQ ID NO: 23135 - DNA, 509 bp, Oryza sativa
  Clone ID: uC-osflM202081f06b1
tgtttttaggcctgtgctcaagtatttctgacaaaggtcttgcttttatcagttcaagctgtggaaagctgattgagcttgatctctatcgctgcaattctattaccgatgatgggctggcagctttagctaatggctgcaagaagattaagatgctaaacctatgctactgcaacaagattaccgacactggtttgggccacctaggctctctagaggagctcacaaaccttgaactgaggtgcttggtccgcataacaggtattggaatctcatcggttgccatcggctgcaagaacctgatagagatagacttgaagcgttgctattctgtcgatgatgctggcttgtgggctcttgcccgatatgcgctaaaccttaaacagcttactatatcctactgccaagtcactggcctgggcctgtgtcacctgttgagctccctgaggtgcctccaggatgttaagatggtacacctctcatgggtctctatagaaaggttcgagatg

SEQ ID NO: 23136 - DNA, 430 bp, Oryza sativa
  Clone ID: uC-osflM202081f07b1
ttgttccccaagatccagatcgccggtcacccccacgaactcgctcgagatccagagagagagagagaggcagtttcttggttgattttcgaggatgaagaggaagactcggaacaagataatcctgacgacgctgctggtgtcggcggcggcgatcctgatcggcgggacggtggcgctgatcctgacggcggggacatggaaggtgaagatgaaggagtcgcgcgagaagatctgcgacaaggggtgggagtgctcgggtagcaagtactgctgcaacgacaccatcaccgacttcttcaaggtgtaccagtttgagaacctcttttccaagcgcaacagccccgtcgcccacgccgttggcttctgggacttccagtccttttattaccggcgtcgccctttttaagccccttggtttttgcaccac

SEQ ID NO: 23137 - DNA, 452 bp, Oryza sativa
  Clone ID: uC-osflM202081f12b1
tctttagtggtgcaaggcaggcagcaactttcttgttcttcctcctatcataatcggctcatccttttcctcctctggagcaaccatgtccatgcagaaggtgtactagatatatagagttagttcgcagctgctccctacttacataaacaaacgcattcagatagccagcttcttgatcggcaacagcagctagttagagtgcaacaagaggtagcagagacaattttttttggcaaggcaagcaaaagctgatcgaggagagcgatcgagcaggtgttgatcgatcggtgcgaggaaacagagacaattttcccacacagattgtgatttggtagcagcagcaatggcgggcgttggattcgtggaggacatgctgcgggagcagagcctcctggaggcgacctgcggcgaccttttcgaccacatcgacgacctgctcgacttcccca

SEQ ID NO: 23138 - DNA, 99 bp, Oryza sativa
  Clone ID: uC-osflM202081g01b1
gataacttccatgaatgcgagaacctcttccagagccagagtggctttaaggggggcgcgatgaacaagaagccttatgctgacccaactgtctgtagg

SEQ ID NO: 23139 - DNA, 219 bp, Oryza sativa
  Clone ID: uC-osflM202081g03b1
gctgatttgaagccctgaaaaacaacactgtcgacaggctttgatggaacaagacgggcgaggcgagctccactcccaggtgtcgcaatacaacaagagattggtaaagctcctgagataggacaagatacactccagagtacacagtgtcgactgatggcagccacaggcccaacaggtggagtacaaaaactgacgcatgcatcagctcatactggg

SEQ ID NO: 23140 - DNA, 407 bp, Oryza sativa
  Clone ID: uC-osflM202081g08b1
tctgtctcactacccttgagtctcttgaggctattggtggaaaggacaagcttgtggtctcgacttcctgctcactcatgcacaccgctgtggatcttgtaaatgagaccaagctcgatagcgagattaagtcatggctcgcttttgctgcccaaaaggtggttgaggtgaatgcccttgctaaggcattggctggacagaaggatgaggcttactttgcagcaaacgctgctgctcaggcctccaggaggtcatcacctcgtgtgacaaacgaggaagtccaaaaggctgctgctgctctgaaggggtctgaccaccgccgtgctaccaatgttagcgctagactggacgcacagcagaagaagcttaaccttccagtccttcctacaaccacaattggttcattc

SEQ ID NO: 23141 - DNA, 415 bp, Oryza sativa
  Clone ID: uC-osflM202081g10b1
tttgccagagagagattttggtgccaatagacacacactgatttcatcatcatctaggcccaaaaacctctactcttccgcgtcttggaaaattcttctcagattgcatcaccagaaggaggattgtcagattgctgctgctgctcttgtcctagttgtattcaggattcagaatttgggcggacgacgacgaggataaatcggatcttttcttcctccttaattaattcctgaggcgtgtgtgtgattagttcaaaaaagaaaaatagaagcgagatgtcggcgttgctcgatctgctcatgggggtcttccgccagccgaccctcggcggcgtcgccctcgagctcgcctccctcgccgcgccgctctggctcgccgccctcgtcggcctactcatcggctgggcgtggcgcc

SEQ ID NO: 23142 - DNA, 177 bp, Oryza sativa
  unsure (1)..(177): unsure at all n locations
  Clone ID: uC-osflM202081g12b1
ttcactcccctcggttggttcgctcgctccccgggattatcagccatggggcccacccgtcagtctcactccctcctcctcaccttcctcctcgtcggcgccgccgncgncgccgncgnggnctcgccggaggacgggagccccttcctccgcctccccaccgtctcgggccttccc

SEQ ID NO: 23143 - DNA, 239 bp, Oryza sativa
  Clone ID: uC-osflM202081h01b1
gttcttgacaccgccaccgccgatccgaagggcggggacgacgaccaccaccgccgccgccctcgtcctcgccgccggcggccatggcgttcggcgaccgcatcaccaccttcgaggactccgagaaggagagcgagtacggctacgtccgcaaggtctctggacctgtggttgtggctgatggaatgggaggtgctgccatgtatgaactcgtccgggatgggcacgataatctttat

SEQ ID NO: 23144 - DNA, 115 bp, Oryza sativa
  Clone ID: uC-osflM202081h02b1
tacatcaatgggcacgaccactgcgtgtaacacattagcagcagagacagtcctatccaatacttcacaagtggaggtggttcaaaagcatggagaggagtctggctgccagatt

SEQ ID NO: 23145 - DNA, 191 bp, Oryza sativa
  unsure (1)..(191): unsure at all n locations
  Clone ID: uC-osflM202081h03b1
gcatangcaggctcagattgctgagcttaaaggctgtgttaatatacaggagacgcactgcaccgatgggaaactgaactacagtattgcaacccgttgcttgagggagaccggttcgaataattcagcttggaatcagagatacctggtattaacaagttcaccacttcttggaggccttgcagcaatgc

SEQ ID NO: 23146 - DNA, 125 bp, Oryza sativa
  Clone ID: uC-osflM202081h06b1
gtggtgagcgagcggacatggcagcatcgctccgatccttggccaccctgaggcggccggccaagctcggcggccgggcctcctccgacgcgctgccatagagcccgtcttcgcacgtcgacagg

SEQ ID NO: 23147 - DNA, 486 bp, Oryza sativa
  Clone ID: uC-osflM202081h10b1
ttccacggcaacgacttctccggccccatcccggactccatcgccgactgcaagcgcctctccgacctctgcctcaacagcaaccagctcgtcggcctcgtcccaccggcgctcgagtccatggccggcctcaagtccgttcagctcgacaacaacaatctcttgggccccgtcccggcgatcaaggcgcccaagtacacctactcacagaacgggttctgcgccgacaagccgggggtcgcctgctcgcctcaggtgatggcattgcttcacttcctcgccgaggtcgattaccccaagaggctggtagctagttggtccgggaacaattcctgcgtggattggctgggaattagctgcgttgcagggaatgtgacgatgctcaatttgccggagtatggactcaatggcacaatcagcgacagtcttgggaatctgagtgaactctcggacatcaaccttatcggaaataaccttactgggcat

SEQ ID NO: 23148 - DNA, 298 bp, Oryza sativa
  Clone ID: uC-osflM202081h12b1
tcgtaacctctcccaaaattagccccgatccgatcgcttcctagccctgattcgaggtaaaaaaggggaggagaagatgagggagatcttgcacatccagggcgggcagtgcgggaaccagatcgggtccaagttctgggaggtggtgtgcgacgagcatggcatcgacccgacggggaggtacgccggcacgtcggacctgcagctggagcgcgtgaacgtctactacaacgaggcgtctggcgggcggttcttgcccctcgccgtgcttatggacctggagcccggcaccatggac

SEQ ID NO: 23149 - DNA, 447 bp, Oryza sativa
  Clone ID: uC-osflM202082a03b1
ttcctttgcccaagctaatccccctcctcttcctcgtcgccggcgagagctcttcgtcttctccaactcgaccggaagcaagcgcgcttccgatccgccatggtgctctcccacggcgtgtcgggctccgatgagtccgtccactccacgttcgcctcccgctacgtccgcacctccctccccaggttccggatgccggagcagtcgatccccaaggaggcggcgtaccagatcatcaacgacgagctgatgctggacggcaacccgcggctgaacctcgcgtcgttcgtcaccacgtggatggagcccgagtgcgacaagctcatccaggccttcgtcaacaagaactacgtcgacatggacgagtaccccgtcaccaccgaactccagaaccgatgtgtgaacatgattgcacaccttttcaatgctcctctaggggactctgaa

SEQ ID NO: 23150 - DNA, 355 bp, Oryza sativa
  Clone ID: uC-osflM202082a04b1
ttggataggcacttcaccaaccctctgcctcccttcggccgccctccgccgccgcatgcaagccatcctcgccgctgccatggccgcccagaccctcttgttctccgccaccgcccctcccgcctcccttttccagtccccttcctctgcccgccctttccactcgctccgcctcgccgccggccccgcgggcgccgccgctgccagggcgctcgtcgtcgccgacgccaccaagaaggccgccggcgtgctcaagggcacctcccaggttgagggagtcgtcacccttacccaggatgaccaagggtcctacacagtgaatgtcccggtgacgggacttactcctggactttac

SEQ ID NO: 23151 - DNA, 393 bp, Oryza sativa
  Clone ID: uC-osflM202082a05b1
atccatcaagcgaagcaaacccatcgcatcaaggacggaatcgaaggcacgtaggtgagcaccaacagctacatcggccatggctcgcgcgctcgttctcgtcgtgatcctcctcgccgctatcgcagtggcaccgttcgcggaagcctcgacagtcaccggtggctccagggtattgttggcctccgacgcgcccgctgagagcccggctgggcctgcggcggccccaggcccagcggaagagtccagcagtgaatctgctccatctccgagcgccgctgatgcctgatcgagtaataatgaagtccaagtgaaaaattcttcatcccaagaacattgatcaagcatatatgtcctacccttcctttataaaggctaacagagcctcatttt

SEQ ID NO: 23152 - DNA, 136 bp, Oryza sativa
  Clone ID: uC-osflM202082a09b1
tcggtgtctttggaactctgggacattagggagaagaacgccatgacggtccacagtgctcatgatggtttagttgcagcgctagcagcatctagcgcaacaggcaaggttgcctcagtaagccatgataggtttg

SEQ ID NO: 23153 - DNA, 71 bp, Oryza sativa
  Clone ID: uC-osflM202082a10b1
ttcgttaaaaaaaaaaaaaaaaaaaaaaaaaggaggaataaataaaaaaaaaaagaggaaacaagacaacg

SEQ ID NO: 23154 - DNA, 407 bp, Oryza sativa
  Clone ID: uC-osflM202082b01b1
tttctatcctagtgctggtgctctactctactgtagacgtcatcttttgtatactaacccgtttgctagccgaggcgagtagagtttagttttcttcttttttcttctatctttttttttttttttttcttttctatttttcttttctttttttttttttttcttttttttttttctctcttttttctcttttttttttttttcactttttcctttttttttttttcttcttttttctttttttctttttttctcttctcttatctctttccattttttttctattctttttcttctctctattccttactttttctctcttttctttcttttctctcttttattttattctttatcttatctttttttaccttttttctttctatatctctcttttatcttttttt

SEQ ID NO: 23155 - DNA, 257 bp, Oryza sativa
  Clone ID: uC-osflM202082b02b1
ttaggtggcacaaggacggcagcggcgacgaggaggcgaaggcttgcgacaaggggtgggagtgcagcgggagccggttctgctgcaacgacaccatcaccgactacttcaaggcgtaccagttcgaggagctcttcgcccaccgcaacgaccgctcgctcgcccacgccgccgggttctgggactaccacgccttcatcaccgccgccgcgctcttcgagccccgcgggttcggcaccacgggagggaaggaggtt

SEQ ID NO: 23156 - DNA, 271 bp, Oryza sativa
  Clone ID: uC-osflM202082b03b1
gttgctatattagagacctaccgatcccacacatgggatgatctggaggggaggtggggtattaacccgctagcaaggtttggtgactcacaggatcactacgtgcctgtcgatgggcctgatttatatgaacaggttaaagactgctcagtcactgctggactagagcagtatcggcatgtatagggatgctatgcatgaagctaaggtcaagcatggcacgaccttatcaggccaattgatgtatacaatttgcagaccgctgactgat

SEQ ID NO: 23157 - DNA, 488 bp, Oryza sativa
  Clone ID: uC-osflM202082b06b1
ttcgttatcgcggaaaccctagcctcctctctgtctgggctcgttcactcgttcctggcgccgccgccgcgacccgcgagcgggaggaggagccatggcgccgaccaagggggaggggccagcgatcggcatcgacctcgggacgacctactcgtgcgtgggggtgtggcagcacgaccgcgtcgagatcatcgccaacgaccaggggaaccggaccaccccctactacgtcgggttcacggacaccgagcgcctcatcggggatgccgacaagaaccaggacgtcatgaaccccatcaacaccgattgcgatgccaagcagcttatcggcagacggctctctgatgcctctgctcagagcgatctcaagaggaggccttacaaggatattactggcccaggggataagcctatgattgtagggcagtaccagggtgaggagaaggcattcttttgccaagaaatttcatcctggcccttataaagat

SEQ ID NO: 23158 - DNA, 221 bp, Oryza sativa
  Clone ID: uC-osflM202082b08b1
gtgactttgttggctaggctgggttaatctcctccccggtctggtcgattcgaagccatggagatatagcctgcaagcttcatggggctggagcgagctcgtatttcttgatgcaagtttcagcccctccaagaacagggtaggagagattatttgtgttccttccattgctggttggttgctgcagtctgcatgtggtggattcttgggaagaaggtggt

SEQ ID NO: 23159 - DNA, 169 bp, Oryza sativa
  Clone ID: uC-osflM202082c01b1
agagctagaagcagagagagaagaagaggaagcagaggaggaggagtccaagaattgaagcaggagaagaggaggtggtggtttgattcaagaagaaggagaagagcttgagcatggatgttgtgaggaggtacgatcttgctggtgattgtatattttttgacgtttc

SEQ ID NO: 23160 - DNA, 326 bp, Oryza sativa
  Clone ID: uC-osflM202082c03b1
ttaatgttgtatttggggaacgatgattctggtgctggtaccggtattggtaagtttagtcccgatagtaaaggaaaggctaagatggttgtggaagagagttcattgtctgttagctcaggtgcggatcaaatggatttgaactcagtgatttctgaagaggtgcagagtttcccagcagatcattgggaaccacgtcggagagaaagggcaagacagagagctattgaaatggctcctaggtttgcattcttcaaagcagatgaagatggacatagcgatgatggtgatgatgatgatgacaatgcaaactagttggaaccgta

SEQ ID NO: 23161 - DNA, 441 bp, Oryza sativa
  Clone ID: uC-osflM202082c04b1
tctcatagctgctcgcttgctcattccccaatttgaagtcgctcgtccttgttggctgtcaggggttcagcactgatgggcttgctactgtcgctaccaattgcagatttatgaaggaactggacttacaagagagtctggtggaggatcgagactctcgttggcttggatgttttcccaagccttctacattactagaatccttgaatttttcttgcttgaccggggaggtgaatagccctgcattggaaatactggttgcaaggagtccaaatcttagaagcttgagattgaaccgttcagttccacttgatgttttggccagaattctttgtcgcagacctaggctggtggatttattgacaggatcttttgtacgagggaatattgctggtgcctatgctgggcttattaataattttcaacattggaagtttgctg

SEQ ID NO: 23162 - DNA, 139 bp, Oryza sativa
  Clone ID: uC-osflM202082c06b1
caataaccttccagaaccccagagaggcggcgagatgcacggtttactcacctccgggtgcctgcacccccctcccctcctccgccgtgccttcccgagccctgtcacccgccttcttccgctccaaaccctagccctc

SEQ ID NO: 23163 - DNA, 511 bp, Oryza sativa
  Clone ID: uC-osflM202082c08b1
tcgttggaatgaaagagcagcaactgatcgagaaggatgtattctccttctggctcaaccgcgatcctgatgcaccgacagggggtgagttaatctttggtggtgtagacccaaatcattacaaggggagccatacatatgttcctgttacccgcaaaggctactggcagtttgagatgggggatcttcttattgatgactactcaactgggttctgttctggtggttgcgccgctattgcggattcagggacttcattgctcggtggcccaacaactattgttgctcaaattaatcacgcaattggagctgagggaattgttagtatggaatgcaaacaagttgtgcgggactacggggacatgatcctcgagatgctcatagcacaggcaagccccatgaaactgtgctctcagattggtctctgtgcatttgatggtactcgttctgtcagaaacaatatagagtctgttgttgattaagaaaaagtgggctcagatcttttctgcac

SEQ ID NO: 23164 - DNA, 302 bp, Oryza sativa
  Clone ID: uC-osflM202082c11b1
tcgtcgaagcggagggtgccatcgcagcagccatggccgactagcggctcacggtcactgcggcctcggcaacgtccggcgatcgtcgtcgatccttaccttactccctcacgccccctagctgtctcctcgagaagaatcttgcttaagttgatttacctccgggtgtttacggtctttcaaattgctaagcataatcttgaactttccaagaaaaaaaaaacaggcctgcattaactagtgccagggcagcactaatggatttgtgcgacgacactcatttcccttgggaggggtcccct

SEQ ID NO: 23165 - DNA, 451 bp, Oryza sativa
  Clone ID: uC-osflM202082c12b1
tcgctagaccccatttcggtgcttaaccaaactgaggataatatcagttcatccacagcaatgtcggcctactgcggcaagtacaaagatgagctcataaaaaatgctgcctacattggcaccccgggcaagggtatcctcgccgcggacgagtccactggcaccatcggcaagcgcttcgccagcatcaatgttgagaacgtcgaggataaccgccgtgccctccgcgagctcctcttctgcacccctggcgccctccagtacatcagcggcgtgatcctcttcgacgagaccctgtaccagaagaccaaggatggcaagcccttcgtcgatgtcctcaaggagggccggtgccctccccggcatcaaggtggacaagggcaccatcgaggtcgccggcaccgacaaggagaccaccacccagggccacgatgaccttggcaagcaatgc

SEQ ID NO: 23166 - DNA, 296 bp, Oryza sativa
  Clone ID: uC-osflM202082d05b1
gtaatcccacctcctccctcgccgccgccgccgccggtgacttttaccgcgaccgcgtgccccgccggcgcggtttttgtgtattctttattccttttcgcattcgtctgttcgttctattttctttttcatctctttcctttctcttcttttaatatcctcttttttttcattttttttcttcctactcttttttttttcttttttttttttctccaatttttctttttcctctttttttcctctttttcgttttttttttctttctttttctttcttctctatttctctctctt

SEQ ID NO: 23167 - DNA, 312 bp, Oryza sativa
  Clone ID: uC-osflM202082d06b1
ttcatgtgtccattacgaggggaaagaacactcgtgatcgagagagcttcttatcagccgacagagaggagagacgagcatgtcgtcttgcacggagaagcccacggtgacagagcgtggcagacgtacggaccgccgcaactactacgggagataaaagaaggacggaggcggtggatccatgtagaaggtgacggccgcaccgcatgagctcagagcgacgacttaggggagttcaaaccggaggagatgaccaacatcatgaaggacttcgacgagccggggtttcttgccccgaccggactgtttctt

SEQ ID NO: 23168 - DNA, 151 bp, Oryza sativa
  Clone ID: uC-osflM202082d07b1
tcggtatgcgtttccatttaagtataaaaggacctgtatttggcatgggctttaagtagcatttaaaccttcaaagcatagtttgacagcaatatacactacaatcggtgttatacttctgtcgaaaaagatggtggatgaggaaccgttt

SEQ ID NO: 23169 - DNA, 482 bp, Oryza sativa
  unsure (1)..(482): unsure at all n locations
  Clone ID: uC-osflM202082d09b1
tcgttcctcgctcactagcgcacagatctcctaccaccaccaccaccgccgcagccatggcgaccgggtactaccgcggcggcggcggcgccagggaccacgccgacgagcccgacgacttcgacgagtacgaccccacgccgtacggcggcggctacgacctcttcatcaccttcggccgcccgctcccgccctccgacgagacctgctacccttgctccgctccctccacctcctacgacgccccgcactactccgccgacgagccctccccctacgcccaccactccaagccgcagcccgcctacggcttccgcccccagcacgagcagcagcagcagccgtcctacgcctcctccggctaccgcccccagcacgagcagcagcaatcctacggctcctctggctacggatctaagccccagcccgcctatggcttncgcccccaggccgaggaggagaacacctacggctccggctat

SEQ ID NO: 23170 - DNA, 294 bp, Oryza sativa
  Clone ID: uC-osflM202082d10b1
tcgtagactttggcttccccactctctcttcttcgtgggaggctgggagctaccagcacaacacaccaaggaagctgaggtgcgttgatttcttgatatcatggccaagaggcacctcttgttggtgacaacttgtttgtgggctctgtcatgtgccttgctgcttcatgcttcctctgatgggttcctgagagtcaacctcaacaagaagagattggacaaggaagatctcactgccgccaagttggcgccatagggcaaccgtcttctgaagaccggcagttcatacagtga

SEQ ID NO: 23171 - DNA, 423 bp, Oryza sativa
  Clone ID: uC-osflM202082d11b1
tcgtcgagaagtgggtcgccaaggtctctgattgtggcctgtccaagactggcccgacggccatgaaccagacccatgtcagcaccatggtcaaaggaagcttcggatacctcgacccagagtacttccggcggcagcaactcacggagaagtccgacgtctactcgttcggtgtcgtgttgttcgaggttctgtgtgcacggcctgctttgaacccgagccttccacgggagcaggtcagccttgccgaccacgccatgagctgccagaggaaaggaaccctttatgacatcatcgacccgttgctaaacggcaagatcgcaccctgactgcctgaagaagttcgtccaatctggtaaaaagtgcctggccgaccttggtgtggaccgcccgatcattggcgatttcccttggaacctttag

SEQ ID NO: 23172 - DNA, 411 bp, Oryza sativa
  Clone ID: uC-osflM202082e01b1
ttggatatgtggccgtcgaggtgtccggtggacctgccgtcctcttccacccaggaagggaggacaaacctgcacccccacctgagggccgtcttcctgatgctaccaagggttctgaccacctaaggcaggtcttcggtgcgcagatgggcttgagtgatcaggacattgttgccctctctggcggtcacaccctgggaaggtgccacaaggaaagatctggttttgagggaccttggacaagaaaccctctgcagtttgacaactcttacttcacggagctttctgagtggtgaccaaggagggcctttttcagctttctagtgacaaagccctgctgagggaccctgctttccgcccactcgttgagaaatattgctgcagatgagaaggctttctttgaagactaca

SEQ ID NO: 23173 - DNA, 505 bp, Oryza sativa
  Clone ID: uC-osflM202082e04b1
ttcgttttcgattccaatcctctcgaccagcgagaggcctcgccttcctcctctcccccacgttggcgtagctcgcgcgcgcgcgcgcgcccgcgcccgaatccacaaacagcgtggtcgcgggcgggggttctcgatgaggcggatgctggaggtggcggcggacgccggctcgtctgcggcggcggcggcggcaaacggcgcggtggactggtggcgcgacgtgaacgagtcgccggtgtggcaggaccgcatcttccacgtcctcgcggcgctctacggcttcgtctccgccatcgcgctggtccaattgatcagaatcgaatgtagggtgcccgaatacgggtggacaacacaaaaggtgttccatttcctcaacttcctcgtgaacggcgtgcgatccatagtgtttgtgctgcgacgaaatgtgcagctcatacatccagagatactttaacatgtgcttctagatatgcccgggctcgcattcttcacgacgtatgca

SEQ ID NO: 23174 - DNA, 518 bp, Oryza sativa
  Clone ID: uC-osflM202082e05b1
tttgtgtgtaaaattgttgccggtgcgaaaaaaaaaattgttgagaggtgaccatgtcgagtgggacctcgtccgggtcgagccagggaacccggagctccaggtcggaagatgacctgaacctccaggcccagatggagaagaagaggaagaggaggaaggagtcgaaccgagagtcggctcggaggtctaggatgaggaagcaacagcacctcgacgaactcacctcgcaggtgaaccagctgaagaatcagaaccagcagctgagcatggcactgagcctgaccacacagaaccttgtggcagtgcaggcacagaactcagtgctgcaaacccaggagttggagctgcagagcaggctgtgtgccctaactgacatcctgatgtgcatgaacaacaccagtgctactcctactcctacaattccagccaccactacaagtgcttgtgatatttttggtgccagctcatggaaccagccacccatagacttgtaccagtaccagtgcttctgatct

SEQ ID NO: 23175 - DNA, 153 bp, Oryza sativa
  Clone ID: uC-osflM202082e09b1
tcggtagtggccgcggatgcgcgcggccgtggcgcggccgcctccgccgccgccgcgatggctgagttgtccggggacgaggcgtgcccgctgtgcggaggcagcgggcaccaagcgcgcgtcgcgatgcacaagcggaggctgtcggtggag

SEQ ID NO: 23176 - DNA, 126 bp, Oryza sativa
  Clone ID: uC-osflM202082e11b1
tttcgttgaaggttgactgtgatgagcacaagagtgtgtgcagcaagtatggagtttctgtgcaccccacaatccaatggttccccaaaggtcccttggagcccaagaagtatgaaggtcaacttc

SEQ ID NO: 23177 - DNA, 88 bp, Oryza sativa
  Clone ID: uC-osflM202082e12b1
tcgtgccaatccgctcgctcgctcgctcgccggcgacccgaatccggccaggagggggggcggctggccggagctagggtgggtgggt

SEQ ID NO: 23178 - DNA, 423 bp, Oryza sativa
  Clone ID: uC-osflM202082f03b1
gtcttttacctcaagatgaagggcgactaccacaggtaccttgcggagtttaagtctggcgacgagaggaagcaggctgcggagagcaccatgaatgcatacaaggctgctcaggacattgctctcgcagatttggctccgacccaccccataaggcttgggcttgcactcaacttttcagtgttctactatgagatcttgaactcccctgaccgtgcctgcaacctcgcgaagcaggcgtttgatgaggccatatcagaactggacagccttggtgaagaatcctacaaggacagcactttgatcatgcagctcctgcgtgacaacttgactctgtggacttcagatgccaatgatgatggtggtgacgaaatcaaggaagccgcagcttcaaaagagcctggggatcagtgagatgaattc

SEQ ID NO: 23179 - DNA, 152 bp, Oryza sativa
  Clone ID: uC-osflM202082f04b1
ttcatctcgtcgtctaagttaaaaggaagccatggggcacatggagactggatgccggcagccagaaggcccgatcctttgcatcaataactgcggcttctttggcagcgcggctaccatgaacatgtgctcaaagtgccacaaggagatga

SEQ ID NO: 23180 - DNA, 420 bp, Oryza sativa
  Clone ID: uC-osflM202082f05b1
tttattatccaacccaaccgccgccgcatcgccctcgggagaacgatggccgcgtcggcgctgcaccagaccaccagcttcctcggcaccgcccctcgccgggatgagctcgtccgccgcgtcggcgactccggtggccgcatcaccatgcgccgcaccgtcaagagcgcgccccagagcatctggtatggacctgaccgtcccaagtacctgggcccgttctcggagcagacgccatcgtacctgaccggagagttcccgggagactacgggtgggacacggcggggctatcggccgacccggagacgttcgcgaggaacagggagctggaggtgatccactcgcggtgggcgatgctgggggcgctgggctgcgtcttcccggagatcctgttcaagaacggggtgaagttcggggag

SEQ ID NO: 23181 - DNA, 477 bp, Oryza sativa
  unsure (1)..(477): unsure at all n locations
  Clone ID: uC-osflM202082f08b1
tcgtttttctctccctcctcctcgccgtcgcgtcgccgcggaggcggaggcggagagccaaggccgcggcggtgcagccgccctcccctcctcccgccgccatggtgaggccgacgcaggacgcgatcgacaccttcgtcggcatcaccggcgccgatgaggccgtcgccgcccgcaagctcgaggaacatcatggtgacctaaatgaagctgtgaatgcctatttcaatgaaggagataggaccagcaccagagccaatgaaaatcctatacctaccggttatgatgacatggagttggatgaaccatttggtcctgttcctacatttcacatgcctttgggcaaccctttttcacttctggatcaaggttttttagaacgagctgctgctgtgtatggtgagggacctcatattacacaccctanggaggtgaggcggatagatgtgaaagttaaggacaacaatactccagcag

SEQ ID NO: 23182 - DNA, 484 bp, Oryza sativa
  unsure (1)..(484): unsure at all n locations
  Clone ID: uC-osflM202082f09b1
tcgttgtcaagcacccaaatggcggcgccggtgaggtcggtcctccccgtcgtcctcctcggctgcggcggcgtcggccgccaccttctccgccacatcgtctcctgccgcccgctccacgccaaccagggcgtcgccatccgggtgctcggcgtcgccgacagctcctctctgctcgtcgccgacgacctccactccaacggcttcgacgacgcgctcctcgctgatctctgcgccgccaagtccgccggctcgcccctatcttccctgctcgctcgagggcaatgtcagctattcaacaacactgaggctaggaggaaagtcattgacactgccagcgttctagggaaaacaactggtcttgtactagttgattgttctgcaacttatgatactgttggcatgctaaaggatgccgcggattgtggatgtgnngttgattggcaaacaagaaaccgcttacttgtgcttatgaggatttcga

SEQ ID NO: 23183 - DNA, 66 bp, Oryza sativa
  Clone ID: uC-osflM202082f10b1
tcgtaatctccccggaacgccagatccggacgcggaggtgatcgcgctgacgccggggacactact

SEQ ID NO: 23184 - DNA, 508 bp, Oryza sativa
  unsure (1)..(508): unsure at all n locations
  Clone ID: uC-osflM202082f11b1
tcgtgcctcgctcactagcgcacagatctcctacggccaccaccaccgccgcagccagtggcgaccgggtactaccgcggcggcggcggcgccagggaccacgccgacgagcccgacgacttcgacgagtacgaccccacgccgtacggcggcggctacgacctcttcatcaccttcggccgcccgctcccgccctccgacgagacctgctacccttgctccgctccctccacctcctacgacgccccgcactactccgccgacgagccctccccctacgcccaccactccaagccgcagcccgcctacggcttccgcccccagcacgagcagcagcagcagccgtcctacgcctcctccggctaccgcccccagcacgagcagcagcaatcctacggctcctctggctacggatctaagccccagcccgcctatggcttccgccccaggccgaggaggagaacacctacngctncngctatggatctgggtaccgnggtggaggaag

SEQ ID NO: 23185 - DNA, 130 bp, Oryza sativa
  Clone ID: uC-osflM202082g01b1
cttccgtctccggcgaccctcccctcacctcctcgccgcggctccccccgcctgacctccgcgcgccccccgtcgactcccccccgcgaatccggatcccgcgcgcgcgaggaaggagggggggaggagg

SEQ ID NO: 23186 - DNA, 390 bp, Oryza sativa
  Clone ID: uC-osflM202082g02b1
cttgttctggttcgggttctcgtggctgctcgaccagctccccaagctgaacccgatcaaccgcgtccccgacctcgccgtcctccgccgccgcttcgaccacgccgacgggacctcctccctcccggggctggacatcttcgtcaccaccgccgacccgatcaaggagcccatcctgtcgacggcgaactccatcctctccatcctcgccgccgactaccccgtcgaccgcaacacctgctacctctccgacgactctgggatgctcctcacctacgaggccatggcggaggcggccaagttcgcgacgctgtgggtgcccttctgccggaagcacgccatcgagccgcgcgggcctgagagctacttcgagctcaagctccaccccta

SEQ ID NO: 23187 - DNA, 132 bp, Oryza sativa
  Clone ID: uC-osflM202082g04b1
gtaaatctaacattgataatgggaaaccgtgaggctgtttccatgatgcataatatgagtgcagctgacttgacatcagtacttacattgattgatgaatatgatttgcatggtcaagaggcatacccaaag

SEQ ID NO: 23188 - DNA, 470 bp, Oryza sativa
  Clone ID: uC-osflM202082g05b1
gtaattaactacacttgttgctaacacatccaacatgcctgttgctgctcgtgaagcctccatttatacaggaattacaattgctgaatacttccgtgacatgggctataatgtcagtatgatggctgattctacttctcggtgggctgaagctttgcgtgagatttcaggacgtctggctgaaatgcctgcggatagtggttaccctgcatatttggctgcacgtttggcatccttttacgaacgtgctggtaaggtgaaatgtctcggcagtccagatcggacaggcagtgtcacaattgttggtgctgtctctccacctggaggtgatttttcagatcctgttacctctgcaactcttagtattgtgcaggtcttttggggattggataagaagctggctcaaagaaagcatttcccatctgtcaattggctcatctcttacttaaaatacttaaaggctctggaat

SEQ ID NO: 23189 - DNA, 157 bp, Oryza sativa
  Clone ID: uC-osflM202082g08b1
atcggttctccctcacacactgaacaccatggcggcggcggcggcggctccggctctatccttggccgaggcggcgccggtgacagcagttatgacgccggggtcgacgccatggaggatctttgctgtgcatatatgttttaagtttataattaat

SEQ ID NO: 23190 - DNA, 133 bp, Oryza sativa
  Clone ID: uC-osflM202082g09b1
tcgatgagagaaacatctagagtgaataagaaagatggggttcgtccgtgccctgttcctgctggcgatggtgtgcgtggcggcgcacgcgaaggactaccccaaggaggagggcgcgaaggcggaggggccg

SEQ ID NO: 23191 - DNA, 483 bp, Oryza sativa
  Clone ID: uC-osflM202082g12b1
tcgttgggccccacccgcgcggcggaaggctctaggctctcctgcgaaggttctggaaggctcgagaggaggtgggagatgattctgttcgtgctcgcgactccggcggcgatcaacctcggggctctcgctgctgctcgtagccccttcatcctcttccgaccgcctcggacctaccctttctcgccctgcatctccccctctcccgcgccgtcggactcatccgtgccctcaacctgcacccgcacgacgcctccccctccccctccagccgaggtgatggcgacgtcccccccggaaccctagtcgagaggcccatccacctcgcctccatggccaccgggaagagcggcggctcctctgctgaagaccttggccaccacgccgggtactaccgtcttcccacacccacgacgcaaggctgttctactttctctttcagtccagggggagcaagggggaggaacacccccttggtaatct

SEQ ID NO: 23192 - DNA, 298 bp, Oryza sativa
  Clone ID: uC-osflM202082h01b1
cttacatacctcaggtctcatctctctctctctctctgtctctatatctatctctctctctctctctccacctggtacttttgctggaatcgatggcttacatatgtttttagaggatcttagggatagatataagcatgcttgttgcaggccaaatctttcttcatttttggaattaatactgcacctgaactttttttggataaaaaagaaagtgtatcagctttgaatgaagcctactagctctttatgagtagtggggggtcatttttcccctggtaaaatgtgggatggatgt

SEQ ID NO: 23193 - DNA, 322 bp, Oryza sativa
  Clone ID: uC-osflM202082h02b1
gtgcatataaacatttctctcgcgagtcgcgagttggaccgatcgaattaagggtcgagagatgttcgggttcgggcaccaccacaaccaggcaccggcggcgccgtcggacccgaaccagatcttcaagatcttctgccgcgccaacgagaactactgcctcaccgtccgcgacagcgccgtcgtcctcgcccccgtcaaccccaaggacgagcaccagcactggttcaaggacatgaggttcagcaccaaggtgaaggacggggagggcatgccggcgttcgccctcgtctacaaggccaccggacttcgcgtcaagcac

SEQ ID NO: 23194 - DNA, 384 bp, Oryza sativa
  Clone ID: uC-osflM202082h05b1
gtttttagaagctgacgaggaaaacagaacaaaacaggggagaaacaagcctacagatgatggctcggtctatcccgccggagtccggtgacgagaacgtctcggcttctgccgatggcggcctattttagggacagaagatgacaaaagaacatcaaggaagagggcgtacgtgtagagaaagacggtgaaatattttgccagccagccggccggccggagtccgacgatcgagcacattccgatggacactgcaggcggtacaacaaaccacgcctaaaacctcctttacttaggagggcatggaggaggaaggtgaacgaccacccgatcgaggaggtcccgaacactgtgccggtgaccgatgacccggcggagccctgc

SEQ ID NO: 23195 - DNA, 205 bp, Oryza sativa
  unsure (1)..(205): unsure at all n locations
  Clone ID: uC-osflM202082h06b1
tttcttaccactcgtttcctccacaaagagggagggaacaagggaagggtgtcgcccgccccccaccccgatctgcctccgccgctccgctcctccgcgcctgcgaaatctaccaacgctaactcagcaagatgggtgccggcggcaggatgacggagaaggagcgggaggagcagcagaagctgctcggacgntccctacaagg

SEQ ID NO: 23196 - DNA, 121 bp, Oryza sativa
  unsure (1)..(121): unsure at all n locations
  Clone ID: uC-osflM202082h07b1
tcggtagcgatatgggttgcttttcatgctgcggagcggattatgactgcaggaggaggaagcacaacnatccttacatcccgatccctgatccaggtggtaactatggacgtatcaagcc

SEQ ID NO: 23197 - DNA, 369 bp, Oryza sativa
  Clone ID: uC-osflM202082h08b1
tcgttttgttgccactcggcactcgccaccatgctggtcgtcggcgtcctcctgctgctcttcttcaacctacatctccccacggccgccattgacaccctcacgctaggccagtctctgctgtggaaccagacgctggtctccaatggcggcaacttcgagctcggcctcttctcgccgggaaagtccaacaagcactaccttggcatctggtacaagaagatctccaagaagacggttgtttgggttgccaaccgtgagcgcccgattcttgagccgtcgagctgccacctcgagctgagcgtccacggcgatctgcggctgttctcgacggcgccgtcgaacaccttgctgtggtcgtcgaacgcg

SEQ ID NO: 23198 - DNA, 252 bp, Oryza sativa
  Clone ID: uC-osflM202082h11b1
tcgataccaacccaaccgccgccgcatcgccctcggtagaacgatggccgcgtcggcgctgcaccagaccaccagcttcctcggcaccgcccctcgccgggatgagctcgtccgccgcgtcggcgactccggtggccgcatcaccatgcgccgcaccgtcaagagcgcgccccagagcatctggtatggacctgaccgttccaagtacctgggcccgttctcggagcagacgccatcgtacctgaccggaga

SEQ ID NO: 23199 - DNA, 237 bp, Oryza sativa
  Clone ID: uC-osflM202082h12b1
tgtcgttaatccccatatctccgtctcaaggtcgtagggtgtccttccacacgaccggggcgacaccgaggagggaggagacgaggcacctggcacatacatcgtgagcccgtgatcacccagagctataccgagtgctggctgatgctgcagccactcgcttcacaggcgcccgaacagcatctacccttagattttacggacctaagtacgagtcgccggagccagggctgaccg

SEQ ID NO: 23200 - DNA, 436 bp, Oryza sativa
  Clone ID: uC-osflM202083a01b1
ttatgactgcaatatgtgcttgaaggcacttgctgatgcttactcaaacgcagcgatgaatgactgcggcagcgatatgcatggcgggcctgaacgcgctactgggcctgtatacatgagcctgcgtccagataacgtgggacgggctaacatgccagagagtgcggctccagttccgatgggggcttatggccatagtcggcaactggctccaggtcgtggacgaccttaaccaccgtaacctgatggcgctggcgcggcggttcggcgacatcctcctcctccgcatgggcgtccgcaacttgggggtggtgatcagcccggacctcgcaaggaggtgctccacacccagggcgtattgttcggctcccgtacccgcatcgtggtgtacgacatcttcaccggtaaggggcaggacatggtgatcaccgagtac

SEQ ID NO: 23201 - DNA, 234 bp, Oryza sativa
  Clone ID: uC-osflM202083a06b1
gctttgatgagattcaggcaagggttgcacagctgaagaaggaactctccgagactgattcgatgtatgatacagccaaattggctgagaggattgcaaagctttctggcggagtggctgacatcaaggtcggggctgcaactgagactgagcttgacgaccgccaactacggatcgaggatgcgaagaatgcaactgtctcagctattgaggagggcattgctgccggaggag

SEQ ID NO: 23202 - DNA, 350 bp, Oryza sativa
  Clone ID: uC-osflM202083a07b1
tctggagaagagccgggtcctcgtcgtcggcggcaccggcttcgtcggtcggcgggtcgtggcggcgagcttggcggcgggccacccgacctacgtcctgctccggccggagatcggcctcgacatcgacaagctccagatgctgctggccttcaaggcgcggggcgcgcggctcctcgaggcgtcgctcgacgaccacgacggcctcgtcgtcgccgttcggcaggcggacgtcgtcgtctccgccatgtccggcgtccacttccgcagcctcaatctcatgctccagctcaagctcgcctaggccatcaaagatgctggaaatggaaagcgacttctgccatctgaat

SEQ ID NO: 23203 - DNA, 521 bp, Oryza sativa
  unsure (1)..(521): unsure at all n locations
  Clone ID: uC-osflM202083a08b1
ttcaggacaaggagggcatccccccagaccagcagcgtctcatcttcgccggcaagcagctggaggatggccgcacccttgctgactacaacatccagaaggagtccaccctccaccttgtgctcaggctcaggggaggtatgcagatcttcgtcaagaccctgaccggcaagaccatcaccctcgaggtcgagtcctcggacacgatcgacaacgtgaaggccaagatccaggacaaggagggcatccccccggaccagcagcgtctcatcttcgccggcaagcagctggaggacggccgcacccttgccgactacaacatccagaaggaatccaccctccaccttgtgcttaggctcaggggaggtatgcagatcttcgtcaagaccctgactggcaagaccatcacacttgaggtcgagtcctcggacacgatcgacaatgtgaaggccaagatccaggacanggagggcatccccccggaccagcagcgtcttatcttcgctggcaagcagctggag

SEQ ID NO: 23204 - DNA, 459 bp, Oryza sativa
  Clone ID: uC-osflM202083a10b1
tctatacccctctcactcccagatacctgctgctgccactagcccactaccatggatccttgcaagttccggccgtcgagctcgttcgacacgaagacgacgacgacgaacgcgggagctccggtgtggaacgacaacgaggcgctgacagtggggcccagggggccgatcctcctcgaggactaccacctgatcgagaaggtggcgcacttcgcccgggagcgcatcccggagcgcgtggtccacgcccgcggcgcctccgccaagggcttcttcgagtgcacccacgacgtcaccgacatcacctgcgccgacttcctccgggccccgggcgcccagacccccgtcatcgtccgcttctccaccgtcatccacgagcgcggcagaccggagacgatccgagacccgcgcgggttcgccgttcagttctacactcgcgagggcaactgggacctgctc

SEQ ID NO: 23205 - DNA, 251 bp, Oryza sativa
  Clone ID: uC-osflM202083a11b1
tcttccgcctcctgcattcttctccttgcttctgcgtaacctcgcgctttcttggccgcttcgcccgcgacgcaacgggggggagaggccttcctccgtttccttggataggataaagctcgcggatctccgctcaatccagttcttcattctcctctcccggttctgttcttggttcttggaaagccggtggggtgcgggtggctcgtggcgaccagtgctcgctcgatagatccatcctagatgctgag

SEQ ID NO: 23206 - DNA, 525 bp, Oryza sativa
  Clone ID: uC-osflM202083b03b1
ctttcactccctcctcctccatctcctccggtcccgatctcacaaccaccgactcctcctcctcgcgcggcggcggcggcggcgtgagccagcagcagccatggtgctgttctcggtgacgaagaaggccaccacgcccttcgacggccagaagcccggcacctccggcctccgcaagaaggttactgtattccagcagcctcattacctccagaactttgtgcaatccacatttaatgcccttcctgccgacaaagtaaaaggtgcaaccattgctgtgtctggtgatggccgctatttctcgaaggatgctgttcagatcattacaaaaatggctgccgcttatggagtaagacgtgtttgggttggacaaaacagcctcatgtctacttcagctgtatctgctgttatccgtgaaagaagatggcgcagatggatcaaaggctactggggccttcatttaacagctagtcaccaacctggtgggtctactgaggactttcggaatcaatataacatggaaaa

SEQ ID NO: 23207 - DNA, 427 bp, Oryza sativa
  Clone ID: uC-osflM202083b05b1
gcctttttctagacgcaagctgggtggactaagggtgctgaactcctactgggtgaatgaggactccacctacaagtactttgagatcattcttgtggatgctgctcacagcgctatccgcaatgacccaaggatcaactggctctgcaagcctgtgcacaagcaccgtgagctccgtggcctcacctctgctggcaagaagtaccgtggcctgcgcggcaaaggccacactcaccacaaggccagacctttccgcagggccacctggaagcgcaaccagaccgtctctcttcgtcgctaccgttaagcttatgtgctttggtgtttcgttacagtggaatctgtcccttgcagacattaattatctgtctattttcttgtgatgagagaaagaattatttagttatcgaatatctcatgatttggc

SEQ ID NO: 23208 - DNA, 316 bp, Oryza sativa
  Clone ID: uC-osflM202083b06b1
atttttgcatgcatggatcgctagctaagagcgcgtgtacctattggggtgagtgccaactagagctccattgacttggagatcatggaggccgatgttgctcacagtgcggggcacaccgactcagttgatccatttggcgtggcggctaggccagaacacgcgatgagatgcatccatcggaagacaggagggagggcaggcccgggaggcgacagcgggatcctggccttccccgcacaacgcccacaggcgccggaactgcacaggatacggacagggcacgctcgatccttggaatctgtactctactacc

SEQ ID NO: 23209 - DNA, 423 bp, Oryza sativa
  Clone ID: uC-osflM202083b11b1
tcgtctggacgcaagctgggtggactcagggtgctcaactcctactgggtgaatgaggactccacctacaagtactttgagatcatccttgtggatgttgctcacagcgctatccgcaatgacccaaggatcaactggctctgcaagcctgtgcacaagcaccgtgagctccgtggcctcacctctgctggcaagaagtaccgtggcctgcgcggcaaaggccacactcaccacaaggccagaccttcccgcagggccacctggaagcgcaaccagaccgtctctcttcgtcgctaccgttaagcttatgtgctttggtgtttcgttacagtggaatctgtcccttgcagacattaattatctgcctattttcttgtgatgagagaaagaattattcagttatcgaatatctcatgatttggc

SEQ ID NO: 23210 - DNA, 443 bp, Oryza sativa
  Clone ID: uC-osflM202083b12b1
tcttgggaatgaaaggatcaccatcaacgagcgagtcttcctcctgcaatctgcaccatcaagattgcctctgttcagcgttttttctcacgctttttcttcgtcttttcgtgcgcacttttctgacttattttcttttccgtggcggcgaggcctcacgaacgcgatgagatgctcgatcggtagacaggagggagggcatgcggcggaggcgacagcgtgttcctgcccttcgccgcacaacgcccacaggctccgtaactgtacacggtatggacatggcacgctcgatccttgtaatttgtactctactaccgtgtggcgttggactgttctcgctgtcaggtgtcaggcccgaccgcccaactttgagaggacctactccccactcgtagtatttgtaccgtctcataaggctatttacaatgctcataggtgacgtt

SEQ ID NO: 23211 - DNA, 466 bp, Oryza sativa
  Clone ID: uC-osflM202083c01b1
tatgcagttgagtttgacagttactgccacaaccatcagccaccaattgctttcattaagtcagaaattcgtggcctttttggcagtgtcttttgtgactttggtcctgagtttactgtattggatgttgatggagaggagccacatacaggaatagtagcatcgatcagcaatgacaaccctgcgcttgtttcctgtgttgatgatgagcgtctggagttccaggatggtgatttagttgtgttctcagaagtccatggaatgagtgaactaaatgatgggaaaccaagaaagattaagaacgctaggccttattcttttactctagaagaagacactacctcatatgggacatatgttagaggtggtattgttactcaggtcaagccatccaaggttcttaaattcaaaaccttgaaagacgcccttaaggaacccggaaaatttcttatgagcgatttttcca

SEQ ID NO: 23212 - DNA, 529 bp, Oryza sativa
  Clone ID: uC-osflM202083c02b1
gtcggagaatccctctcctcccgtcccgccgccgccgccgacgacgacgacgacgtccagccctcctccgtaatcccccacttgttgggcctgcaccttgtggtagccactctttaatcaatggagagcacagagcccctacaggatatcatgtgcgagtttcgtgcgggtaagatgtcccttgatggaacacgagtgatcccagacacacgcaagggtcttgttcgcataggaaggggtgaagaaggcttggttcattttcaatggcttgatcgtggacagaatctagttgaagttgatcaaattgtcttccctgaggaggctgtctttgagaaggtaacacaatcttctggaagggtttacatcttgaagttcaggcacgatagcaggaaattcttcttctggatgcaggagccaagtgctgatgacgactcacaaatatgtcgccaagttaatgcctacataaaccgaccattagatggtgaggcagtttctattgaagctgaaatgtacatgaagacacagctga

SEQ ID NO: 23213 - DNA, 314 bp, Oryza sativa
  Clone ID: uC-osflM202083c04b1
tctacctctcgcctcccgctccaccaccatcgggcgatctccacctcgccggagttgagagagacgacgctgcagggatcgagatcgagatcagagaggttggcaatggcggcgcgcgtggcggctgacctcctgctactgttcggcctcgccggcgcggcggtgacggcggctaggatcatgccctgacgacgactgtggcgactcgtcgaacgaccgcagggccgacggcgttggggatgccaaggcatgaaatggctgcagaggacggccctataggcttcttccgctgcggcgccaatcagctcagggtt

SEQ ID NO: 23214 - DNA, 432 bp, Oryza sativa
  Clone ID: uC-osflM202083c06b1
gaacgcgtacttacccacaaggtaggagcatgccatggcaccattcatggcgagcgcctcgccaccggtactaacgctggccctgctcgcgatgtgcggtgccctactcggcacctccatgcttccggcgcgtgcgacgggggacaggtgcttggacaacagcgacatggtgatgatgctcagcaccctagcttgacagtgagcttaaaggcgtaaggccccgaacgtagaagaggcgcctacacgggacaacaatgacattggtggccttgagaaacaggttcaagagctggttcaagccctctggtggaccatgactcacaaggaccggtttcagaagttgggaattcgtcccccgccaggtgactttctgtacagtctaccactgcaaggaagaccctaatggctcgtgcatgtgctgtccaaactaac

SEQ ID NO: 23215 - DNA, 448 bp, Oryza sativa
  Clone ID: uC-osflM202083c07b1
tcggttcgatcggaggaggaagccgtcgaggaggagtcggagtgggcggccatggagtgcgcggactggaagtcgtacgggtgccaccccggtgacaaacgctaccccaggaacgccgctagggtgaagggcatgctgctcctggcgcgcctcgcggagcccccgggtctctccgagctctccatccgcctctccgccgccgccgccgtgcccaggccgccgccggccagcttcccccccggcgccgccgtcccgcccattcccaacttgcccgacgcgtcaccgtacgacgacccgtcgctcacctacgtcgaggcggtaggcgacggtctcatcgccctcacctcgtgcttccgggatggctgcagctgctacctcgtctacgacgtcgatggtatgtttgtcttcatgatcccgggcctgcccgagacctgccatattactgcag

SEQ ID NO: 23216 - DNA, 539 bp, Oryza sativa
  Clone ID: uC-osflM202083c11b1
tctttaggatgaggctgaagaggatggtgcgaacatcgatctggattcacaaaggaaaggaaaatgcgttgttttgaagacatccacaagacaaacaatattccttcctgtaatcgggcttgttgaccctgaaaagctcaagcctggggatttggttggagtcaacaaagacagctacttgatactagacacgctaccttcagaatatgattcacgggttaaggcaatggaggtagatgaaaagcctacagaggattacaatgacattggtggccttgagaaacagattcaagagcttgttgaagcaatagtattgcccatgactcacaaggaccggtttcagaagttgggaattcgccccccgaaaggtgttcttttgtacggaccacctggcactggaaagaccctaatggctcgtgcatgtgctgcccaaactaacgccacatttctgaaacttgctggtccacagcttgtccagatgttcatcggtgatggtgcacagcttgtccgtgatgcctttcagcttgcaaaggagaaat

SEQ ID NO: 23217 - DNA, 480 bp, Oryza sativa
  Clone ID: uC-osflM202083c12b1
tttaccttgactttggcttccccactctctcttcttcttgggaggctgggagctaccagcacaacacaccaaggaagctgaggtgcgttgatttcttgatatcatggccaagaggcacctcttgttggtgacaacttgtttgtgggctctgtcatgtgccttgctgcttcatgcttcctctgatgggttcctgagagtcaacctcaacaagaagagattggacaaggaagatctcactgccgccaagttggcgcagcagggcaaccgtcttctgaagaccggcagttcagacagtgatcctgtccctctggtggactacctcaacacccagtactatggggtgattggcctcggctcaccgccgcagaacttcacggtgatatttgacactggaagctccaacctgtgggttcctttagcaaaatgctatttttcgatagcatgctacctccacagcagatacaactcgaaaaagtcgag

SEQ ID NO: 23218 - DNA, 468 bp, Oryza sativa
  Clone ID: uC-osflM202083d01b1
gtttcatctctcaatctctctctctctctctctctcaaacacacataatattcccctttctctctctaggcattattcctctgatttcttttactgcctcttctctctctaaccttattcccccctacctggacactgtaatgctctctctctctctctaaccttatagtagtagcatcaagctttctctctctctctagaggcctttcctttctcatctctctagttctctagaacacacacacacacaaacccccatacaaaaatgatatgctactcatgacctaatcacccaattcccactacctctcttctcctctccttcttctcctcctccttttcttggaaccaaacaacaacaacaaacttactctcccacacttagctagctcacacaccaccattgttggctagctagctaagcttttaatttgttgaagcaatgagcacaactactgctactactac

SEQ ID NO: 23219 - DNA, 358 bp, Oryza sativa
  Clone ID: uC-osflM202083d03b1
cttacgcgtgggggacgtcgtcggcgcgatcgccgcgcaggccggccgcctgcagcactccaccgtgctctacctcaaccacgccatcgccgacttcgccgaggcgctcgcctccaagatgcccggcgacctcaaggttgtgttcttcaccaactccggcacggaggcgaacgagctcgccatcatgatggcgcggttgtacaccggctcccacgacatcatatcgctccggaactgctaccacggcaacgccgctggcaccatgggcgccaccgcgcagaagaactggaagttcagtgccgtccagagcggcgtgcaccacgtcgtgaacctggacctcgacaggggcgcgttcggc

SEQ ID NO: 23220 - DNA, 519 bp, Oryza sativa
  Clone ID: uC-osflM202083d04b1
atttcatcgcgctcgcgcgccccgcccgtttcgcctcggccgcctcctccaccgactccggccgccgctgcctgcggcgcggcgctgtcaggcggcatatccttttactagtggaggcctgacagaattatataaagactgctgaaaatgtctgagttccttgaccttgaggcacaagatgggataaggatgccctggaatgttattccaggcacgagggaggatgctttgagctgtgttgttcctatttctgctatctatactcctctgaaacaagttcctgatatccctgttctcccatattctcccctccgttgccggatgtgccgttccattctcaaccctttctccattgttgactatgtcgcaaagatctgggtttgcccattctgctttcagcgcattcacttcctacagcattactccttaatttcagaaagcaatcttcctgcagaacttttctctcagtacaccaaaggtgagtacatattcactgctgacactggccctgtagtgcca

SEQ ID NO: 23221 - DNA, 507 bp, Oryza sativa
  Clone ID: uC-osflM202083d05b1
ctcaactcgacataagagctccctggcttctctgggggacactttggccgatggagggggggacgaagaaagccttcacagtggcggtggaggatgtcaagcccagcacggacgcccactgctacgacggctgcttcaaggactgcatggtcagagagaacaacatggtcgactactgcagctacacctgcgacaagacgtgccagccggacaagcccacgctgtactcctcagataagccgacccgcctcgccggcgacatggagtgccaactcttctgcgccttgagctgctgccaccgactccttccggacggcaagggcgccgcggaggcctgcttcgggcagtgctacgacggctgcaagaccacggcggcggccagactgccgaggcctctccgcgccggccactacgtgctctctagtccccctgatgacgtagaccatgatccggaccacccgttcgtgttctctagcccccatgatgacctaaaccatgatcccgacc

SEQ ID NO: 23222 - DNA, 344 bp, Oryza sativa
  Clone ID: uC-osflM202083d06b1
cttcttacggggaattgcagcggcacaaccgtatgacagctgttattgctattgggatgtgctatactgcctgctggaactccgaggatgcaagcttcacatcccctgcaagcagacctatggctatcacactggagtcatcaaccatcaccgctgagaccaagaccatatatcctgttgattaatgagctgggcacaatggaatagtgtgtctattagacacacattagggggacaagcatctaaagtaagagcccttcgtgacgcttacataaagtgctcactctggtgttcaacaagctcaaactactgtctacatcggtgacttatgagcacacacaagg

SEQ ID NO: 23223 - DNA, 507 bp, Oryza sativa
  Clone ID: uC-osflM202083d12b1
tttcgggggctcacagtgcgcgacgagctggagttcggggagccaatgcaggacgtcttcttctgcctgcagcacgccgaggggctcaagttcccgctcctcttcatggtgaacgcgttggtgcacaagggaatcatcaaccagcaccagctcacgcctgaattcttcagcctgctggggagaagcgaggagaacgtcaatgtggctgcattgagggatttctggggggacaagttcccagtgtttgatgcgtgcgggaggctgaagaaggcactgaatcgggtggccaggaaccccaaacttctctgcagcaaggtcggggatgaccacgcggaggtgcggaggctggtgatcacgcccaccagggcttattgtctgcctccagaagtggagcgctcaaaccgtgttcttcggcattaccatgaggtggctgacaggtttttgagggtcacttttatggacgagggtatgcaggtgctgaacaacaatgtgctcaactccttcact

SEQ ID NO: 23224 - DNA, 345 bp, Oryza sativa
  Clone ID: uC-osflM202083e03b1
tggttgtcctccgccgcagtctccattgaagcggcgggtatatattccgcgcctcagagtgaaaatacatcaggaatcagaagtcagtgaactcaaatgccaaggcagtgaagaaccaatggatgcttcaagggcaactacggaacaattaatggagagtggagaggatgcaaaaactaccgaaggtgcaaaatggatggcaaagaagaggaataggtgctgcgaaagcatagcagcattatgctatgaagctgggattcctattaatattctgtgcatagagagtttccagttaatgaaagaagaaattggtaaatttggacctggctttcaggggccctctat

SEQ ID NO: 23225 - DNA, 480 bp, Oryza sativa
  Clone ID: uC-osflM202083e04b1
cgtacggcctttctttttgttaggttactcggggtctttttggacgagagactgggtggtaagattcgccggccatggtgggcgccgtgctggtcgccattcatggtctccatcggcaacttgctgcagggctgggataatgcaaccattggatgtgcggtactgtacatcaagaaggaattcaacttgtagagcgagccccttatcgaaggcctgatcgtggccatgtcgctcattggggcgacgatcatcacgacgttctctggagcagcggctgattcttttggtaggcggcccatgctgatcgcgtcggctgtcctctactctgttagtgggctagtgatgctttgggcgccaaatgtgaatgtgttgctcttggcgaggctcattgacgggttcgggatcggttaggctgtcacgcttgtaccattgtacatctttgagactggcccgtcggacatcagaagacttgttaaacac

SEQ ID NO: 23226 - DNA, 337 bp, Oryza sativa
  Clone ID: uC-osflM202083e06b1
tctaaaccgctctagcaactgaaagtctgaaacggtcgtctcctcgagtctgaactctcgagtctcaaccctcgtcgtcgtcgtctgcacccaatctctcccatttccatttccatatacatttcctcccaaaaaaacacacaagacgaaaaaaggagaaaaatcgcaactttaccattcggtccaaactggcgacatccctttctccctcccttgtgcagcatcaaactcgttcaaaggttagccttttgggggttcctctcgtttgactgacccggcgtgtagtgcagacgtgaagtcgtaggtgtctggtccagcatcctcgctcttcttggct

SEQ ID NO: 23227 - DNA, 357 bp, Oryza sativa
  Clone ID: uC-osflM202083e08b1
gccctgtgtttattttgtgagtggtagcacaggaaacgagagggagctctgtctagagctcgcgagcatgaccaaggaaagccagaggcctgttgcagaggctactggtgattctgaccttcatgatagtgcacctgagaaaggcagagtaatgggtcaacttctatccaaggctagagaagatgtgtatgattgcacggcggttactcagagacttagagctatgtttcagtcagctgatgaacaagtcaggagcttgaagaagcagagtacatttcttagccagttggctgctaagacaattccaaacacccttcattgtcttgtctatgctgcttaacactggataactatcct

SEQ ID NO: 23228 - DNA, 437 bp, Oryza sativa
  unsure (1)..(437): unsure at all n locations
  Clone ID: uC-osflM202083e09b1
tttgcccagctgctttgttaggttcacttgcagtgagctctttttgctcatattcagatcttcacttattacctaggaggtactactgcctttgagtattgacaggttcatgctgccaactcagctcaatcttcctctgaagattcagtctttgattctgaatctcttcagtgttcagaggggaagttctgccaaaaaatttctctggccatccattttccaaggggagattctgccaaaattttcatctctgtccatcaatattcctgggngaggttctgccaaaattttctctgaaatcggttaatttatagcnggaggttctgccgaaattttcgctggtcatcaatcttccctttgttgacataccctgcataagtttatacaacaaacatataactttttgcaaggtaagaaggagtttttatcttgtcttg

SEQ ID NO: 23229 - DNA, 532 bp, Oryza sativa
  Clone ID: uC-osflM202083e12b1
tcttccagccatctgcaacatatagacacaagaaggaattcaatcagcagccaccacctgccaattgggaggtggttccaacacaaggaggcaagccgggtcaagcagagcagcaaagagaagctgcgagccgagaaggcccatgtacacgccatggtgtcggtggcccgggtcgcagctgccgttgctgcggttaccgcggccaccacgagctcagatatccagacctccaagatggccgcggccatggtgtcggccaccgagctattggcttcgcactgcgtggagatcgcgcagcacgcgggggcacgccatgagcaggtggcctgtgccatccagtctgcagttggtgttagaagctctggtgatctgatgacactcacagcagcagcagctactgctcttcgaggagccgcaacaatgaagcagagagtgcagcgagagatgagaagcaatgcgagtgttcttccctatgagaagggtcactcatggagtcctgacatctggtgcaaggagggggagttactgaaac

SEQ ID NO: 23230 - DNA, 303 bp, Oryza sativa
  Clone ID: uC-osflM202083f03b1
cttttcctcatcgagtcaaaacaacccatgaaaccctaaaaccccaatccccccagcccaatccgccattgcctccccgatgcaagcgtccgcgcgcctctacaccgccgccgcatccaagcgggtgattgcgggcgtctctagcacgatctcgcgctcgtgccaccggacttgccgatggaagtcacatgccgcgccgctgtccgctcaggaggcgcccaaagggccaaagaggatgaccaagcaggagaggagggttaaaatagagaaattagctgaggagactgtggcatccaatgatgg

SEQ ID NO: 23231 - DNA, 528 bp, Oryza sativa
  Clone ID: uC-osflM202083f07b1
aatagactctgaactgaactgattgacattttagactgatcattcattcaagctaatgatgagtgatgcgtgccaaggaaaaccaggccttctctaaaaacaaaaggtaaaatgctaaacatctcagatcctaccactactgcataattttacataaccatacggcaaagacatatccgcacagcacaatgacaccatcacatcacatgcatagaagaatggcaagttcctatataagcagttgtacagaggtttataatcaaatactcaaatccacgggccagtgggtttgcacttgcttgccccagaaacaagaaaaaagacacaaaataagtaactaaaaggaataattggtcagtgatatgttttatccaatcctgcgtacctagtggacttctccggcaaggattttctctgtttcctcattagccttcatgccatcttttttcatacgatcaagcaagtctgacactggttttcctgcattgacatatgtcttcagtaacccatggtaaatgtcccttgttg

SEQ ID NO: 23232 - DNA, 525 bp, Oryza sativa
  Clone ID: uC-osflM202083f10b1
cgttcgaacccattataatccataaacaaacaatcccctcctcctctccaatctccattccctctcgagaagaagaagaaatcgcaacaatttgacggccatggcggtgtcgatcgagctgaccaaggaatacgggtacgtggtgctggcgctggtcgcctacgcgttcctcaacttctggatgagcttccaggtcggcaaggcccgcagaaagtacaaggtgttctaccccaccatgtacgcggtcgagtcggagaacaaggacgccaagctcttcaactgcgtgcagcgggggcaccagaactcgctggagatgatgccgctgttcttcgtcacgctgctggtcggcgggctgcagcacccgctcgtcgccgcggggctcggggtgttctacgccgtcgcgaggttcttctacttcaagggctacgccaccggcatcccggacaaccgcctcaagattggggggctgaacttcttggcgatctttgggttgatcatctgcacggctatcgtcggcatcaacct

SEQ ID NO: 23233 - DNA, 271 bp, Oryza sativa
  Clone ID: uC-osflM202083f11b1
tctgaatattttttttgcttcggttaaagcaacgctaattccccgcgtcgcaagcatgcgtttctaggagaaagtaaagcttgcgtttttgagactaaagcttgcgttttttgttttttaattgtggagtttgggaggaggagggaaaaaaatcgcgatcaggaaaaggcatctcgagaataattatttaagtccccagagcgagcagtgacgcgaaattccccaggagagatctccatctccacctccactgctcaggcgaggatgtcgt

SEQ ID NO: 23234 - DNA, 390 bp, Oryza sativa
  Clone ID: uC-osflM202083g01b1
ggtttgaagaatggcaaaacaccccagaacttcacagagctcgagaaattagcactgggcaatgttcaagaacatagccgaaggctgtgggcatttctattatcagtctattgggtctcttttgtcacgtacttcgtactatggaagtcctacaagcatgtttctaatatgagagcggctgcaagatcaacaccagatgttaaaccggaggagtttgctgtgttggtgagagatgttcctaagccacctcctgatcaaactataaaggattctgtagactcatatttccgagcacttcatcctgataccttctacagatcaatggttgtgactgaccacacaaaggctgacaaaatttattaagagattgaaggtcacaaacagaaaatt

SEQ ID NO: 23235 - DNA, 546 bp, Oryza sativa
  Clone ID: uC-osflM202083g02b1
gttatagtcaacaatagttcattttcaggtaccgatttcctctgacctgtcattcagatacttgtatgcataagaaagctggcgtatgcatttgggtgaccgctttatagaaagttttgaattaacaatgctagttaactttatgatttgtttgcatagcaccctatgaatgctatactatattttgttcatcaatttttgaaaaatacataactagataccaacagtctaatttctaaccacaattatttatggtaatagaaatggaagaagtttccctctctttcttaaataaaaaagtccacaagcttaaataaaaattcatctatgtggtatcagcatctatcattattatgcacatgatgtttatctagcttattcttaggtttgttatgattaacaaatagtctccaaaatttcgtactgttatgcataccatttgcatgtgcacaacctgcatcactatattctgtttaataaagtgtactgtctgtacctttctgcccttttgtttatatagacataatatttactgcaggttgtatg

SEQ ID NO: 23236 - DNA, 303 bp, Oryza sativa
  Clone ID: uC-osflM202083g09b1
ctcttcttcctacttcgtcttcttgctggtgtgttcgaggaggaggaggaggaggagaagctagcggcggcggcggcaatggcgacgagcgggctgaggagctgcagcgcggtgggcgtgccgagcctgctggcgccgtcgtcgaacaggagccgcctgccgggctgcgcctacgccaccacctccgggcgcgtcaccatgttcggcgagtggctgccgggccagccacgcccggaccacctcgacggcttctttcccggagacatccgggtcgacccgctgggccttgttaccgtggctgat

SEQ ID NO: 23237 - DNA, 479 bp, Oryza sativa
  Clone ID: uC-osflM202083g10b1
tcttcccttttttttttttttgagttggagcagaggagaagaatggcggctctgcttgtggtcgtgttggttgccatgtcggccatggtggcgacggccaactttaaccaggagttcgacatcacctggggcgatggccgtggcaagatcctcgaggatggccagctgctgacgctcacgctggacaggacgtccggctcagggttccagtccaagcacgagtacctctacggcaagatcgacatgcagctcaagctcgtccccggcaactccgccggcaccggcaccgcctactacttgtcgtcgcaggggccgacgcatgatgagatcgacttcgagttcctggggaatgtgaccggggagccgtacacgctgcacaccaacgtgttcacgcaggggcagggccagcgcgagatgcagatccgactctggtacgaccccaccaaggacttccacacctactccatcctctggaaccc

SEQ ID NO: 23238 - DNA, 302 bp, Oryza sativa
  Clone ID: uC-osflM202083g12b1
tcgctagctccggccaccaactttgacccgtgctcctcctccgcatcccccatcccctcctccccggcggcggcggcggcgcggaggcggcggcacgggagcggctagtggtttcgtcggcggaggcggaggcggggccaagatgttcgggcgcgcgccgaagaagagcgacaacaccaagtactacgagatcctgggggtccccaagaccgcctcccaggacgacctcaagaaggcgtatcgttaggccgatatcaagaaccaccctgacaagggcggctacccccgagacgcccacggag

SEQ ID NO: 23239 - DNA, 462 bp, Oryza sativa
  Clone ID: uC-osflM202083h02b1
tttttctcctctcttccccgtcgccgcgcacctaccgatccctccctccgctcgctcgcccatcgcgccaggtgggctctctggacacccggtgatggatcacgcggagctgaccaccgagcaggttctcaagagggatattccatgggaatcatacatggcaaataagctgatttccgggacatgccttcagcttttgcgacgttatgaccacaaaccagaaagccaacgaggtcctttgcttgatgaggatgggccatcctatgttcgagtgttcctgaatatcttgcggaacatctccaaggaagatactgttgaatatgtgcttgccctgattgatgagatgcttgcagtaaatcctaaacgagcagcactgttctatgataactctctctctggtgaagacatctacgaccctatcctaagattgctcttgaaagggtactggtttgtgccagaaaa

SEQ ID NO: 23240 - DNA, 395 bp, Oryza sativa
  Clone ID: uC-osflM202083h04b1
tttttacatggctttcacaggtatgaagactctggcgatgatgatggattgctgttgaaagatacctttacaggagtaccctcccgtcacattttaggtgataccatcaccaatgcatgaccgaacatcatacatgacaacagtccccatcttgaaatgcttgaggagctgctctgcaaagagggaggcatgtatgagaccctgccagcaaagtgtgccagattcgggttgcctatgttgaccggtgacttagaagatgactatgaaaagcatggtccagctttgctgttgaggcaaacaaggatgtacctggtatggagaaagtcggttacatggttcctcgcctggaacctagcactgggagctctatttagtcagcaggtgttgagaacact

SEQ ID NO: 23241 - DNA, 506 bp, Oryza sativa
  Clone ID: uC-osflM202083h06b1
gtatgcgcgagggggaaggaggaggaaaggtgcacaaggtcagactaagtttgcgttgaagaacaaaggagaggaaaaatgtcgcctgctgaggcatcgcgtgaggagaatgtgtacatggcaaagcttgccgagcaggctgagcgttacgaggaaatggtcgaattcatggagaaggtggcaaagaccactgatgttggtgagctcaccgttgaggagcggaacctgctttctgtggcttacaagaacgtgattggtgctcggagggcatcgtggaggatcatctcttctattgagcacaaggaggagagccgtgggaatgaggcatatgttgcatcaattaaggagtaccgtagcaggattgaaactgagctcagcaagatctgtgatggtatccttaagcttttggattcccaccttgtcccatctgccactgctgcagagtccagggtggtctaccctgaaatgaagggtgactaccacaggtaccttgcttagtctaagtc

SEQ ID NO: 23242 - DNA, 156 bp, Oryza sativa
  Clone ID: uC-osflM202083h10b1
tctatcttgcataagaactcccccccctccttgggcccctccgtcgacgccgtttttttggagaggagaaatccgtaggctcagaggatttctggcagtcttgcttcgcgacatttgtgaagagggggggagctaaggggggatcctgtaatgatc

SEQ ID NO: 23243 - DNA, 442 bp, Oryza sativa
  Clone ID: uC-osflM202083h11b1
tcttgagagagagagagcctttgaccgccggagcggcagcgtcaccgccatggcgggcgatcagatgcacgtgctctccgtgctggacagcgccaagacgcagtggtaccacttcaccgtcatcgacatcgccggcatgggcttcttcaccgacgcctacgacctcttctgcatcttcctcgtcaccaagctcatcggccgcgtctactacaccgccgacggcgcgtccaagccgggcagcctgccgcccaacgtctcggcggccgagaacggcgtcgccttcgtcggcacgctcacggggcagctcttcttcgggtggctcggcgacagggtcggccggaagagcgtctacggcatgacgctgctcttgatgatcatctgctacgacgcgtcggggctgtcgttcggggacacgccgacgagcgtcatggccacgctctgc

SEQ ID NO: 23244 - DNA, 515 bp, Oryza sativa
  Clone ID: uC-osflM202083h12b1
tttagagtaggcacaaatcgtttacaaaaggcaaaatgtatatgaaaaaaagattgattgaactttccgacggactcattccatgagtaaacgattgaatgggattcgtttgggcaacgaaatcaagtgctggtccccttttctctcttattgaattaactaattcatttccttttgacttttggatttttggatatttttttggtgttgatttggcattattcaacaagaaaaaaatcaaaatttcgataaattccttttttttgaaaattatgtgataattatgagaaccaatcctactacttctcgctccggggtttctacaattgaagaaaaaagtacagggcgtatcgatcaaattattggacccgtgctggatgtcactattcccccgggcaagttaccttatatttataatgctttggtagtcaagagtcgagacactgaccgtaagcaaattaatgaactctggaggtacaacaatatttagaaataatcgagttagagctgtagct

SEQ ID NO: 23245 - DNA, 500 bp, Oryza sativa
  Clone ID: uC-osflM202089a02b1
ttcgtctccgcgcgaaaattcccacgccacgcgcgccggaagagagggaaggcttttcctccgttctccgcccacgcgccgtcatcgctgcccgcctttcttcctccgctttgtttgggccggagcggggggcgcaccggcgccggcgacgtctctcttccgaatcgggaggcgggagccagttcatggaatctggtggaattgatgctcaagtcagagcaatcgagcagcgcacaagattggagattcctatacgtgattgagattgcaaatgtggcgcctgttcaatgagttgtgggatgttctaggatctgggtttttctcatcgaggtttctttaatccagctcaaatctatttacaccttatccgtttgcaccgagatcatctctgtgtgtgtggtcaccgtgagattaggaggagatggacgaggaggattactcgtgggttcggcggacaaggttctcccactccgtcgtccgcttcaagtcccgcagggagc

SEQ ID NO: 23246 - DNA, 541 bp, Oryza sativa
  Clone ID: uC-osflM202089a03b1
tttcccccatatcacatcctctccttcctcttcctctgctcactcagctctcccccgcgcgcgccaccgtcgtcgccatgtcgggcaacatcgccttcggccgcttcgatgactccttcagcgcggcctccctcaaggcctacgtcgccgagttcatctccaccctcgtcttcgtcttcgccggcgtcggctccgccatcgcctacaccaagttgaccggcggcgcgccgcttgacccggccgggctggtcgccgtggcggtgtgccacgggttcgggctgttcgtggcggtggccatcggcgccaacatctccggcggccacgtcaacccggccgtcaccttcggcctcgccctcggcggccagatcaccatcctcaccggcgtcttctactggatcgcccagctcctcggcgccatcgtcggcgccgtcctcgtccagttctgcaccggcgtggcgacaccgacgcacgggctgtccggcgtgggcgcgttcgagggcgtggtgatgggatcatcgtcaccttcgggctggtgtacacc

SEQ ID NO: 23247 - DNA, 493 bp, Oryza sativa
  Clone ID: uC-osflM202089a04b1
ttttggcattcgactgccgcgaaaaccctaggcgccgccgccgccgccgttggccaaaatgtccacgccaccggcggccgccgacgactccccggacaccgaccaaggcaagaccaagtcgaagaagaagagcaagaagcatcaggaggacacctgctgctccctggccgtcgccggagcatcggcggatgaggcggaggacgccaaggccgacggctacctgagcaagccgcagtcggtggcgccgtcgctggacacgtcggagcggccgctccttctaaagaactacgaccgacttaacgtccgaaccggccactacaccccgtttcctgtcggccactccccgataaagcggcccatcggcgagtacctacggtgctgcgtgatcaacctagacaagccgtgaaacccttgctcgcacgaggacaggggatggatcaagcgcctcctgcgagtcgagaagaccggccacagcggtacccttgaccccaag

SEQ ID NO: 23248 - DNA, 226 bp, Oryza sativa
  Clone ID: uC-osflM202089a06b1
gttaccttcggcttcgtcttcctctcgccgctgattcgattcgatccgatccgatccaaggggaggggaagcaatggcgacgaagaggagcgtggggacgctgggggaggcggatctgagggggaagaaggtgatcgtgcggtgacatctgctgtaatgggatcacagaaagacaagtatcctgcaaattacaatcctgcactagtgggctatcactgtgaagttt

SEQ ID NO: 23249 - DNA, 482 bp, Oryza sativa
  Clone ID: uC-osflM202089a07b1
ttcgaggcgatcggcgcggacctgctgggcaacccggagctggtggcaacggacccgacggtggcgttcaagacggcgctgtggctgtggatgaccgcgcggtcgccgagccagccgtcgccgcacgccgtcgtcacggggcagtggactccgactcccgcggacagcgcggccggccgcgcgccaggctacgggctcaccacgaacatcctcaccggcgggctccagtgcgccggcggcaacggcggcgccgaccgggtcgcgttctacaagcgctactgcgacgtgctcggcgtcggctacgggcccaacctggactgcttcggccaggcgccgttcgacggcgacatcatgtcggcgtctgcggcgaagtagacctgtgcgccgccgtgccggccccgatcgatcgaataaattgcgtgtgagtacgcactcgcacggtcgctctgcagcagagtgagtgagtttgctttatgtatttt

SEQ ID NO: 23250 - DNA, 519 bp, Oryza sativa
  Clone ID: uC-osflM202089a08b1
tttgagactacggctacgacccttttggcctgagcaagaagccagaggacttctccaagtaccaggcctatgagctgatccatgccaggtgggcgatgctcggcgccgctgggttcatcatccccgaggcctgcaacaagtttggcgcaaactgcggccccgaggccgactggttcaagaccggcgccctcctcctggacggcaacaccctcaactacttcggcaacagcatccccatcaacctcatcgtcgccgtcgccgtcgaggtcgtcctcgtcggcggcgccgagtactaccggatcatcaacggcctggatctggaggacaagctccacccaggtggcccattcgacccgctggggctggcgagcgacccggaccaggcggcgctgctgaaggtgaaggagatcaagaacgggcggttggccatgttctccatgctggggttctttatccaggcctacgtcaccggcgagggccccgtcgagaccctcttcaagcacctcagcgacccctttg

SEQ ID NO: 23251 - DNA, 458 bp, Oryza sativa
  Clone ID: uC-osflM202089a09b1
cgcttgtctgctgctgctcatcagtagttcatcagtagtagtggtaggggagataattcgtccatcgttttgggcatccatccagaattcgttccagatccagccagccagccatctcaagcttctctcttctcttgttattaagagcaagcaaacagtagtctagcgaagcgagactgcgagagcagagcattgttcttcttctctagctattagtggtggggaataatggctcccgccaccaccgcagcaatggccctcgcgccgcctccttcccatcaccatcaccatcaccatgtcaagcagctgcagctccctccgtctgtctccgtctccgtgcccctccgctccggtttccttggccgcgcactgactgctgctgcccacccacagccgatgctcgccgccgagagccgtcgcagcaacgccgtgttcgtgcggatgtcgtgggacgggcc

SEQ ID NO: 23252 - DNA, 468 bp, Oryza sativa
  unsure (1)..(468): unsure at all n locations
  Clone ID: uC-osflM202089a12b1
tttgaagaaagaagaaatgcttcagagaaggaagatagctgctacttctcgtgtctcttctgtaccaatggttcagtctccagtctcctcaaaatctggggagatatcaagcagttcaatgagtgcccagtttggcgctgctgtgacatctgctgtaatgggatcacagaaagacaagttccctgcaaattccaatcctgcagtagtgggctatccccctgttgcttctagccctagtgattcaatgcaccggatgcagcagccttcagttgctccttcaaagagaaaatcaaattctgttcccaaaactcaaccgcctgtgagtggtgtagggtctccagccagtgtttcaaacatgcatgctgtactgaatgctagcagcccatcaattgggactgcacctatgngtgatcaagcaatccttgagagatttgtcaaaattgatgccatatcttaaaggtgcaagct

SEQ ID NO: 23253 - DNA, 404 bp, Oryza sativa
  Clone ID: uC-osflM202089b02b1
gttcgttgcgtgactcatcagatcgagcagagtcatacatggccatggagaagagccgggtcctcatcgtcggcggcaccggctacatcggccggcggatcgtggcggcgagctaggcggagggccaccccaccttcgtgctgcttcgggcggagatcggcctcgacattgacaagctccagatactgctggccttcaaggcgcaaggcgcgcggctcctcgaggcgtcgctcgacgaccacgatggcctcgtcgtcgctggccggcaggtggacgttgtcgtatacggcatgtccggcgtgcacctgcgcagccacaacctcatgctccagctgaagcttgtctaggccatcaaagaagctggaaatgtcaagcgtgtcctgcctgcagaatttggcatggat

SEQ ID NO: 23254 - DNA, 354 bp, Oryza sativa
  Clone ID: uC-osflM202089b03b1
ttggccgtggatggacacgtgtcatgacatccaaggctttaaagctggcggcgcatcagagggaaccatttattggagtcgccggccgtcctgttggtggtgaccgagcggttgcgccggtcgacggcgaacatgacggccgattctcctggctgacggtcctcgggtttgactttctaactttcaattcatgtatggcgaactaccggtcggacggggacctcgccgacgcgaccttcgggaccttatactacatggacctacagctgctgttcggctggtagctcatgctggagaaggcatagtccaactatcgggagagggggaacctgaaggcggacgcgtggatcctga

SEQ ID NO: 23255 - DNA, 555 bp, Oryza sativa
  unsure (1)..(555): unsure at all n locations
  Clone ID: uC-osflM202089b04b1
atcgacgccattggcgagagctcgagcgcgcaacaccaccacgcggtagcctcccccaacctccacctcctcctcctccgcccgccccagagccaccggatggcctcgcttctgtaggagtagaggcgtagagcccagcgcgagggaaggcggcgattgatttgatttgaccaagattggtcggccgtgccgtctggtctgaggagcccggctctgggggatggcggcggtggcggggggatcgcgcgcggctccaccggcggattccgctgccgtggcggcggtggcgaaggaggcggaataccagaagggcgtgcagaagctggtggacctgctgtccaagctgaacccggctgccaaggagttcgtcccctcgtcggcggcggtctcgtcgccgtccaggaaggcgctgtcggcggacgcgccggtgttcgactacaactcgatcggaggctggaacggnggcggcaaggaatccggcgccgacgcctaccagcagcgtcggaggagggatggatgcctcagtcaagggaggaggaggatgaacgagagagc

SEQ ID NO: 23256 - DNA, 152 bp, Oryza sativa
  Clone ID: uC-osflM202089b05b1
ttatcttaatttctctcttcatcttctcgctctcgatctcctacagaagctatagtagccagcaaatcaatcgatcgatccgtacaatggcggccatgaagatgaacaagattgccgtggcggcgctgttcctcgtcgccgtggtggtggcg

SEQ ID NO: 23257 - DNA, 549 bp, Oryza sativa
  Clone ID: uC-osflM202089b06b1
gtatgagcggtggtgacaccgctcgcctccgtccgcctcgcctccaccgagaggttctctctgccgccgattcagatttacagggagattatcttgtgatctgtaaacatgtttgggcgtgtaccgaggagtaacaacaccaagtactatgaggttcttggagttcctaaaactgcaagcaaggatgagctaaagaaggcataccggaaggctgccataaaaaaccatcctgacaagggaggggatccagaaaagtttaaagaattatcacaagcgtatgaggttctcactgatcctgagaagagagacatatatgaccaatatggggaggatgctcttaaggatggaatgggaggaggcagtgacttccataatccatttgacatatttgagcagtttttcgggggtggtgcctttgggggagtagctcaagagtacgcagacagagacgtggtgaagatgtggcgcatactttgaaggtgtctttagaagatgtgtataatggatctatgaagaaactatcattatcacgaaatatcttgtgccaaa

SEQ ID NO: 23258 - DNA, 535 bp, Oryza sativa
  Clone ID: uC-osflM202089b07b1
tggcgtcaaggaacacagcgatacgccccgcgccggcccggtcggccctggccgtccggcggcgcggcgcgataccacgagttaaatccacacgactctcggcaacggatatctcggctctcgcatcgatgaagaacgtagcgaaatgcgatacctggtgtgaattgcagaatcccgtgaaccatcgagtctttgaacgcaagttgcgcccgaggccatccggccgagggcacgcctgcctgggcgtcacgccaaaagacgctccgcgcgccccccctatccgggagggcgcggggacgcggtgtctggccccccgcgcctcgcggcgcggtgggccgaagctcgggctgccggcgaagcgtgccgggcacagcgcatggtggacagctcacgctggctctaggccgcagtgcaccccggcgcgcggccggcgcggtggcccctaggacccaacgcaccgagagcgaacgcctcggaccgcgacccaggtcaggcgggactactccgtgagtttagcatataaatagccgaggag

SEQ ID NO: 23259 - DNA, 547 bp, Oryza sativa
  Clone ID: uC-osflM202089b09b1
ttgacgcgtggggcggtcatgtccgccgccgacgacgcgggcgcggcgtccggccgggaggacccaccgccagccgtggtgctcgtctccgccggcgccagccactccgtcgcgctcctcgcgggcaatgtgctgtgctcgtgggggagaggggaggacgggcagctcgggcacggggacgcggaggaccggctggtgccgacggtgctgagcggcttcgacgccgtcgcgccggggatcacgtcggtcatctgcggcgccgaccacaccaccgcctactccgaggacgagcagcaggtgtacagctggggctggggagacttcgggaggctcggccatggcaactccagcgacgtgttcactcctcagccagtcaaggccctgcaggggataaagatcaagcagatagcttgcggcgatagccattgtcttgccgtcactatggcaggtgaagtgcaaagttgggggcgcaaccaaaacggacagctaggtcttggaacctactgagactcattgctcccacaaaagattcaatcttttgagggag

SEQ ID NO: 23260 - DNA, 474 bp, Oryza sativa
  Clone ID: uC-osflM202089b11b1
tttcccccgcattccgcgccggagctgaggagggacagcgagccagcgagggaggtggggcaatccagcgagcgccagatcgtgccgccagccccgctccgtcctctctccggcgaccctccgccccgcctgatcccgtggtggatcaactacaactcatctttaggaaagcctcttgaacattagccttgtgtgcctttcaacagtatggcctcggtaggtgtggtgcgttcttccttggggtttcagaacgaaacaagtacaagtggcgatgccgaccgacttccgaatgagatgagcaatatgagtataagggatgataataaggacattgacgacatagttgtcaatggcaatgggacagaacctggtcatgttattgtgacaagcattgatggaagaaatggacaggctaaacagaccattagctacatggccgagcgtgtcgtagtcatggatcctttggaactgttt

SEQ ID NO: 23261 - DNA, 531 bp, Oryza sativa
  unsure (1)..(531): unsure at all n locations
  Clone ID: uC-osflM202089b12b1
gtctcctcgtcctcctcctcctcctccccctgccggtaaggcggacgaccgagctgaggctgagctagggctagggcacccacctcctccccttccgtatcctggatggctgctggtcggggcattaaccagctcctacggagaacactccataatcagtcctcaggctcatctctgctatcctcgttccggataaagcatgaagaatcctccgctggactgagagcattggctcttcttggagttggtgcttctggtcttttaagctttgctacaatagcttctgcagatgaagctgagcatggtttggcagcagctgaatatccctggccacatgctggcattcttagctcttatgaccatgcatctattcggcgtggacatcaagtttatacacaagtgtgtgcctcttgccattccatgtcattaatnttcgtaccgagatttggttgtgtggcctacactgaagaagaaacaaaggctatggctgctgagattgaagtggatgatggtcctaatgatgagggtgaa

SEQ ID NO: 23262 - DNA, 431 bp, Oryza sativa
  Clone ID: uC-osflM202089c01b1
tttaaaggggaagaaaaatttctgtgtccgctccatcctagcccttggcaagtcttctcaagcaggaggaggacttgccatggtgttgatttggggcggtaagaagcatcggtctcgccgtctgctcctatgatcggcctcctcagttgacacagcaagatttggtccggggggaaggggagcagccgccatgtttgggtcccgcgtccaggatgaggtggagatgcagaggaggactaccaacaggatctttcctgatgagagacaggaccagattaagctaccgtttcaagctgcacgggctgacagatttggggtaaacaggatagatgcaaagactactgagaagattaaagtgataagtgaaggcaacataccatggcaccgccgcattctagaccctgggagtagcatggtgctaatgtggaaca

SEQ ID NO: 23263 - DNA, 326 bp, Oryza sativa
  Clone ID: uC-osflM202089c02b1
cttgggcttttccaggttcagatcgacgcctccttcctctggacattgttgctagttggtgatggctgagcaggctaatcaaccgactgttcttcagaagttcggtggccagttccaccttggctccagcttttctgaaggtgtacgggctcgcaacatctgcccatctgtctcatcctatgacaggcgctttaccacaaggagctacatgacccagggccttgtcaatggtggcatcaacgtcccaatgatgtcgtcctctccaatttttgctaatgctccagctgagaaaggtggcaaaaacttcatgaatgatttccttatgg

SEQ ID NO: 23264 - DNA, 536 bp, Oryza sativa
  unsure (1)..(536): unsure at all n locations
  Clone ID: uC-osflM202089c04b1
cttgaagaaagaagaaatgcttcagagaaggaagatagctgctacttctcgtgtctcttctgtaccaatggttcagtctccagtctcctcaaaatctggggagatatcaagcagttcaatgagtgcccagtttggcgctgctgtgacatctgctgtaatgggatcacagaaagacaagttccctgcaaattccaatcctgcagtagtgggctatccccctgttgcttctagccctagtgattcaatgcaccggatgcagcagccttcagttgctccttcaaagagaaaatcaaattctgttcccaaaactcaaccgcctgtgagtggtgtangggtctccagccagtgtttcaaacatgcatgctgtactgaatgctagcagcccatcaattgggactgcacctatgggtgatcaagcaatccttgagagatttgtcaaaattgatgccatatctcaaaggtgcaagctgcacagcaagaangacaaagttgacaatatacctcagagaaaaccgattatcaatgcaagccaagag

SEQ ID NO: 23265 - DNA, 232 bp, Oryza sativa
  Clone ID: uC-osflM202089c05b1
gtcgccgtctcctcgtgtaaccctagcttagtggattagtttaagtgtttgccggagattatggggtcggtggcggcggaggaggtggtggtgttccggtcgaagctgcctgacatcgagatcgacaacagcatgactctgcaggagtactgcttctcgaggatggcggaggacaaggcgcgggcgcgcctgaacgacggtcaaaccggggagtcctacacgtacgctaagg

SEQ ID NO: 23266 - DNA, 252 bp, Oryza sativa
  Clone ID: uC-osflM202089c06b1
ttattgagggataggcaaaatacttgatagggctttctggctgtttggcatttgtcagacgccctgtgtgtggtaacatctcgatcaaattggaggtcgaaattaaatatatccggtgagaagagatcacgagatcgatcgctacctatatatcacagatagaaatcagagtcctatcgatattttcgccgagcatatataagtagtgctgtcgatggcgagcccaattcgtgctttataaaaacagaacat

SEQ ID NO: 23267 - DNA, 552 bp, Oryza sativa
  unsure (1)..(552): unsure at all n locations
  Clone ID: uC-osflM202089c07b1
ttggaagttctgccaaaaaatttctctggccatccattttccaaggggagattctgccaaaattttcatctctgtccatcaatattcctggggaggttctgccaaaattttctctgaaatcggttaatttataaggggaggttctgccgaaattttcgctggtcatcaatcttccctttgttgacataccctgcataagtatatacaacaaacatataactttttgcaaggtaagaaggagtttttatctgttcttgatgatagactcctagagaagttgtcctagttgtgtagatgttgttgctcatcatccctgagcacctcctctctagatttatgactggcccagccataacccagcttgttcagtccttctctgttgtcttcctctactggttctatgtcttctcagtaagctccctgtagttgtagccttttgaaattacaagacttatttatacaacataattatcaaggcatccacatataaactacanggnttatatatatatatatatatatttacanaaagaaagggaatagagggagtaa

SEQ ID NO: 23268 - DNA, 524 bp, Oryza sativa
  Clone ID: uC-osflM202089c09b1
ttcctcccattcatcgggtcgtgtcgccgccggcgaacaacacggcgagcggcgccggtagcgagctacctaccctccatctctccagatcccttccagggacagtacaagacaagtcgcacaaaacagaaaatcttgtgatagtttaaatggcttcaaagcttcaagccttttggaaccatcctgctggccccaaaaccattcatttctgggctccgacatttaaatggggtattagtattgccaatgttgcagactttgctaagccacctgaaaagatatcctatccacagcaagttgctgttgcttgcactggagtcatttggtcacgctacagtatggttataacaccaaaaaactggaatctattcagtgttaacgttgcaatggccggcacaggcttgtatcagctttcccgtaaaataaggaaagattacttttctgatcagaaggatgatgttgcatcattggaaggataatgatgactgacatgatgaaaacctcgcccacaacctttgagcgat

SEQ ID NO: 23269 - DNA, 433 bp, Oryza sativa
  Clone ID: uC-osflM202089c12b1
tttcacgctttcttgcataagaacttccccccctcctcgctccccgtcgccgtcgccgttttcttggagaggagaaatccgtaggctcagaggatttttggtagccttgtttcgtgatattcgcgaagagggggggagctaaggggggattcgttagatcagaattggatcacgcgggggcccgctcgggatcgggggttccaaacacagtttcttcgttgaatttaagtggatgtactaatggagtcaaagggcggcaaaaagaagtctagcattagtcgttccttgatgtatgaagctgcccttggctacatcattgaggacggtcgacctgccggaggcctgaagaagcttcagactgctgcttactgcaactgctccgaagaagccatcctgatagccttttcgggttctccatcctagtggtttagga

SEQ ID NO: 23270 - DNA, 556 bp, Oryza sativa
  Clone ID: uC-osflM202089d01b1
tttagcagcagcagcagcagcagccgcgatgctcctgacgcgcgcctcccccaccttcctcccctccacctccgccgcctcgccctcgccgcagcaggcgccgtcctccccgaccttcgggaggagccagtaccgccggggaggtggattggtctccgtttcttctccggtggccggtcagcgctgtgctgccaggaggaggtccgtgatggcggcggccggcgcggtccccgcggcgaagctggagaacgccgacgcgctcatcgactccgtcgagacgttcatattcgattgcgacggtgtgatttggaagggcgacaagctgatcgacggagtgccggagacgctcgacatgctcagatcaaagggcaagaggctggtgttcgtgacgaacaactcgaccaagtcgaggaagcaatacgggaagaagtttgagacgctgggactaaacgtcaatgaggaagagatcttcgcttcgtcggtcgcagctgccgcgtacctgcagtccatcgatttccccaaagacaagaagggttatgtgattggagaggacggg

SEQ ID NO: 23271 - DNA, 213 bp, Oryza sativa
  Clone ID: uC-osflM202089d05b1
ttgatacaagccggcatccgcaagcacaagaagttttgtctgctctttcaagaggacagctccttctatatgcaccactggagagagggtatactctcgatcacattgctgctattgaccacgagctctgggcaaagaggaccacggcgctgcatatagactacacgctagaaataatgtaccaggtagataacggaaagtatgagaaggaag

SEQ ID NO: 23272 - DNA, 552 bp, Oryza sativa
  Clone ID: uC-osflM202089d06b1
ttgtagaaaaaaaaatctcccctcgaagcgaagcgtcgaatcgccttctcaagatgcagatctttgtgaagaccctcaccggcaagaccatcaccctcgaggttgagtcctcggacaccattgacaatgtcaaggccaagatccaggacaaggagggcattcccccggaccagcagcgtctcatctttgctggcaagcagcttgaggatggccgcaccctggccgactacaacatccagaaggagtccaccctccaccttgtgctcaggctcaggggaggcatgcagatcttcgtcaagaccttgactggcaagaccatcacccttgaggtcgagtcgtctgacaccattgacaatgtcaaggccaagatccaggacaaggagggcatccccccggaccagcagcgtctcatcttcgctggcaagcagcttgaggatggccgcaccctggccgactacaacatccagaaggagtctaccctccaccttgtgctcaggcttaggggaggcatgcagatcttcgtaagaccttgactggcaagaccataccctt

SEQ ID NO: 23273 - DNA, 522 bp, Oryza sativa
  Clone ID: uC-osflM202089d09b1
tgctctcacttcttgtgcccaagtgtgagagcaatgggagttcttggtagtagggtcgcttgggcatggctggtccagctgctgctgctccagcagctcgccggagcgtcgcacgtcgtctacgacgacctcgagctgcaggcggctgctaccacagcggacggcgtgccgccgtccatcgtcgactctgagctccggactgggtatcacttccagccacccaagaactggatcaatgatccgaacgcgccgatgtactacaaggggtggtaccatctgttctaccagtacaaccccaagggcgccgtgtgggggaacatcgtgtgggcgcactcagtgtcacgtgacctcatcaactgggtggcgctcaagccggccatcgagcccagcatcagggccgacaagtacggctgctggtcggggtcggcgacgatgatggccgacgggacgccggtgatcatgtacaccggcgttaaccgccccgacgtcaactaccaggtgcaaaacgtggcgctgccgagg

SEQ ID NO: 23274 - DNA, 495 bp, Oryza sativa
  Clone ID: uC-osflM202089d10b1
gttctctgaaccccacaacctccttggaggttttgccttcatcggagagggcatccctgttgctactggtgctgcctttgctgctaaataccgccatgaggtgctcaagcagtctagccctgatggacttgatgtaaccctggcattctttggtgatggtacctgtaacaatggccaattctttgagtgcctgaacatggctcagctttggaagcttcctattgtgtttgttgtggagaacaacctatgggcaattgggatgtcgcatcttagggctacttcagacccagagatttataagaagggtccagcgtttggaatgcccggcgtgcatgttgatgggatggatgtcctgaaggtcagggaggtggctaaggaggccattgagagggcaaggagaggtgaaggaccgactcttgtggagtgtgagacttaccggttcagaagacattctcttgctgatccagatgagctcatgaggcctgatgagaaatc

SEQ ID NO: 23275 - DNA, 553 bp, Oryza sativa
  unsure (1)..(553): unsure at all n locations
  Clone ID: uC-osflM202089d11b1
gggtactgtgtgtgtgtgtgtcagagtgagagagagatagagagagagaggcagctgatcgccacagcgtgctcctcgccgcccgcctgccatggccgacccatacggcgacggcaagggcctcaagcagcagcagcgccagaagctcaagcccgcgctcgaggtggaggacttcatcaacctcctccacggctccgatcccgtccgagtcgagctcacccgcctcgagaacgagctccagtataaggagaaggagcttggggaggcgcaggctgagatcaaggctctgcggctgtccgagcgagcgcgcgagaaggccgtcgaggatcttacggaagaattgacaaaggtggatgggaagctgaagcttacagagtctctcctcgaaagcaagaaccttgaggcaaagaagataaacgattgaaagaaagcagcacttgcagcccaatttgcagcagaggctacacttcgaagggttcatgcagcacagaaggatgatgacatgccccctattgaggccattcttgcgccattngaagctgaactgaaacta

SEQ ID NO: 23276 - DNA, 334 bp, Oryza sativa
  Clone ID: uC-osflM202089d12b1
ttttggtcgtcttcagagcccaacaaactggcttgttggtgataggacacatgttccaatggccgaaaaattgtgatattactcttctaaaatgcggtgtcagaaacaaggctgaccgagttgaacagcaaattttaaggtatatatgggactaacgctccacatagctgaattaacatcgttgattggaatgggattatccagactgatacgacaggctatgtttgcttgaacaagatggcatgtgcatttactcataaagaggtttaattgctgctgaccttgttataaaactgattggagtacactgtgtgagcatggaatctcagcacga

SEQ ID NO: 23277 - DNA, 449 bp, Oryza sativa
  Clone ID: uC-osflM202089e01b1
tttacgtcagtcctgaagctgctgcccagtcagccactaccacaacatggggatctggggttacctcagttgcttttgatcccactcgagggggatcagttattacagttgtaatagttgaagggcagtacatgtctccttatgatcctgatgaaggaccttccatcactggatggagagtccagtgctgggaatcttcagtccaacctgttgttcttcatccaatatttggaagccctgcaaactttggtggacagccacctacacagactgtttggtccacaagagttaacaaaagcatcccaccatctgaggaccttaagaaccctcaatcatatgttccaatgccaacaacttcagatgagcggagttcttctgagtgcagtgttgacagggcgaaccgacttagctttgacccttatgatctttcaaatgatgtcagacaattg

SEQ ID NO: 23278 - DNA, 509 bp, Oryza sativa
  Clone ID: uC-osflM202089e02b1
ttttaatgttccctatatattttctgcatgttggaaggttgtgaaacccctgttgcaggagaggacaaaaaagaaggttaaagttttgcatggttgtggaagagatgaacttctgaagattatggactattcatctgttccacatttctgccgccgcgagggctctggctcatccaaacattcatctactgacgctgatgactgctactcacttgaccatcctttccacaaagagctttatggtcacattgaggagctagcatcgtgcaaggaactcatcaagatgggatcattacatgtcagcattcccgagcctgaccccgatgacgcaaagattgttgaggtcatccaagctgaattccagaagatcggtgagcagaatggatccgccaatggtcacaaggtttagccaaaacattggccatctgcagaacaccttaaccagtgctggtgacttctgaatctgatgaagttgattactactgtccatgtcaagtattttggtgaca

SEQ ID NO: 23279 - DNA, 557 bp, Oryza sativa
  Clone ID: uC-osflM202089e04b1
gtaactggtgccaagaagcgtaaatctggaaatgtgaggaggtttgagcagaataaaccaacacaaggacaaggagaatgtggagcattagtggtggctgaggatgttggttccactgaaggagaaactggcgataagaaaaagacagagggctgtcctaaccgagttcatatcaccaagatcatcaagccagtgcgatttgcagcagctgtgaacaacgatgtgcagcaagtttcaattacattcaaagcactcaggtctgatgggcaggaagtcatggtggacgacaaagaattgaaagcaaataatcccttgctgcttattagctactacgagcagtgccttcgttataatccgacttcgtgagagatgaactgaaggaactgggtttagctgcctgtgtatttaattagcatttgtgtgtttagaagcttgtagctctatgggcttgataatttagtctggtcttgcagtaggttgctaaatgcaagaaatgtattgcttggtctccccactgattgcttattcgcgccatcttatgtgtaacattttgaaca

SEQ ID NO: 23280 - DNA, 522 bp, Oryza sativa
  Clone ID: uC-osflM202089e06b1
ttaaagcatggagattatgttggttctacctctggctcgagtgagggtaaaagtagggaccatgttgactcatcctcccgttcaactgaacagttgtggcaagccttctttgctaatccttttgactggtgggataacaggacaaataaggtaactttcttcttattgttcatttagacattcaaatgcattatcttgtaatatatattacatgataaacggactaatggcttctgttcttgggtaaaccatctacctccttttaggagggtcatatcctactaagtactgctgcaaagatttgagagcacttctaatagtccaaaacttctcagataattaaaatactactatatgaagtattaatggttcatggagtttggctgaacattgtaaaacagaaacattgaaggtgtcaaatactcaaatgtaatcatgaaggaaaaaaaaaaaaggaagttgcaacatagtcagcatagcgatgtggctattttgtatttgagtcatgcaatatgtttttgg

SEQ ID NO: 23281 - DNA, 552 bp, Oryza sativa
  unsure (1)..(552): unsure at all n locations
  Clone ID: uC-osflM202089e07b1
ttacctcgccgcgatccccgccgggggcgccccctccgccggagttcgagatctcgcggcagtcccgtctcctcgcggcgctgtccaagaaggtgatagatctcgatgagctgaggatgctggctgctcagggggtccctgacggcgccgccgtccgtcctactgtgtggaagctgttgctgggctatttgccgagtgatcgtgccctgtgggagcaggagttggcaaagaagagatcacagtacgcagcctttaaagaagaattccttagcaaccctatggaaattgcacggcaacaggaattagaaggccaagggagtgagaatgcagggagtatcaataatgggttacttcatagatcagaggttacacaagaagagcacccattgagccttgggaagacaactgcatggaatcagttctttgagtattcagagattatcgagcaaattgaccgtgatgtgaagcgcactcaccctgacatgccatttttttgtggagactcatctnttgcaaagtccaatcaggaatctctgaaaaatatactgatta

SEQ ID NO: 23282 - DNA, 375 bp, Oryza sativa
  Clone ID: uC-osflM202089e08b1
gtacgccacccgcctcgtcgtcttcctcgcgagctctccacccccaccaccatggcgatggcgatggcgatgcgacgcgcggcggcgctcggcgcgcgccacatcctcgccgcctcgtccacctcctcctccggcgtcctcctccgccgccacgtactctccccctctgccccccccccccttcggatgtgggtttagggcgcttgctgtgaattgggaggtttgtgcagatgagcgtggacgcgggggcggcgatggagaaggtacgggcggcggggctgctccggacgcaggggctcatcggcggcaaatgggtggacgcctacaacggaaggaccatgggggttcaaaatccaccacttggggggactttgg

SEQ ID NO: 23283 - DNA, 466 bp, Oryza sativa
  unsure (1)..(466): unsure at all n locations
  Clone ID: uC-osflM202089e10b1
ttttgaggtgggttggcttctcctccccctctttaccttttcctcctcggttcggttccgaggttcgactagggtttagtgggttgagatggcggcgccggatgtcgagtaccgctgcttcgtcggcggactcgctctgggccaccgacaaccgctccctcgaggccgccttctccacctacggcgagatcctcgactccaagatcatcaacgacaggtagacggggaggtcacgtgggtttggcttcgtcaccttctcctacgagcagtcgatgcgcgacgccatccagggcatgaacggcaaggagctcgacagccgcaacatcaccgtaaatgaggcccaatcccgacgatccggcagcacaggccgncgctactgcggacgcagaggcacatactgcggacgtcgtggaggcggcggataccgaggaggtggtggcggcggctacggtcacccagagggcgg

SEQ ID NO: 23284 - DNA, 538 bp, Oryza sativa
  Clone ID: uC-osflM202089e12b1
gacgcagcaaggcacagctgggccgccgacaatggcgatggcggcgcgggcggcgtacctggcggcgacgcgcgcggcgctggcggcgctggagcgcaacgccctccccgacgcggtcacccggcgcctgacgcggctgctgctcgcgcagcgcctccgcctcggctacctcccctcctcctcctcctccgcgccgctccacctccaccacctcctcctcttcgcccacgctctagaagagatgcccatcgcaatcgagacggagaaagctaaagaccagcactacgagttgcccacgacatttttcaagctggttcttggaaggaatctcaagtacaggtttgtgccgtgcttcatgcataatagtacaaagttcactactttgggaaactattgcatcattttgacaggtcatttaaatagttattatttttttaaaaaaaatgatataataaatcaatatgatgtatgccattccacaaatatgcaaattcaaattcaatctgaagtgttatttttttttctactcacactaaat

SEQ ID NO: 23285 - DNA, 520 bp, Oryza sativa
  unsure (1)..(520): unsure at all n locations
  Clone ID: uC-osflM202089f01b1
ctgtcgcgtgggctccaattaaccaaagctaattaagctagctcaagctctaatccacatttagctagaatggcgccgtccaagtccacagccgccgccggcgtcctcctcgtcctgctcgtcgcggcggcgggcggcggcgcagaggcggcggcgacgacgtgcgtggcgtcgctgctggagctgagcccgtgcctgccgttcttcaaggacaaggcggcgacggcggcgccggaggggtgctgcgcggggctgtcgccatcgtgaagggggggcggtgtgcctgtgccacatcgtgaaccacaccctggagcgcgccatcggcgtcgacatccccgtcgaccgcgccttcgccctactccgcgacgtctgccgcctctcgccgccggcggacatcatctccacctgcgccaacgagaaaggtggtgtgccgnctctctactcttgcccggctccatctgcctgagtatatatgagaaaagaatacatgttaccaaaggagggatttcaacatatctaa

SEQ ID NO: 23286 - DNA, 536 bp, Oryza sativa
  Clone ID: uC-osflM202089f03b1
gtacgcttgctgactacaacatccagaaggaatccaccctccaccttgtcctccgcctccggggaggcatgcaaatctttgtcaagaccttgactggcaagactatcacccttgaggttgagtcttctgatactattgacaacgttaaggcaaagatccaggacaaggaagggattcccccggaccagcagcgtctgatctttgctggcaagcagctcgaggatggtaggacccttgctgactacaacatccagaaggagtccacccttcaccttgttctccgcctaaggggaggaatgcagatcttcgtgaagacccttactggcaagaccattacgcttgaggttgagtcatcagacacgatcgacaacgtgaaggcgaagatccaggacaaggagggcattcccccagatcagcagcgtcttatttttgccggcaagcagctggaggatggcaggaccctcgctgactacaacatccagaaggagtccacccttcaccttgttctgcgcctaaggggtggaatgcagattttc

SEQ ID NO: 23287 - DNA, 517 bp, Oryza sativa
  Clone ID: uC-osflM202089f05b1
ttccgccagcgagcaaaaaaaaaaaaagaagaggaaaaaatccaccgatctggactcgactcgacggtcgacgccaccccccaccggccggccccgtctcgccgtcgacgacgtcgtctccgccacccaaaaccctagccctgcagcctcccctccgcagctcgccccctctcctcgccatggccaccaacggcagctccccgagggcgagggagactgagagcagcctggagaaggtgaagcggcagctctcgtcggggtccgggcggtacctgctgcaggggccactgctgaagcgatctgagacgttgaggaaatggaatgagagatgggtaattttagaccctacttcaggaaagatggaatacaaaattcggagaaatgaaactgccattaaaggaaccattatatttgatgcttcaagcactattaccttgtcccctgtaaatttccaagggatgccaaagtatgatggctgctgtttctacattggaactcctcaaaaaaaggattactt

SEQ ID NO: 23288 - DNA, 554 bp, Oryza sativa
  Clone ID: uC-osflM202089f06b1
ttacgacttgccaactaggaaacaccaagccggcgcacatgagacacggcggatagagctacagaatcattgatgcctcctgtccaatcctgctatcccatatcggagttggatggagcactaccgaataagagaagagggcgggctgacaaacggttgaaccaaggagtcctaggtggggaaggtggggatccacgacgcagctatggcctccccgcccaccaggccgccagccacaaccagctgactaggtcgcatgcatcatcagatttcaatctcccttcgttccctgtccctaatccaataccaatagggagcaatcagctgctcctcgacggcgagggagatgtcgtcggccgcgggccaagacaacggagataccgctggggactacatcaagtggatgtgcggcgccggtggccgtgcgggcggtgccatggccaacctccagcgcggcgttggcttcctcgtccgtgacattggggacccctgtcttaacccatcccccgttaaggggagcataatgctcaaaccgaaaaaatggccacatgttt

SEQ ID NO: 23289 - DNA, 404 bp, Oryza sativa
  Clone ID: uC-osflM202089f07b1
gtacgccgcctccccgcccagcgacctcggcaactccggcgaagatgggcgccttcaggttccaccagtaccaggtggtggggaggggcctgccgacgccgaccgacgagcaccccaagatctaccgcatgaagctctgggctaccaacgaggtccgcgccaagtccaagttctggtacttcctccgcaagctgaagaaggtgaagaagagcaacgggcagatccttgccatcaacgagatttttgagaagaacccaacaactatcaagaactatggcatctggctgcgttaccagagtaggactggctaccacaacatgtacaaggagtaccgtgataccaccctcaatggtgccgttgagcaaatgtacactgagatggcttcccgccaccgagtcagattc

SEQ ID NO: 23290 - DNA, 532 bp, Oryza sativa
  Clone ID: uC-osflM202089f08b1
ttcgcatccatccaccgtctcaatctcggtagtaatcctcgcggcctcgccgttagttccaccaccgggcgccaccatgtgcgggatcctggccgtgctcggcgccgccgactggtcgcaggcgaagagggctcacgtcctctcctgctcccgcaggctgaagcacaggggacccgactggtccgggttgtaccagtgcgagggaaacttcctcgctcagcagcgtctcgccatcgtctccccgctctccggcgaccagccgctgtacaacgcggaccggaccatcgtcgtcgtggccaatggagagatctacaaccacaagaagatcaggaagcagttcgcctccaagcacacgttcagcaccggcagcgactgcgaggtcatcatcccgctgtatgaggagtacggcgaggactttgtcgacatgctggacggggtgttcgcctttgtactttacgacacctcgaccaagacgtacatggacgcccgggacgccattcgcgtaaccccctttacatcggaggggcagtga

SEQ ID NO: 23291 - DNA, 433 bp, Oryza sativa
  Clone ID: uC-osflM202089f09b1
ttatcatgggaactgagaatgatgcccagacagacactcccacaaaatacgaaccacgctgttccgatggagagagatagagtgctattacgcgctgagcagtcattacagtcgtaatagtcgaactgcacaacatcttctcctatgagcctgaggaaggaccgtagatcactggatggagagtccagggctggcaattctaaaatcgaaccagtgcgtattcatccagtataaggaagccctgcaaactttggaggacagccacctacacatactgttgggatcacacgagttaacaaaatcatgacatcatatgaggaccttaagaaccctacaattatatgttgcaatgacaacaacttcagatgagcggaatacttgtgagtgctaaggtgacagggtggaccgacttagttttgatcctaatgatctt

SEQ ID NO: 23292 - DNA, 535 bp, Oryza sativa
  Clone ID: uC-osflM202089f10b1
gtcaattttgggtgttcagcctcggacacatggtgctgaggatgcagatgcagtcaaacccaagagtcgaaccacaaagtctggtcttgcaactgttggggaaatcaacactactgcagcaggggctgttgccaagcatggccatgatgaaaatattccacaggagcaaacaccgtcatctctggctagaatggtgaatggagtagcaacagatactcaaaatggtttccatgatgttgatcgaactgctcgtagggctgaggaaccatcgaatactgccgtaaatggaagagtgcaaggtgcttcccctggaactaatgaaattcccgctgttagtacccaaaacatgcctaccgagaggtctgcagagaacattcctgttgctaggactgaacagcatggcaatgctaaagcaaatttggaaccaacatcaggtgtgaatgcttctagaagttctcatgctggaaatgacactgctgctgaagcccgggctggaaatgaaacattaccattagtagagggtggagaaacagga

SEQ ID NO: 23293 - DNA, 537 bp, Oryza sativa
  unsure (1)..(537): unsure at all n locations
  Clone ID: uC-osflM202089f11b1
gtaccatacacctgtggcttccaatcaaggtgggacaggattcatgggaagctgttcgctgcatgataatagctcagaggctatgaaaacggattctgcttacaacatgaagtcaaactcagatgctgcaccaataaaacaaggttctaatggtagtagcaataacaatgacatgggttccactacaaagaacgttgtgacaaagcctagtacaaataaggagagagtaatgtcaccctcagctgttaaggctaatggacacacatcagcatttcatcctgcacagcactggacgtctccagctaatacaacaggaaaagaaaagactgatgaagtggctaacaatgcagcaaagagggctcagcctggtgaagtacagagcaacctcgtacaacaccctcgcccaatacttcattatgttcatttcgatgtgtcacgtgagaatggtggatccggggcccctcaatgtggntcatccaatgtatttgatccttctgtcgaaggtcatgctgccaactatggtgtcaatggaagcaa

SEQ ID NO: 23294 - DNA, 555 bp, Oryza sativa
  Clone ID: uC-osflM202089f12b1
tttctctctctcctcctcctcgccgccgaccgccgccgtcgccgcgagtcgccttcgccgtccgggtagcagcaggaagagggaggaagggggggcatggcgctacggaggctgctccaggggagcgtcctgccgcggatggcgggcagagccgccgcggcgccgttctcgacggcgtccggggagaccgtccgcgccacgctcttcccaggcgacggcatcgggccggagatcgccgagtcggtcaagcaggtattcaatgttgcaggggtaccaatagaatgggaagaacactatgttggtacagaagttgatcccagaacagagagttttctgacttgggaaagcttggagtcggtgcggagaaacaaagttggcttgaaaggtcctatggctacgcctattggaaaaggccaccgttcattgaatcttacactaaggaaagagcttggtctttatgcaaatgttagaccttgcaacagcctcccaggatacaagactcgatatgatgatgtgaacctgtgactatacgggaaataccgagggagaaatagt

SEQ ID NO: 23295 - DNA, 535 bp, Oryza sativa
  Clone ID: uC-osflM202089g01b1
gttatatcttcttagagattgtccaaacatgcagagcttggcatgtaattactgcgatatgatctcagagcatggcctaggaatcttgtcaggtctttcaaacctgacatctctcagtttcaagagcagcgatggtattactgctgaagcaatggaagcatttgctaatttagttaatttggtaaatcttgatctcgaacgatgcctaaagattcatggtggccttgttcacttaaaaggcctcaggaatctggagtcactcaatatgagatattgtaacaacattgcagattcagatatcaaatacttatcagatctcacaaatttgaaagaattgcaattggcttgttgtagaatcactgatctgggtgtttcttatcttagaggcttgtccaagctaacacagttgaatttggagggctgtccagtgactgctgcctgtttggaagctatatcaagattggcttctctggtggtgttgaatttgagcggtgtggcattatacagtgaaggctgtgaaaactttcaaggtctt

SEQ ID NO: 23296 - DNA, 389 bp, Oryza sativa
  Clone ID: uC-osflM202089g03b1
gttcgatctcgccgcgcgcgctcagctcgtcgacaaggcagcgtgcacccaccaagatagcgggatgatccagtgagcgcgtggaggcggtgtttgattctagattgttctagaaccgaacgagcgagcttagctagctagctagctgctgctgcttcgatcgatcggtcgttgcctcatgcaggagttccagtccatcccggggctcgccgggcggctgttcggcggcgcggcggcggctgacatccggcgcgcgcaggcgcagcagggcccggcgtcgcggtgcggcgggataccgtcgccggaggcgttgaagtgcccgcggtgcgagtcgaccaacaccaagttctgctactacaacaactacaacctctcgcagccgcgccact

SEQ ID NO: 23297 - DNA, 502 bp, Oryza sativa
  Clone ID: uC-osflM202089g04b1
ttgcccttggcgcccgagcgccgcctgccggcgcacatcgacaccggcgtcgacgggctccgccggctccgctccatcgcgctgtccgacgccgccgctctcggcgacccggcggcggagctcctccggacggccgccgacttctcgcgggtgttcctcatcggggacagctcgggcggcaacctcgtccaccacgtcggcgcgcgcgtcggcgaggacggggcggacagctgggcgcccctccgcgtcgccggaggcatcccgctccacccggggttcgtgcacgccacccggagcaagtcggagctggagccgaggcccgactcggtgttcttcaccctcgacatgctcgacaagttcctcgccatggcgctccccgagggcgccaccaaggaccacccgtacacgtgcccgatggggccgaacgcgccgacgctggagtccgtcccgctgccgacgctgctggtcgccgccgacgagcacgaacttattcgggacacca

SEQ ID NO: 23298 - DNA, 499 bp, Oryza sativa
  Clone ID: uC-osflM202089g05b1
actgaccaacttaagcaactattataatgcaaagaccaaactcctcgttcttacaacactcactcaacgatacatcacaagatataaacaggggcgagcgagcaaggcaggaggcactagagtgacaccaagcgattatacttaattacttatatataaaccatgcattccagacacaccattcatcatcacatacaccaccatggcacaagaccagaacgcaaccccctcctccaggcaggagatcaggatacattcccgacttcacagcaaaattaaatcaggaaggaatacttcgctctaagctcaaccagatctaggagtcccatgttcttccaggctgctgcctaggctgcgaggacgattatcactatgagcaggaccaccccgaatataaccagcaacaagcatatcagcgaagagttcgacttctgagttttagcagccttagagagttggccttttgcttgtgtagtcgctataacagcattctcgatat

SEQ ID NO: 23299 - DNA, 145 bp, Oryza sativa
  Clone ID: uC-osflM202089g09b1
ttgcatgaaaagacgcgcagatatgactatatcactgtacacacgactaccctactataccgtgagtgtctgccgacgagacgtatccactatacatgtatgaattgtggaccgtgcctaaataaaatgcatgctgcgcgcgtcc

SEQ ID NO: 23300 - DNA, 358 bp, Oryza sativa
  Clone ID: uC-osflM202089h01b1
ctatccatctcaagaggcacattacattgggttcatgccctaaaattaagaaccaagagcacaagctagcactgactccagctggagggactgacaatgatggtgagggtactgtggagcgcccatctaagaggcgttacagatatactggttatgcaaatgctgcttttgatcaagaccgcagttgctcatatctggcaaagatgataattttgcatgactacccacttcacattgttcaacagccagcgttcactacctttattgacagtctgcagccacgtttcaaggttgtagatgttgagacaatggaggggagggtgtatgctggttaccagaaagaaaaggaaaaccttac

SEQ ID NO: 23301 - DNA, 440 bp, Oryza sativa
  Clone ID: uC-osflM202089h02b1
ctttgtcattgttgcgccgtgcaggatacacagcgaccatgatggcttgcgctttccttgtaaggattaggcgcttcgctcgaccaatatgcgccgagaggtaacagggacgctttctgcatgaatctgggaaggaagatagtacttaactgacttgtaatgaaaggagcacaaggagcctgcaatacttcagcctaacacaacagaagagaggatggtgctcagagaatgaggtcaatttacacagaaatcgctgatgcacacgctgaccttaatgagatgttaggtcctgtgagcgaacaacaggtatagaaggcagactcagatggaacagctaactgggctattgaagatttcacctactaggtatacttgcaagacactaaataacactcagaggatactatcgtggatgctagcttaaatgaggacatacatag

SEQ ID NO: 23302 - DNA, 513 bp, Oryza sativa
  Clone ID: uC-osflM202089h03b1
gatatcttcttctccatcagatcaaatccatcggaatcgatcggtggctgggagtgggaggagaggggagcctccttatcccccacgcagacgcttctccaccgcacattactcgcctccgccgttttggattcttccctgattttttcccctcctctcgatcgcttggtgtttgtgcttgttgttgcgttgcgtttgcttatagtggtccagtgagctccagcgagcaaaaacagacgccatgagccccagagagagattttggtgccaatagacacacactgatttcatcatcatctaggcccaaaaacctctactcttccgcgtcttggaaaattcttctcagattgcatcaccagaaggaggattgtcagattgctgctgctgctctttgcctagttgtattcaggattcagaatttgggcggacgacgacgaggataaatcggatcttttcttcctccttaattaattcctgaggcgtgtgtgtgattagttcacaaaagaaaaatag

SEQ ID NO: 23303 - DNA, 525 bp, Oryza sativa
  Clone ID: uC-osflM202089h04b1
ctgattgctcctacaaggttacagatggaaatgataaaaatcgtgattctctcattgatatgacatctgaagagttgggtttgaagagatagaaaacaactggatctgcaactgaaatccatgatgaacgaaatattctgaaaagatcagatctctcagctttcaccaggtaccatacaactgtggcttctaatcaaggtggagctggatttgggggaagctgttcacctcaagataacagctcagaggctctgaaaacagactccaactgcaaggtgaagtcaaattcagatgctgctgaaataaagcaaggctccaatggtagtagcaacaacaatgacatgggctccagtactaagaatgccatcacaaaaccttcttcaaacaggggaaaagtgatatcaccatcagctgtcaaagctacccaacatacatcagcattccatcctgtgcagcgtcaaacgtcacctgctaatgttgtagggaaagacaaagttgatgaacgacttgctaatggaagtaatg

SEQ ID NO: 23304 - DNA, 525 bp, Oryza sativa
  Clone ID: uC-osflM202089h05b1
ttcagccaagatctttcttcctcctcctcgtcttcaggactcaattcgtcttctgatagcttagcttgattggggtgggtgacaatgggaggtggcaaggacaagcatgacgagagcgacaaggggctcttctctaacatgatgcacggcgttgccggcggccatgggtatcctcctcaccagggataccctcctcagggctacccgccgccgccgggagcgtacccgcctcctccgggggcttatccccctcctcctggggcttaccctccaccacctggggcataccctccacagcatgggtaccctcagcctggtggctaccctccacctggtggttacccccaacatggtggctaccctcctgcgggctaccccggatcatctgggcaccagggcggccatgggagtagcggtggaggacacatgggagcaatgctggctggaggcgccgctgcggctgctgcagcctatggggcacacaagatctcttctcatggccatggtggacacatgggctatgga

SEQ ID NO: 23305 - DNA, 292 bp, Oryza sativa
  Clone ID: uC-osflM202089h06b1
gtgacggccacgggggacaaggcggacagcctgtgctttatcgaggtggtggcgcacaaggacgacaccagcaaggagctcctcgaatggggctccagagtctccgccgccaactccaggccgcccaacccgcagtagtaccgccattaccattcatcctcgatcccggccccatttgcacctacctgctgccttttatatataaatttcgataatattagtatactatatatatagatcatatagaatcatcgtacgaataaatgatggagtgaataaagctacaattttt

SEQ ID NO: 23306 - DNA, 508 bp, Oryza sativa
  unsure (1)..(508): unsure at all n locations
  Clone ID: uC-osflM202089h08b1
gtaagagagagcccccctacgacgacgacgacgatggcgctcgcctccacctccgccaccgcgtccgcggccgtgctcaagacgcccttcctcggggcgaagcgcgcgctcgccaatgccgtcggcgtcgcgggcgccaagcccgcgccgcgccgcgcgctcgtcgtgtcggccaagaagtcgtggatcccggccttcaagagcgacgccgagttcatcaacccgccgtggctcgatggctcgctccccggtgacttcggcttcgacccgctggggctgggcaaggacccggcgttcctcaagtggtacagggaggcggagctgatccacgggcggtgggcgatggcggcggtgctggggatcttcgtcgggcaggcgtggagcggcgtgccgtggttcgaggccggcgcgcagccggaggccatcgcgcccttctncttcggctccctcctcgggacgcagctgctgctcatgggctgggtagagtccaagcggtgggtcgacttct

SEQ ID NO: 23307 - DNA, 203 bp, Oryza sativa
  Clone ID: uC-osflM202090a04b1
cgcgggtcctctttagctcggatcatctctgcatttgggtttgcagctgctcgtcacggcaatggcatccaccaacagctggacccacgagatcgagtcgccggtggccgcgccgcgcctgttccgctccgccgccatggactggcacaccgttgcccccaagatcgactcccacatcgctgccagagaccaccccgtccacg

SEQ ID NO: 23308 - DNA, 132 bp, Oryza sativa
  Clone ID: uC-osflM202090a07b1
ctgtgacaacacattatcacccaccctttccatgtgcccgtcctcacgtcacgccggcatagccgccgtcgtcgattatagccttggcgcatctcaggaggcatcggcgatggcggtgaccgcctcggaggg

SEQ ID NO: 23309 - DNA, 349 bp, Oryza sativa
  Clone ID: uC-osflM202090a08b1
gtgaagaacacacacacaaacacaaacagaagaacacaacacattaagctagctagaagaagagagaaattaaagaagctaggagctaacgatcaggatggctgctggcatggtggcgacaatggtgctactgacgtgccttgctgcaggagggctggtcgtcggagctgaggaagacggtggcggcggcggtcttggccggctggggtcgccggactactgcgacgcgctggcgaaggccatcctgttcttcgagggacagcggacggggcggctgccggcgaaccagcgagcgacgaggcgcggggactcggcgcttaccgatggcccgtgaagaaaacgtgaacct

SEQ ID NO: 23310 - DNA, 263 bp, Oryza sativa
  Clone ID: uC-osflM202090a09b1
tctttggaaggagagaagactggtcaccaccatgttccagaaacaagaggtttatgcttatcagaagagcaaactgtcagcacgatattgaggagaccaagaatggctggaaataaagatactggaatgataactgagccatatagagcgactcgtcgatgtgaagtgactgcaaatcttattctttatggagtcccaagattgttgacaggttcaattctagctcatgagatgatgcatgcggagttgggacttaaaggata

SEQ ID NO: 23311 - DNA, 485 bp, Oryza sativa
  Clone ID: uC-osflM202090a10b1
tttctcattcctgctttatttctaaccttgtcatttctttgccaatttatatgtgcccttgattcctcgtttgctcatctgctctttttcgatatatatctatcttgttgtatcttcttttcgcatgacgagcgattcggctttttgcggctttcgatctatgctaccctagatacctgccaagaaagggcacatacaggttgattgattagccaatactgaattcattacaagagcttttagcctctcattgcctatgaaaatgctcacctacttttgtagatataaaaataaacccatcatatgagctaatgaagcacttcaagaaaaagtcaatttttatagcagattagagattgggctacagctagcctaaacacatgattgtggaggatgtttcagagtcctctatgactccatgctccatgacaaatgagctataaaatagcttaattctgaagcttcatatgaccccctcatggatg

SEQ ID NO: 23312 - DNA, 311 bp, Oryza sativa
  Clone ID: uC-osflM202090a11b1
gcttattttagcccgtacccccctgcatgccaagcgcccgagaccgactctccgctgcaccaataccaccaccgcttcctttccgatccgagcccttcccctcgatcgacggcggccatggcgagaatcccgctgctgctggccctcctgctcgccggctccgccgccgccgccgcgcaggtcgggggtagccgcggccatggcccgctggtgggcgggtggagcccgatcacggacgtgggcgacccccacatccaggagctcggcgggcgggcggtggagcggtacgcctcgctctccagcgacgggct

SEQ ID NO: 23313 - DNA, 181 bp, Oryza sativa
  Clone ID: uC-osflM202090b01b1
acgcgcgtttttgcttgccttcctcgcatgcctcctcctgttccttctctgtctccgctagggtgtccgcgccgccaacggcccgaaccgagatgccgccggccgccatggctacccctcccccgccgcagggttcctacacaggggatccgatctacgacgagctgaggcacgcctgctc

SEQ ID NO: 23314 - DNA, 324 bp, Oryza sativa
  Clone ID: uC-osflM202090b04b1
ggaaaaaaaatgttgcaggtggaggaggcgctggcggccgtgctgtccgcggcggcggcaagcgcggcggcgcgcgccgccgaggccgtgccgctgcacgacgcgctcgggctcgtcctcgcggaggacgtccgcgcgcccgaccccctccctcccttgcgcgcctccatcaaggatgggtacgccgccgcggcctccgacgggcccggggagcacccggtgattacggagtcgcgggccggcgacgacgccctcagcgatggacgtcacccccggcacgggggcgtatgtcacgaccggagggccgatttctgatggagctga

SEQ ID NO: 23315 - DNA, 337 bp, Oryza sativa
  Clone ID: uC-osflM202090b05b1
cgtgagccgaagcttctagaaccttcgaggccgcggctcccacgggcggcaatgcagagcgcggcggccgtcgggctcctccggccatgcggcgccaccaccgccgccgccccgctccagctccgcaaccctagcccccggggcttcggcgtcggagtcgggcagccgctgctcccgccgagggggctccgcctctccgccgtggccccgcgcgcgggcatctccgcccggcgcatcgggctcgtgccggcctccccggagcaggaggatgagcggcggcggggcgcacgcgacgtggccgtggcggcgacagcggcggcggcgggtgaggcagggg

SEQ ID NO: 23316 - DNA, 434 bp, Oryza sativa
  Clone ID: uC-osflM202090b07b1
gctttcagacagcctgaattcatacttgaacaagtaccgtattgagcttgacccacagcttgaagccctcgttggaaggcacagcaggaaaccttggtcaaagtttattaatgctgacaaccaacatctagtatccccagaggccatcgatttccttgacaagcttcttcgctatgatcaccaggatagacttactgcacgtgaagctatggcacacccatactttctccaagtgagggctgcggagaacagtatgcctcgtgcacaatagacaaaaaaacgggactattgctgactgtcgattagcaacagtcatggagctgcaccgtattagtgacttagttcagtcacttgtattgggagtttgagattcggtaatggttgaatcacctggcacgaagattctgggagagcatgtaacagctcatgtgtgc

SEQ ID NO: 23317 - DNA, 345 bp, Oryza sativa
  Clone ID: uC-osflM202090b08b1
tcctgtgcaactgcaaggaggatgtaaagaggaaggtgcatgctgtgattgacaagtatgctgagcgtgggcttcgttctcttgctgttgcaagacaggaagtacctgagaagtcgaaggagtctgctggtggaccatggcaattcgttggtctgctgcccctgtttgatcccccgaggcacgacagtgctgaaactatccggaaggctctccatcttggtgttaatgttaagatgatcactggtgaccagcttgctattggtaaggagactggtaggaggctcggaatgggtacaaacatgtatccttcatccgcattgctcggacaaaacaaggacgcttcac

SEQ ID NO: 23318 - DNA, 244 bp, Oryza sativa
  Clone ID: uC-osflM202090b09b1
tgacaacaacaacaacaacaacaacaacaacaacaacagcagcaacggcggcggcaactacggcggcaacggcggcgacgtgaagagctacttcaacaagtcggtcgggaggccggcgagcaacaacaacaacaacaatagtaacggcggtggcgggtactactgcaagaagggcggcgacggcgccggcgggaagaagaagcacgccaagaacagcgacagcggcgcgcaagcgttggacaag

SEQ ID NO: 23319 - DNA, 313 bp, Oryza sativa
  Clone ID: uC-osflM202090b10b1
ttctgtgggtaggccggcgccgcctgccgacgggtggcgaggagaccgactgggctagacggtagaggaggtccggcggccggcggctgcggggaccgcgacgactcgagagcatgagagcaaggcggctgtggccgcgacgactcggcgccgatgtgcacttgctctcgttgaagattgggaggctcgccgtctcgtctgagtcgtgcctcccgactatgcgcctggcttgccgccagcgcggagatcgtcttcaccatgtagttcttctcggcgcccgcggggccagcgggcttgggcgccgtcatgctct

SEQ ID NO: 23320 - DNA, 407 bp, Oryza sativa
  Clone ID: uC-osflM202090b11b1
ttataatgggaggaaatgatccagtcacaggtgatataatttcaactactattggagggaagaacgatgagcccaaaaggactattagctatatggctgaacgagttgttggaactggatcctttggtgttgtattccaggcaaaatgccttgagactggtgaaactgttgccattaagaaggtcttacaggacaaacgatacaagaacagagagttacagataatgcgatcaatggatcattgcaatgtcatctccctaaagcattgtttcttctctaccacaagcagagatgaacttttccttaacttagtcatggagtttgttcccgagtcactttatcgtgtcctgaaacactacagagatatgaagcagaggatgccacttatatatgtcagactttacatg

SEQ ID NO: 23321 - DNA, 488 bp, Oryza sativa
  unsure (1)..(488): unsure at all n locations
  Clone ID: uC-osflM202090b12b1
ttttacgcgtgggctcggcgcacacagcagatgggcgaggtctgagcgcatcgtcctcaacaccgagtagaccggccggccgcggcggccatcatcgctcctaccatggccaaggagctcctcgccttccccggtgtcgccgtaccgtacgtgcagcagtttcttgacaagaacgatggcatactgaagtgatgccaaattgccaactgccaagttttcttgtgcttcttttccaggtgccttagctccgggagcacgatccattctcgatgctaggcagttagctatttctcccctttagctcctttttgctttgtcaggcaggggaggcagttttgctttgcctctataagagacagtgcgattattaggctgggcangtgttaaaccgttgctgggatttggtggatctatcaaagcntggtcgggtggtatctcttgggtggaatagtactactgccaggtactactcgtattctaactattca

SEQ ID NO: 23322 - DNA, 188 bp, Oryza sativa
  Clone ID: uC-osflM202090c01b1
tgtacagggagagtggcaggtcaaggggatttggcattgtgacgtatggttccgctgaagaggttgagaatgcactttcaaatcttgatggcgctgacatggatggcagacagatccgtgttacagtagcagaatcgaaaccacctaggagacaatattgaaattcgtttagattgcctggaggctat

SEQ ID NO: 23323 - DNA, 375 bp, Oryza sativa
  Clone ID: uC-osflM202090c05b1
ttttaacattatattgcagcaatggcatcctcctcccttctactcgcctgtgttgtggtggcggctatggtgtccgccgtctcctgcgggccacccaaggtgccaccgggccccaacatcacgacaagctacggcgacaagtggctggaagccaaggccacctggtatggtgcgcccaagggtgctggccccaaggacaacggcggcgcctgcgggtacaaggatgtcgacaaggctcccttcctcggcatgaactcctgcggcaacgaccccatcttcaaggacggcaagggctgcggctcatgcttcgagatcaagtgctccaagccggaggcctgctccgacaagcccgcccttatccacgtcaccgacatg

SEQ ID NO: 23324 - DNA, 337 bp, Oryza sativa
  Clone ID: uC-osflM202090c07b1
tgtacagggagagtggcaggtcaaggggatttggctttgtcacgtatggttccgctgaagaggttgagaatgcagtttcaaatcttgatggcgctgacatggatggcagacagatccgagttacagtagcagaatcgaaaccacctaggagacaatattgaaattcgtttagatgccctgaagcctatggatagtccagatatgaatcatactatcgtcatgattgttctatagcatcgagggaattctagtcgtaactttcaccatatggatcaaaagattggtttggtgatgatatatatctcattttggtttaagcttttgaacccactttttt

SEQ ID NO: 23325 - DNA, 311 bp, Oryza sativa
  Clone ID: uC-osflM202090c08b1
ctcgtgtggttgcaaaaaccaagacatacacacagaatcaaataataacaaaggtttcctagcctcaaaggatacatatatatagtttccctacaatacaatggagcctgtcaatgatttccaggaaggcatttcaacagagcatgcctttgaggcagagcctgtgccatcattgtcggaaacaataacgccacgatcaatggtggtgagcttcatccttagtgtaactctcagcatcgacggcatgaaggtcaccttgagctctggcttcattccggcgctcagcatgccagccggccatctcggttttt

SEQ ID NO: 23326 - DNA, 218 bp, Oryza sativa
  Clone ID: uC-osflM202090c09b1
cgctttcttctgcttcttcttctgtcctcacttcgttcgcttcctcggtcgctcgggcgtcatgtccgcccaaggagcaggacgaggggtaggggacccggatgtgttcgcgtagctgtggcgaggcttcccgcagacggtatccgatgtaccacaagctgacgagcggctgttctacttccttcaggaccacctcgagcaggtgcaagagccgactg

SEQ ID NO: 23327 - DNA, 429 bp, Oryza sativa
  unsure (1)..(429): unsure at all n locations
  Clone ID: uC-osflM202090c10b1
gtcactcagttcatccacagcaaagcgcacaggcatagcagcctccttcccctcttcttcttcttcagtagtggagtacatgctacctctgcttcagcagcacatgggaatcacccatgccaactccatcaccaccgagccttctccttctccccgcccgccgcttcttcgcctcttgccccagcctcgccgccggcgtcatgctcatgccaaacacatcgccctcttgaccaactgcaagtgcgcctccgccgcttccgcttccgtggaggaagacgacgtagcaggtgggttgggatatcgtcatcctccaaagcaaatacaagaaatccttgatgttccacccaatcccagttaccttatttcccctcgcagagatcggatcatgttcctacagcgcacagncatgcctncattatctgagcttac

SEQ ID NO: 23328 - DNA, 398 bp, Oryza sativa
  Clone ID: uC-osflM202090c11b1
ttcttcttcttcttcttctctcctcacttcgctcgctccctcggtcgctcggccgccatgtcgtcgcaaggagcaggaggaggggtaggggacccggagctgttcgcggagctgtggcgggcctgcgcggggccgctggtggaggtgccgcagcgggacgagcgggtgttctacttcctccagggccacctcgagcagctgcaagagccgacggacccggcgctgcatggcggagcatatcaagatgttccaggtgccgcacaagatactctgcaaggtcggagacgtcgagctgaaggcccagacgggaacctacgaggtgttcgcgcagattaccctgcaacctgacccggatcatgagaatctgccaacattacctgacccgcccctgccggagc

SEQ ID NO: 23329 - DNA, 225 bp, Oryza sativa
  Clone ID: uC-osflM202090d01b1
ttatgattatattgggaataacattttaacatgaaggccgatcggttaatgttgtccaatctcgaccatgatttgggatacctacacaagtttccctcagattttccaatgtctcatgatcttgggttgagcttgtttacgcatgccggtacaatggtgggaagttctttgcgacagcacatgcagatctgttcttcaggaaatttgattgttcaggaagcattt

SEQ ID NO: 23330 - DNA, 261 bp, Oryza sativa
  Clone ID: uC-osflM202090d04b1
gtggagaggagaggagatcagggggaggaagggtggccttttcagcagatcggggcggtcggatttaggggaggagcgcgctagcctggatcggcggtgatggatgaggagtacgaccagatcctgctgtggacaggattcacggagggtattatcaacgagctcatcttcgtttatatgcttaaggaacatgacattgacaataactattactatctgggaatatgtacatgagttactgtaactaatatctgtgtgaga

SEQ ID NO: 23331 - DNA, 398 bp, Oryza sativa
  Clone ID: uC-osflM202090d07b1
tcttgttgtagcagattgagagagagtcgggaggaattacacaagaaatttagagaaatagtactagctagctagcaagaatatagatatataatgtcgatcaagcactgcgagcaacacaaggattgcgagcggcagcgcctgtaccggcgttgctgcgcggccatcttcggcatacttgtcctcctgctcctcatagcactcatcgtctggctcatactgcgacccaccaagcctagcttctacctcaacgacctcaccgtcgtctgcctcaacgtcaccaccggtggttactacgccggcgccaccgcctactccggatacttgttcttcctcaccgacaccatgcagaccaccctcggcggccgcaacggtaacgagcgcgtgggcatctacta

SEQ ID NO: 23332 - DNA, 412 bp, Oryza sativa
  Clone ID: uC-osflM202090d09b1
tttattcttgagctcaatcagcaacaacatctatctccttcttgcttagttaagtccttcgccctcccaagaagaagaagatgtcttgctgcggcggcaactgcggctgcggcagcggctgccagtgcggcggcggctgcggcggatgcaagatgttccctgatgtggaggccacagccaccaccaagaccttcgtcctcgctgctccatccaacaaggcgagctctggaggaatggagatggcggcggagagcggcgagaaccgcggctgcggctgcaacacctgcaagtgtggcaccagctgccgcggctgctcctgctgctcctgcaactgaatctatcgtcggcgttcgccggcttgatgaggaattatcgcatggatgctgctactggcgatcagagctttgatcga

SEQ ID NO: 23333 - DNA, 389 bp, Oryza sativa
  unsure (1)..(389): unsure at all n locations
  Clone ID: uC-osflM202090d10b1
tttacaggcggacgcgagcgtcgtcctcttcgtttcgcttctcctcctcctcctccgcctccgctctcgcgagatctcctgatcgactcgctccgccatggctggagaagctgatggaaaagccccactgggatcaagatacccccctgctgctctcaacgagcgcatcctttcttccatgtctcaaaaacatgttgctgctcatccatggcacgatctggagataggtccaggagctccagcagttttcaactgtgtggctgaaattcctagaggcagcaaggttaagtatgagttggataaggcaactggtctaattaaggttgatcgngttctttactcatctgntggttacccacacaactatggtttcattccacgcacacttt

SEQ ID NO: 23334 - DNA, 195 bp, Oryza sativa
  Clone ID: uC-osflM202090d11b1
tttttagtgaactgaaggggcgggggacaagcatgattgcgacgacctatcatctcctgatccagcgacttctagaactggggacgtcgaacaagtccatgcctgtcttagatcaactgttgcacagtgatacggtctcttacatcacctctttctggttgttgaggatggttttcatggaaattaactaccacc

SEQ ID NO: 23335 - DNA, 393 bp, Oryza sativa
  Clone ID: uC-osflM202090e03b1
gtatccagcaatctcatggtgaatcgctcccagtgacttcagttgataaagtgcatacttcagatgcatcatgcgaggacaacaaactaaaaaaccattttatcacaagcgaggtgtgttcagacgcaacaaatctttctgcatcaggcttgctgacggaagaagaaaatatccataatgtggaggatcagtatgaaggcccattacctagtgaagaatcatcaggatgtctagattacccacatgatgaccacaattcggagaaagaagacatacaccagccagatgggtatgcagcaagccctggcaataataaccactttgatagctcttatgaaggtggctatttacatgccgagcagccaccagtcatgggctggactgtgagacccc

SEQ ID NO: 23336 - DNA, 381 bp, Oryza sativa
  Clone ID: uC-osflM202090e04b1
ttttcgcccttgaaactttgacatacttggcatgaaatcatccaaatgtggctaaactgtggctatttcttgagtgcccttgccccccaacttgccatgctaaaacacctgatcagaggcgtggcaaggctgttcttatggaaggtgacagtgcacagaacgcttatgcacttgtcctacttttaaccttgttgaatgaggcactttatatgaggagcgtatctcatcttgaacaggtactaaaccttctcgaaggtgttatgctcaatgccgagaatgaaattacacaagctaagctggaagcaatctctgaaaaaccatctggacctgagaatgcaacgcaagatgcccaagagggtgcgaatgctgctggatcatcta

SEQ ID NO: 23337 - DNA, 67 bp, Oryza sativa
  Clone ID: uC-osflM202090e06b1
gtggattagtttaagtgtttgccggagattatggggtcggtggcggcggcggcggtggtggcgcccc

SEQ ID NO: 23338 - DNA, 351 bp, Oryza sativa
  Clone ID: uC-osflM202090e08b1
ttctagctcgcagctcaagcgcacccagccatggcgactcctcagatctcgcgcaaagccctcgcctccctcctcctcctcgtcgccgccgccgccgcggtctccaccgcgtgcgccgacgacgtgctcgccctcaccgagtccaccttcgagaaggaggtcggccaggaccgcgccgccctcgtcgagttctacgcgccatggtgtggtcactgcaagaagcttgcccctgaatacgaaaaactcggtgcaagtttcaagaaagccaaatcagtcctaattgcgaaggttgactgtgatgagcacaagagtgtgtgcagcaagtatggagtttctgggtaccccacaatc

SEQ ID NO: 23339 - DNA, 350 bp, Oryza sativa
  Clone ID: uC-osflM202090e10b1
ttgcagttgcagcaactagtaactaataaagtgatgacgatggatcgtcccaacgtcgtcgtggccgcggtggggctgctagtggcggcggtggcggcgacgctgccggcgccgtcgtgggggcagcagcagccagccaacaagctcatcaccagcacctccggctccggcaaagggttgtccaagtggctggcgatgaaccaggaggagtacgtggagaagaaggcgctgcacaccatggccaccgcggaggagctcggcgggaagaagctggacgcgaacctgacggcggcggaggaggccaaggtgacgtgggtgatcgaccccaaggggacgccgggcgacaccac

SEQ ID NO: 23340 - DNA, 277 bp, Oryza sativa
  Clone ID: uC-osflM202090e11b1
tttggcctcagaacctaagctcatcagatagttcaccacccgtcggacacactcacaatacacaccataaaaacatatacaaactacatcaaaaccacgggtaggagtctttacatggagaacgggaagggcaactggcttggcaccaccaagcagcagcggtgtgtcatgggggagccaacacgacatgaatgatatgactcctcgaagggggcacctagacccatccttgacgtgctggccaagcgactagcagcagatcacggctatacatgtg

SEQ ID NO: 23341 - DNA, 392 bp, Oryza sativa
  Clone ID: uC-osflM202090e12b1
tgaaccctctctcgcctgctacagaaaaaatgggctttctcgacccctcttcctcctcgattccggcggactcgtcaccggcggcgggaggaagaggggtcgtccccctcccctagtttagtacagtagtcgggctaatctcgttaggtcgggttcttcccgttcttttctcgttggtgcggtatggaagctggagacggcggctgcgacgtggatgcagcttgtgacggcgatggcgacgcggaaacgacccgagacgatggcgacagcgcggatccggtccgcggcggtggcggcggcttggaggcggtccacggaggcggtagctgctccgatgcggttcacggcggcgacttggttgccgtcccccgaggcggcggctgtgcggttgc

SEQ ID NO: 23342 - DNA, 365 bp, Oryza sativa
  Clone ID: uC-osflM202090f01b1
tgttatgatgcaaagcaatctgattcttgggatggctggaagtctgctggagttgacaaagcaattaacaaagacaaggaatccttgggcaatgtgcctgcatctccatcatttagtgcgtggaatgctgctccagtttcccaagggaatgaacgtttagatgcaaagcactctgattcttgggatggctggaagtctgctggagttgatgattcagttaaagacaaggaatcctggggtaatgtgcctgcatccccatcagatagtgcgtggaatgctgcttcagtttcccaagggaatgaaaggttcagaatgcaaagcaatctgaattttgggatggttggaaagtctgctggaagtgatgc

SEQ ID NO: 23343 - DNA, 374 bp, Oryza sativa
  Clone ID: uC-osflM202090f03b1
tttttatctggagctcttcgtggccatcagcacccacgcctaaggtccggttttctgttagaacgacaaggtgatggtgtttggggtgttccgttgtcaactaggagcagggaaggaagaagattaattgagatccggaacgcgcttgaaatgattcacagaggggaaaatgtaagatttgagtccattttctatggtggagtcgacattcatgacagacacagggatatgcgccttgacatagacaacatgtcttatgaggagctattggcactggaagaaagaataggcaatgttagcactggcctcagtgaggaagaaagtgacaaaagctcctaaaagcaaggaaattctcatcatggaggttggaagca

SEQ ID NO: 23344 - DNA, 378 bp, Oryza sativa
  Clone ID: uC-osflM202090f06b1
ttttagggccccttggcctcggggttaactcgcggccatcagcgcgcactattgctaagtcttttagcagaaccaaagacatgacctggagacctgatctgtttagtgatagtatggcagctagtggaattgaaactggtacaaaattgtacatttcaaacttggactatggggtttccaatgaggatataaaggagctgttttcagaagttggtcacttgaagcgctttgctgttcactttgatggttatgggcgcccaaatggcacagcagaagtggtgtttactaggagaagtgatgcaattgctgcattgaaacgttacaataatgttctgcttgatggtaaagctatgaagatagaagttattggaagtgact

SEQ ID NO: 23345 - DNA, 345 bp, Oryza sativa
  Clone ID: uC-osflM202090f07b1
tcgtatctctccctcttccaccttcctcccgccggaacttgacgaaatctgggaagcgagccaaggaggagggggaggagaaccccgccgccaccgcccgatctccccgtgcggcgccgggcgggggggtgcggagcgggagcctcgaccgcgccgatccggacaggggccaccagattcgccccgcgcgtgtgccgtcgccgagcgcccaggcggctttagatctccgcgtccgggccccccacccttgcctgtggcatgcatagggatcagaggccacggttatagagtgatacatatatcttgctgctgtgcttttggtgcctactgtcctgcttagttaga

SEQ ID NO: 23346 - DNA, 244 bp, Oryza sativa
  Clone ID: uC-osflM202090f08b1
tgcaaagcggctggatgtagcagcaaagaaaggcaatgcgtacggctggaatctccttttcggtggcaagaagtcagcatgatgaagttgtccaataataggggagtcaaaatggctgtataaatttgtggattctgaacatacggattttggtatttacttttactactgttacagtagcaccttacctaaacaagttctcgaattctaaaggagcccttgatgaacgtctgttaattttacg

SEQ ID NO: 23347 - DNA, 415 bp, Oryza sativa
  Clone ID: uC-osflM202090f10b1
ttagacatatggctcaatgttgaaaaatctaacattcatcaagacttttgcatctggaatacttgtccctaagaactatatctggcctgtaacacaagacaattatctgcagcccagcacatcggtcgttggtgatgctcataaagcaggactagaagtttatgccgctgattttgcaaatgactttttgctcagctacaactacagctatgatccattaacagaatatcttaacttcattgataatggtgccttctctgttgacggtgtattgactgatttccctattaccccttcagaggccattggttgctttagtaacctcaacaacagcaagacagacaatgcgaaacctctcatcatctcccacaatggtgctagtggcgactacccaaattgcactgacctagcttat

SEQ ID NO: 23348 - DNA, 385 bp, Oryza sativa
  Clone ID: uC-osflM202090g01b1
ttgttatggtaatctccacccggaaggaaatggagggaaagattgactccatgagaatcttagacaactcaaatcctcagaagccagtagtgcgcatggcaaatttgtgcgtagtgtctgcccatacggtgaatggagtggctgagttacacagcaacattttgaaggaagagctttttgcagactatctctctatatggcccaacaaatttcagaacaaaacaaatggaattacacctcgtagatggctccgtttctgcaacccagagttgagtgaaatagtaacaaaatggctaaaaacagatcagtggacaagcaaccttgatcttcttaccgggacttcggaatttgcagatgatgaaaagcttcatgctgagtgggcatc

SEQ ID NO: 23349 - DNA, 277 bp, Oryza sativa
  Clone ID: uC-osflM202090g02b1
cacgcccggaacggcgtcaagttcggcgaggccgtgtggttcaaggcgggctcgcagatcttcagcgagggcgggctcgactacctcggcaacccgagcctgatccacgcgcagagcatcctcgccatctgggcggtgcaggtggtgctcatgggcgccgtcgaggggtaccgcatcgccggcgggccgctcggcgaggtcgtcgacccgctctaccccggcggcgccttcgacccgctcggcctcgccgatgaccccgaggcgttcgcggagctca

SEQ ID NO: 23350 - DNA, 258 bp, Oryza sativa
  Clone ID: uC-osflM202090g04b1
ttttgcggcgcacggattcaccgaggccagcgacggcggcaactgctcctcccctcttacaaggttacacgatgttttctgtgaggtgcgggccgcctgcattcgcctttggattggaaagggctgccattacgcatccttcaaagttcagtactttagtggtatgtggtgccaggggcccgaggccaagatatcctcgtgtgtggaaaactcgcaagagaatcggaaccgttttcaagtctcaaaagcttgtcgaat

SEQ ID NO: 23351 - DNA, 190 bp, Oryza sativa
  Clone ID: uC-osflM202090g06b1
gaggattagtttaagtgtttgccggagattatggggtcggtggcggcggaggaggtggtggtgttccggtcgaagctgccggacatcgagatcgacaacagcatgacgctgcaggagtactgctttgcgaggatggcggaagcccgcgcgcggccgctcccgatcgacgggcaaaccggtgagttgtaca

SEQ ID NO: 23352 - DNA, 325 bp, Oryza sativa
  Clone ID: uC-osflM202090g07b1
gtaatatcccccgccgggcccaccaccgccacctgctgcttcccccccccccccaattcgccggccggttcctgagacctcgccggcggcgagccggcaccctctcgacacccacgatgcgctgcctcctcctcctcgtcctcgcgctcctcgcggcggcggcgggggatgccgagcccgttctccgcacggtgacgggcgtccccacgggagtgccctccggcggcggcggcgggggtggagaatcttccgacgagctgcactgcgacggatggaggctgtccgaggagactgggaacgcggggccgtggaccgccatcccccg

SEQ ID NO: 23353 - DNA, 312 bp, Oryza sativa
  Clone ID: uC-osflM202090g08b1
attggaagggagagacatgcaataagggtaggtcgggaatacatacacgttaattattacactataggaaagcgggcattaatcaataacggaggattctcggtgctttacaggtacaggaaaggatcaagagcgctaggtaggacctccgcccccgccgactccctccctgagcctggtcctcaacccgaagtaccccggcgcccggtgcgcgcccgtcgtcgtcgtcgaccacccggtcaaggtcttcatgtacaaactgacagggagcaaacacgtcggcatgatggacgcctccgcctcggggtttcc

SEQ ID NO: 23354 - DNA, 398 bp, Oryza sativa
  Clone ID: uC-osflM202090g10b1
gtacgacgagccgcgggacgagtggaggatggtcgccgggagcggggtgccccccgaggtgaggcgcccccacgtcgtctccggcgaggtcgaggaggtcggcagcggcggcaggcggcggatatacgtggtgggcgccggcctcgacgtcgccataggcacggtctccccttctccggccatccacggcggcgacgacgagagggtggactgggaggtcgtcaagggccccgccgagttcgccggcctcgccccgtgcaacgctcaagtcctctacgcctgaacttcccgccgccgccgctgacgctcgccggtggggcgttacatcgccggggaccccgcttttttcgggcccacctgtcagtgagaccccttcacccacgcgggcccacctggca

SEQ ID NO: 23355 - DNA, 489 bp, Oryza sativa
  Clone ID: uC-osflM202090g11b1
ttcgaagcaaatccatcatccaccaaatcaaaggcacgtaagtgagcaccaacagctgcatcggccatggctcgcgcgctcgttctcgtcgtgatcctcctcgccgccatcgcggtggcgccgttcgcagaagcctcgacagtgagtgccgcctccagggtattgttggcctccgaagcgcccgctgagagcccggctgggcctgcgccggccccaggcccaacggaagagtccagcagcacatctgccgagtctccaagtgctgatgcctgaatgagtaagagtgaagctcaagtgaatgattcctaataccttgaatattgaccaaacatatatatgccagacaatcttttgtaaggctaacatagcctcaatttttttatttttttttgggttatcactacccttacctatggtggtgaatgatcatggtaatcatgcaacactatgattaatataaagtggatgaagatcttcttttccgtggtc

SEQ ID NO: 23356 - DNA, 443 bp, Oryza sativa
  Clone ID: uC-osflM202090g12b1
ttttcggcggcgcggcgcggagcagaggaggacgaagcagcaggcggcggcggcagagcacggcgacctagcccgacctcgcaaccatggcaaggggtttgaagaagcatctgaagaggctcaatgcgcccaagcattggatgctcgacaagcttggtggagcttttgcccccaagccatcttctggtcctcacaagtccagggagtgcctgcctctgatcctcattatcaggaacaggctcaagtatgctctgacataccgtgaggttatttctatcctcatgcagcgccatgtcttggttgatggcaaggtcaggactgacaagacctacccagcttgtttcatggatgtcatttccatccccaagactggtgagaactacaggcttctgtacgacaccaaaggacgtttcctgcctccagtctgtcaaggatgaggatgc

SEQ ID NO: 23357 - DNA, 303 bp, Oryza sativa
  Clone ID: uC-osflM202090h01b1
gtttaccaagagaacaaccgttgagtgttgatgagtggagatccttcttagatcctgaaggcagagttatggattcgaaggcgctgaggaaaaaggctctctatggagggattgaccatgttctgagacaagaggtctggaaaatcctgttggggtatcatgaatacgattcaacatatgccgagagggaatatcttggtgttatgaaaagaacagaatatgaagccatgaaatcccagtgggagagtgttttgttcacacaagcttaatgatttaccaagtttagggaaagaaaaagcctta

SEQ ID NO: 23358 - DNA, 237 bp, Oryza sativa
  Clone ID: uC-osflM202090h02b1
cgatctgcacgcggaagcaagtgcaacccaagcgggcagtatatgcaattcctcacgtgctcatgtgcatgtctgtttcgagacttcctactgcttctagccatggggctactactcctccgacactgagggagctttgctggggccactgccctcgcagaacgaagcgtctagctcgcactctactgatgtgaaggctcgtcttgcggacccagggacctcacggtcgggtactac

SEQ ID NO: 23359 - DNA, 270 bp, Oryza sativa
  Clone ID: uC-osflM202090h07b1
tttagctcgaggttgcaagtattaccaaattcgagagtatatggagctgctcaggagctacattctatgagccgcaagaaatccctgatggtttccactgccttgggcactatgcccaacagaatgaccgacctttacagggatttcttcttgtggcaagggaagcggctagctgccaatcgatcaatctcaagcctgctcttgagaaaccattagattacacccttgtttggactagtactgacttgaatgatgatgacaatagtgatt

SEQ ID NO: 23360 - DNA, 410 bp, Oryza sativa
  Clone ID: uC-osflM202090h08b1
ttttgtgaagcaaaagcttgaagcaggaggcatgggcgctaatgtaattggacaagttacagcatcaccagatattgagctagttgttgatggcaggctgcatctcaaggaaaaaacttcagatctcagggatatctgggaggaaacaagcttccagcttgaggggctacaacgcctgaaatcttgtgtcagacttgagaaagaaggactaaagcacagaacatcaccatcgtggtctttgtctttcactcccaaatttacagatgaaaaactgctgactgcttcctcaaagccaaaagttgccatcattcgtgaagaaaggagcaatggcgatagggagatggctgctgcattctatgctgctggatttgaaccatgggatatcacaatgtcagacctcttagctggga

SEQ ID NO: 23361 - DNA, 231 bp, Oryza sativa
  Clone ID: uC-osflM202090h09b1
attcaattagccgcacaccgatcccctcctgtgtgttcccccccttctcctctctactctatttttcctcatccgtgcgcgatactgcgcttagattgtgggtggggggagtgatcatcaccaaacccacaaagggggcgcggagagacactatatcatctttgggaaagcgctggatgagaactactcgcttagggcgtcccacccagagtaggacagaacatgcgccaa

SEQ ID NO: 23362 - DNA, 261 bp, Oryza sativa
  Clone ID: uC-osflM202090h11b1
gtctttagccgccgtcgccgccgccgccggtggcccgcgccttcgacgagctgcaggccgtagacctcgccggatctccccgatggccgtgaccttcaccgacctccacaccgtcgacgggctcaaagccctcgagcagcacctctccggcaagacctacgtctccggaaacgcgatcagcaaggacgacatcaaggtgttcgccgccgggccatcaaagcctggagctgagtttccgaacgctgatcgctggtatgatac

SEQ ID NO: 23363 - DNA, 80 bp, Oryza sativa
  Clone ID: uC-osflM202091a01b1
atgaacagtgggaagcaggcatcttggctcattgcttgttgtattccgccgccttcttcattgacaagcccaggagaagg

SEQ ID NO: 23364 - DNA, 56 bp, Oryza sativa
  Clone ID: uC-osflM202091a08b1
ttccgggggtggaggcggaggtggagactgagggagaagaatataaggcaagaccg

SEQ ID NO: 23365 - DNA, 182 bp, Oryza sativa
  Clone ID: uC-osflM202091a09b1
tccgcctcccgctcgttgccttcgccgccgcctcacgccgccgtgatttgagttaggttttttttttttttttgctctgaccagacttgccggcgaaggaaccaccggcgggcaccgcctctcctcggcaatcgttgccggggataaagtggggtcgttaagggagcggcaggtttgggggt

SEQ ID NO: 23366 - DNA, 369 bp, Oryza sativa
  Clone ID: uC-osflM202091a10b1
gatccgccctagcacgatcccctcccccctccccgtctccgatccccctcctccacctcagatctccggcgagccgatcgaatcggcggctgcggcggcggcggcggcgcgatgtcggggcagacgcagcgcctgaacgtggtgccgacggtgacgatgctcggggtcatgaaggcccggctcgtcggcgccacccgcggccacgcgctcctcaagaagaagtcggacgcgctcaccgtgcagttccgcgccatcctcaagaagatcgtcgccgccaaggagtccatgggggaggccatgagggcgttctccttctccctcgccgaggccaagtacgtcgccggcgacggcgttcgccacgttgacctt

SEQ ID NO: 23367 - DNA, 467 bp, Oryza sativa
  Clone ID: uC-osflM202091a12b1
ctccagtctccactccactgaatcctcccacctcggctcgaaggaatggcaagcggtagtgaagctgagaagtcacctgaggttgtgctggagtggcctaagaaggacaagaagaggcttctacatgctgtttaccgtgttggagatttggatcgcaccattaaatgttacacagaatgctttggaatgaaattactgaggaaaagagatgtgcctgaagagaaatatacgaatgcatttcttgggtttggacctgaggacaccaactttgcacttgaattgacatacaattatggtgttgataagtacgacattggagcaggatttgggcatttcgctattgcaactgaggacgtgtacaaattggctgagaaaattaaatccagttggtgctgcaagatcactcgtgaacctggtcctgtcaagggaggatccactgtgactgcctttgacaggatcctgacggt

SEQ ID NO: 23368 - DNA, 362 bp, Oryza sativa
  Clone ID: uC-osflM202091b02b1
tgcagattctccttttgtccatgtgacgaggaaattttctcgaggaaattaaattgcctggtttgtggtttaccattttgtggtttgattgattgtttctagattcggtgcatgtgttttcttgttcgcatattgattaccattttgtggtttgatcgattgtttctagattcggtgcatgtgttttcttgttcgcatattgattacagggttggttggaaatgagctccctgtgagaaagcttagtcctggaatttgaggaagggcagttagttattagataaggtctggtcgcttcatagattcatcttgatttggattgtctgtctctatgctgttctttgttttggcacttttgagga

SEQ ID NO: 23369 - DNA, 105 bp, Oryza sativa
  Clone ID: uC-osflM202091b05b1
gtacggaggaggagaggcggcgacgactgtctcgaacggtgccgacgcgacgacgacgatgccgccggttgtgggggagaccgtcggatggaggaggagagccat

SEQ ID NO: 23370 - DNA, 237 bp, Oryza sativa
  Clone ID: uC-osflM202091b06b1
gtggtggattcctaggcacccagtgactaggatgggcgtacatggcgcctgaacgctctggactgtcgtacttccgtgtcataacggttagtgaagcacaggtcaagcgctacatgaaccagttactgccaggactggagcattgacatccacgtggactggtacatcgcgacatcaagggtgccaatctgcttgtgaataatgaaggggatctaaaagcgacttgggaggagccta

SEQ ID NO: 23371 - DNA, 73 bp, Oryza sativa
  Clone ID: uC-osflM202091b08b1
ttttagagatggtggagatcccggcgatcgacctgcggctggccggcggcggcggcggtttgcttgacactgt

SEQ ID NO: 23372 - DNA, 106 bp, Oryza sativa
  Clone ID: uC-osflM202091b09b1
tgtgagttgttgtaaagttgcgagagagagagagagagagatcagttagtttgttgagtggaagcagatcaggaagatgctggagaagctgtgggacgacgtggtg

SEQ ID NO: 23373 - DNA, 482 bp, Oryza sativa
  Clone ID: uC-osflM202091b10b1
tcgcaccaacatggcctcccagaacgctctgcgttgtgccagggtcgcactccagggcacctctcctctcttgcgttgccgccgccgcgctgaccccaacacccgccaccgctacggcttcgcccccctgcacatggccgccgagaacttcagcgtcgacatggtcaagctcctcttccgctgcggcgcgtccgccaacatccgcaccaagggcgacaacgtcattgagggcctcctccctctccatgttgctgtggagaatgccagcatgcacaagtacattgaggatcattgggctcatggggaccatatcatcaacctcatcttcctcctttgtcttcctgagatgaaaatgttcttggacacgactagattaattgccaaacagacggacaacattgtcgacgaggtatggaattacattcagcatgaagagaagcatgtccaggcagcaattttgctgctcgctgctgaaaagcagc

SEQ ID NO: 23374 - DNA, 222 bp, Oryza sativa
  Clone ID: uC-osflM202091c02b1
ttatactagcgacgcgaggtgaggctctcggaggagtactatcaccacccaccgccggtggggaggaagcagattatggaggattcttactttctctctttgtttcttttattatttttttatttattgtctatctcttttttcctttctttttttattatatatttttctttattatatttttcttttatttatttttctttatatctttcttcctttttt

SEQ ID NO: 23375 - DNA, 254 bp, Oryza sativa
  Clone ID: uC-osflM202091c03b1
gtggtcgtcaaccccggtgaggagtggagggctggggctacgtcatcgagcacgacaacctgtaacgtgttctgtatttttttttcattattacgacagtgaaaaaggcgaccaatttatacacgaattgttctttgaaacaagaaacacgctgaaagcgatagcatgcaggaagagatagtggtgcatctcatgtatcagcgtggccaagtgtacagagaacaggaaaaagaacatggtacatggaactaaac

SEQ ID NO: 23376 - DNA, 83 bp, Oryza sativa
  Clone ID: uC-osflM202091c06b1
atcatatgcatccaaaaccagacccatactcgtgttctccaccggagcagagccgcggttttccctcaggacttctatctttc

SEQ ID NO: 23377 - DNA, 169 bp, Oryza sativa
  Clone ID: uC-osflM202091c08b1
tccaggcagcaagcgtaagcaaggcagaggagagggaaagaacctctctgcagtgctgctgctgctagcttgcagaaaaaaaaaaactctcatcttttgcaggaagagacatcactgtttctgcattcgtgtgcatttggattaagctttgcttatccctttttagtgg

SEQ ID NO: 23378 - DNA, 189 bp, Oryza sativa
  Clone ID: uC-osflM202091c09b1
tctttacaactgtacacaatattggacatgtgtcgtgcgtttgaccgagtttttaaagagcacctagatggcggtcggccaggtggagatcgtatttatggtgtatttgatcattcaattactagttattatttattaagcttttattttatatgcatttttcattgtataatgtttttaatgttattt

SEQ ID NO: 23379 - DNA, 233 bp, Oryza sativa
  Clone ID: uC-osflM202091d01b1
ttcgcgagcggcggcgcggatggggctctgggagtggccgtgggatcgccggcggcgaggcccgtcgggcttaggccccacctccaccgccgaagaggtcaccgccggcgtagacgccacccacctcaccgccatcgtcacaggagcgacgaacgggatcgggagggagacggcccgagttctggcgaggaggggggcggaggtgatcatcccggcgaggaccatggtcagcg

SEQ ID NO: 23380 - DNA, 172 bp, Oryza sativa
  Clone ID: uC-osflM202091d02b1
gtagagtgcggtctcctctcctccctccctgctcgcgctctcagtctcccccatccccaatcaccttactagcttagtagctttgtgaatcaatcaaggccagggtttgatcagatcatccttccctcccatttgcccatgccttggctttgatccgaccaggcatggaggg

SEQ ID NO: 23381 - DNA, 144 bp, Oryza sativa
  Clone ID: uC-osflM202091d10b1
tactctgttgattatggaaagaagtccaaggttggctttacaatttacccttccccccaggtctcaacagctgttgtagaaccatacaacagtgttctctccacttactccttgtttgagcacactgacgtggcttttttcctc

SEQ ID NO: 23382 - DNA, 235 bp, Oryza sativa
  Clone ID: uC-osflM202091d12b1
tctctccgccgcctcctcctcctctcgccttctcccgtcttctccttcgagttagctacctccttattcaaccatgggtaaggagaagacgcacatcaacatcgtggtcattggccacgtcgactccggcaagtcgaccaccacgggccatctgatttacaagcttggaggtatcgacaagcgtgcgatcgagaggtccgtgatggaagcccctgagatgactacgaggaccttc

SEQ ID NO: 23383 - DNA, 83 bp, Oryza sativa
  Clone ID: uC-osflM202091e01b1
gtcgtatgcgcaaaagcaaagccacgcttttggtgaggttgatatctacatgccctggtctctgtcacactcgttcacggagg

SEQ ID NO: 23384 - DNA, 109 bp, Oryza sativa
  unsure (1)..(109): unsure at all n locations
  Clone ID: uC-osflM202091e02b1
gctgnggctcgctggacacaacacacacccacacgcacttcctcactctatctccggttcatgtcctgctgctccccatgtcgtccctactcgagctcgactacatagg

SEQ ID NO: 23385 - DNA, 83 bp, Oryza sativa
  Clone ID: uC-osflM202091e04b1
gtgattactgttacaacccaaccaaatggaggcgcaagttttacatttgaggaccatttgaaagcttcccaagagctaactga

SEQ ID NO: 23386 - DNA, 377 bp, Oryza sativa
  Clone ID: uC-osflM202091e05b1
ttcacgcgtccggttcgcgttcggctcgtgggtcggcatcaagagcggcggcgtggtcgccgccctggtcgccggcgggatcaccatgtcgatcctgggcaacgcggccgacgtcgcgcaggacctcaagacgggctacctgacgctgacgtcgccgcgcgccgtgttcatcagcgaggcgatcggcacggcgctgggatgcgtcgtcaaccccaccgtgttctgggtgttctacagggtgtacaagatgggcagcggcgacatgggcgacatgccctacgccaagctttaccgcggcttcgccatgctcagcgtcggcgacggcgagcaaggcctgcccaggcacagcatgcttctcttcaaggtcttttttgtgc

SEQ ID NO: 23387 - DNA, 117 bp, Oryza sativa
  Clone ID: uC-osflM202091e06b1
ttcttctcctcctccatttccatatctccaccgaccaccttaacatctccggatccttcgctccatccttctcctaagaagagcccaagaagccagcaagatccaaagatcaagagc

SEQ ID NO: 23388 - DNA, 397 bp, Oryza sativa
  Clone ID: uC-osflM202091e09b1
tgatctcttcttctctctgcctgcagacacaagcaggtgactcctccatcctcccaaagcaaagcacccatgtatcccgctgctgccgctgctacctacaagtgcaccctgcagaagctgcttctccttctccttctgatctgaggagctgcagctgctgctccagcagcagaggctgcagtgcaatccgctgccaaattcctcttcttctccttcctactagcttttctcttcttcttcttcttcttcttggaaagctggaacttggagctgcttaagcttacacctgctgattcatctccagctgctgctgctgctgattcagtattattatgtgtgcagatgtacagtagatgaggaggacggaagtagcctctggatagctagctgagctgag

SEQ ID NO: 23389 - DNA, 55 bp, Oryza sativa
  Clone ID: uC-osflM202091e11b1
tctcacgcgtccggcacaggaggcatcattgggaccatacatatctctaccccgc

SEQ ID NO: 23390 - DNA, 77 bp, Oryza sativa
  Clone ID: uC-osflM202091f02b1
gtgaaaggaaatccagatgagcgcatctatggtcgacttctagcgagttgcccaggttgcagcccctacacaagcct

SEQ ID NO: 23391 - DNA, 244 bp, Oryza sativa
  Clone ID: uC-osflM202091f04b1
tccatctctctcagctctcacagctcactgcatcaatggccgcggccaccatggcgctctcctccccggtgatggcccgcgcggcgccgtcgacctcctccgcgctcttcggcgaggcgcggatcaccatgcgcaagaccgccgcgaagcccaagccggtggcgtcgtcggggagcccgtggtacggagacgatcgcgatcttaacctcggcccgctctacctgcaagccgcctagctatctca

SEQ ID NO: 23392 - DNA, 85 bp, Oryza sativa
  Clone ID: uC-osflM202091f07b1
tgcgttcgtgtctggctcggcactctcaacagtgctgtagaagctgcaagagcttatgatgctcaagcacgcaggattcgtggca

SEQ ID NO: 23393 - DNA, 267 bp, Oryza sativa
  Clone ID: uC-osflM202091g05b1
cgctgatcgatcttttttcgggagggcgttgcttgctcggatcggcggccatggctgagcccgctggggaggcggccccgcaggcggacggcgtctcggaggaggtggcggcgaggccgagggggtttaggcttcttggggaggacaagtacgtgcaccaggctctcggcggtggtaaagctgctgatgtacttttgtggaaagacaagaagatttctgctgcagtgttaggtggtgcaactgtgttgtgggttttttttgaagacg

SEQ ID NO: 23394 - DNA, 268 bp, Oryza sativa
  Clone ID: uC-osflM202091g07b1
gatacattgtgcagtacaaggggaacctcagccttgtaaccgtgagaggagcaggccatgaagtccccagctaccagccacagcgagcgcttgtgcttgtccagtatttccttgaaggcaaaacgctacctgattgcgaaaaatgtggagaggcttagttataaaaaaaaaacttaacttatgtttacaaatataagtagcataatgtgccatgaccacaagtcgcatttttcccatcgctgcccccattctagattgtgcctgaaag

SEQ ID NO: 23395 - DNA, 195 bp, Oryza sativa
  Clone ID: uC-osflM202091g10b1
tccatactatacctagcttgccaccaacaacagtacaccatgcccaagaagaagctgtcacataagctgctctctgccttggtatccctactccttcatgggaagcctatctctagatcatcactcaacacctacaccacattgcctcaccctatcttgttgcacatgttctcctcaagcttccctcctatggag

SEQ ID NO: 23396 - DNA, 353 bp, Oryza sativa
  Clone ID: uC-osflM202091h01b1
tttatccaaactccacctacatccatgagcctgcatactttaaggacatgaccatgtccccacctggcccccatggggtgaagaatgcctactgcttactgaactttggggacagcattacgacagaccatatttcaccagcaggtagcattcacaaagacagccctgctgccaagtacttgcttgagcgtggtgtggaccgtaaggacttcaattcatatggtagccgtcgtggtaatgatgaagtaatggcaagaggaacatttgcgaacatcaggattgtgaacaagcttttgaatggagaagttggaccccagaaccgttcatgttcctacaggggagaaggtctatgt

SEQ ID NO: 23397 - DNA, 62 bp, Oryza sativa
  Clone ID: uC-osflM202091h02b1
tttatgcgagagagatctctcccgagctcgagcgcgtccactttgacacgaagacgaccatg

SEQ ID NO: 23398 - DNA, 250 bp, Oryza sativa
  Clone ID: uC-osflM202091h03b1
actgacgttgccaccacaggctacgcaaaatggtgtgcctttctcctccaccacctccactccgacgatcctcctcctgatcctgtgccggccggcgatggcgtaccggttgctggagctcacgctggtctccgcgagcgacctcaagaaggtcactctcttcttgcgcatgcatgtctacgccgtcgcctccatctccgggagcaacgtacccatgcccatgcacggaacccacgtcgaccgcaacgga

SEQ ID NO: 23399 - DNA, 325 bp, Oryza sativa
  Clone ID: uC-osflM202091h08b1
ttgatagcatctagctagggagagaaaggaagagacgagaggagagagatggccactgcttatgctcccatggcgagccagctgatgaagagcagcttggtgtgctccaagccgagggggctgtctggtgcttcgctgacaaggaggccccgcttcacagtcaaggccatccagtctgagaagccaacgtaccaggtggtgcagcccatcaatggcgaccccttcatcggcagcctggagacgccggtgaccttcagtccgctggtcgcctggtacctcttcaacctcccggtgtaccgcacccgcgtcagcccgctgctccgcg

SEQ ID NO: 23400 - DNA, 390 bp, Oryza sativa
  Clone ID: uC-osflM202091h09b1
tcgctatacattgaaagatccctgtccagttcattagcaatggccaaagccgtcgccctactccttgcagccatcgcggcatcggccgtgttagtgcaagtggaatgcgacgcccccgtcgagaagagcttcaacaaggccctcctcgcccctgtcgataagcgcttggatgaggcaactcaggccatcaacgaggccgccgactccgttgtggctgctgccccaccagcaaaaaaggatgaagttgaagctgccacgtggaagcggagaatgctcgcctttgctgctctcgggatggcccaaggagatgagaagaaagttgctgcaacttcacttgcctacaagaaagcagcctaagcttgcctcgatgcccccccagctgacaagttt

SEQ ID NO: 23401 - DNA, 316 bp, Oryza sativa
  Clone ID: uC-osflM202091h12b1
tcgtatttccaagggctatgattctctggcaccaaaaggtgtgccggaaacttctacttctgtcggccccgtacatggggcttctccaagtgtggaacccaaagtgagggattctcctatacaaaccgttttatcaggaaacattgctactgattgtgccaaaaggcaagatccattggtatcaagagtggcacctgtagctcataatggcctcttaaggatgccatctggaaaattagcatctctcgcagcgcaagtctgcaactctgtcagaccatgcacaggacctttaggctgagctttacagaaccaaata

SEQ ID NO: 23402 - DNA, 488 bp, Oryza sativa
  Clone ID: uC-osflM202092a02b1
ttgcgtgaagcagcggcaagaacacaaaaatggcggacgagaagctcgccaagctgcgtgaagccgtcgccggcctctcgcagatcagtgacaacgagaagtccgggttcatcagcctcgtcgcccgctacctcagtggcgaggaggagcatgtggaatgggcaaagatccacacgccgacggacgaggtggtggtgccgtacgacaccctggcggcgccgccggaggacttggaggagaccaagaagctgctcaacaagctcgccgtgctcaagctcaacggcggcctcggcaccaccatgggatgcaccggaccaaaatcggtcatcgaagtgcgcaacggattcacattcctcgacttgattgtgatccagatcgagtccctcacaagaagtatggcagcaatgtcccactgcttctgatgaactcattcaacacccatgaagacaccttgaagattggtgagaaatacaccaattcgaacattg

SEQ ID NO: 23403 - DNA, 262 bp, Oryza sativa
  Clone ID: uC-osflM202092a04b1
tttgcttagccgccgagatttcctcaccactttgtcctcttaccccgccaccaccgccgcctatatatacgcgcccatccctgcgtccttgcacttgcgcacccacagtggttgttttcttggatggttgccgctgcgccctgacctcacctccctctcccccatggattactccgccatgccttctccttctccttcttcttctgccgctgcggcggcggcggcggcgtcggggtgctgcctcgacaggctgtggagggcg

SEQ ID NO: 23404 - DNA, 462 bp, Oryza sativa
  unsure (1)..(462): unsure at all n locations
  Clone ID: uC-osflM202092a05b1
ctctccactccactctccgttgctcgcgcggttggcgttgcgttttttcccctcgaatcgcgggggggaatccgccggttaatgcagcagaggggcctcgcgcacaaccgccgctcccgcggcttctcccgatcccgccgcgccgtcgagggcgcctaaaccacacgcctttttttttccttaaaaacgaatagatctctctcaatttcctgaaacttataataatttcaaaaacgccctagacgaggacgaggagacgatcgagatggacgccgtcgcggcgaatgggatcggggaggctgagaaggacggcgcaccggcgctactgggaggagcactccaaggacctcaccgtcgaggccatgatgctcgacttccgcgccgncgacctcgacagggaggagcgccccgaggttggcaaattgatcaataggaactgacgagtactagacttgatgcaga

SEQ ID NO: 23405 - DNA, 378 bp, Oryza sativa
  Clone ID: uC-osflM202092a07b1
gtgatgtccgaccggcagcagtcggaggagccggaggagcaggtggacctggagggggacgacgacaacgacgtcatggacgacgacgaggacgggtaccgccgccgccgccgccgcgaggactccgacgagccggacgacgacgaggaggatcccgaggtcgagggcgatggccacggagacgcggggaccgcggcgggcgaaggaggagcgcatgagatggacaaggccgccggcggcggcggcgatgggcctgaggacgatgacgagaagcggaagtgggatgagctgctcgctctgccgcctcagggctccgaggtgttcatcggcggtctcccccgcgacaccaccgaggaggacctccgtgagctctgcgac

SEQ ID NO: 23406 - DNA, 454 bp, Oryza sativa
  Clone ID: uC-osflM202092a09b1
cttccttccttcccttggtggtggtggtggagactggagagcggaggcgaaaaaaagaaacgaatcgaatctctcgtccctcctcctcctcgatctccttcctctcaattccatccatcgtctagtcttcttcccaaacccaacaactccatcttcttctttgcttcgcccttgatttgtgtgctgcgtgaacaaggcctgtctagagggcagccatggccactgtttctgacatcggcctctccgcggctatcaacgtctcgatggccgttgcattcttgctggtctttgcttttctacgattacagcccatcaacgatagggtttactttccaaaatggtacctcagaggaatgagagacagccctgttcctctggtgctgcagtcaaaaggttgtcatctaaacatgagatcatacttgacattttaagcttgatgcccgctgctctcaag

SEQ ID NO: 23407 - DNA, 397 bp, Oryza sativa
  Clone ID: uC-osflM202092a10b1
tttgcgcagagaggcgcaaccgatggcagcggaggccggctcggcgcgagaggcgcgggcggaggagatggaggccggcttggcgcgagaggcgcggccgatggagggaggccggattggcgcgagaggcgcatccggtggaggaggccggcttgacgcgagaggcgcggccggcagtggaggcgacctcggatcgaggagctgctgatggatgtgacgcggtcttcggcgctcgaaggctagccagtagggggcgccggtgcaggggtcccacatgtcggcagaggatgaggggtggtgggagcattggtgcgtcagccgtggatttcgcggtggtgagcagcgtgtgaaaacccaagctggccatggccggaccgacaacgatgggaattcccct

SEQ ID NO: 23408 - DNA, 455 bp, Oryza sativa
  unsure (1)..(455): unsure at all n locations
  Clone ID: uC-osflM202092a11b1
ttcaaaccgaagaatcctggtctaccagtttgccacgcacggctccctgcatgacatcctacacgggaagaagggcgtgagggacgcggcgccggggccggcgctgaactggagccagcgggtgaaggcggcgtacggcgccacgagagggctcgagtacctccacgagaaggcccagccgcccatcgtccaccgcgacatgcggtcgagcaacgttctcctcttcgacggctacgagtccaagctcgccgacttcaacctgaccacccagcctcccgacggcgccgcgcggctgcactccacccgcgtnctcggaaccttcggctaccacgcgcccgagtacgcgatgacgggacagcttaatcagaagagcgatgtgtacagtttcggagtcatcctactggagttactgaccggcaggaagccagtgggccataccatgccgtagagacagc

SEQ ID NO: 23409 - DNA, 383 bp, Oryza sativa
  Clone ID: uC-osflM202092a12b1
tttacaagagagcaggatgcttcggaagcctttcatcatcttttgacctcactgagggatgaattttcccgttgttatgtaccaaataggagttctctggcagacatcaccatgtttccttccaaagtatatagtcaaagggaagctgtcattggacttcgaaaatttctactgcttgcctctctcacctgtggctactataaatggagatattatcaatggatgtagtttggtggattgccttgagcactatacggcgttggagcatcttgacaactatcgttgtgatcattgttggcacaatgttgctgccaaatattttgtctcttaaaatccgaggtgatgaggaaaaaattaacaaactacacacctgtgtcgactat

SEQ ID NO: 23410 - DNA, 431 bp, Oryza sativa
  Clone ID: uC-osflM202092b01b1
ttcgcgccgccgccgacgccgacgacgacgaagacgacggcgagcgagagcgcgcgcgactcccactccgacgatcttgaacttgtgtgtacgctattatcgtccgtcgtcgtcgtcgccgtcgttgtattgtgttggcttttagctatcactccccttcgtcctcggcggccggccggacgtgctgctcgatcgatcgaacgccggcgggctccgccgccgccgccgtcgtgattgagtttttgcaggatcagcactagggctcatcttggagaaccaatttgattcgatagaacgagcgagtcgaagaagatggtgctcgcgagcacgcccaaagtggtgctgggatgcgtggcgttcacgaacttctgggtgctggccgtgttccgtcggtgcccgtcatgccggtgggtcgcacggcggggtccctc

SEQ ID NO: 23411 - DNA, 416 bp, Oryza sativa
  unsure (1)..(416): unsure at all n locations
  Clone ID: uC-osflM202092b04b1
atttgcctccccctcctcctcctcctcgccggcgtcgtcgccgccgcggcgccactgctcgccaccgcccagctctccgccgacttctactcctccacctgccccaacgtcgagaaggtcgtctccaccgtcatcgagcgcaagttcaaggaggaccctaccacctccgccctcctcctccgnctcctcttccacgactgcttcgccaatggatgcgacgcgtcgatcttgatcgacccgctgtcgaaccagagcgcggagaaggaggcggggccgaacatctcggtgaagggctacgacatcatcgacgagatcaagacggagctggagaaggagtgcccgcaggtggtgtcgcgcgcggacatcgtggcgcttagcacgcgcgacagcgtgcgcctcgccggggggcccaacta

SEQ ID NO: 23412 - DNA, 421 bp, Oryza sativa
  Clone ID: uC-osflM202092b06b1
gtgttcttcttctcgatttatctttcttggtttcttgatctgtagcttattagcggccatgtgcggcggagcaatcatctccgggttcatcccgccgtcggccgctgcggcggcggcggctgcggcggccaagaagcagcagggcaggagggtcacggccgacgtgctgtggccggggatgctgcggaaggggaaggcggcggcggcggaggaggactttgaggccgacttccgcgagttcgagcgtggcatgagcgacgacgaggcggaggggggcggcggcgaggaggaggaggacgacgaccacgtggtcgtggtggtccccccgccggcggcggcgaggttcgtcgtccgtgccgcggacaaagcggcgcccccaactgcagatgggatggtgactacaaagcttggtccacatgat

SEQ ID NO: 23413 - DNA, 459 bp, Oryza sativa
  unsure (1)..(459): unsure at all n locations
  Clone ID: uC-osflM202092b07b1
tcctccttgcttatcaacacgtacgttgcgtttcttggcaatgcgtgctgcaccgacgacgatgtggcgttcgccggcggcgccggtgtgtctcctcgtcgccgccgttctcctgtcggcggtggcggcggcgacggcgggggaggagtacgtgaagtacaaggacccaaagaagccgatcggcgagcgcgtcgacgacctcctcagccggatgacgctcgcggagaagatcggccagatgtcgcagatcgagcgcgccaacgcgacctccgccgttatcgagaagtacttcgtcgggagcgtgctgagcggcggcgggagcgtgccgtcggagaaggcgacggcgaaggagtggcagcagatggtggccaagatgcagaatgcggcgctcaagacgcgcctcggcatcccgatcatctacgggatcgacgccgtgcacgggcacacaacgtncacaac

SEQ ID NO: 23414 - DNA, 464 bp, Oryza sativa
  Clone ID: uC-osflM202092b09b1
tttagatcgcgagcggccgcccgcgatctagaacctttcacactctcgagctttgctaagatgtatgcttccaagtttggagttgatgaatttaagatgatggagaggctttggggtgagaacttctttgacccagccacaaagaaatggaccaacaagaacactggctcagctacctgcaaaagaggtttcgttcagttctgttatgagccgatcaagcaaatcatcaacacttgcatgaatgatcagaaggataagttgtggcctatgttgcagaagcttggtgtggtcatgaaggctgatgagaaggagcttatgggcaaggctctcatgaagcgtgttatgcaaacatggctgccagccagtaatgctcttcttgagatgatgatataccaccttccatctccgtccaggcccagaggtaccgtgtggagaatttgtatgagggtcctcttgatgatgtc

SEQ ID NO: 23415 - DNA, 484 bp, Oryza sativa
  Clone ID: uC-osflM202092b10b1
ttcgaagtgacttgggagatatgaaacagattgtcgtggccttcatccagctagcaaagaaacttgagaacccaaggttgatttctgatagagatgggacagcagttcagaaggacagttctgacatgagtcagtattcttcagatctgaaactcaaaaagaaacagagtaaaactatgtcagaaagaaggggagcaaactggactactgctggagcagatccgtcatctcgtgcatttgaccgtgaaatcaaaagaagtctttctaaattaaagaaaagggatatcgattctggtagtgaaacatctgatgatgatgatggctactctgaaggtgatgagactgagagtgaaactactgtttctgatacagagagtgatcttgatgtaaattcgggagcatgggatttaaagggaaatggtatgaagttatttgaatcaagcgagtctctgacggatgatcgtggatggggtgctcgcatgac

SEQ ID NO: 23416 - DNA, 331 bp, Oryza sativa
  Clone ID: uC-osflM202092b11b1
tttttcttcctgtacgagagcgggttcgcgctgttcgtggcgctgctgataaacatcgccgtcgtctccgtctccggcaccgcctgctcctccgccaacctctgccaagaggacgccgacaagtgcgccaacctcagcctcgacacctcctccttccttctcaagaacgtgctgggcaagtcgagtgcgatcgtgtacggcgtggcactgttggcatctgggcagagctccactattaccggcacatacgctggacagtacatcatgcagggctccttggacatcaggatgaggaagtgggttcggaacctgatgaccagaaccatcgcca

SEQ ID NO: 23417 - DNA, 474 bp, Oryza sativa
  Clone ID: uC-osflM202092b12b1
ttttgatatggccgagtcattgtgccagaaacgtgctttggaggccttccgcttggacccagcgaaatggggagtgaatgtgcaacctctatcagggtcacctgccaacttccatgtttacactgccctattgaaaccacatgagagaatcatggctttggatcttcctcatggtggacatctttctcacggctaccagactgatactaagaagatttcagcagtttcgatattctttgagacaatgccctacagattggatgaaagcactggcttgattgattatgatcagatggagaaaagtgccgttctttctaagccaaagttgatcgttgcgggtgcaagtgcatatgcgcgtctttatgactatgaccgcatgcggaaggtttgtgacaagcagaaggcaatacttctagcaaatatggcacatatcagtgggcttgtcgaactggcgttgctccatctccttttgat

SEQ ID NO: 23418 - DNA, 425 bp, Oryza sativa
  Clone ID: uC-osflM202092c01b1
tgttttagggttttttttttcccttctcctccccattcgccggcaagcctccgctcccacgcggcgacggtctcctcccatggcgaagaagggcgcgccacgcaggcagcagccggcgccggcggcgcggcaactggccgtggcgaagaaggggaaggcccccccgaaggcggcgaagagggcgccgaagaagaagcaggagctgctcgagccgtcctccgacgactccgagctggagcagcagcaggagcggctccaggaggtggaggaggatgagtcagggtcggacctcgacgccccctcggactccggcgccgaggagctctccgactccgacgatgcctccttggagggaggagacagcggcgaccaggaggacgatgacgaggaggaggaggaagatgaccaccaccccctcgctgacg

SEQ ID NO: 23419 - DNA, 175 bp, Oryza sativa
  Clone ID: uC-osflM202092c02b1
agtcctccgcctccggagcggcgcaactggggctggtagactgatatgatgaggctgtctagctccttgccgggcataacctagaagctgcctcgcactatttgaaaattcgagaacgataataagcaataccgacgcgaactccaagccggcggaagcgtcaaggagcccgtgt

SEQ ID NO: 23420 - DNA, 442 bp, Oryza sativa
  Clone ID: uC-osflM202092c04b1
cttcgatccccttcctccacctccaccccccaccggccgatcgccccccgcgagctcgtcccgtcgcggcgggcgatcgctccacccacccattcaccttcacctttccgcgcgattccccgagaggcgaggcgaggcgaggccgctatagctccgctccgctccccgaccaccacgacgcggctggcggcggatcctccactccacccacccaccccgctttcgccgatcggatcgcgtgctccccccgaggtagaggtgatgataaatcatagctagtgacttagcttgcaccagttctttcttgcagctaagacaaataataattggcgttatggcatatagaaataccgtatgcactccccaagtaatttgatctagaaactgaacaagggcactctcatattcattctgaaagtgttaatcgcactgggaatgattc

SEQ ID NO: 23421 - DNA, 411 bp, Oryza sativa
  Clone ID: uC-osflM202092c05b1
gatgtatggtggactactacccatcgcgccacgcgccgctccgtcacgcgccggcgacgcccatcacgccgagccccgtggtggggaggaggcagaaggcgacgatacacaagcagaacgacttcaagcatcccggggagaggtacatgtcgtgggcgccggattgacaggagaggttgatccgccgcttcggcggagagctcgcgcaccccaaggtctcccctgagctccgcgccatctgggtcaactacctctcccagtgtgatgagtcgttgggggtgaagattgcgaataggctcaacgtgaagccatgcatgtgaagaaactaaagcacaagaatgcatcatatcttgataattaattggagtactaccaaccaaataatgccagacaatgtcagatgcacgcatc

SEQ ID NO: 23422 - DNA, 452 bp, Oryza sativa
  unsure (1)..(452): unsure at all n locations
  Clone ID: uC-osflM202092c06b1
ttcagctcaaacaagtcaagagcgaatagttcttgctgatctgttgtttgattactttagttctcgagaggctttagctgaatccatcgatcgatcatggaggatgagaggaacacggagagccaccatcgtggcgaggctgcagagcaggtggaggtgaaggacaggggcctcttcgacaacctgcttggcaggaagaaggacgatcagccggaggagaagaagcatgaggaggagcttgtcaccggcatggagaaggtctccgtggaagagccaaagaaggaggagcaccacgccgagggcgagaagaaggagagcctcctctccaagctgcaccgatccagctccagctccagctcgtcnagtgatgaggaagaggaggtgatcgatgacaaccgcgaggtggtcaagaggaagaagaagaagggcttcaggagaagatcaggagaagc

SEQ ID NO: 23423 - DNA, 450 bp, Oryza sativa
  Clone ID: uC-osflM202092c08b1
ttttgctaaatgtatttcgtgcagctgaggcatgtgaagaatttggtggagttctagtcaccctaagaatggctctagatgatctttgtggtataactggtgagaatgtgggccccttgcctggttatatagaagatgctgttaaatctgcatataagcgttacatgaaatatctggaatcatttggcccggaggaaaattatctacgtaagaaagtggagaatgagttggggactaaaatgatacacctgaaaatgcggtgcagcggtgtagggtccgagtggggaaagatcaccctgattggcacctcaggcatctcaggatcctatgtcgagctaagggcatgaggaaagtctgcagatcataaccatggcagaacatcgttttctgagggaaggatgcatatcagaacaaggtgttccgtttctcttttcttactgtgtagctacc

SEQ ID NO: 23424 - DNA, 482 bp, Oryza sativa
  Clone ID: uC-osflM202092c10b1
gttgttcttcaacacacctttgttacagatgctaatagtattgcggagtcacactatggcttctctgtggttgatgctaattcattggagtttcttttcaataatgcgcctgaggcagcaaaatggctgaaggataactcactattatcttttgaagaaaagtatcactccgacagaagttcatggttggcactatatcctgtcaatttcttgttctctgggagcttaaagtttccttcagaaaatgaagagattagaaaacattaccagcatttcccccagatggttattcagaagacctcgagtaataatgggcaccggaggatgcatcttgagctttcacttggttcattatcggagatttggacctctgtgcttaatattactggaccactatcaaattggtccttttctgatatgacactttcagatcctcaaagtttagtgggggccaccatcatatatatgcagacttagtggag

SEQ ID NO: 23425 - DNA, 420 bp, Oryza sativa
  Clone ID: uC-osflM202092c12b1
ttctacggatctaagccccagcccgcctatggcttccgcccccaggccgaggaggagaacacctacggctccggctatggatctgggtacggcggtggaggaaggaagcagcaggaagaggagagctacggctccggctacggtcgcaagccgcaggtcgaggagagctatggatcagggtatgggaccaagccgcagcaggaggagagctatggatcagggtatggatctgggtatgggaccaagccgcagcaggaggagagctacggctccggctatgggaggaagccgcagcaggaggagagctacggatcggagtatggttccggctatgggaggaagccgcaggccgagagctatggatcggggtatgggagcaggccacagcagggtggggaggagtatggaagcggtggtatg

SEQ ID NO: 23426 - DNA, 290 bp, Oryza sativa
  Clone ID: uC-osflM202092d01b1
tttatgatcatcttagcttggagaagacagaagagtgttatcttggaaggacaacatggcaactgcagggaaagtgatcaagtgcaaagcggcggtggcttgggaggccgggaagccgctgtcaatcgaggaggtggaggttgcgccgccgcaagccatggaggttcgcctcaagatcctctacacggcgctctgccacaccgacgtctacttctgggaagccaaggggcaaactccggtgttccctcggatcttcggccacgaagctggagggattgtggagagtgtgg

SEQ ID NO: 23427 - DNA, 433 bp, Oryza sativa
  Clone ID: uC-osflM202092d02b1
tgttccaccccagcggcgacggcggcagcaccagcagcatcatgggcagcattgcgtcgtcgatcgggaagatgggcagacggcgaaccgacagcagcgaacacgtcgacgtcgacaagccctagcacgcaactcatcggatcgagtcagagtggacacgatcatcctggtacaagccattgtcgtcgtcgtcgtagtcttcttcaaccgatcggcaaatgagctactattttttgtagattattactattattttttcctcaagaaaatgagctattccatctgtgtagatttgagccatgctgtattacgctgtgtaaatccaaataagcagtccttgcatgcttggtagcccccagcacttccagtggagttcttgaaaatttgtaaatgccaggttcagagatttggaccgatatgataatgagaaccc

SEQ ID NO: 23428 - DNA, 80 bp, Oryza sativa
  Clone ID: uC-osflM202092d04b1
ctgacgcgtgggggcggaggtggtggtggggagggcgagagatggctgcggcggtggggagggcgcggcgggcgacaagc

SEQ ID NO: 23429 - DNA, 478 bp, Oryza sativa
  Clone ID: uC-osflM202092d05b1
ctctccgggagcgctttgaacaatcgctctctctctctctccctccccgattcgattcaattcgcgacgcctccgtgaaattctccaaagccagcttgccctgtagccgcgtgctccggccatggcgttcttcaggggcctgaccgcggtgtcgaggcttcgatcccgcgtggcacaggaggccaccacgcttggtggtgtgcgatggctgcagatgcagagcgcatctgatcttgatctcaagtcccagctgcaggaattgattcctgaacaacaggaccgcttaaagaaacttaaatcggagcatggaaaggtccaacttggaaatataacagtcgatatggtccttggtgggatgagagggatgactggaatgctttgggaaacatcattgcttgacccggatgagggtattcgttttaggggtctctcgattcagagtgccagaagtgctgccgacagcagttaaagatgggga

SEQ ID NO: 23430 - DNA, 473 bp, Oryza sativa
  Clone ID: uC-osflM202092d06b1
ttcttattccctcctctctcgcctccgacgccacttcgcctcctcctcctcctcctcctcctcccgctcctcctcgccagcttacaacaccacacaaaatactactagtacgttcatggaggctgctcaggaagtccttaagcatggttcgacacaaggtgtccatgcagccatcagatctgaccaaaagagttataaccttgtccagctcattgcatctgcactggatgtctacaatattctgcgcaataaaaatatgacacagaatggaagtacaggctcatctgtcaaaggaataaatggaactggattccttggtggagctcgtattggcatagtggctaaaccttctcctgaatctgctgccgggatatttggaacctggctttctggtggagttgcagtggctctagcacttagctattctgaagctgaactccttcatgtcatgaatgactcggacatttcgctga

SEQ ID NO: 23431 - DNA, 494 bp, Oryza sativa
  unsure (1)..(494): unsure at all n locations
  Clone ID: uC-osflM202092d07b1
ttaatcccccaagccgctgcaaggatcgtccaatcaatccgtcgtcgtcctcctcctccgcctccgtctcaagaatgacagaatcaccgtttttgccgcgcgagaggctctttaagcagcagcagtattttcagaacttgaccaagcacacgtatctgaaagggcgttatgatgtggtcacctccgttgccattcccctcgctcttgccgcctccagcttgtttatgataggccgcggggtgtacaacatgtctcatggagtcgggaaaaaggagtgaacgacatggtttcctctcatttcagtacttcagcataggggtgatagcttcaaggcttcctatggtgtcttttaagttgcacaaataaatactggtgaagntaactcttgctatattactgctggtaactgcggatttctgatttaagcaagctgtgtcagatgatggtagatctggatatcaggttgttacaggatctaatattttacattctta

SEQ ID NO: 23432 - DNA, 450 bp, Oryza sativa
  Clone ID: uC-osflM202092d09b1
ttaaatgggatgatctcatagcaaacatgcccctcaagatatgttaccccgcaatggaagatgatgaatggcgcattattaccggcagtgatcctaagaacaccccatggtcatatcataatggtggatcctggccaacgctgctgtggcagtttacattggcctgtatcaaaatgggaagaccagagttggcccgaagagccattgctgtggccgaggagaagctggcagctgacaaatggccagagtactatgacacccgctctggaagattcatcgggaagcaatctcggtcatatcagacatggactattgctggttttctgacctctaagatgctattggaaaaccccgagctggcttctattctgacctgcgatgaggacctcgagctgcttgaaggctgtgcatgctgcctttctaagaagagactaggtgctcacgccgtgc

SEQ ID NO: 23433 - DNA, 444 bp, Oryza sativa
  Clone ID: uC-osflM202092d10b1
tgtctctctcgccacggatcttttaggcgcaggaccaacggacaacaacgatggctcgtggcctcgccgctgcgtcgctgctgctggtcgccctcgccgtggtagcacggccgccgctcgccctggcagtgaaggattacccggccgacgcgtcggcggtggctaagaaatctccagccagtaaggctgacacgcctaccacgggtaaagaatccgtcgctggcaagaccgacgtggtcacggcggctaagaaatctccagctggtaaggcagacacgtctgccacatataaggaatacgccgctgcaaaggccgacgcggtcacggtgactaagaaatccccagccgccaaggctgacacgcctaccacgaagtaggaatctgccgcttgcaaggcccacgcggccaccgtggctaagaaatctccagctggtaaggcagaca

SEQ ID NO: 23434 - DNA, 506 bp, Oryza sativa
  Clone ID: uC-osflM202092d12b1
ttcatagtacacaagaatgggttaaaggagaggcagttgcggtatttggtgaaatggaatccttacatgcggaggtatatggattcctttctaatactgaaaagagtatcataaccatggatgaatcattaaaaactggcatagaaagacagatcattgagatgaaggatttgcttaacatggaaagaaatgaatatgagactttgcttctaccagttatcagggggagtacccattccatgaaatcaagtattgatattttggagctcaaccgtctgagacgtggtctcctcctagatgcttacatttgggactgcaggctttgtaacataagttcaataacaaaagatggccgtgcttctagaataaagggttcggaagctgaattacaccaggcaattacaaatcacggagaaatgcatcaagagccttctacttgtccacagtgttcttcaggaagttaagaaaatctctactatctagagagggccattccatggacactg

SEQ ID NO: 23435 - DNA, 468 bp, Oryza sativa
  Clone ID: uC-osflM202092e01b1
gcaagaatagatgcagttgacgcaagcacagtcaagcgagtggccaaccgtttcatttttgaccaggatatcgctattgctgcaatgggacccattcagggtcttccggactacaactggttcaggcgccggacctacatgctccgttactagactctccaaccgatgtactatgtttacattctgcaaaggcaagataattgcctcttttggcatcagtatattatggcctcgtccatgcacattgtgtgtgcgacgtggaggaaatttttttgagcaccattttccttgttttctttgtccaaaaccaacaaagctgtcaataatgataggcaaattcaactgacgtggcttacttgagttgccacccgttgtttctacgatgaatcgttacccctacttatccttttttttattgcaagattgctttcttttttttgaaatatttgatgaagctgcttatgtaag

SEQ ID NO: 23436 - DNA, 488 bp, Oryza sativa
  Clone ID: uC-osflM202092e04b1
ttttgacaaggaaggccaaacatctcaacttgcaccaatcgatttctttgtcagtactgttgatcccttgaaggaacctcctttggtcacagcaaacactgttctatctatcctcgcggtagattatccagttgataaggtttcatgctatgtctctgatgatggtgctgcaatgctgacatttgaagcattatccgaaacatctgaatttgcaaagaaatgggttcctttctgcaaaaagtacagtattgaaccacgtgctccagagtggtacttccaacagaagatagactacctgaaggataaggtggcaccatactttgctagggagaggagagcaatgaagagagagtatgaggaattcaaggtgagaatcaatgcattggttgctaaagctcagaaagttcccgaggaaaggctggacaatgcaagatggaactccctggcctggaaacaatgttcgcgatcaccctggaatgattcaagtc

SEQ ID NO: 23437 - DNA, 422 bp, Oryza sativa
  Clone ID: uC-osflM202092e08b1
ttaaaaaggaaaaaaaaacaaaacacaccaagccaaataaaagcgacaatgggatcgctcaccaccaacatcgtcctcgccgtcgccgtggtggcagcgctggtcggcggcgggtcgtgcggcccgcccaaggtgccacccggcccgaacatcacgaccaactacaacgccccgtggctccccgccagggccacctggtacggccagccctacggctccggctccaccgacaatggtggcgcgtgcgggatcaagaacgtcaacctgcctccctacaacggcatgatctcctgcggcaacgtcccaatcttcaaggacggcaggggatgcggctcatgctacgaggtgaagtgtgagcagccggcggcgtgctcgagcagccggtgacggtggtcatcacggacatgaactacgagcccatc

SEQ ID NO: 23438 - DNA, 470 bp, Oryza sativa
  unsure (1)..(470): unsure at all n locations
  Clone ID: uC-osflM202092e09b1
tttcgcacgcaaacgccggtagcgaggagaaggattgcttcttctttttttttttgtgtgtgtgctgcgttcttgggtttcttggcaatggtgattggggccgagatcaaggacgagatggaggaggcgccgccgctgctgctcgacgaggccgcgcgccctcgccgcgtcgcgctcttcgtcgagccgtctccgttcgcttacatctctgggtacaagaaccggtttcagaacttcatcaagcacttgcgcgaaatgggggatgaggtgatctgttgtgaccaaccatgagggggttccccaagaattccatggtgccaaggttattggttcatggagctttccctgtccaatgtatggaaaagttcctctctcgctggcactcagtcctaggattatttcggaggttgcaaagttcaagcctgacatcattcatgcatnctcacctggaattatggcttttggggcac

SEQ ID NO: 23439 - DNA, 463 bp, Oryza sativa
  Clone ID: uC-osflM202092e10b1
tttcgccaccgccagattcccatgggctgcgcaggatccacccccatgggcgcccccgaatccgatgctactaaaaaaatcaggaagcctaagccctggaagcacccccaaccgataacgatggtccagctcacgaagatgcgcgaggagttttgggacacagctcctcactatggtggtcggaaagaaatctgggatgccctgcgtgttgcggcagagtctgaagtgtcccttgcacaggcaattgtggaaagtgcagccataattgtttctaatactgatctgactctctgctatgatgaaagaggtgcgaagtatgaactgcccaagtatgtcttgagtgaaccaaccaacctgattcaagacagctgaagagcagacctactgatgtaaacaactgtaaatgagaacaaccccttgagtgtcctggtagctgaagcatgcttgataaaagatctaagca

SEQ ID NO: 23440 - DNA, 343 bp, Oryza sativa
  unsure (1)..(343): unsure at all n locations
  Clone ID: uC-osflM202092e11b1
tgcgggcggcgaggtaccagtcgacggcgttgtaggcgccgcacctgaccggcttgtctgtgagggccttcgtttggctcatggcggcgaccatattcggccggctgctgacctccgttctcaagtcgaagaacaacatcacaaggatgctgaacgacacggtgatccccgagcgccccatgtacactgcccgagtacccgtcgtaagagccggaggatggagctctgcttctggaggatgacagggaccttgtggacagagcagtggatgcacttcagtgtcttccgcgctatgatccagttctgctttggccggacagngacacaccccctcaactctact

SEQ ID NO: 23441 - DNA, 427 bp, Oryza sativa
  Clone ID: uC-osflM202092e12b1
ttttgaaagtgctctcatggaactgccttcccagcactctgttgaatctattggtgatgaggtagtttctgtggacaactgttctaatgtggtcaataatgcagacagtcctgtaattgaggggcttgtattggaggaactttctaggtttttaactgattctcctcatcatggcaaccctgttggggagcactctggtctcccaccaatgtctgaggctgaagctcatgcttttgaggttagcacaaatgatctgtacaatgaaattgcagggcttgctgaattgggtgtgccaaatggtgatggattttctccgtccaatgctggtgttactgaacaacagcccacatactttggagttcctaacagtgaaaattatgtaaatatggatgatatctttgctccagacacaagattatcctatgca

SEQ ID NO: 23442 - DNA, 213 bp, Oryza sativa
  Clone ID: uC-osflM202092f01b1
tcttacctctctctcttctcggaggaaacccccaatttattccttccccgcaaacccgcagccttcctaaaacgaattaaatctccctcccttatccgccgctgcaatccctccccacaaaatctcgctgcgccgcgcgctgttttagggttcgagctcatggcggtggaggaggcgcgcagcagcagtggcggcggtcgtggtgggggtggc

SEQ ID NO: 23443 - DNA, 433 bp, Oryza sativa
  Clone ID: uC-osflM202092f03b1
gtgcattctccctacctgacccctactggcatgtccttggctgccgccacagccgtgtcctcctcattagctcaagctggaatagtctacaagcgtggaaccccatgactggcaaccggtatgctgtaccagttacacctgatgtgaatcctcgtatcaattatggacgtgtgcccgagagccatgctgcggtgctttgcgcagctggccacaatgaccatggtgactgcagctcatgccccttcttcatagtatgggtattcaccaatataggctatgcttatatctctaggtactccgcagagaaggacacctgggacatgatggcatcttcaccagcaccatcggaggttgattccaggcctagcattcttggtgggaatgtcatatattggccacttaagtcaaagcatattcttgcattcgagctggg

SEQ ID NO: 23444 - DNA, 504 bp, Oryza sativa
  Clone ID: uC-osflM202092f05b1
atttatctgattatgcgtctcgaaacatggcagaaagcgagggggaacggtccttgcgacactggttgctgctatatgagcttctagttactatatacccgtttacatatcccttgctttcttagtatttctgtttggctttattcattagttatgcctatgtgttgtgatacatagttttgtactgtggagattgtacgtctgtcaaactacttaatgaaattacagattattggaccgaaagtctgaaactactatagtatattagactaaggttatatagtttgtttacttggaattgctccaaagtttgtctgattgctgaatttgtactccgtttgtttgctgtttttcgcatgaaacattaccagtcctgaagatatttatcatacatgaggtttgtgtatgcagcttctgattttttagtgcctcttatgcagatgccaagcgtctcatcggccagagatttactgatgcttttgtccagagtgatattatgctctg

SEQ ID NO: 23445 - DNA, 419 bp, Oryza sativa
  Clone ID: uC-osflM202092f06b1
attggcaattacagtgatggaaaccttgttgccactctgctggctcacaaattaggagttacccagtgtaccattgctcatgccttggagaaaaccaaataccccaactcagacatatacttggacaagtttgacagccagtaccacttctcatgccaattcactgctgatcttatcgccatgaatcacactgatttcatcatcaccagtacattccaagaaattgctggaagcaaggacactgtggggcagtatgaatcacacattgcattcacccttcctgggctttaccgagttgtgcatggcatagatgtttttgatcccaagttcaacattgtctttcctggagctgacatgagtgtctacttcccgtacaccgaggctgacaagaggctcactgctttccaccctgaaattga

SEQ ID NO: 23446 - DNA, 385 bp, Oryza sativa
  Clone ID: uC-osflM202092f08b1
ttcagcagcagcagcagctgagcttgaagcagcagagcgaggtagacatggccgccgccaccatggccctctcgtccccggcgctggccggcaaggccgccgcgaaggtgttcggcgaggggcgcatcaccatgcgcaagtcggcggcgaagcccaagcccgccgcgtcggggagcccgtggtacggcgccgaccgcgtgctctacctcggcccgctctccggcgagccgccgagctacctgaccggcgagttccccggcgactacgggtgggacaccgcggggctctccgccgacccggagacgttcgccaagaaccgggagctggaaggtgatccactccaagtgggcgatgctcggcgcgctgggctgcgtgttcccggagc

SEQ ID NO: 23447 - DNA, 394 bp, Oryza sativa
  Clone ID: uC-osflM202092f09b1
tttcctccaagtctccgtcggatccatcctcccctaccccgcgaaaccctagcctcccgagcccctcgccgccggcggatggcgacggcttgatcggccctggacacccgccccgcctcgcctcgcctctgcctctccccgctccccccgcgcatctgatgttcctctcccgcatcgtcctccgcgacctggactccatcgactcccccgccgcctccatggcgtcctccaagaagctggtgacccgcgacgagtgggagcggaagctccgcgacgtcaagatccgcaaggaggacatgaaccgcctcgtcatgaacttcctcgtcaccgagggctttgtcgacgctgcggacaagattcgcgtcgagttccgcacccaaccggatattgacct

SEQ ID NO: 23448 - DNA, 404 bp, Oryza sativa
  Clone ID: uC-osflM202092f10b1
cttccccccagccatcggcgacgcgaggacgcgacgcgccccaccaaccaccaccgcctccgccgacctcgccgccatgctgtccgcgcgcgccgccgccaccgccgccgccgccgccgcctccccgctgtggaagcgcggcgagggtggcagcagcgggagcgggagcggatgcacgagctgcagggaggtgcggaggagggccgcggcggtgagggtccgcgcggcggcgccgaggagggtggaggcggtcgcgatggagtccgcggcggagaccgagaagaaggaggaggttgcggcggccggcggcggggttgaggacatggctaccgaggaggtgcccgtcacgccatgggccttctccgtcgcgagtggttacacccttttgagggatccacatcaca

SEQ ID NO: 23449 - DNA, 377 bp, Oryza sativa
  unsure (1)..(377): unsure at all n locations
  Clone ID: uC-osflM202092f11b1
ttccaccgataccgatggacgcggccctcgcctcccgccgccaccgtctcctccttgccgccgctgccgccgctgccggcggctacggcctctaccgcctctaccgccaccatcgccgccgcgttgctgccgtcctctccctcgccgacgccgtctcccaggtcggttccgacctcgccgatttcctccgctccgattccgatcacgtgccccgaaccctactccagctctccaagctcgccggctgcgaccccatgtactacgatggcttctccctcttccactgcctcgcctccggcctcctacgcgccctcttcgactccacctncacctcgaccacgaccacacccgcacaaatagggctcaccgatcggatc

SEQ ID NO: 23450 - DNA, 464 bp, Oryza sativa
  Clone ID: uC-osflM202092f12b1
ttttgaaggcggcggttctagggatgagactcggtggccttcctcatggcgtgcgctgccccgtactccggcgtgaagcgtggagggcggatgggcgcagctatcaggaggccactacggcgaggtcgtcaacatcaactttcgttgctacccggttctactgcaacacctcgaagaatggcgaggcagcgacatcggcgacccccatctccgctttctgatggggcggagcccctaccggggttgcaggtccgatacagacggagtatggcacctcccaggggttgagcagccagcattggtagccatcggcgtgagggtgcagcagaccggcgccgtagttcgaccccgctagcgacctccgacgagttccaacggcaaggaggtgccctctcacatcatcccagatccgattgcccactgttaccgacgtggtggcaggcccttcttgtgagggaaggagc

SEQ ID NO: 23451 - DNA, 344 bp, Oryza sativa
  Clone ID: uC-osflM202092g02b1
ggtgtaggagcacgcgttcttcgcctcgcctgtgtcgcctcacgggaggagaggaggagggctcatctcgcacgagggcggttgcctttgatcccattcccctcccccatcttctcccccgggttcggattcggtcggtcggttggttgatccgcaaccgatcgatcgaggggggggtggcactcgcggatcctctcgtgttcttcctccagtgcgctgatctggacacggcgcgatttatagtctatcggccagatcacaaagtttttcctcgccgcacattcaaaagctttttctggagactttctacattctgaagattatattgggaataacattttaac

SEQ ID NO: 23452 - DNA, 332 bp, Oryza sativa
  Clone ID: uC-osflM202092g03b1
tcctgatggtccatctcttgccatgcacccatgctcacttgcccctgcctctcttcttctccatcctcctcctcatcttctccatggaggtggcacattcagatgcaaggaggttgccactgaagcttctagaagttggcaacatcaaggaggagcctgatgaaaccattggagagaagatggagatggagatggaagggacggaggctgataggatcaaggccacccaggtgtgagagggcgtgcatgtcctgcggccactgtgaggctgtgcaagtgcccattgtgccacaggtgattcagaagacacaaaccaaagctgctgctgctgc

SEQ ID NO: 23453 - DNA, 482 bp, Oryza sativa
  Clone ID: uC-osflM202092g04b1
ccatcctcctagagagggagcgcgcgcaaggaggaggaacaagggctcctcggatcgggaccagctgaggatttgaacaagtcagcttgtcgccaccatggttcttgattcattatcatctcctcacaggaggtcacagaacacattttttctatcatccccaaagaagcttcaatcatcgaaggatgatgttggcagttggtctgcactggttgagcggcatcgcttcctcttgacaacactagtggttctggtctttctgtgcaccatctatctgtactttgcagttaccttgggggcacctgatgcttgctctggattagcgggcactgaaaaggctgtatgtcgggcaaaatctgctcttcgacatggaaaattgaaatttttctagcgctgtcgtgcatactctcgaagaccaagttactgaggcttacaatgcgcccttcaggtcacccacagcttattcttcagacattgaatct

SEQ ID NO: 23454 - DNA, 484 bp, Oryza sativa
  Clone ID: uC-osflM202092g05b1
gtgtcacatcacacttgtagcttctgttgtgaaggctgactctttaagagaattcagaaccccagattttcacccaactgcaagcgatgacaatttttatttgaaagttcagattaaagatacgggctgtggcattagccctcaggatctacctcaagtatttacaaagtttgctcaatctcagcctggaggaaacagaggatacagtggtagtggtcttggccttgccatttgcaagaggtttgttactttgatgggagggcacatctggttggatagcgaaggaacaggaagaggctgcacagtaacgtttgtcatccagcttggcatatgcgataatacgaatgcatatcagcagaagctgattcctctagtctggccaagcagtggggatgctgattttgttggtcccgtgccaaatgctcctaatgaagagaaaggtcaggcttctctgaatctcggtatcagagaagtatatgagcta

SEQ ID NO: 23455 - DNA, 412 bp, Oryza sativa
  Clone ID: uC-osflM202092g06b1
tgttataagaggcctatcgccaccggcgcgcgcggccccgagggaagcgaaggtaaggaatcgctcgcgtcgcgtcgcctcgacccccacccaccgcacgccggcgacgggaggcccacatgccgaccgcctcctgcctccgcccgccgctgccccactcctccgccgccgcctccgcctcggcggcgcgggggctccgcgtgcccctccctccgccgccgccgccgccgcagcagcagctgttccaggcggcgctgcggctgccgcgcaagaggctcgccggggtagggggtcgtgggcggcgtctcgcgtcgcccttcgacgagctctacgcgcgggggaggcccgcccatggctccttcaagaaatctatcctatggaacccgatccaagacatagagcctttggatct

SEQ ID NO: 23456 - DNA, 251 bp, Oryza sativa
  Clone ID: uC-osflM202092g07b1
atgcggttcggttccgtggttcgtctagggggtagtgggttgagatggcggcgccggatgtccagtaccgctgcttcgtcggcggcctcgcctgggccaccgacgaccgctccctcgaggccgccttctccacctacggcgagatcctcgactccaagatcatcaacgacagggagacggggaggtcacgcgggtttggcttcgtcaccttcttctccgagcagtcgatgcgcgacgccatctagggcatg

SEQ ID NO: 23457 - DNA, 464 bp, Oryza sativa
  Clone ID: uC-osflM202092g08b1
ccctctgtttgtcccaatggatggcaattgatctggacatccgggaactagacactctaagctttgagctatcaattaacagatgcagcgagaagcttgcaaacttagcaaatgacatcctgctcaaagaatcagcatcagaggaccagaagaccaatacctggaatcaaactggaccccagaacaatctaaagcttcagcacagcttggcccttcctgcacagcttccttctggtgctgatcttccatcatgtacagaatgcaacgatggggaatctcaaatcagaatgtcaaaacttccagggaatccaaagcataaagttggctctaaacataacagaaaaacgtgaagacagtccattgccgtctcctagtcatcgcccgatgggtcgaactccaagtggaggtcaactaaggaagatgttcacagaaatccaaaatgggcgatcgagctttccggaacc

SEQ ID NO: 23458 - DNA, 321 bp, Oryza sativa
  unsure (1)..(321): unsure at all n locations
  Clone ID: uC-osflM202092g09b1
tttcattgaggaagctgcggaggtagactcctagctatctaattagctagggagggatcgatcgagagcttcttcttccggggttgcgtccatgcgggacagaatagctagcatcagaatggcgacgacggcggatgcacagtaggcgtgctacttgccggactacctgcaccaccatggcacgatgctgtcgtctgatggcgtctacgcgcgggaccatatgagtgagtacgcttgccctcaaaatggggatgacttagctcagnttgcacctgtaccgaaacaagatggtcctcagcgtccacttccccttcgcctatt

SEQ ID NO: 23459 - DNA, 477 bp, Oryza sativa
  Clone ID: uC-osflM202092g11b1
ttttagcttattagcggccatgtgcggcggagcaatcatctccgggttcatcccgccgtcggccgctgcggcggcggcggctgcggcggccaagaagcagcagggcaggagggtcacggccgacgtgctgtggccggggatgctgcggaaggggaaggcggcggcggcggaggaggactttgaggccgacttccgcgagttcgagcgtggcatgagcgacgacgaggcggaggggggcggcggcgaggaggaggaggacgacgacgacgtggtcgtggtggtccccccgccggcggcggcgaggttcgtcgtccgtgccgcggccaaggcggcgcccccaactgcagatgggatgttgactacaaagcttgtgcaacatgatggacctactgctagatcagcaaagcacaagaggaagaatcagtacagggggatccgccagcgcccctggggcaaatgggcagctgaaatccgaga

SEQ ID NO: 23460 - DNA, 239 bp, Oryza sativa
  Clone ID: uC-osflM202092h01b1
tttttatccattggcagatggcattctacatgagctctgtcaaatattatagggactgtatcactttgcttgtgctggattgcagtcaaagacatgtatttagtgtgtctgtgatcaggccgaccctaactgaattcgggaaagttgaaatctcaatgttcttcgtgttatttaaacggaattggtagaaaactttttctgttggctgacggcaaggatctttttcaagaacaaattct

SEQ ID NO: 23461 - DNA, 299 bp, Oryza sativa
  Clone ID: uC-osflM202092h03b1
gtatcgagaaggtccaggacctcctcctgctgggtgttacccctctctctctcggggtggagactgctggcggcgtcatgaccgtcttgatcccaaggaacaccaccattcccaccaagaaggagcaggtcttatccacctactctgacaaccagcctggtgagctcatccaagtttatgagggtgagaggaccaggacacgtgacaacaacctgctgggcaaagttgagctctctggaatcccttctgctcccaagggtggtgcacagatcactgcttgctttgacattgataccaat

SEQ ID NO: 23462 - DNA, 347 bp, Oryza sativa
  Clone ID: uC-osflM202092h04b1
cttttccatcgccggcgagagagagagagttagctagctaggatgggttctacagccgccgacatggccgcggcggccgacgaggaggcgtgcatgtacgcgctgcagctggcgtcgtcgtcgatcctgccgatgacgctcaagaacgccatcgagctgggcctgctcgagacgctgcagtccgccgccgtcgccggaggaggggggaaggcggcgctgctgacgccggcggaggtggccgacaagctgccgtccaaggcgaacccggcggcggccgacatggtggaccgcatgctccgcctgctcgcctcctacaacgtcgtcaggtgcgagatggaagagggcgc

SEQ ID NO: 23463 - DNA, 440 bp, Oryza sativa
  Clone ID: uC-osflM202092h05b1
ttcaaacccgaaacccaaaaccggcgagctgcgccgccgcggcgaccggcggagctcgcgactggcggcggcggcggctgctgctagtgccactccaagcctccgagcgtgatggaccccatcccctcccacatgtcgtcggtccaccccacctcctcgccgtcgacgccctccatctcgccgtgccaccacccgccgccgctcgcgtctgaaaccaagccaccacgccgttcaaatttccgtcacaaaatcgagagagcgaacgagagaggggagagagattacagtggttgtacgcagcttggtcgccgccctcctcgccgcggccggtgggccccgcatgccgccgcccccgccgctgccttctcgtcgtcgccgtcgtcgtcatcgtcctcgccgcgggcctcggcttcgggatcgtcgccgagcaccaccacgcg

SEQ ID NO: 23464 - DNA, 321 bp, Oryza sativa
  Clone ID: uC-osflM202092h08b1
ttttagagagagaggagacgccaccacgcgcacggagctcgcgattccaatccgggcacgcctcctccgccaccgccggctcggcctccgccgccggcgcgaccaggatcacagctgcgatggaacacaaggaggctggctgccagcagcccgagggcccaatcctttgcatcaataactgcggcttctttggcagcgcggcgaccatgaacatgtgctccaagtgccacaaggagatgatcatgaaggaggagcaggccaagcttgctgcctctccatcgatagcattgtcaatggttgtgacgggggaaagagcatatt

SEQ ID NO: 23465 - DNA, 405 bp, Oryza sativa
  Clone ID: uC-osflM202092h09b1
ttatcagcagcagcagctgagcttgaagcagcagagcgaggtagacatggccgccgccaccatggccctctcgtccccggcgctggccggcaaggccgccgcgaaggtgttcggcgaggggcgcatcaccatgcgcaagtcggcggcgaagcccaagcccgccgcgtcggggagcccgtggtacggcgccgaccgcgtgctctacctcggcccgctctccggcgagccgccgagctacctgaccggcgagttccccggcgactaccggtgggacaccgcggggctctccgccgacccggagacgttcgccaagaaccgggagctggaggtgatccactccaagtgggcgatgctcggcgcgctgggctgcgtgttccccgagcttctcgcccgcacggcgtcaag

SEQ ID NO: 23466 - DNA, 500 bp, Oryza sativa
  Clone ID: uC-osflM202092h10b1
gtgcctgccatgtcgccgacggccagtccgatgtcggcgcccgccggcagcagcagcttctactcccccttcgggctccacgtgcagcccgatcactggagcttcttccatgaccacgagcccgtcttcttcatgcccgacttcaagttcgccgccgccgccgccgccagcgcgcagcccaagcccacctccgccgccgacatgccccacaagatcgtcaagcaggtcgagtaccaattcagcgacattaacctcgtcgccaacgagttcttgctcaagatcatgaacaaagattctgaaggttacgtccccttatccgtgattgcttcttggaagaagatcaagtctcttggagcaaccaatcaaatgctggtcaaggctcttcgcacctccaccaagctgattgtgagtgatgacggcaagaaagtccggcggaggcagccattcacggagaagcacaaggaggagcttcagtcacggatgatcatagcttgagattt

SEQ ID NO: 23467 - DNA, 345 bp, Oryza sativa
  Clone ID: uC-osflM202092h12b1
ttatcaagaaagctggtgaacgatctctctgcgatatttctttggagaagaagccaaagagtcactgggaatttgccctggaggagatggcttggatggcaaatgaatttatgcaggagcgcctgtggaaaagtgcagcagcttcccagatgtgccactggattgccttaagtggtcgagcaacatttgaggaagcaaacattcaaaggaaacagaaatcaattgctagaatcctagccaagagtatcatgaagttttggtgttcagctgagactttacgagctaccagcggtgaaatgcgtcaagagaagcaagcacaggagtcaattgggattggggaaacaa

SEQ ID NO: 23468 - DNA, 346 bp, Oryza sativa
  Clone ID: uC-osflM202093a01b1
tctccccccgatccgccgccgcctctcccgattcgccgccgccgttgacccgccacctatggcctcagggccgccgtcgtcgccctccagcaaggcgttctcccgcaaatcccacgcccacgcctgcggccccaactcctccaaggcggcggcggcgggcggtggcggcgccggtgtcgcggcggccttggatgctcacaacgggacgcacgtgcgcacagtcaccttctcgctgtcgtcctcgccggccgcccgcagggagctccgccgccggctcaccgacgagctcgcgcaggtgcgcgccacttgcaagcgccttagcttgcttccggcccccgggcctttc

SEQ ID NO: 23469 - DNA, 436 bp, Oryza sativa
  Clone ID: uC-osflM202093a02b1
tttacaacaaagcacgcatttgcaactctgtccttcattgctgagacttttctcttcctgtatgttgggatggatgcattggatattgaaaaatgggagtttgccagtgacagacctggcaaatccattgggataagctcaattttgctaggattggttctgattggaagagctgcttttgtattcccgctgtcgttcttgtcgaacctaacaaagaaggcaccgaatgaaaaaataacctggagacagcaagttgtaatatggtgggctgggctgatgagaggagctgtgtcgattgctcttgcttacaataagtttacaagatctggccatactcagctgcacggcaatgcaataatgatcaccagcaccatcactgtcgttctttttagcactatggtatttgggatgatgacaaaccattgatcaggctgct

SEQ ID NO: 23470 - DNA, 410 bp, Oryza sativa
  Clone ID: uC-osflM202093a03b1
tcgttcgcagcacacgaaaagagaaccagagagagagagagagagagagagagagagaggagtggaagtggatcggggcatcgctgcggcgtcggggctgtgcagatcggaggaggtcatgaacgactaatctccgttcatttattatggacttgcaccagttattaaagtacagattgactggcgctaacgttgtgtacgaaattcctacagagaacaacttgcaaaactctccctggcaagctaacccactgaagtacgagttcagcgattccccatacacccctctctcttcccaatttgagtgtgacaatttgtctgctcttaccaacactccagataaccagagctttacagaaaccatttcagcccaaccaatcttcccattggaagcagacagctcatataga

SEQ ID NO: 23471 - DNA, 307 bp, Oryza sativa
  Clone ID: uC-osflM202093a05b1
tctgtgaagctgaagtctctatgcgagaagttacagaaggagctctccctgatggtgaaggtgctgcaaagttggaaattacaggggggctttctcgagaatctgctgacaaaatggaagttacaaagggaatttctcttgttactgaagcttctgctgattcagaacttgcacagagagttcctactgaaccaggagttgaactctctctgccggaagttacagagagagttcctggtgtgactgaagatttcactgagctaggagatacattcagtgggctacatattacagggttcggttcctt

SEQ ID NO: 23472 - DNA, 264 bp, Oryza sativa
  Clone ID: uC-osflM202093a06b1
tgcttctcgccaagggaggttgcttcgctttgcttgctcgcgtcggaaacgcatcgtctcctctccgccgccgcagcggaagcggaagcgcgcgcgcgagagagatggcgtcccgcgccgtcggcgccgcagtcgccgccgtggcggtgctcctgctgctggctcccggggcggagccgatcgggctgtggctgccgcctcccaccggtggcggggtggcgaccttggcgggcgcccgccgcaccagggcaggtaccctgacgc

SEQ ID NO: 23473 - DNA, 471 bp, Oryza sativa
  Clone ID: uC-osflM202093a07b1
tttcgcgcgagatgacccggcggtacatgaccgacatgatcacctacgccgacaccgacgtcgtcgtcgtcggcgccggctccgcggggctctcctgcgcgtacgagctctccaaggacccctccgtcagcgtcgccgtcatcgagcagtcggtgtcccccggcggcggcgcgtggctcggcgggcagctgttctccgccatggtggtgcgcaagccggcgcacctgttcctcgacgagctcggcgtcgcgtacgacgagcaggaggactacgtcgtcatcaagcacgccgcgctcttcacctccaccgtcatgagccgcctcctggcgcgccccaacgtgaagctgttcaacgccgtcgccgtcgaggacctcatcgtcaaggagggccgcgtcggcggctgtggtcaccaactgggcgctggtgtcgatgaaccacgacacgcagtcgtgcatggacccaacgtgatgg

SEQ ID NO: 23474 - DNA, 479 bp, Oryza sativa
  Clone ID: uC-osflM202093a09b1
ttctcggcggcggcgggcggcggcggagatggttttcaccaggctggatgagtcgcccatgttcaggaagcagatacaatcccttgaagaaggttctgaattgctgagagagagatgtttgaggtttcataaaggttgccgcaaatacactgaaggactaggggaagcatatgatggagatattgcatttgcaagttcactggaagcatttggaggggggcataatgatccaatcagtgttgcttttggaggacccgtcatgaccaaatttacaattgccctgagagaaattggaacttacaaggaagtattgcgctcacaggttgagaatatgctaaatgacaagttgctgcaatttgtggacattgatttgcctgatgtgaaggatgccaggaagcgttttgacaaggctagccttctctatgaccaggctcgtgagaggtatttatccttgaagaaaggcacacggacagatgtag

SEQ ID NO: 23475 - DNA, 364 bp, Oryza sativa
  Clone ID: uC-osflM202093a10b1
ttttggatgatttagctcaaccatcatatgagcatccagatttgttgtcattgagtcaaaatcagggcacagttttgggaaaccaaggtcaacctcatcacccgccgcaatttcatccccatcctcattctcaccttcaagagacaattagaagctttgcccccagtatgtctgttgcacctccacaaaatatattccatggacaaggaggtagcgcagctgcactcctgccaagttctttccctgtaccacctgcagtaccaccctatggcttgcagtctatgcctggatttcctttgccatcggtaccttcaagaccacctcctccaatcgagataggtccatcatcatcgcaagttggggg

SEQ ID NO: 23476 - DNA, 428 bp, Oryza sativa
  Clone ID: uC-osflM202093b01b1
tcggacgcgtgggccggcgtcagctcacgaggcaggaaagaaaccccaaacccgcgtcgccgacgccgtcgccggcacactcgccttcgcctcgcccaccaccaaaccacctccgatggcgcccggctcctcctccacctcctccccgggaggaaaagccgccgcggtgggcggcgaggcggggaaggagggcggagccgtgccctcgcccgcggcagctgcctccgaccacgctccggtggcgcccgacggctccggggagggtggcgcgctgccggcgggcggcgaagcggggaaggaggacgaggggcgtcgcctcgaccggctcccgcactccgctggcccctggctcctcctgggagaaggcgcgctcggtgaatgcggcgaggcgaggaacgacgacgaagcgccagcgccagcgccacggc

SEQ ID NO: 23477 - DNA, 451 bp, Oryza sativa
  Clone ID: uC-osflM202093b02b1
ttcctgaaccaagaacactgccctcctccacacgacatggcttctcaagaagagaagacgagcgtcaagtcggaggaggcctcgtcggcggcggaggagcagccacctcaagctgcagctccgccgccgcgcaggggtgtgccgccggccaaccccttcgacttctcaaccatgatgaacttgctcaatgatccgagcataaaggagatggcggagcagatcgccaaggacccggcgttcacggagatggcggagcagctgcagaagacggtgcagtcgccgccggcgcggggggcggcgcaggaggctgcggcggcggcggcgccggcgctggacccgagcaagtacgtgtcgacgatgcagcagctgatgcagaacccgcagttcgtggcgatggcggagcggctgggcagcgcgctgatgcaggaccccgccatgtcgtccatgcttg

SEQ ID NO: 23478 - DNA, 350 bp, Oryza sativa
  Clone ID: uC-osflM202093b03b1
tctgtttgatccatcacactcacacaacacaaccctccccaaaacctcccgaagagagcaagatgttcggcttcgggcaccacggccaccatggccaagaccagccgccccagcaccacggcggcggcggcggcggcgcgcaccagcccaccttcaagatcttctgccgcgccgacgaggggtactgcgtcgccgtgcgcgaggggaacgtcgtcctcgccccgaccaacccgcgcgacgagcaccagcactggtacaaggacatgcgcttcagcgccaagatcaaggacgaggagggcaacccggcgttcgcgctcgtcaacaaggccaccgggctcgccatcaagcac

SEQ ID NO: 23479 - DNA, 403 bp, Oryza sativa
  Clone ID: uC-osflM202093b04b1
tcgaaaatatcgaacttcttctcgatcgaagccatcttgaacgcatccaagggtatgacaaggttgcacattgttgactatggtatacagtatggattccagtggccaatcttcttccagcggatctcgaagagacctggtggccctccaagtgttcgaatcaccggtgttgacttaccacagccgggattccgccctgcacaactcattgaggcgacgggccgtcggttgcatgactatgcccgtatgttcaatgttccatttgaataccatgctattgctgccaagtgggacactatccggtcgaaagatcttaagatagacaaagacaaggatgaacttcttggttgttaactgccttttccggatgagaaacatgatggacgaaatggtgacagatgac

SEQ ID NO: 23480 - DNA, 324 bp, Oryza sativa
  Clone ID: uC-osflM202093b06b1
ttggtccctgtcaaaacttatccaagatcgctgatgcttccaaaggagtttgatgccaggtctgcatggtcacagtgtaacacaattgggaccatacttgatcagggtcactgtggctcgtgttgggcatttggtgctgtggagtgtctccaggatcgtttctgcattcatttcaacatgaacatttcgctatctgtcaatgacctagtggcatgctgcggtttcatgtgcggcgatggttgtgatggaggctatcctatcatggcatggcgctactttgttcggaatggtgttgttaccgatgagtgccgatccatactttga

SEQ ID NO: 23481 - DNA, 467 bp, Oryza sativa
  Clone ID: uC-osflM202093b07b1
aagttgctggcggtagaatgaacagtgccgagatgagtaatatctctccatggtttgcttctgcacacccttatgctcctgtagctgcacagccatttttaccatctagaggagaacagcctcacccagttgagacagctgctggaagtggaacccagaggatcattacatccttggcagatggtgtccagcgtggaagtgatccctgccgtgctccagttatttctacttcaccaaccatggtttttcatcctcctgcgtatcaatatgcaggattcccttttactcctggtgtgcaccttcaagcaccggggttttcaattggctcgacatcttatgccaattcagcacctgcaggagttccatattttcctagcattgctccaacactgttagggccagcaggtgcattacctgctcaacatactaagcaatatgcaataaaccttcctgaagaagcagcactg

SEQ ID NO: 23482 - DNA, 482 bp, Oryza sativa
  Clone ID: uC-osflM202093b08b1
tcgctcgaaacctgttcggtcccaaaccgcaccaaggccaccactcctcgcgccctgctccagttgcacttccacactggtctccccctccccttgctcccgctccggcgaaggcgagcgcgcggatcggctgtgatggcggcggcggcgccctctcccccacccgtcgcggcgctggagcagatgagcaggaccaaaatgttcgggggccacaacctccgcttgcgccaccacagcgccacgctcggctgccccatgaccttctccgtcttcctcccgccgtcgccggcatccgacctccccgtgctgtactggctctccggcctcacgtgcaacgacgagaacttcgtcaccaaggccggcgcgcagcgcgccgccgtcgcccacggcatcgccctcgtcgcccccgacacctccccacgtgggcttaatataagggagaggcagacagctggattttgcgggtggcgctggattctatt

SEQ ID NO: 23483 - DNA, 337 bp, Oryza sativa
  unsure (1)..(337): unsure at all n locations
  Clone ID: uC-osflM202093b09b1
atcaaatgctcctcctccgccgcctcctctcgctgagctgagctgagctgtgaaatagtgccaccgagtgagcgctgagctgagctcgaagcaagagaggaagaggaggaggagggaagagggggnggcgaagatgattacggcggcggacttctaccacgtgatgacggcgatggtgccgatgaacgtggcgatgatactggcgtacgggtcggtgaagtggtggcgcatcttcacgccggaccagtgctccgggatcaaccgcttcgtggcgctcttctccgtgccgctgctgacgttccacttcatgtccaccaacaacccggacacgatgaac

SEQ ID NO: 23484 - DNA, 461 bp, Oryza sativa
  Clone ID: uC-osflM202093b11b1
cctagctagcggctatcaaacccccacaccactgctcgatcgatcgtcgcacccggagtaactaaggcagagatcagatcaggcgaattaggagcatatggcgctgtcgacggcgcagacaggggagtcgatgcactcctcgacgttcgcgtcgcggtacgtgcgcacggcgctgccgaggttcaggatgccggagaagtcgatccccaaggacgcggcgtaccagatcatcaacgacgagctgatgctcgacggcaacccgcgcctgaacctggcgtccttcgtcaccaacgtggatggagcccgagtgcgacaagctcatgatggccgccatcaacaagaactacgttgacatggatgagtaccccgtcaccaccgagcttcagaaccggttgcgtgaacatgatcgcgcatctgttcacgcgccgatcggggacgacgagacgggggttcgggtgggc

SEQ ID NO: 23485 - DNA, 177 bp, Oryza sativa
  Clone ID: uC-osflM202093c03b1
tctctctctctctcggtgactcttccgccgcctgcgccgcggcgcgagccgccatggcgaggcgcgcgaggctccggctccggctcgtccgcgccctcgccacggcctccgcgtccggatcgcctgcggcgccgcggccggcgaggcaagcggcgccctacctggcggtgctccacc

SEQ ID NO: 23486 - DNA, 372 bp, Oryza sativa
  Clone ID: uC-osflM202093c04b1
tcgaattaatttacctcctccacctcctcctgctccccccgatcggatcggcccggctcctcctcctccgccgccgccaccgccgccgcagataggagaagatggccgcacttgataccttcctctttacctcggagtctgtgaacgagggccaccctgacaagctctgcgaccaagtctcagatgctgtgcttgatgcctgcctcgccgaggaccctgacagcaaggtcgcttgtgagacctgcaccaagacaaacatggtcatggtctttggtgagatcaccaccaaggctaacgttgactatgagaagattgtcagggagacatgccgtacatcggttttgtgtcagctgatgtcggtctcgatgctga

SEQ ID NO: 23487 - DNA, 415 bp, Oryza sativa
  Clone ID: uC-osflM202093c05b1
gaccgatccgacccacttccctccccccccgtccgtcctccgatccgatccgatcccgacaccaccgcctccggtggtagatctggatcggagccaccccgccgccggcgatccccggcatcctcgccacccatcggtagcccctccgccgccgcagccgacgacgacatggacgctgcccccgccgccgccgaggcgcacgacgggcagagggagcggttcgactcggggtgttgggtcggcgacctcgccctcgacgaggatgtcgccagtgatgaggacgagtcgtggaggggtttgaggcaggagctcgacgactgcaaggacgacagggaagtggcaaatatcctggctaacggcatcaaactgcgtgattacacaaagggcgtcgagaacaacattcgccaattgagct

SEQ ID NO: 23488 - DNA, 355 bp, Oryza sativa
  unsure (1)..(355): unsure at all n locations
  Clone ID: uC-osflM202093c06b1
ccgaattccattcctcgcgattcctctcccctcgcctcctcgtcctccccctcctaggggatcgccggagaggaatcgcgcggaggaaaaaaaaaagaaaagggcttcctcgtcgtctaagttaaaaggaagccatggagcacaaggagactggatgccagcagccagaaggcccgatcctttgcatcaataactgcggcttctttggcagtgcggctaccatgaacatgtgctcaaagtgccacacggagatgataatgaagcaggagcaggccaagctggcagcctcctctatcgacagcattgcaatgngtggctgattccggggaaggaaccaattcattgctggtcacgc

SEQ ID NO: 23489 - DNA, 444 bp, Oryza sativa
  Clone ID: uC-osflM202093c07b1
caacctccgccgcgcgcgccgccaccagctgctcgacccctccgcggagcacggcgtcaccaagttctccgacctcaccccggccgagttccgccgggcctacctcggcctccgcacgtcgcgccgcgccttcctgcgggggctcggcgggtccgcccacgaggcgcccgtcctccccaccgacggcctccccgacgacttcgactggagagaccacggcgccgtcggccccgtcaagaaccagggatcgtgcgggtcgtgctggtcgttcagcgcgtcgggggcgctagagggagcgaactacctggcgacgggcaagatggacgtgctctccgagcagcagatggtcgattgcgaccatgagtgtgattcatcagaacctgattcatgtgatgctggatgcaatggtggatttgatgactaacgccttcagctatctttttg

SEQ ID NO: 23490 - DNA, 356 bp, Oryza sativa
  Clone ID: uC-osflM202093c08b1
aagagattgccttcgcaactcccttgtctaaggctactaaggagatcctactccgactcccggctgaatcagtcttgaagttcaaaccagtctgtaagcaatggcttgggctgataaagagtgaaagatttatccgtgcatactttgcacacaagaacatggacaagaggccaaaaatcatgcttgtgggtaagggctctggaaaatcacttttcaactttgttcccttaagtaaatggcttcaagaggcatccaatcaaggcacactgtttcttgacacaaaggtggtttgctccaagccttgccgtggattgaatttgatgagcttcgcggaggaggactttctgttcacccgt

SEQ ID NO: 23491 - DNA, 470 bp, Oryza sativa
  Clone ID: uC-osflM202093c09b1
tcgcagaaaatcctaggatgggaatgagtgggtgaaattacccccacaaaaaccaactctgcaactctttaccttttttagtttgcctttgttctttgcggtgtttcgttttcacatccctggaaattttcagagcaaagacaacgtttgttgcaagaggaaagagggtggattggtcaggtttggttgcagcttggattttttcttaagaaacaaaaggcaggattgcagcttaattgatctggagggagaggaaagacaaagatttttgtaattggaaatatatcgccgtgtcagcggaatgcttcttgtggatgtgagtacgggataatttatgttccaaaaggaattaaatggtccataagcaggaaggcaataacagtgaacagatgagcaccactcctgcccctccgggcgaaaccagtagacagattccatctagagatgatgccaaacatgagaaggaagcg

SEQ ID NO: 23492 - DNA, 348 bp, Oryza sativa
  Clone ID: uC-osflM202093c10b1
cgcagccagccggagccaccgccgcctctctgtcgccgcctcgcccgcgggggctccggcgaacgggccgcccgcctcgacctcccctccttcccgtcgccgagctagcctctccacgctgcgcggggccgcctccggcgagcaggctgggcctcgggcctcggggcctcattccaccgccctgcgcctctcggttcggatcggcttgaaggtgaaggtatggacttcggtgattctagacgcaagcctaatgtcgtcgggaagttcaccgtaagctgttgcactcacggtcatgtgcatcattgtgttgaaacagtcgcctggttttaccagtacaagtgtgttctc

SEQ ID NO: 23493 - DNA, 458 bp, Oryza sativa
  Clone ID: uC-osflM202093c11b1
tcgagaagattaattttcaatgctctgtataaccgcaaactggcaaacatgaaagcaggctgcacgcacaaaactgcttcaccttttgcagatatgttggctttccgcaaggtcaaagcaaggcttggtggtcgtcttcgcctattaatctcgggtggggctccattaagtaatgagatcgaagagttcttgagagtaaccagctgcgcatactttatccaaggctatggtttaacagaaacactgggacctagcacggtctgttaccctgatgacatgtccctggttggaactgttggcgtggctgctacctatacggaattgcgattggaagaagtgcctgagatgggttacaatccacttggtacttcttcccgtggtgaaatatgcgtccgaggaaacttcttaccggatactataaaaatcctgagctcagaatgaagtcatggctgatggat

SEQ ID NO: 23494 - DNA, 446 bp, Oryza sativa
  Clone ID: uC-osflM202093c12b1
cacgctttcggatctctccaccaccatcaccaccagcactactctacacgcacagaggagcacgcggcccctgcgatctccactccagaatcctcgatcccccgccgcggaatccatcatagggactgaattttgcaattctcagccatgggttcagttgtggatgctccagtggttgtggagggggttgctgagaacatgttgggtgataagaaagttacagttgtatttgttctaggtggtcctggaagtggaaaaggcacacagtgtgccaacattgtggaacactttggattcacccacttaagtgctggagaccttttgcgtgcagagataaaatctggttctgagaatggaactatgattgagaacatgataaaggaggggaggattgttccgtcagagggtactataaagctcttgccagatgccctgattaaaatgag

SEQ ID NO: 23495 - DNA, 351 bp, Oryza sativa
  Clone ID: uC-osflM202093d02b1
ccggtctaatccgattcaaacccgccgtttccaagcttgctctcctctcccccccaatccttccctcccgagtggcagggtgctcgacgggatggcgcagaaggaggccaatggcagcagcaacggggagcacaccacccgcccgccgccgacgccctcgccgctccggttctccaagttcttccaggcgaacctgaggatcctcgtcaccggcggagctggcttcatcggctcgcacctcgtcgacaagctcatggagaacgagaagcacgaggtcattgtcgcagacaactttttcactggttcaaaagacaacctgaagaaagtggatcggacacccaagatttgagc

SEQ ID NO: 23496 - DNA, 472 bp, Oryza sativa
  Clone ID: uC-osflM202093d04b1
tgagaatgccaatgtcattatggcaacatatgaagacacactccttggtgatgtccaagtctaccctgagaagggaactgttgctttctctgctggtctgcatggctgggctttcacactctcgagctttgctaagatgtatgcttccaagtttggagttgatgaatttaagatgatggagaggctttggggtgagaacttctttgacccagccacaaagaaatggaccaacaagaacactggctcagctacctgcaaaagaggtttcgttcagttctgttatgagccgatcaagcaaatcatcaacacttgcatgaatgatcagaaggataaagttgtggcctatgttgcagagcttggttgtggtcatgaaggctgatgagcaggagcttatgggcaaggctctctgcaggcgtgttatgcaaacatggctgccagccagtaatgctcttcttgagatgatgatatacca

SEQ ID NO: 23497 - DNA, 479 bp, Oryza sativa
  Clone ID: uC-osflM202093d05b1
cgaaggtgatgccgtcgatggacgccgtggtgaaggtgttctgcgtgcacacggagcccaacttctcgctgccgtggcagcgcaagcggcaatatagctccagcagcagcgggttcatcattggtgggcacagggtgcttaccaacgctcactccgtcgagcactacacccaggtcaagcttaagaagaggggatcggataccaaataccttgccaccgttctcgctattggcaccgagtgtgacattgcaatgttaactgtagaggatgatgaattgaaagggggggtttcacccctagagtttggatctttgcctgcacttcaagatgctgtgactgttgcttggttacccaattggaggagacacgatctcagtcacaagtgggtgttgtatctagaatagagatactttcatatgttcatggctcaacggagcttctaggattgcagatagatgcagctataaattcaggaaact

SEQ ID NO: 23498 - DNA, 423 bp, Oryza sativa
  Clone ID: uC-osflM202093d06b1
tctattaacccgtcacctagggcctcttcgagttaagcgcgcagaggccaagggagaaaaagaaaaaaaaaacgaaaaaaaaagagaaaaaaaaaaggacgcgccaccgcggcgggagaggcgtacggcgcaccggccggccgtcggatctgcgccggcgacgcgcgcccccgccggatccccgctgccggaggtggacgaggcggcgctccggccatttccccgcccgcgagcgcccagatccgtcccgccggatatttgctgctcaattatgcgataaagtgcttccagttgacgcggagttggtgggagacgccttgctctataatctattctccattgctcagcagtgcatcagtttggaagattctgcctttcttcctcttgtgcctgtttgtttgcttcttggtgggagtagacaga

SEQ ID NO: 23499 - DNA, 323 bp, Oryza sativa
  Clone ID: uC-osflM202093d07b1
gcaccaaatccccccaccatggatcaccgcctcctcctcctcggcctcctcctcctctccccggcggtggccgccgcctcagtccccggcgaggaggagccgctgatccggcaggtggtcggcggcggcgacgacaacgagctggagctgaacgcggagcgccacttcgccagcttcgtccagaggttcgggaagtcctaccgtgacgccgacgagcacgcgtaccggctctccgtgttcaaggccaacctccgccgcgcgcgccgccaccagctgctcgacccctccgcggagcacggcgtcaccaagttctccgacctcac

SEQ ID NO: 23500 - DNA, 465 bp, Oryza sativa
  Clone ID: uC-osflM202093d08b1
atcagtcccagttgattcaacaattgtctcagaaaagccaggaaattctacagcaacaaattttgcaacatcaatttggtgggtctgattctattggtcaactcaagcaatcaccatcgcagcaagctcctttaaaccacatgacaggatctttgacgccccagcaacttgtcagatcacattcggcacttgctgagagtggggatccatccagttcaactgctccatccaccagccgtatttctccaataaattcgctgagtagggcaaaccaaggaagcagaaatttaactgacatggtggcaacaccacaaattgacaacttacttcaggaaattcaaagcaagccagataatcgaattaagaatgacatacagagcaaagaaacagtccctatacataaccgacatccagtttctgatcacttgatgcatcatctgctaccctcttttggttaggacagag

SEQ ID NO: 23501 - DNA, 500 bp, Oryza sativa
  Clone ID: uC-osflM202093d09b1
tcggacgcgtgggctcgcagtcaccgcaggtggagagggtggaggagacggctagggggggatcttttctctctttattatccttttgtgttctttttttcatctttttgttatcttctttcttttgtttccttttacacttttctttttttagtttatattttcgttttttcttgtttctttctctctttttttccctttttttttcttttttttctccttacttattttttttttttttgttaattttttttcagttcttttttcattcttttttttattttttttttttttaatttttttttctttatttcattttcttctactttctttttttttctgttctttcaaatttctatttattattcccttttctcttttttttattttcaccattcttttattcttttcttcttttctttctaattctcttctttcctttcttttttttcattaccttttttcttttttttcttttttttattccattttcttttatt

SEQ ID NO: 23502 - DNA, 411 bp, Oryza sativa
  Clone ID: uC-osflM202093d10b1
tcgctagttctagatcgcgagcggccgtggaggagatgtacacgctgaatgagaagaaggtgcagatagtcgatacaacgtgcccttgggtttcaaaggtgtggaacatggttgaaaagcacaagaagggtgactacacttctattattcatggaaaatactcccatgaagaaactgttgccactgcttcctttgcagggacatacatcattgttaagaacatagcagaggctagctatgtatgtgattatatacttggtggccaacttgatggttctagctccacaaaagaggagttccttgagaaattcaaaaatgctgtttctccaggatttgatcctgatgttgacttagtgaaagttggcattgccaatcaaacaacaatgcttaaaggagaaactgaagaaattg

SEQ ID NO: 23503 - DNA, 361 bp, Oryza sativa
  Clone ID: uC-osflM202093d12b1
tttcgcatggagaaggcgtcttcggcagggggctcaaatggaagggatgatggcggaatcaatggtttcgccattggagcaatggtgatagctgcgcttcttgcacctctgattatcttgcgtgtgctgaggaggaatcattcctgtcccgtctcatctcattactacacggatgagtcaggccgctggaattcttcagcagccaacatgaagtcactggagcattccccatcgatgggctgtaagacaccgcctgctgttcctcgcaagtcgatgagtgacaatgagtttgagaacaaactgaatcattctaggcgaatcacagaccccatcagcttgctgaatcattcatcatcagacc

SEQ ID NO: 23504 - DNA, 475 bp, Oryza sativa
  Clone ID: uC-osflM202093e01b1
cccacgcgtccgcccacgcgtccgcgaaagcgcaaaagcaaagccacgcttttcgtcaggttgatctctccccgcattggccctggtacacttgttctaggcggaggtgggggagaagggggaaaaggagtcggctttcggggagatggcgcgcaatgcggcggacaaggggacgtccatcgacgcgcagctgcggatcctggcgcctaagaagctctcggaggacgacaagcttgtggagtacgacgcgctgctcctcgatcgcttcctcgacatcctccaggatctgcatggggaggacatcagggagacggctcaagaatgctatgaattagctgctgagtatgaaagtaagggttgaccccaaacagctggatgcaattggaaatgtgttaactcgtttagatcctggagactccattgtgatgacgaagtcattctcacacatgcttatcctggcaaacttggctgagga

SEQ ID NO: 23505 - DNA, 371 bp, Oryza sativa
  Clone ID: uC-osflM202093e02b1
ctctacccttcaagaaacaagaaagataacaccaacaaactagctagctcgccaatggcctcgttgtcctccttccggctctctgtggcagtggcggcattgttggtcgtcggctcgtgcgccactgaggtcaccttcaaggtcggtgagggttctagcggaaaaagtctagagctcgtcaccaacgtcgccatctctgaggtggagatcaaggagaagggcggcaaggactgggtggcactcaaggagtgatcgactaacacctggtcgctcaagagtgaggcggcgctcaagggccccttctccgttcgcttccttgtcaagaacggcggctaccgtgtcgtcgacgacgtcatccccgaaagctttta

SEQ ID NO: 23506 - DNA, 474 bp, Oryza sativa
  Clone ID: uC-osflM202093e03b1
gtgaaatccggaaagctgctcttaatacacttgccactgcatacaagaaccttggagatgatgtatggagatatgttggaaaactttcggatgctcaaagaagcatgcttgatgatagatttaaatggaaggctcgagaaatggataagagaagagaaggaaggccaggtgatgctcgagcagctttgagacgttcagttagagagaatgggtctgatattgcagagcaaagcggggaagcggtttcccgttcaatggcagggtcaatgatttcaagggaaaactttgggtattctgatgctcatatggtacccaggcagatggcaaccgcaacacctggtccagcagattggcgtgaagctcttgatattgctgcactaggtttgcctgagcagtctgttgaaggaatgaaagttatctgccatgagctaactcaggcaggttgatccctgaagctctgtccttgatgatctg

SEQ ID NO: 23507 - DNA, 452 bp, Oryza sativa
  Clone ID: uC-osflM202093e04b1
cgcccttctagaaccttcccgcgtccgccaatggcgacctgctcgtgggccgccaccacggcggcggcggcgcccccccgcccgcccgccaggtgccgctcgcgcgtcgccgcgctccgccgcacggccgccgcctccgccgccgccgccagctgcgtcctcgccgaagcgcccaaggggctcaaggtggagcaggcggatgcggtcgagccagcggcggcggcggcggcgcggagggacgtggggccggacacggtggcgtccatcatcctcggtggcggcgccggcacgcgcctatttcctctcacgcggaccagggtcaagtccgcggtgcctgtgctgggatgttacaggcttgatcgatatctcctatgagcaactgcataaacagcaagatcaacaagaatttcgttttcaccctatttcaactcccagattttaaaccgttgaca

SEQ ID NO: 23508 - DNA, 397 bp, Oryza sativa
  unsure (1)..(397): unsure at all n locations
  Clone ID: uC-osflM202093e05b1
gctgaatatgtcaaaggggagaacccatcaatcaccttcaaatattacagtaaagatggagaggaaggtttcccaggagatgtttctgtcaccgctagatattctattctggcaagtacgacactgaagttggagatggaggctatacctttgaataaggccacacccatcagtttagcacagcacacctactggaacctggcaggccacaactcaggagatgtgcttgcacatactgttcagattttggggtctcagataacaccggtagatgaaacctcaatacccaccggtgagatgatgccagttagtggctcacccttcaatttcctgacagagaccacaattggcagcaggattgatcaagtccctggtggttatgatcacanctttgtga

SEQ ID NO: 23509 - DNA, 407 bp, Oryza sativa
  Clone ID: uC-osflM202093e07b1
accttttagcttctcagccttttgcctctctttctactctctttcttggccgtctctcttatatccctcaatttaaccatcgagggcggccaaaaaaaagagagaaaggaagagcaaaataacacattacaccatggcgcgattcgtcatcatctccgtcgtcgtcgtcgccgccttcgccgctgccgctgtcgttgaggcccgggttggacctatcgacgtcgctccgaccaacctgatcaccaacccactcggtgccatcatcgacaatggccgcaagatcaccggcgccgtcgtcgacgagtgcgcctggacctgcgatcatgtcgcggcgggtaacaagaaggatgtgcaacacgctgaggaagctgcggcgggtgagctcgccgaaggagctcctgacgcgg

SEQ ID NO: 23510 - DNA, 409 bp, Oryza sativa
  unsure (1)..(409): unsure at all n locations
  Clone ID: uC-osflM202093e10b1
atggccgccgcgctcgccgccgccgccgccgccgccgccgccgcccaccaccaccgcctctcctcctcctccccggccgcgcggacacgagtagttcaccaccaccgccgccgccggtcgtcctccctctccttctccgcgccagcctcttcccacggctgtcccagaggcgcccgtgcgctcaggcgcgccgccgccggcgatggaggcggtaacggcagcggcggcgtcagcaccggcacggtggacccggccgccgcgtcgtcgccgtcgtcgtcgctggaggagctgtaccggagctgcgcgacgtggacgtggggcgngatggcgcgtgaactacctggaggggggggagggcccgccgctgctgctcgtccacggcttcggcgcctcccgcggccactggcgc

SEQ ID NO: 23511 - DNA, 327 bp, Oryza sativa
  Clone ID: uC-osflM202093e12b1
cttcctccccgcctcccgctcgttgccttcgccgccgactcacgccgccgtgatttgagttaggttttttttttttttttgctctgaccagacttgccggcgaaggaaccaccggcgggcaccgcctctcctcggcaatcgttgccggggataaagtggggtcgctaagggagcggtaggttggggggtcttgggattataaaatgaggaggctgaagcattccttatcggttgtcatgcttggcaccgactgacgctgctgttgagccctatagggacatttcgcttgtgcaccaacttgacccgactatttttggtacatgcccc

SEQ ID NO: 23512 - DNA, 457 bp, Oryza sativa
  unsure (1)..(457): unsure at all n locations
  Clone ID: uC-osflM202093f01b1
ctagcggcgccctttttttttttttttacaaccaacaaaagaaatgatataatctcatccaaaactgtccacctccagttagtgcataaatagcagacaagaaaatgctttgcccctgtaccgtacttctagcagctaaaatgcaaatgtgatttctgtccctgcctcaggctttcatttccccacccacattcgcattcacctcaatcacccaaacacagctgtatggtactcctagatatataccacatgagctccgggaggtgaagcagtaaatatcccaccgatataatacttatcttggcgtagaagagctcctgtgaaatggtatccgctgtcagtcgagcaagacgaattcaggtcaagcaaatggagaccctggtccatgtatgcgcggcacaaaatattgccttcaggnngggatcgatcgatgttgcctgctgtcagttgtgaaatc

SEQ ID NO: 23513 - DNA, 444 bp, Oryza sativa
  Clone ID: uC-osflM202093f04b1
tagaaggtgaaggtgaaggaggaggcggccatggcgagggagcaggcgctgctgttgacggagatcgtgaaccgcggcgtggagccgtcggggccggacgccgggtcgccgacgttctcggtgcgggtgcggcggcggctgccggacttcctccagtcggtgaacctcaagtacgtgcggctcgggtaccactacctcatcagccacggcgtgtacctggccaccatcccggtcatcgtgctcgtctgcggcgccgaggtcggcagcctcagccgagacgagctgtggcgcaggtcttggggcgaggccacctacgaccttgccaccgctctcgccttccttgccgtcctcgccttcaccattttcgtctacatcatgttcaggcctaggcccgtctacctcatcgacttcggctgctacaaaccagtcgacgaactcaaggtg

SEQ ID NO: 23514 - DNA, 470 bp, Oryza sativa
  Clone ID: uC-osflM202093f05b1
cggacgcgtgggttcatcagcgaggtatccaccattggcagtatccatcatgtcaatgtagtacgtctagtggggtattgtgcagaggaaatgaggagagcacttgtgtatgagtacatgccccatggatctcttgacaggttcatcttctctcctgacaagagtctctcttgggacaagctcaatgagatcgcattgggcattgctagaggaataaactacttacatcaggggtgtgatatgcagattctacattttgatatcaagccgcacaacatccttcttgatagcaatttcgtcccaaaagttgccgattttggcctcgccaaactgtacccacgggataacagttttgtgccagttagcgctgcacgaggaacaataggttatattgctcctgagatgatatctggagttttggtgtcatatctagcaatctgatgctatagctttgggagcttctgtgggag

SEQ ID NO: 23515 - DNA, 424 bp, Oryza sativa
  unsure (1)..(424): unsure at all n locations
  Clone ID: uC-osflM202093f10b1
ctcgatcgatcgacaaagctatagctagcccagtcatggccgcctctcccgcaatggcgacactcctcctcctcctcctccatgctgtcctcgtcgcggcagccgatgccggcgccgccgataaggaggcctatgcggcaacaggatcaaccgctggcaaggagaccgctgcggcggccgacaaggagacctctgcagcggccggatcaaccgcgggcgccgtccctgaccccaacatcttcaacaaggagggccgtgtgccccaagacgacggacgagaaggcgtgccagcaactggtgaaggtcctgccgcccgagtttgcagagacgaaagacgccaagggcctcgccaagctgtgcatctncagcgcncgggttctcgcgggagcagttcaccaaggacgccatgcccgcggcaggagtg

SEQ ID NO: 23516 - DNA, 426 bp, Oryza sativa
  Clone ID: uC-osflM202093f12b1
cccagacaccctcaaaaaccctaagcccctccctcccgccgacgccgccgccgccggcatgggctccgcctccgcttcctggctcccggcctccggcggcttcggcgagaacctggtcctcatcctcgacttcggctcgcagtacacccacctcatcacccgccgcgtccgccagctgggggtcctctccctctgcgtctccggcacggcgccgctcgcctcgctcgcgggcctccgcccccgcgccgtcgtcctctccggggggccccactccgtacacgcctcgggggcgcccacgttccccgaggggttcctcgagttcgccgccggcgcgggcgcccacgtcctcggcgtctgctacgggatgcagctccctgtgcagtccctcggcgggcgccgtcgaggcccgcgaagagcatgagtacg

SEQ ID NO: 23517 - DNA, 481 bp, Oryza sativa
  Clone ID: uC-osflM202093g02b1
ttaagccttccttcgcccttgtcgtccaaccctcctctcctcccctcctcgtcgcggggctagggttacgccccctcctcctcctcctcctcctcctcctcgtgtgggggcatggccgggagcgaggcggcggcggcgcaggaggcggagatggacccggacttctcgggcgggggcggtgggggccccagcttcgagttcgccttcaactcggtcaacttctccgaccgggtgctccggatcgaggtcgtcgcgggggacgacgacgacgacgacgaccacgcgcccggctccagccgggacggcggggccggctcgctctcggattgggcgcgccaccgcaagcgccgccgcgaggagctcctcaaggagaaagagtctgaagcagtcatgcccgaccagataaattgcaaagtagaaccagaagaatgtgatgcatatgaagaaaatccagaagaacctgtagcaatgatggacgact

SEQ ID NO: 23518 - DNA, 468 bp, Oryza sativa
  Clone ID: uC-osflM202093g03b1
gctctcttcgctcgcggcggcttctccgcctccgcctccgccgccctctcctcctctcgcctcgccgccggcgccgccagccaccgcgcgggtcgggcgggccgtatcttcctttctgttccgatggcttccgcgaaggtggagaaccgcggcggcggtgggttcggttcgaagaggtcacgcaacgacgtgtctgtaagggagggggactggacttgtcctcagtgtggtaatgtcaacttcagttttagaaatgtttgcaaccgcggagcctgtggtgcaccccgtccatcaccgagtctaagcccaagagtgccacctcctcctgctgctggatatgatcggccacatcttggatatgatcggccacatctgttttatggtagtgctggcaccccacctcctattcctcttggatctggtagctatggtgccccctatccacatcttggcttgcggtatggatat

SEQ ID NO: 23519 - DNA, 476 bp, Oryza sativa
  unsure (1)..(476): unsure at all n locations
  Clone ID: uC-osflM202093g05b1
taatttcatggacacaacgacgaccatggcgcctctccctctcctcaccacgacgtctctgctgctcttcttcttcctcgcgtcgtcgttcgccgccgacttcgtcgtcgcgggcggcggcggcggcggcggctacgacgacggcggcgacagcgaaggcggcggcggcggcggagccaagatgccgcacgtgaaccacggcaggtacaagtgcgggccgtgggtggacgggcacgcgacgttctacggcgggcgcgacgcgtcgggcacgacggagggcggcgcgtgcgggtacaaggacgccgacgggtacggcgcgatgacgcgggcggtgagccccgccctgttcgacaacggcgtcgggtgcgngcgcgtgctacgagctcaagggggatctcgggaagacgttcgtggtgacggccaccaaccaggcgccgccgtcagtgacggtatgaagggcgagcacttcgacctca

SEQ ID NO: 23520 - DNA, 473 bp, Oryza sativa
  Clone ID: uC-osflM202093g06b1
tttgcgctccgtcttcacccaccgctaatgagtgctgctccgccagtcacacaacgacttctcagtgacaacgaaggatggcaaagagttcgacatcccgaagggccacatcgtcgcgacatctccagccttcgccaacaggctccctcacatcttcaagaaccccgactcatacgaccccgaccgctacgcaccaggcagggaggaggacaaggcagcgggcgccttctcgtacatctcctttggtggcggcaggcacggttgcctcggtgagcccttcgcctacctacagatcaaggccatatggactcacctgctgaggaactttgagttcgagctggtctcccccttcccggagaccaactggaaagccatggctcgtcggcatcaaggacgaggtgatggtcaacttcaagcggcggaagctcgtcgtcgacaactaggatgccaccttcaaccttaggagtcgatgc

SEQ ID NO: 23521 - DNA, 329 bp, Oryza sativa
  Clone ID: uC-osflM202093g07b1
cgaacctgccggaggacctcaaggagaggttcgcggagtacgccagcagcggcagagggcagaaggagatgagcttcgacctcgacgacaagatcatcgccgccgcctaacaacacccatctcatctcacctcgtcatggtcaaatacaaatacaaagtgctcggggatctcttcttctcgtgatttattttcttctccctctgtttctttggttcctcttctcataccggaagcatagagaaatgcaaaactgaacaattatatatgtaaatgctaggaaaatgctgttacaaataagtgaataagatgagttttcgcttttcgtttt

SEQ ID NO: 23522 - DNA, 428 bp, Oryza sativa
  unsure (1)..(428): unsure at all n locations
  Clone ID: uC-osflM202093g08b1
ttggcccccattcctcccccaccccggtggcctcccctccgccgctcgcgtcgccgcctttttcccctatggcgctgccgaatcaggggaccgtggattaccccagcttcaagctggtcatcgtcggcgatggcgggactggtaaaactacatttgtgaagaggcatctcactggagagtttgaaaagaaatatgagccaaccattggtgtcgaagttcaccctctagattttaccaccaactgtggtaagatccgcttctactgctgggacactgctggacaagagaagtttggtggacttagggatggatactatatccatggtcaatgtgcgataattatgtttgatgtcacttcaaggctgacttacaagaatgttccaacatggcatagggacttgtgcanggtgtgtgaaaacatccccatt

SEQ ID NO: 23523 - DNA, 481 bp, Oryza sativa
  Clone ID: uC-osflM202093g09b1
tcggcgacctccaccaactccgatcgaacagcccaatcgaccatggccgccgccgccgcccgttccggcgcgcatccgccatcgttcgcctcctcgctcggccggtgcagggttcttccagtcgtggtggtgcgtcggccgggcggtgccgcgaggccgtcaccgctgctcgctccggcgaggtgcgccgccgccgtcgggacggcggcgcccaaggtggagggcggcggacggcggtcgtcggagcaggggcagctggcggtggcgccggcgcggctggtggatgagctggtcgaggaggcgctggtgtggtcgtcgcagcacggcctcgtcgttggcgacaagaaccacccgagatcaggaaaagctcccggtgttggtttgctccatgccccatttgctctactgccaatgtcattttcgaaagtttactgggatcaggcggttgaattggctcccctttttaatgagcttgttgatc

SEQ ID NO: 23524 - DNA, 376 bp, Oryza sativa
  Clone ID: uC-osflM202093g10b1
tcggcacatcggacgccaagccccaggaaagaggaacgcacgagcagcatatgtcacagagggccagcgtcccacactcctactccatagccttcgccctccattcccatctcctcgtctccagtgagatgtgccccagctcctattggcagcaataggaatagaaaagattgctcctttcttttgagctttcttgcaattttggtcttctttccttttgatttggtttctttccgtccgatttgtgaagaggaggagcaatggcgttcaagggatttgggcagggtggcatcgcgtccatcgacgctgggtgctcgacgcacccgctcgatttgattaaggtgaggatgcaactgcaggcggaggcgccagcggc

SEQ ID NO: 23525 - DNA, 478 bp, Oryza sativa
  Clone ID: uC-osflM202093g11b1
acgagttcctttttttcgtgaaccaaatcacacctcgcctgcagtgtctcgtgtcccagaacgcgattgcgttttttttttgcacgtttggtttccatatccctcgtctcttgtactcccttacccacatttggcctagccggaggcggtagccagggcccagggctgcttcttatggccgcgcaggagatggaggttatgatggttgcgatggcggcggaggcgccggtggctgtggaggtggaggcggctccggcggtggcgggggggctaaacgcgacggtgcccgcgttgtacgtgggcgatctccacgaaagcgtgcgggaggagcacctgctcgaggtgttcggcaagattggcaccctcacgtccgtgcgcgtctgccgcgacaatgccacgagcaactccctcagatatggatacgtgaattacctctcccaggctgacggtatacaaaaaacctgtgcatgatctgtgt

SEQ ID NO: 23526 - DNA, 470 bp, Oryza sativa
  Clone ID: uC-osflM202093g12b1
tcggggagaacgtcggcaagctcgttgaggcatgcgtcgccgaggtggcgctgtcagcgattagcaaggaggagaccgtcgcggctgtgctcgccgcgctggccaagcgcggcggtgcggaggcgatcgtcaatattgtcggagtcgtggctcgtcttgtggcggcatttatgttcggtacggactgtgccagggtgaactccacggttgcgctcgtgctgctttgtcggggcctgggcgccgccggcggtgacccatgtcatggtcgtgccctgtgtgcaatgggcgatctgggagctgatgagcattggctctgagcgcgctcggcggaaggccgcctcgctcggcctgatatgccggctgtgggcagacgtcttcgtcaccacggtgagcgaggcggcggttgccccgttgcccaccgggtggcccctgccatgatggttttttgaaacccattacaactggcttgg

SEQ ID NO: 23527 - DNA, 340 bp, Oryza sativa
  Clone ID: uC-osflM202093h01b1
tcccggttcggttcggttcggttcgggtccggttcgatttcggtttttccttcggttcgggggttggtgggaaagcatggcggcgccggatgttgagtaccgctgcttcgtcggcggcctcgcctgggccaccgacgaccgctccctcgaagccgccttctccacctacggcgagatcctcgagtccaagatcatcaacgatcgggagacggggaggtcgcgcgggttcgggttcgtgacgttctcgagcgagcaggccatgcgcgatgccatcgaggggatgaacggcaaggagctcgacggccgcaacatcaccgtcaacgaggcccagtcgcgccgc

SEQ ID NO: 23528 - DNA, 202 bp, Oryza sativa
  Clone ID: uC-osflM202093h02b1
tgtcagaggcgtgaccgaatcggctagcgagtgagagaggaggagcagttcacaggtgcagttccacgctcacagcagtgtccagagcagagcgcgaagggaagagggcgcacagaggaggaggagaggcagccatgggcgaggaggagaaggtgaaggaggaggcggcggcggagaaggggaaggaggcggcggtagcgga

SEQ ID NO: 23529 - DNA, 472 bp, Oryza sativa
  Clone ID: uC-osflM202093h03b1
ttacgagcagcaggaaataacgtcgtcctcctggtgtggccggtgtcactgggccacacaagtccccgtgcacgagcccgagccgctccttggctcggaagctcgtctgctggggaaaggggagccgccgctgctttgtcaccacgcagacgtcgcagagctgctccacgtggtcaaggcacggcatgcctcgcaccatctccttggcactgagctgcttcagggcctcgaagtggaggtgcccgaagcgctcgtgccactgccacgcctcgtcgtcccgacgagcggcgaggcaaactggatgtgcgacctgcgcgctgaggatgtagagtcgattagtgcctctggttaccttggcaagaaggcgacgacggcgatcccaaatcctcatgagttcgtcctcgaccaacacgcgtgagccgttctcatcagctgtcccagctgatgatagaattcctcaacgggggatgta

SEQ ID NO: 23530 - DNA, 397 bp, Oryza sativa
  Clone ID: uC-osflM202093h05b1
gagaactcctgatcaggtcaagaaaagatcggtgcagaaacaaaaacatttatctcaaggacttccaggtgatcctggtgagcttcagttaatggaagggcatctgagtgacccgaatgctggggaagcctcaggtgctctggtgagcaaagatgatgacctggaggcagctagagaagagttgatcaagggattccttgacattgataacggtggacggaaacttgggataaaggaaatgcgacagttgaatgagaaaggtgttccagattgcatgtcttgctaagctacctccagaagaagttggcgaggcatcgtatgaactatactcatcgtggcagaagcaactcagtgacctaagctggaatcccttcaagacatcacaagtgatggtaac

SEQ ID NO: 23531 - DNA, 361 bp, Oryza sativa
  Clone ID: uC-osflM202093h07b1
tttgcctgaaccaagaacactgccctcctccacacgacatggcttctcaagaagagaagacgagcgtcaagtcggaggaggcctcgtcggcggcggaggagcagccacctcaagctgcagctccgccgccgcgcaggggtgtgccgacggccaaccccttcgacttctcaaccatgatgaacttgctcaatgatccgagcataaaggagatggcggagcagatcgccaaggacccggcgttcacggagatggcggagcagctgcagaagacggtgcagtcgccgccggcgcggggggcggcgcaagaagctgcggcggcggttgcgccggctctggacccgagcaagtacgtgtcggcgat

SEQ ID NO: 23532 - DNA, 377 bp, Oryza sativa
  Clone ID: uC-osflM202093h08b1
tttaaaaaaaaaggaaaaaaaaacaaaacaggccaagccaaataaaagcggcgatgggatcgctcaccaccaacatcgtcctcgccgtcgccgtggtggcagcgctggtcggcggcgggtcgtgcggcccgcccaaggtgccacccggcccgaacatcacgaccaactacaacgccccgtgggtccccgccagggccacctggtacggccagccctacgggtccggctccaccgacaatggtggcgcgtgcgggatcaagaacgtgaacctgcctccctacaacgggatgatctcctgtgggaacgttccaatctttaaggacggcaggggatgcggctcatgctactaggtgaagtgtgagcagccggcggcgtgc

SEQ ID NO: 23533 - DNA, 492 bp, Oryza sativa
  Clone ID: uC-osflM202093h09b1
tttatttcagaagtccgacctgttcttcatgggcatgctaaggcctacatgagaacaatatcaaaatcgacgaaacagagattcaggcagcgaagtggatgccgctggaggagttcgtcaagcagccgttcatccagggggaccacatgttccagaagatcatggacatctgcatccagaggctcaggaagtgctactgcggcctgaccgcgcacaacgtcatctccaggttcgacggcaggaggtcgacgctgtactacaacgtttctgaacctgaggatgtgaactgcaatgcttcttgacaacggatcgcccaaccttccgtcaggttcgcgttgtgatctagcattaggctctgtgcaatgcagtgcagagtctcgagtacagcgacctgggtaactgcttgtgaagcagaaatcctctgtaaatatgaaaaggagataggatttatggcaggtcgggtagctctgaccggctgttgcagtttcacgt

SEQ ID NO: 23534 - DNA, 461 bp, Oryza sativa
  Clone ID: uC-osflM202093h10b1
tcgattgcttcttgtcatctgcatcaattggtctcttatgtcttttgctagtatcctaagtcatttgctagtatatcaatgtcatctacaaatcaatttcctatgtttcctatcaagtccatcaaagtccatcggttcgtcgaagtcatgcttgtcaatcattatcactatctcgctcgctccatgtcgaagttagccttctatcatcaccagaagctccacgtcggagctgatctttgtcatatcaccagctccccatcggagttgacatcatcatcaatcattgaagggccgaagaacagtttgtgaaggtccttcatctcgtcatcatcaccgtctctgaatcagtgaagagccaaagaacagtttgtgaaggcttctggtactaagggctgaagaacagtttgtgaaggctcgaggtctacttattgaggatggaatggtttctcttttttaattca

SEQ ID NO: 23535 - DNA, 357 bp, Oryza sativa
  Clone ID: uC-osflM202093h11b1
actgactgctcgaccagcagcaataggctctggtttcctcttcttgcaagttgcatgctccctagtccctagacttgaacagttgagcccttcctgattttgtggttctagaccacctctggcttgcagcgagaagcaacgttcgctcgcatgacgttccagctccaagattagttggaggaactgttctaaacacagaataatactacctatttcgatgcgaaaagtatgccaatttggccgtacattacgccaaggtgtgctcttgctctgatgttgatcggacccctacgaaccaagggataagagttttgcttccttttgtccctccactgtgtttgcgatcggtgtggcgct

SEQ ID NO: 23536 - DNA, 81 bp, Oryza sativa
  Clone ID: uC-osflM202093h12b1
gcatctttcttgctgagcaccaaggggctcttttaacctatgtggggttgttatatactagcaaggtggaaaaccttcaca

SEQ ID NO: 23537 - DNA, 487 bp, Oryza sativa
  Clone ID: uC-osflM202094a01b1
atttgttttagcaactgcacagaagctgtttgtaaagatgctatggtgtgtttttcgagcgccaatgtcattctttgatactacaccatctggtcgaattttgaaccgagtttctgtagatcaaagtgtcgtggaccttgatatagcattcagacttggtggatttgcatcaacaacaattcaactacttggaattgttgctgtcatgagcaaagtcacatggcaagttttgattcttatagttcctatggctgttgcatgcatgtggatgcagagatattatattgcttcatcaagggaattgactaggatcttaagcgtacagaagtcgtcggtgatccatttgtttagtgagtcaattgctggtgctggtacaattagagggtttgggtcagagaaacgattcatgaaaagaaatctttaccttcttgactggtttgcttggtcttttttttcagcctggcagctattgaatggttgtgcctgc

SEQ ID NO: 23538 - DNA, 236 bp, Oryza sativa
  Clone ID: uC-osflM202094a02b1
tcggtttattagtgtcaagatggctactactaagcatttggctcttgccatccttgtcctccttagcattggtatgaccaccagtgcaagaaccctcctaggttatggccccggaggaggaggtggaggtggaggtgaccttgatattacagctggatctggaggattggcatggacaccagtgcaattacttggaattgttgttgtcatgagctaagttacatggctggtttgga

SEQ ID NO: 23539 - DNA, 428 bp, Oryza sativa
  Clone ID: uC-osflM202094a04b1
atttgtgatgggggtcttattgtgagtgttcttgagatggcatttgctggtaattgcggtgttaagctgaacattgactcagaagattcgggccttcttcaagcactctttgccgaggagcttggccttcttcttgaagtgcacttgaaagatctcagtgttgtgaagcaaaagcttgaagcaggaggcatttccgctaatgtaattggacaagttacagcatcaccagatattgagctagttgttgatggcaggctgcatctcaaggaaaaaacttcagatctcagggatatctgggaggaaacaagcttccagcttgaggggctacaacgcctgaaatcttgtgtcagacttgagaaagaaggacttaagcacagaacatcaccattggggtctttgtcttttacttccaaatttacagatgaaaa

SEQ ID NO: 23540 - DNA, 407 bp, Oryza sativa
  Clone ID: uC-osflM202094a05b1
gcattgttactggacatactctactactactagccagtaagctagctaactaactacgtggctatggcccccaccgtgatggcctcctcggccacctccgtggctccattccaagggctcatgtccaccgccggccttcccgtcagccgccgctccaccaactcgggcttcggcaacgtcagcaatggcggaaggatcaagtgcatgcaggtgtggccaattgagggcatcaagaagttcgagaccctatcgtacctgccaccactcaccgtggaggatcttttgaagcagatcgagtacctccttcgatccaagtgggtgccttgtcttgagttcagcaaggttgggtttcgctaccgtgagaaccacaggtcttccggatactacgatggcaggtattggaccat

SEQ ID NO: 23541 - DNA, 398 bp, Oryza sativa
  Clone ID: uC-osflM202094a07b1
tttcttctcctctccaaaccctagcaaaggctatctctctcttcgccgccatggaggatgacgacgcggggggcggaggcggaggcggcgaggcgtccccgccgcacgcgggctccgccgcggcgatggcgggggcggggagggacatcgcggcgtcgccgacgagctcgcggtcggtgacgcagacggtgaacgggtcgcacaggttcgtgatccaggggtactcgctggcgaaggggatgggggtgtgggaagcacatctcgagcgagacgttcacggtgggagggtaccagtgggcgatctacttttaccccgacggggagaaccccgaggacaacttcgtctacgtcttcgttttatcgcgcttgcctcctagggcacccgcttccgggccctt

SEQ ID NO: 23542 - DNA, 369 bp, Oryza sativa
  Clone ID: uC-osflM202094a08b1
ttttcaccggcttctttcccctcctctccggaccagggaagcagctaactgtctgcgcaagaaaggtggttcaagcacgatgggacggaaccatctttgcctggtcacttgcttgtggattctgtcatgcgcagttctgcttcatgcttctcctgatggattgctgagaattagcctgaataagaagagattggacaagaagaccttggacggtgcaaaattggcaagggaggaaagccatcgtctgagagccgacggtttaggtgatgacatagttcctttggacaactacctggacacgcagtactttggagagatcggcattggcactccaccacagaacttcactgtgatatttgacactggaag

SEQ ID NO: 23543 - DNA, 313 bp, Oryza sativa
  Clone ID: uC-osflM202094a09b1
gttgcattgaatcatccatcatcaaatcattgggatatatattccacgatggccaaggtaatcacactaatccttgtcgttattacagtgtcaaccatgctagcctcacctgtggaatgcaccaagattcctggtgcctttcctattggaatgtctccatacaactttacgacaatgatagatatcttcaaagtggccatgttagtgccaacggaggattgcacctccaatgttgagatgtgcataagtgagacatgctcctacattagaaaagcccttgatggtgttgttgatgctgccccaccagcaaaac

SEQ ID NO: 23544 - DNA, 381 bp, Oryza sativa
  Clone ID: uC-osflM202094a10b1
tttttgttcagggggtactgtatggctagtagccaggatgctagctaactaactacgtggctatggctcccaccgtgatggcctcctgagccacctgcgtgggtccattccaagggctcaagtccaccgaaggtcaggctaaaagaggctaaataacctgacgagcgatatggcaacatcaggaaaggcggaaggatacatcacctacacatctataattgatgggggttgtaagagtgtgagggcctatattgcctgtcaaggtcttgaagatgatggaacttgagggttgactggcaaacgcctggacccacaagagtttgctggttcgggttcaacaagatataaaactacataaggcgatggctcttttaactcaga

SEQ ID NO: 23545 - DNA, 496 bp, Oryza sativa
  Clone ID: uC-osflM202094b01b1
gattccaagccctaaacctcccgaatcggtcgaggcggtgctcgatccggccgttgcatctccggattcgagcggggggcgttgccgcggtgcccggatccggaggaatcgcgccgcggcgggttttctagggttccacaccgtcgcgcgtcccggcgggtgttcatgaaggccatggggtacaataacccctacgattccagcgggactgacgacgatctccctccaacacaaaatagaggattaagagtgcgatcttttagtgcgaatggcagggcatctgttatgccattttcttacattaggccgcacggtgatttggagagtgaaatacatcaggttgagcaagaggcgtacactggtgttcttagagcatttaaagtgcaatctgatgctatattctgggaaaaagaaagattgatcactgcactcaggaaagaaataagagtctctgatgatgaacacagggaactattaaacaaagttaatgaagatg

SEQ ID NO: 23546 - DNA, 362 bp, Oryza sativa
  Clone ID: uC-osflM202094b03b1
catttgcaccacaattccaacggatagataagaagggaatgtttcagtcagagggaatacagtgccttactgtgattcatgctggaaaactctactggattgtgaaagggaaccaggtggaatgcaatagatttagctagcgtatgctacatttgcatacacagttacaatagcatgtgttggagaaaaatataggaatacaggaaaatagagattctgtttgaatttcatggcaatttgacaagctcttcgcagaacaactctcccatttctgtaatgagctgtttcttgtaattcctattgcaacacataggcgttactgaatgttgataaatgatattgccatcgcaatttttttttag

SEQ ID NO: 23547 - DNA, 226 bp, Oryza sativa
  Clone ID: uC-osflM202094b04b1
ctctgatgaagatggcgataacctcgaggcgagcagcggtgacgaccatagggacgagcagccggacaccccgagcggcggcggcggcggagtcaagggcgacttgtcggagctgaccgactccctcacccgcggcctctggggcgtcgcttccttcctcgctccgccgcctgcgcccgccgccgaagccgcggagacggctacgggggcggtgggggagggggga

SEQ ID NO: 23548 - DNA, 459 bp, Oryza sativa
  Clone ID: uC-osflM202094b05b1
catatttagctacaagcgagccaatatcaagggcagggtacatctactgctacttcttctactgtggttccagaggatcttgtgcagatacaatcatatcttcggtgggaaagaaagggaaagcagtcatatacacctgagcaagagaaggaggagtatgaagcagcacgaactgagttgatagaggaattaaacaagggtgtttctttggagaagctacgagcgaaactgacaaagacacctgaggcaactgatagtaatgctcctgcatctgaaagcactgtgactactaaagtcccagaggaacttgtacaagttcaggcttacataaggtgggagaaagcagggcagccaaattatgccccagagaaacaattggtcgagtttgaggaagcaagggaggaactgcagtctgagttggataagggaccctagtgagcagttgaggaacaaattttg

SEQ ID NO: 23549 - DNA, 342 bp, Oryza sativa
  Clone ID: uC-osflM202094b06b1
ctctccttcctcctaaaccctacgaccatgccgaccctcgccgccgccgccgccgccgcccgccgcgccggcggggcactgcgatacgccgtgctgggcggggttcggtcgctctcatccctgcagccgtcatcctcctcctccgccgcagtcgccgccagcgaggaggtgctggtggaaggcaaggtcagcgcgcgcgccgtcgtgctcaaccggcccggccatctcaacgcgctcacgaccaccatgggagctaggctcaataaggtttatatgtcatgggaggacaaccctgatattggctttgtcatgatgaaaggcaacgggcgagcattttgtgct

SEQ ID NO: 23550 - DNA, 353 bp, Oryza sativa
  Clone ID: uC-osflM202094b07b1
gtgtgcggccgacctttcttttctttttcagtatgaagactcacgatttatagcgtaccaaaatacaaggatctacaaggtataataccagaattacaaaatagtagtttttggacgcgagtatccaggactattatgactatgaacgaaggaaacaagagacagggaaagaactctcagtggacctaatattacaacatgacaacgagaccgtgggtatcagaactctcagggaacctacatcacagcatcacaagagaccgaagtatgagtataagccgggagcacagtgaacaaactttcagtgaacctagtatcacaacatcacaacgagaccggggctatcaaaactc

SEQ ID NO: 23551 - DNA, 358 bp, Oryza sativa
  Clone ID: uC-osflM202094b12b1
tttttgatcttgaattcttgctttactacagatcctttacgaagaagcttatgtggtttgcatacatggcgaccactatagcgtttgcaacgggtttatacaccgtgttggccccacgaatgctgtggttagctgttggaatttgtttcctttcggttttactgcccattctcactaagctgctaggtgagtggcctgtcgtgaagctcaaatttcgtttgggtaagactttcaagactgatctccttgatatggtatgacgtcatcaaatttatattatttgttctgctttccaacactacatataaagttcatgcagaatgtatgttgcaatatatacattttattttggtgatat

SEQ ID NO: 23552 - DNA, 427 bp, Oryza sativa
  Clone ID: uC-osflM202094c03b1
atccgatccgatcccgacaccaccgtctccggtggtagatctggatcggagccaccccgccgccggcgatccccggcatcctcgccacccatcggtagcccctccgtcgtcgcagtcgacgacgacatggacgctggccccgccgccgtcgaggcgcacgacgggcagagggagcggttcgacctcggggtgttggtcggcgacctcgccctcgacgaggatgtcgccagtgatgaggacgagtcgctggaggggttgaggcaggagctcgacgactgcaaggacgacgaggaagtggcaaatatcctggctaacggcatcaaactgcgtgattacacaaaaggcgtcgagaacaacattcgccaaattgagctggattctatacaggattacattggagaaagtgaaaacttggtatcgctgcatg

SEQ ID NO: 23553 - DNA, 311 bp, Oryza sativa
  Clone ID: uC-osflM202094c04b1
aatgatcaggggttgttttatgcattggatcttggaggaaccaacttccgcgtcctgcgagtccaactcggtggcaaggagaaacgtgtcgtccaacaacagtacgaggaagtctcaattccaccacatctgatggttggaacttccatggaactgtttgattttattgcttctgcattgtcaaaatttgttgatactgaaggtgatgatttccacctcccagaagggagacagagagagctgggcttcaccttttccttcccagtgagccagacatcaatatcgtcaggaacgctcattaagtggacaaa

SEQ ID NO: 23554 - DNA, 422 bp, Oryza sativa
  Clone ID: uC-osflM202094c06b1
cccatctctcctcctcctcctcctccgtgtctccgccggtggtgccccggcgagctctcctccgccgcctcggcgcgccacctctcctctcctcgcgccgcgggggagaagccgaacgggcgccggagacacggcgcggattgcctcaccccccttagtggccgtatcaactatcacccttggtgcgcggcctcctcgcgcgcgcgggaacggcgatcgtatcggggtcggatcggattggaggggagaaaaactcatcaagtaattgaaggtggtgaatacacttttacggggcattatcatcgttcctaggttcagctgcaaaaagttaaagcaaattgccaaagaagacatctgaagagaataaagctgttgcacataatgaaccactacccatggagcagacattaagctctggtgct

SEQ ID NO: 23555 - DNA, 437 bp, Oryza sativa
  Clone ID: uC-osflM202094c07b1
tttgagatgacgtgaacactatgagaagaaagaacttttatctcttgagaagaacaaaaaccttcagatgaggagtccaaacagggcacaaccgcacattcatacaaaccgtatgtgagtatatggacaactctatttgatctgcatggtaaggtgttctttttttcaaagcattcagtacaatgatgactgttgctgcaaagtaggcctattggtagtctagaattttcaatcctgtttccaacaacagtacacagggagatattgaaaggaacaacctgaacctattgttctatccctttgtatataagcttattctgtctccaaaacataacttgccttctgaataatgtttattgaaatatatctttattggaggtacaattcagacactgatttatattattggtcttttcaagaagtatttatattattgt

SEQ ID NO: 23556 - DNA, 466 bp, Oryza sativa
  Clone ID: uC-osflM202094c09b1
atcctcttctccaccaccgtcctcgtctacctccaggacaacgtcagctggaccgtcggctacggcatccccaccctgggcctcatggtctccgtcgccgtcttcctctccggtacgccgctgtaccgccacaaggtgccccagggtagccccctcgccacgatggggagggtcgtcgccgccgccgtgtggaagtggcgcgtcccgctccccgccgactccaaggagctccacgagctcgagctcgagcactacaccacccgccgcgggttccgcatggacgcgacggtgtccatggcgttcctgaacaaggcggcggtgaagccgggcgaaggaggaggaggatcggtggcgcggctgcccgggtggacgctgtgcacggtgacgcatgtggaggagacgaagcagatcgtgaagctggtgccgctgctcgccacaatggtggtgccgtgcacgctggtggcgc

SEQ ID NO: 23557 - DNA, 438 bp, Oryza sativa
  Clone ID: uC-osflM202094c10b1
ctccgaccgcgacgacacgagacttttcctgcctccgccgccggtctcggcgtggtgccctgaggcggcgaggccgccgtgagatctcagctccgccgcccgtgggaatcgagctccggccccgtgccttttcctgcccccccagctgaaaaatggggaggataccgtctctgaaaaatttcaatgccttcccccatgcggaagaccacttactaaagaagacttactctggtgctatcgtcacgattttcggactaattataatggttacgttatttgcgcacgagctcaaattttatcttaccacctatactgttcatcagatgtctgtagatctgaaacgaggagaaactctgccaattcatataaatatgtcatttccctctctaccatgtgaagtcttgagtgtggatgcaattgacatgtctggcaagcatg

SEQ ID NO: 23558 - DNA, 89 bp, Oryza sativa
  Clone ID: uC-osflM202094c12b1
ttgttcgcgtgggcgcagccgcagccgccgccgccgacgcctaccaggagaggtggcgaggcaacgctactgggacgtaggtaggtagg

SEQ ID NO: 23559 - DNA, 475 bp, Oryza sativa
  Clone ID: uC-osflM202094d02b1
aatacttcagttcgcacagacaaaggttcttgagatgctgatctcaattctcaactataaaatagcagctaaatagcacggtagatcttcagatgccaactctccaggttcatagtgacaaggcattttagacctcatagatccatgggtgctggttgctcctccactcggcgatgccctcagggaaccacagagcaatctccttcctggcgttctcgaccgagtcgcttccgtggatgacattcctgcaaggtatgaggtcatctttagaacttggattctggatacatatttaggtctatgaacagatgagaactcaaagggataacatgagtactagtagaaaggtaaatttgaaggactctagagcaccatttggtgttctgtcgaccatacttgttcttacatactccctccatatcaattgatctacgtatagtttttttgaggttatttctaaatgatctacataatt

SEQ ID NO: 23560 - DNA, 458 bp, Oryza sativa
  Clone ID: uC-osflM202094d03b1
gtttcgctccatcgacggcggcgccgcgttcggcttcccggacacccccgaggacgccgcccgcgccggcctcgtcagcggcaaggaccagatcatcgaccggagcatccaggacgcctacatcgccgccattaggagggcgcggagcttcatctacatcgagaaccagtacttcctcgggagctcctactgctggaagcccaacgacggcgtcaagccggaagatgtcggcgcgctccacctcatccccaaggagctctccatgaaggtggtgagcaagatcgaggccggcgagcgcttcaccgtctacgtcgtcgtgccgatgtggccggagggcatcccggagagcggcttcgtccaggccatccttgactggcagcgccgcactatggagatgatgtacaccgacatcgcccacgccatccaggccaagggcattgacgcccaccccaggacta

SEQ ID NO: 23561 - DNA, 219 bp, Oryza sativa
  Clone ID: uC-osflM202094d06b1
cacatcaccactttggttcctcccatttttcatttcaaagtgatactaataagcaagtgcaaggatagctagcttgacagtgtggaagtagtagtaggagcaagaggcaaattaaggggaagctgcaggtggtagatgcgtaatgcgagcggcagcagctgctgctctcgggtggcggcgccgttgcatgcgcaagtgcttggctcgccgtctccttct

SEQ ID NO: 23562 - DNA, 391 bp, Oryza sativa
  Clone ID: uC-osflM202094d07b1
gcttaccttgagaatgtaccaatagaaaatgggggctcttcagaaaagacagaagacgagtctcgaccattggaggatggcactggagaagcttctagatcaaggaacttgtattttgcaattggtgatgccaagtgccgggctgctgtccaactcctattgattcaggctgtgatggagatatataacatgtacagagctcggttatcatcacagaacactgtgatcctctttgaggcattgcacactgttgctactcatgctcataaaataaacagtgataatgacctgcgatccaagttgcaggagttgggctcgatgacccaaatgcaggacccacctatgttacgcctggagaacgagtcgtatcagttgtgcttgactatcctgc

SEQ ID NO: 23563 - DNA, 427 bp, Oryza sativa
  Clone ID: uC-osflM202094d09b1
ctcctctcctctcctcccctcctccgccgatggggaggattccttccattccatccgcgcatccgctgcctccgcggaatccgagttccgcgtactgcgctgatctccggcatcggatttcggagagggtggggtgttctctccgctcggggttgttccactcggttctgaactgggagtgtgagtgtgcagggcaaggttgttgggatttcacgtcgggtagagactaccgcgactgtcctagttatgtcagtgccgttgtatttttatacaaagcggtagatctggtggaaggatatgaactgttgcagataattgttgattctgatttgtactggtgtgacatgtgcccccatgtgttcaacttgggtagaacatgttttctgatgcttggattgtttattcagtctgcaattctacttatggt

SEQ ID NO: 23564 - DNA, 459 bp, Oryza sativa
  Clone ID: uC-osflM202094d10b1
ctctcccgcaccaagccgcctgagccctagccgccgccgccgccgcgcgccaccaccgccgcaaccatggccgccgtgctcacccgcccgccgccaggcacggtccagtgcttcgggcgcaagaagacggcggtggccgtctcctactgcaagccggggcgcgggctgatcaaggtgaacggcgtcccgatcgagctgatcaggccggagatgctccgcctcaaggcgttcgagcccatcctgctcgcggggaggtcacgcttcaaggacatcgacatgaggatccgcgtccgcggcggagggaagacgtcgcagatctacgcgatccgccaggccatcgccaaggccctcgtcgcctactaccagaagtacgttgacgaggcattcaagaaggaggtcatggacatctttgcccgctatgaccgcactctactcgtcgccgacccaggcgctgcgagc

SEQ ID NO: 23565 - DNA, 449 bp, Oryza sativa
  Clone ID: uC-osflM202094d11b1
gattgatcgaggcgtggagaagatggccgggaggggccccggcatggtccccatggagatcaagttcacccccgccgccaagaacgtcctccaggcctcccaagaagaagcgcaccagctagggcataactatgttggatctgaacacctcctacttgggttgctccgtgagcatggtgccgcgcttgttgtgctgaagaactttcaggctgatcccagcaacatccgcagtgaggttatccgaatgatcagtgacacctctgaagatcatcaacctgttagtgctgcagttgggggaggaagcagtacaactaagatacccacacttttagagtatggtactaatctgacaaaactagcagaggaggggaagctggatcctgttgtcggaaggcaaaaccaggttgaccgtgtagtgcagattcttggcaggcggaccaagaacaccc

SEQ ID NO: 23566 - DNA, 315 bp, Oryza sativa
  Clone ID: uC-osflM202094e01b1
atcgtttatctccccaagcatggtgtgctgtgggaaattgctttgccttgaggaaagatcatgagactgccttgaagaattttcaacgtgctgtacagcttgactcaagagttgcatacgctcacacgctatgcggtcacgagtattctgcattggaggattatgagaacagtataaaactataccgctctgcactttaggtagatgaaagacactacaatgcctggtatggccttggagtggtgtacctttgccaggaaaagtttgagtttgctgagcatcatttcagaagggcattccagataaatccttgct

SEQ ID NO: 23567 - DNA, 300 bp, Oryza sativa
  Clone ID: uC-osflM202094e02b1
gacacagattgagagcaagcagcgtggcgacgcccaaatcgcgcgattcgatcgaggcaaccctccccaattccctcaaatcccctatccgaaatccgccaattggccgcgtccgccacgccaagagaataaaggaaaacatcggcgtatcaacaagtgaagctgcattttcttagagctcagatgaagcggcctcgaaggcgtctgtggtgggatgactgatgagggatgatagtgacattgatgaacttgttacgggcatgctggagaccattattcaaccagcatgccccggcaggc

SEQ ID NO: 23568 - DNA, 229 bp, Oryza sativa
  Clone ID: uC-osflM202094e03b1
ggctcgtctccagctcctccgcccccgccctcgccgacgcctacgacatcccgtgggtggagaagtaccgccccacccgcgtcgccgacgtcgtcggcaactccgacgccgtcgcccgtctccaggttattgtccgcgacggcaacatgccaaacctaattctcttcgggcctctgggcaccgggaagactaccagcctactgttgttgggacacgagctggttggacc

SEQ ID NO: 23569 - DNA, 441 bp, Oryza sativa
  Clone ID: uC-osflM202094e05b1
atatatatatatatatatatatatatatatatatatataccaaaggaagaagtgtcagtggtacaagagtatttggatgtatttcctgaagaactaagtgaattacccccagatcgggagatagaattcatcatagagttacttcctggaacgacacctatatcaaaaagaccttataggatgccaattaatgaattagaagaattaaagaaacaaatagccaagttagaaacaaaaggttttattcgactaagttcttcaccttggggagctcccgtgctatttgtcaaaaagaaagatggaagcttaagaatatgtgttgactaccgagctataagtgaagtgactgttgagaacaaatatcccttgccaacgaacgacgatctatttgatccattaaaaggagcttgcgtattttttaaaatagatcttcgatcgggg

SEQ ID NO: 23570 - DNA, 278 bp, Oryza sativa
  Clone ID: uC-osflM202094e07b1
gtttgacgtgcgggctgggaaactgactgggatagtcaatgatataggctattctggcggcattgcttgcatcatgacatgcattgaggaggattaaaatgatgattaagatgggtattgagatggtaatagggctgaggaaaggctgatggatgttatacttcaagatactttccagaaagggggccacagaggggatgccgctggtgatgcagttgctgtggaatgtgctaaggattgttttgcttgtgcttgaacttgtgttggaattaagaggt

SEQ ID NO: 23571 - DNA, 382 bp, Oryza sativa
  Clone ID: uC-osflM202094e09b1
caacaaggcacactcttcctacctcttctccggagagctcgatcgctgcaccaatacttcactggagatcgcctagctgcagctagctagcttatcctgcgtgtcttgagcttctctcatggaggagatctcccaccacttcggggtcgtcggagccagcggcgtccatggcggccaccagcatcagcatcaccaccacccgtggggttcttccctgagcgccatcgtcgcgccgccgccgccgccgcagctgcagcagcagcagacgcaggccggcggcatggcgcacacgccgctcacgctgaacaccgtggcggcggcggtcggcaacccggtgctgcagctggcgaacggcagcctgctcgacgcgtgcggcaaggcg

SEQ ID NO: 23572 - DNA, 458 bp, Oryza sativa
  Clone ID: uC-osflM202094e10b1
gccatctctctcagctctcacagctcactgcatcaatggccgcggccaccatggcgctctcctccccggtgatggcccgcgcggcgccgtcgacctcctccgcgctcttcggcgaggcgcggatcaccatgcgcaagaccgccgcgaagcccaagccggcggcgtcgtcggggagcccgtggtacggcgccgaccgcgtcctctacctcggcccgctctccggcgagccgccgagctacctcaccggcgagttcccgggcgactacgggtgggacaccgcggggctctccgccgacccggagacgttcgccaagaaccgggagctggagggtgatccactcccggtgggcgatgctgggcgcgctcggctgcgtcttcccggagctcctcgcccggaacggcgtcaagttcggcaggccgtgtggttcaaggcgggctcgcagatcttcagcgagggc

SEQ ID NO: 23573 - DNA, 451 bp, Oryza sativa
  Clone ID: uC-osflM202094e11b1
ttgggcacgaagcgtcgtcagccgccggtgctgagcatggacgagatcatcgacgagtgcaagaccttcttctttgccgggcaggagaccacctcgcacctcctctcctggaccatgtttcttctcagcacgcacccggactggcaggacaagctccgggaagaagccgtgagagagtgcgccggcgccggcgccggggacgacgacgaccagctccccacctacgacatgctcggcaagctgaagctgctaaatcagttcttactggagacgctgcggctgtacagcccggtgccggcgatccggaggcggacggcggcggcggtggagatgggcggcgtgacggtgccgggaggcacgatgctgacgttcccgatcgcgacgatgcaccgcgacgaggaggtgggggcgcccccacgccgggggtgttcgacccgatgaggttcgacgg

SEQ ID NO: 23574 - DNA, 490 bp, Oryza sativa
  Clone ID: uC-osflM202094e12b1
gttggcttctcctccccctcccggttcggttcggttcggttcgggtccggttcgatttcggtttttccttcggttcgggggttggtgggaaagcatggcggcgccggatgttgagtaccgctgcttcgtcggcggcctcgcctgggccaccgacgaccgctccctcgaagccgccttctccacctacggcgagatcctcgagtccaagatcatcaacgatcgggagacggggaggtcgcgcgggttcgggttcgtgacgttctcgagcgagcaggccatgcgcgacgccatcgaggggatgaacggcaaggagctcgacggccgcaacatcaccgtcaacgaggcccagtcgcgccgctccggaggcggaggcggcggtggctactgtcagcgcggcggaggcggaggctactgtggcggcggctactgtggtggtggcggcggcggtggctactgccagcgccctgaaggcggttaccgcggtggctgt

SEQ ID NO: 23575 - DNA, 208 bp, Oryza sativa
  Clone ID: uC-osflM202094f01b1
accgagtgagcagctagctagctgcggcgatggcctccagagcggcggcggtcgccgtcctcctcctcgccgtggcggcggcgccgctcttcgccgcggcgagcgcgcatggccgaggctaccttggtgccaagttctggcctcctgacggcagcctgagctcatcaagctccggcgaggctgtagtggcggacgacgacgacggtca

SEQ ID NO: 23576 - DNA, 473 bp, Oryza sativa
  Clone ID: uC-osflM202094f04b1
caccttttcgctccatccatccgttccgtttagtttgctccaagcgcaagcgcaagcggcggagaggaagccatagccaccttccaccacgccttggcctttccattacctacgccttcccttcccttcccttcccttcgcgcgctacttggaattggattagccatagccatggacgccacgctgctccgctccgccgatgccgccgtcgccgttcgctccaccaccactgtgcctccgcctcgccctcgccttcaccgacccagtacccttcccctcccgtccttctgcgcctggggggccccttcgtgcctacaccgctttcgctggccccgggcccgccgcgggataattcactttatttatttgacccccctttttcctttctcccccttctcttaccaaataacaggtttccttatacaaaaaaactcactgctggtgcttttttttttttttgggggggggggggg

SEQ ID NO: 23577 - DNA, 438 bp, Oryza sativa
  Clone ID: uC-osflM202094f06b1
atcagttcagcgtgaagcagcggcaagaacacaaaaatggcggacgagaagctcgccaagctgcgtgaagccgtcgccggcctctcgcagatcagtgacaacgagaagtccgggttcatcagcctcgtcgcccgctacctcagtggcgaggaggagcatgtggaatgggcaaagatccacacgccgacggacgaggtggtggtgccgtacgacaccctggcggcgccgtcggaggacttggaggagaccaagaagctgctcaacaagctcgccgtgctcaagctcaacggcggtctcggcaccaccatgggatgcaccggaccaaaatcggtcatcgaagtgcgcaacggattcacattcctcgacttgattgtgatccagatcgagttcctcaaacaagagtatggcagcaatgttccactgcttctgatgaactca

SEQ ID NO: 23578 - DNA, 322 bp, Oryza sativa
  Clone ID: uC-osflM202094f08b1
gtttaaggaggagaagaagaggagagagaggagctctgagctctgtgctctctcttgctgctgctgctggctgctgctcacttttccttttgggattgttacttattttaatcctgggatctgattttgtccccatattgggaggatcgattatctttctcccctcctctcctctcctctcatcccctctcccctatctatctgtcttgaagaagatcagctggctgctttggtgtcaatcgctgctgcagttcctcgtggctttgccctgcgccccaataagagcacaccctcagattttgattggtagctgtgttcctag

SEQ ID NO: 23579 - DNA, 197 bp, Oryza sativa
  Clone ID: uC-osflM202094f11b1
cgataacaaaactgtgaattgcgttgtggagagcggttttgatatgtgatctgaacaaaattacatgttgttaggctctaaaatttgttttaataaaatctaattttggcagaacgagagatccaaactatatagccttgatgttgatttttggtacctatgtaaatatatgcagtcgtagaaagcattttctggcc

SEQ ID NO: 23580 - DNA, 331 bp, Oryza sativa
  Clone ID: uC-osflM202094g01b1
cttccatctccaaatccttcttccctaatccccctcgccggcgaagcgcggcggcggcggcggcgccttcttccctaatcccctcgccagcggggagccgcagggcggcggaggcgtgcgtcggctgctgctgctgcgcgggcgggggaggtggggagagatgcacagatccgcgggcgccacgatggcgtggaacgtgttcaggttctgcactgcgctgagggggctgggctccatcatgatcctgctcgtcctctccatcgttggggtcacctactacgcggacgtggtggacaactaccgccccgcgctttttgccggtggggccagc

SEQ ID NO: 23581 - DNA, 453 bp, Oryza sativa
  unsure (1)..(453): unsure at all n locations
  Clone ID: uC-osflM202094g03b1
ggccactcatggcggcatatggccccctttcacacgcacatcctcctctcctttatttatgaaaggggggttgggttagctgggaagaggaaggaagccgctgctgacatgtgacaccgtgtttggcatcacaccacttgactccactggctcagtggctgcctcactcactcaccaattcaccattgctagtgcaagagctcgcataaataggcagagctgctgctcctctcctctccctctcagcctctggaggaggaagagaagaggaggggtctctgcttcatctttcttcctgagctggcttctttactacagcagccatggctaaagagtatcctgcctcccccaaagctcagcagctgcaagaatccaagaagcagcggctcacctacatcctcgnggngagcgcgctctgcgtcgccttctacgtcctcggtgcgtggcagaaca

SEQ ID NO: 23582 - DNA, 196 bp, Oryza sativa
  Clone ID: uC-osflM202094g04b1
gtcgtgttgttagcttcgttttcttcttgtttcatcaatccaaggagtgtggaaggccacacgccaagattatatctatgctaatttgattagcagtaggattaattcagtggctagcgtagcttgattagttggtttaattagttggagagtaaagaagatgttgggagtgttcagcggcgacttggcggaggtg

SEQ ID NO: 23583 - DNA, 366 bp, Oryza sativa
  Clone ID: uC-osflM202094g05b1
gtcatcttgaagaagaccagcgcggggcaacgcgaaactggtggagggctcccagacctaaccggcggcggtggcggcggccatgggaggagcctacaacctcaagctgctcgccgacctctccgagctcgtgctccttctcggcgcctcgcgcccctttctcccggggctcctggaggcggcccttcgcgcccccgtcctcccgcgcgacctcctccctctgctgccctggccggtgggccagtcgatgctcctgcgcctcgcgctggcgcggcgccgtcgacctgctcccgtgcttagttggcgtcgcgcgggagccagggattgggcggcgccccgcccgtccagtggaagggcgcctgcttt

SEQ ID NO: 23584 - DNA, 486 bp, Oryza sativa
  Clone ID: uC-osflM202094g08b1
gctgcggcgagctcgtgatctcaacgaccaggaggaaaccggcgctcgcctcgatctccgccgcctcgtcccaccatgtcgaagaggaagaccagggagcccaaggaggagaacgtcactcttggacccactgtccgtgaaggagagtatgtgttcggagttgcccacatcttcgcatccttcaatgacactttcattcatgtcactgacttgtctggaagggaaactcttgttcgcattactggtggcatgaaggtcaaagctgaccgtgatgagtcatcaccatatgcagctatgcttgcttctcaagatgttgcacagcgttgcaaggagcttggtattactgctctgcacatcaagctttgtgccactggaggcaacaagacaaagacacctgggtctggtgctcaatctgcttttagggctcttgctcgctctggcatgaagattggccgcattgaggatgtgacccccgtttccacggac

SEQ ID NO: 23585 - DNA, 477 bp, Oryza sativa
  Clone ID: uC-osflM202094g09b1
ccatccgccgccgcatcgccctcgttagaacgatggccgcgtcggcgctgcaccagaccaccagcttcctcggcaccgcccctcgccgggatgagctcgtccgccgcgtcggcgactccggtggccgcatcaccatgcgccgcaccgtcaagagcgcgccccagagcatctggtatggacctgaccgtcccaagtacctgggcccgttctcggagcagacgccatcgtacctgaccggagagttcccgggagactacgggtgggacacggcggggctatcggccgacccggagacgttcgcgaggaacagggagctggaggtgatccactcgcggtgggcgatgctgggggcgctgggctgcgtctttccggagatcctgtccaagaacggggtgaagctcggggaggcggtgtggtttaaggccggtgcgcatatctttttcagggggggctcgactacctggggaaccccaccct

SEQ ID NO: 23586 - DNA, 369 bp, Oryza sativa
  Clone ID: uC-osflM202094g10b1
ctttcccccaagatccagatcgccggtcacccccacgaactcgctcgagatccagagagagagagagaggcagtttcttggttgattttcgaggatgaagaggaagactcggaacaagataatcctgacgacgctgctggtgtcggcggcggcgatcctgatcggcgggacggtggcgctgatcctgacggcggggacatggaaggtgaagatgaaggagtcgcgcgagaagatctgcgacaaggggtgggagtgctcgggtagcaagtactggtgcaacgacaccatcaccgacttctttaaggtgtaccagttcgagaacctcttcttcagtgcaacagccccgtcgccaaccccgtcgggttttgg

SEQ ID NO: 23587 - DNA, 338 bp, Oryza sativa
  Clone ID: uC-osflM202094g12b1
gattgatcaaacagaacagctcacaaacagcccaggtttctccttagaaggtagcgaaaacggtacacctctggaatccgatagaaccatggagggggaaacatgtgacatagacattgaaacagcacgtcataatctggaaatcactaattcccttcccagtgaacaaagtactgaacaaggtgaactgcatggcaccaggacagaacttcagtcaaactttagactagagagtaatcctcttaaggcacaatttccttcttgtgatgttttctccaaaaaggggatgactgacttttttagaagcaaaaaggtatatccaaaatctgttttaaacc

SEQ ID NO: 23588 - DNA, 325 bp, Oryza sativa
  Clone ID: uC-osflM202094h01b1
cgctgccttcgccgtttggcccccgaggtaaccgacggacaccaccaccaccgcgccgcctcgcctcgtgaagctccactagtttctagggtttagcctagccccgaccccgaggaggcccgagatcgcaatggagggcggcggcgagggcgcggagtcagcagctgtcgcctccgcggcggcggcggaggtggaggtgaagaacccgaggtgcttcatggacgtcagcatcggcggcgagattgaggggaggatcgttatagagctctacgcgtcggtggtgccgcggaccgcggagaactttcgcgcgctctgcaccggggag

SEQ ID NO: 23589 - DNA, 387 bp, Oryza sativa
  Clone ID: uC-osflM202094h02b1
atcttttttccagtcaagaaaaaaggaagattacaccaacaaacaaactagctagccaatggcctccttgacatcttttccggctcgccgtggcggtggtggtactattggtaggtgcctcatgtgccactgagctgaccttcaaggtggttcagggctctagcgctcaaagtctagagcttgtcactaatgttgccatctctaaggtggaggtcaaggagaagggcggtaaggactgggtggcgcttaaggaatcgttgtttaacacctggacgctcaaaagtgagtcgccgctcaagggccccttctctgtccgctttcttgtgaagaatagcggctaccgtgtcgtcgacgatatcattcctgaaagctttacagctggctctg

SEQ ID NO: 23590 - DNA, 365 bp, Oryza sativa
  Clone ID: uC-osflM202094h03b1
tcctgatccaactcacgaattggggagcacacaacaaaattccgatccaaccctaagcccgatccgccctagcacgatcccctcccccctccccggctgcgatccccctgctccacctcagatctccggcgagccgatcgaatcggtggctgcggcggcggcggcggcgcgatgtcggggcagacgcagcgcctgaacgtggtgccgacggtgacgatgctcggggtcatgaaggcccggctcgtcggcgccacccgggggcacgcgctcctcaagaagaagtcggacgcgctcaccgggcagttccgtgccatcctcaagaagatcgtcggcgccaaggagtccatgggggaggccatgagggc

SEQ ID NO: 23591 - DNA, 302 bp, Oryza sativa
  Clone ID: uC-osflM202094h05b1
cgcagttggtttccccctcccgcctccgaccacccacgtcatcaccacagcgacctctactccactctgccccgccgcccatggccgccgccgccgcggcgctcgcgagctcccccatggtccacctcacggactcccggctccgcctccccaggcccgccaggtcccccgcgggggcgacgcccttaccctctcccgcgttcgccgcgtgctgctcgaggggcgcggcatgcggcttggagtggagacccaagtctgggctgagggccctgaggcggtgcgaggaccggctgctgtgcttc

SEQ ID NO: 23592 - DNA, 469 bp, Oryza sativa
  Clone ID: uC-osflM202094h06b1
gattattgttgctgcatccttagcgcgcacgcgaaagcgagagggagctcgcgcgcgcgcgagggatcgatggatcgaccccaggcagttaccgagaactatgccaatgctgtgacgtgcctctatcatgtgctcttcaaggctggggcgctggtgttctacatcttgtttttgctcttcgtgaagagcttagtcatcatatttgtcatcaccgagttcctggcggcgctcgacttctgggtggtgaagaatgtgagtggcaggatattggccgggatgcggtggtggaatgagatcgaccaccagggcaacagacgtgggaagtgtgaggtgcctctatggggaggctcttgcttgggtgaacaaaaggacttgtggctgtgctggtggactctttacgtgactgctgatggatggaacatctttgggatagttttacttatgagacttgaagctgactaccttcttg

SEQ ID NO: 23593 - DNA, 342 bp, Oryza sativa
  Clone ID: uC-osflM202094h07b1
gcatccgcctctcggcgcaccgcatccaccacctcatgtccggcctgctcgcggcgcgcatgctctactgtatctccgcggccgaggaccagcactacatccgcatcgcagggacaccacacgggtgggatgtgatgttctacctgttccagctggtgaagggtgtgatcttgtttgctgcgattgctctgattgggaccggttggtcattcctgaagcccttccttcaggacaaggagaagaaggtccttatggttgtgatcccattgcaggctgcagctaacattgctgcagcatgggtccgggagactggtccattcttgcagggatgggtgacatgga

SEQ ID NO: 23594 - DNA, 441 bp, Oryza sativa
  unsure (1)..(441): unsure at all n locations
  Clone ID: uC-osflM202094h09b1
catgaggctgcctcccatttctcttctctgtcggtgttctcctcaagatctgtcttaagttcttgagatctgtttcagaactaagctgagaagatggtgaagatctgctgcattggagctggctatgtcggcggcccaaccatggccgtcattgccctcaaatgcccagcaatcgaggtggtggttgttgacatttccaagcctcgcattgatgcctggaacagcgaacagctcccgatctacgagcctggcctcgatgaggtcgtgaaggagtgcagaggcaggaacctcttcttcagcactgatgtggagaagcatgtcgccgaggcgaacatcatctttgtatctgtcaacacccccaccaagacccgtggtcttggagcanggcaggctgctgacctcacctactgggaaagtgctgcttggatgattgctgatgtc

SEQ ID NO: 23595 - DNA, 173 bp, Oryza sativa
  Clone ID: uC-osflM202094h11b1
ggctaaggcgccgcgggcttggcttggctggcaccctctccttctcgtcttcggcttcgtcttcccccgtcaaacccacccacgccggccgccgacgccgccgtcgttgcggcgggtgcttcccccgctcgcgtcggtgccggggggctgaggggaagagggggagggggagg

SEQ ID NO: 23596 - DNA, 429 bp, Oryza sativa
  Clone ID: uC-osflM202094h12b1
ttctgcagcagcagcagcaacaacatttggccgctctgaagattggtgacggagaatgcccggcggctccctcctcaatagcggcggcatggcggactacggcggcggtggcggcagcggcgggggcctcacgttcccggtcgtggttacctgcctcatggcggcctccggtggcctcatcttcggctacgacattggcatctcacgtggtgtgtcggagatggagtcattcctggagaagttctttccgggcttgctgaaggggacggcgcacgcgagcaagggcgtgtactgcatttacaacagccaggcgctcacggcgttcaccttgtcgctgtccgcgttcggcatggtcgggacgctgggggggagccgcgtcacccggcggaccggacggcaggccgtcatgctgatcgggggcagcatgtt

SEQ ID NO: 23597 - DNA, 315 bp, Oryza sativa
  Clone ID: uC-osflM202095a01b1
gtttattatacagcaagaacatttttttccttaaatttctatttaatttatactacttgcgagcgagagccacctaatcttggtgcccaccaagcataagcttcatcatcttcttcttctttgaagtcgtcttcttccctcctcctctcgtcgcctcttggaaagagagagagagagagagagagagagagagaggtgatcgagttgcagcaatggcgaggagggcgccatggctcgccgggattggggccgtgccgttcttgatcgtcgtcgtggtggcggtggtgggcgccgccctgcccgcgatggggaggt

SEQ ID NO: 23598 - DNA, 458 bp, Oryza sativa
  Clone ID: uC-osflM202095a02b1
cgtgttggggcaggagcacgtcgccgtgttcaagccggtggacgaggagcccatggcggccaacaacccacgcggcctcccaccctcgcccaccggcgaggggctcaagaaggggacacgcgtcggcgagggcgccatcagagaggtcgccgcctacatcctcgaccaccctcccggtggccgccgttcgttcgcaggacatcatggctccgccaccgtgggcttcgccggtgtcgcgccaaccgcgctggtccgttgcatgcacaggagcttcaagcaacctgcagcttccgaacaaggtcctccattgttcaaggtggggtcattgcaggcgttcgtgaagaacagcggcagctgcgaggacatgggacctcgtgcgttcccggtgcacgaagttcacaagatctgcgtgctggacatcaggctggccaacgccgacaggcacgccggcaacattc

SEQ ID NO: 23599 - DNA, 494 bp, Oryza sativa
  Clone ID: uC-osflM202095a03b1
gtttcggcggcggcggcgattggcttgtgctctctccggcgaccgcgcctccttccctccacggtgacctccttccggcgaagcactgcctctctcgtagtctcagttctcctcctacgttctactggacttgtgctgcgaggggagatctaccaatctgggcgtggattggtctgtttcttctggtgacaaaccttaagcttgctcggatttgttcggaacaataccatggaggtgagaccaatggttgctttgcgtgctgccctagttggtggggtcgcagcatttgccaagattggtgcggcgatgaaagctgcacgaggtgagaaggttggtgcagcggctgcagcaatgacagctgcagcaacagctgctgtatctagcaaagacacacacaaagagtgttcgaagactgaaacacaatgatatgggccttacttagtggagaaaccctgtatggaaatgcctcttcagagcttaataatttttttttc

SEQ ID NO: 23600 - DNA, 321 bp, Oryza sativa
  Clone ID: uC-osflM202095a04b1
ggttagaatacgcccatagtctaccgttatcacaactaccggtacaagctattcttgcttaacttttgttgtattgtcatttgtacgtgattcattgtacattcacaacacatggtctgaaattgtagactaaatcagacccactctttctggatgttgagctgcattgagttgataaatgcctgctgtatgaatttcttttcatggtggacagccttagcttacaaacaaaggaataataaccacctatggaccttttatggccttttgattagcagtcaaacatttaggcagtttgcaattatgatatgattttctcct

SEQ ID NO: 23601 - DNA, 344 bp, Oryza sativa
  Clone ID: uC-osflM202095a06b1
tgttgatatactcggttacctcctctatgttgccaaagttgttgcaaagcaggagggacttgaagatggctaccgtattgtcatcaatgatggccccagtggatgccaatctgtttaccacatacatgtacatctcctcggaggcaggcagatgaactggccgccgggctaacgagtgcccgtctgttgaactgccttcatggcaaggatgtcacactgcctctccgttgaataattactgtaactggcataacaattggtgccctgaacttatgctatatgtttgtggatgttaccaggacaggacatgaccattctgctatgatttatggacaagatacatt

SEQ ID NO: 23602 - DNA, 465 bp, Oryza sativa
  Clone ID: uC-osflM202095a07b1
tttttcatcgtgtagttttaggccatctgagggcctttgaatggctctcggcctccttcatttttcatagcatttgtgtagtgtgtgcaaatccatcatcgcatcttcatatctgaagaaatgaaggtgaccactcagctcaagcccatggcctcctcgtcgacgtcgccgtcgccgtcgcggctgccgcggagcgcgagcggcaaggcgcccacctcgccgccgtccagctccaacgcctcgcgccgccaccaccagcagccgccgcgggcctcggcgtcgacgcccgccaccccggcgccgtcgcgccaccacctcaggtcgctgtccatcagctgcatgacgatcaggaccgacgacgactcgccgacgtcggccgtcacccacaaggacaaggcggcgacggccaagcccgtgtcctactactcgtcgatgctgtcgccgaggaagctcatgcagcgcgcg

SEQ ID NO: 23603 - DNA, 285 bp, Oryza sativa
  Clone ID: uC-osflM202095a08b1
ttgctttttcagaataaccaagttctccgccggactgttctccatttgcttagagctgccgttccgcacgcgtgcgcgcctcaacctttatgtgaggaatggggagcaatacacgttccaggtgagaaagcaggatgtattagtgggaggcatgagcacgaactagctacttctcgtcgctgagtctgacagcattttggccggcggatgtcgcccccagccgactgtggtggccgagagtgagacggggctgctgatgccaggcaagatggctgcggatcatcc

SEQ ID NO: 23604 - DNA, 396 bp, Oryza sativa
  Clone ID: uC-osflM202095a09b1
ttgttcttaccaaccgaagagctggatgcaatcagggagctgttcaatatgttggacaccaaaaagaaggggcacttgacactagaagagctcagaaagggactgcaagtgatagggcacaacatccatgacacagatgtcgatatgctcatggaagctgcagacatagatggaaatggcatactggactgcaaggagtttgtgacagtatccattcacctgaagaaaatccgtagcgaggagcaccttccgaaggtgttcagcttcttcgacaagaacggcagcgggtacatagagattgaagagttgaaagaagccctctccccaagaggtgaccagaagtcgatcgacgacatatttctggatgttgacatagacaaggatgggaagataagc

SEQ ID NO: 23605 - DNA, 132 bp, Oryza sativa
  unsure (1)..(132): unsure at all n locations
  Clone ID: uC-osflM202095a10b1
ttgatatggggttcacattacttcttagtcaataagataaactcgtcccatccgcgcgcggcctcaacatctcaaccttntggtcagctctggtaattctgctggttatatcggcggctgggaggaggtgat

SEQ ID NO: 23606 - DNA, 427 bp, Oryza sativa
  Clone ID: uC-osflM202095b01b1
atttgtcatgagagagagagaggggaattggtgaggtgatgctgtgtgtgggggatgatcctctcccagctgggaggctcctccgtccgtgctcccctcgctgcgccgccatggctcgccggtggccgccactggtggtcggcctcgctctcctcctcctcctctccgtcgcggactactccgtggtggccaagaccgaccagcctgacgttgctgctctgaacgtgatgtttgagagcatgaacaaaccgtctgaattgttgggttggaaagcgagcggcggcgatccgtgtggtgatgacgaccagtggaaagggatcgaatgcagcgattcatctgtcacagagatcaacttgtccgggcttggaataagcggcacgctaggttatcagctcttcagcttggaatcaggtaccaaattcgatgt

SEQ ID NO: 23607 - DNA, 411 bp, Oryza sativa
  Clone ID: uC-osflM202095b02b1
attctctctcctcctccgccaccgccatggctcgcctcctcctccccctccccatcgccgccgccgccgcctcccgcctccgcctccccgtcctctcctcctccgtggcgcggcgtgaggcgctgctcttcggggggagggtggcggcggcgagggcgccggtgaggctggcgaggagaggggtgagcgccggggcggaggcgggcgggtcgtcgtcggccgccgcggcagcgcaggtgatcgggcaggacgaggcggtggagtgggtcaagaaggaccggaggcgcatgctccatgtcgtctaccgcgtcggcgacctcgacaagacgatcaagttttacaccgagtgcttggggatgaagcttgtgcgcaagcgcgacattcccgaggagaggtataccaaagcttttc

SEQ ID NO: 23608 - DNA, 448 bp, Oryza sativa
  Clone ID: uC-osflM202095b06b1
cgctcctatccctccctcccccgcgtccagctcagagatgagctctcccacctgtacgcgcgaatctagaaccttctagatcctctccccttcccgatccgcccgcctcgcctcgtctcccgccccaccccgatccgatcccccgaaggtctcggggttgggggggggggcgaatcctgatggcggcgcacggcggtggcggcgtggaggaggatcaggcggggtcgagctcgctgtgcccacctgctgcggaggcagaggcggcggctgcggaggcagaggcggcggctgcggcggcggcgatagcgagggcggcgcggccttcgaggccgggcagggacaagaggctcggcgtgcggcacccgctgaagcaccggaggttccgcgcggggggcaaggcggcggtggcggccggcgctagggaggtcggggaggcgaccaccgtggc

SEQ ID NO: 23609 - DNA, 519 bp, Oryza sativa
  Clone ID: uC-osflM202095b08b1
tggtttaatctccgacgccacgacgctctctcgcctctcccggaatggaaacgttcgcgcggtggcgtccaccgccgccgccggcggcagctgggcgcgtgtcccttcgaccggcgtacgggaggcggagccgggccgccacggtctccccgcgcgcgttcggcggcggcgctgacttcgacggcttcgtgcggcgggcgtggcggggcgccaacgccggcgccgagcggctcgcgttcgaggtgcgccagaccgcgcagcgcctggacgggaggttctcgatatcgaggcgcctggccgaggccgtgcgcgccgtccgcgcgcgcgccgtcgagatcgacgccgagctcggcatcggccggcggtggcgctccttctccgtcgacttttcccgcaactggcccaggtataggagggagctgactgacttcatggccacacctattgggagagctttcactacgatcttttcatttggtttgcactgtcaggatggctattcagagttttcatttttgg

SEQ ID NO: 23610 - DNA, 422 bp, Oryza sativa
  Clone ID: uC-osflM202095b09b1
ctttcgccgtcgcagatccgatccaggaagagctcgccgccgccgctgccatggcgctctccgtggagaagacctcgtcggggagggagtacaaggtgaaggacctctcccaggcggacttcggccgcctcgagatcgagctcgccgaggtcgagatgccggggctcatggcgtgccgcgccgagttcggcccctcccagccgttcaagggcgcccggatctccgggtccctccacatgaccatccagaccgccgtcctcatcgagaccctcaccgtccttggcgccgaggtccgctggtgctcctgcaacatcttctccacgcaggaccacgccgccgccgccatcgccagggactccgccgccgtgttcgcctggaagggggagaccctcgaggagtactggatggtgcaccgagcgctg

SEQ ID NO: 23611 - DNA, 447 bp, Oryza sativa
  Clone ID: uC-osflM202095b10b1
ttctttccgcaggaggccgcatccgcttcgggatcgggatgcggaggagaggggaaggatgggagagaggcaggcgacccggccgcgcagcttcccttgcttcctctctctttctttgtgcgacatcccagcttttgctgttccttgagaagaacagcttgggacattcttgtgttgtggtttgatttctagggcaagaaagcatgaggctatggcttctcatacctcttgttctctgtttacctacattgattccatccgaggattacttggatgtgaccattgttgctcggggtgctgcgacgatcgcttttaccagcaacgtgttcatttgcgctacccttgattggtggccttcacagaagtgcacttctgaccagcgtccatgggggcatgcttgtattttaaatcagtacttgactaatcctctgctagctaaagctattc

SEQ ID NO: 23612 - DNA, 408 bp, Oryza sativa
  Clone ID: uC-osflM202095b11b1
ttttcacctccccggagccgccgcgccgccgccggagcgagccagtgagcgatggccgggacgggcggaagaaccggcgagccggaggccaccggagtggaggcagcctccgccccagagcgctccgaatccagccgatgcatgccgttcgaggactgcgtcgccggcatcaagtggtctctcaaaaagttcctcattcgcgccgtgaacgaatccagatccgacggtgcggttcctgatggagcggatggataaggccggctgcccgatgccgtcggggatgatcacggcgaggaactgcgggactgccgattagaatggttcctacggttcccggatcgggataacggattgctgtgaagaaatacgatataaagatgagataactgaactattaattcacgaatt

SEQ ID NO: 23613 - DNA, 484 bp, Oryza sativa
  Clone ID: uC-osflM202095b12b1
gttcatgctgatccagctggaccatgcaaggccaggaataacttgtgtaaacttgagagagagggattcattgaatcatctccggcacaggattgtgacctctgctgcaaaatgcctgatttctgccgagagtgctgctgcgtctcttgccgcagggttgttgactattcctttggaggttatagctacattaagtgtgaggcagtcctagaagagaacaaaatatgtgggcatattgggcaccttgattgtgctctccgtacttttatggctggaacagttggaggatgtattgacttggacatgcagtattgttgcagacgttgtgataacaaaacgaacttgatgctgcacgtagaaaaattcttggaaatatgccaatctcttcaatcaagggatgacattgaacctatcctgaatactggcttatgcctagtgcgtggttcaagacaaaccagaacaaatgcttggagagcattatgag

SEQ ID NO: 23614 - DNA, 469 bp, Oryza sativa
  Clone ID: uC-osflM202095c01b1
ggtgtgcaggaggcagcaatcttggttcccggtgacattatcagcatcaagctcggtgacatcgtccctgctgatgctcgtctccttgagggtgatccccttaagattgaccagtctgcacttactggggagtcccttccagtgaccaagaaccctggtgatgaggtcttctctggctcgacctgcaagcagggtgagattgaggccgtggtcattgccactggagtgcacaccttcttcggcaaggcggcgcatcttgttgacagcaccaaccaagttggtcacttccagacggtgctcactgcgatcgggaacttctgtatctgctcgattgcggttggtatcgtgatcgagatcatcgttatgttcccgatccagcaccgtgcctaccgcagtggcattgagaacctgttggtcctcttgatcggtggtatcccaattgccatgcctaccgtgctctcggtcacca

SEQ ID NO: 23615 - DNA, 433 bp, Oryza sativa
  Clone ID: uC-osflM202095c03b1
gttgcttgaccgcggtgtcgaggcttcgatcccgcgtggcacaggaggccaccacgcttggtggtgtgcgatggctgcagatgcagagcgcatctgatcttgatctcaagtcccagctgcaggaattgattcctgaacaacaggaccgcttaaagaaacttaaatcggagcatggaaaggtccaacttggaaatataacagtcgatatggtccttggtgggatgagagggatgactggaatgctttgggaaacatcattgcttgacccggatgagggtattcgttttaggggtctctcgattccagagtgccagaaagtgctgccgacagcagttaaagatggggagcctttgcctgagggtctactttggctttttttgaccggaaaggtgccaaccaaagagcaagttgatgctctatcaaaggaattggc

SEQ ID NO: 23616 - DNA, 487 bp, Oryza sativa
  Clone ID: uC-osflM202095c04b1
tctcacagctcactgcatcaatggccgcggccaccatggcgctctcctccccggtgatggcccgcgcggcgccgtcgacctcctccgcgctcttcggcgaggcgcggatcaccatgcgcaagaccgccgcgaagcccaagccggcggcgtcgtcggggagcccgtggtacggcgccgaccgcgtcctctacctcggcccgctctccggcgagccgccgagctacctcaccggcgagttcccgggcgactacgggtgggacaccgcggggctctccgccgacccggagacgttcgccaagaaccgggagctggaggtgatccactcccggtgggcgatgctgggcgcgctcggctgcgtcttcccggagctcctcgcccggaacggcgttaagttcggcgaggccgtgtggttcaaggcgggctcgcagatcttcagcgagggcgggctcgactacctcggcaacccgagcctgatccacgcgcagag

SEQ ID NO: 23617 - DNA, 557 bp, Oryza sativa
  Clone ID: uC-osflM202095c07b1
cttgggcttacaccgtcgttttcgctcccttttggctgcctgtgctgccgcgttcaattcgccgctgcttggtctcgtttggttccatccgctatggcagggggccgggatttgcacggcgtggatcgctgcttccatggttcttgaacctgttcatcagcacagcaaaggtcttccgcggcggcagctcgcgtgcggacccccctatctttccttcgctttctggatcgactcgttcgtgtcttctctgtctcgtcctcctctcgtacttgcttcgtccttgttgtcccacggcgttcgcgggcctcttcgtccgaggctgcgccgcctggcgcttagcgcggctttcatgaacaagacatggccgctcttgtacataaattttgccataaatatgttccatctgtatgtttgtactatatactcctggctcactatagcgtatatccttatttctcagcttctgtatggagacatcagcaagcagatcaagacacggctctctaggctatgggattccacgatatcaatgatgaagaaaaatatatcacactgaa

SEQ ID NO: 23618 - DNA, 529 bp, Oryza sativa
  unsure (1)..(529): unsure at all n locations
  Clone ID: uC-osflM202095c09b1
gatgaacggctttgggagcctccaatgcaaggcgacggtgcatgtcgagaaagggcacatgcaagcatcggggatggccttcttctctcccgtcaacagatgcgcccaggttcatatctccagtattcctcatttcatcggcgcgaagtctgttagtgcttcccaacttcgaatgaggcacaaggtcgggtccatcagagcctctgcagcctcgtgcttgcaagatgaaacaacaaaatatttcgattttgtggtcattggcagcggtgttgctggcctaaggtatgctctggaagtgtctaagtacggctctgtcgccatcattaccaaagcagagcctcatgagagcaacacgaactacgcacataggcggtgtcagcgcggttctatgcccctcagattctgtagagagccacatgcatgacaccattgtcgcggnggcttatctgtgtgatgaagagactgtcagggtagtatgcacagaangacccgagcgtgtgaaggagctcattgccatgggagcttcatt

SEQ ID NO: 23619 - DNA, 500 bp, Oryza sativa
  unsure (1)..(500): unsure at all n locations
  Clone ID: uC-osflM202095c11b1
atttcgatctcgatctcgatctccgtacgcaccaaggcgaagccaattccactaccaccgctcttccttcttctcactccttctcgcgactgcggcgagggtgagtctcctgtcgtgagaatttcggtctaccggcggcgnnnncttctttgggtgttcttcgcgtcgtcagacgtcgggatctgaattactagacttccaataagaaggaaacaccttagggaatgcagaaagatgtgcttgcatgctagagagctaccttgtgagggaattggcagggtagcaagccatatttctccttccacaactcttcatgacattggaacacacgagtatatacagcgctcgctccatgtgctctcgcactatggggttcgacgtggcaacttaaccatcttcttagatcaccatcttggtggagaccgttggagtcacctatcatttctaggctccctgctaccacactttgagctttgggattactgctttctttggcgtga

SEQ ID NO: 23620 - DNA, 437 bp, Oryza sativa
  Clone ID: uC-osflM202095d01b1
gtttgttctcccctgtacccacccaccgccaccgcggctactaccccgccgccgctatcgccgccgccatcacgagctactagtagctaccgggctatcgccgccgcttgccctgatgccgcagcaggaggtcgccgaccagatcgccgccgcggcggcggagcggggcctgcagaggagcggctcggtcagccgcctcaacgcgggggcgccggagttcgtgccgcgggtcgccgcccccgtggtgccgccgtcgtcgtcgacggtgatccgcgtgttcgccgcggcgcctcccccgccgtgggcggtctttttcgtgccgtcgccgacgtattaccggccgtacgagtactacgcgcctgtgaggggcggttcggtttgccgccgccgccgtcgccaggagcacgaggcggaagtggaccccgatgcgacggagg

SEQ ID NO: 23621 - DNA, 519 bp, Oryza sativa
  Clone ID: uC-osflM202095d03b1
gttctttagccctagcgccgccgccgccgccgccatgaagttcaacatcgccaacccgaccaccgggtgccagaagaagctcgagatcgatgacgaccagaagctccgggcattttatgacaagaggatctcccaggaagtcagtggtgatgctcttggcgaagaattcaagggctatgtattcaagatcatgggaggctgtgacaagcaaggtttccccatgaagcagggtgtgcttacttctggacgtgtccgccttctcctccacaggggtaccccctgcttccgtggatatggcaggcgtgatggtgagcgcaaaaagaagtcagtccgtggttgcattgtcagccaagatctctctgttatcaacttggtgattgtaaagaagggtgataatgacctttctggcttgactgacactgagaagcccaggatgaggggacccaagagggcatctaagatcaggaagctgtttaaccttgccaaagatgatgatgtccgcaggtatgtcaacactta

SEQ ID NO: 23622 - DNA, 477 bp, Oryza sativa
  Clone ID: uC-osflM202095d04b1
cgccccccatttcgaagcccaccgaattccattcctcgcgattcctctcccctcgcctcctcgtcctccccctcctaggggatcgccggagaggaatcgcgcggaggaaaaaaaaagaaaagggcttcctcgtcgtctaagttaaaaggaagccatggagcacaaggagactggatgccagcagccagaaggcccgatcctttgcatcaataactgcggcttctttggcagtgcggctaccatgaacatgtgctcaaagtgccacaaggagatgataatgaagcaggagcaggccaagctggcagcctcctctatcgacagcattgtcaatggtggtgattccgggaaggaaccaattattgctggtcacgctgaagtagctgctgctcaagtcgaggtgaagacgcttgttgcgcagcctgctgagattgctggtcctagtgagggggtcacggtgaaccccaggtgagggaggac

SEQ ID NO: 23623 - DNA, 443 bp, Oryza sativa
  Clone ID: uC-osflM202095d05b1
cacccttcccatctcgccgttcgccggcgccggtggtcgcttcagaaggaaatcatcgtccgacgcatatgagagggcaacacctgggacaaccagtcaccctcctccctttgaagtgtgagcccccagcgtgctcacgctcgtttttgctcctaggccagcgtctactgcacacacaaggcagaggaggaggagagacatatcagagaccgaagcggatggaagtcgagtgttgtctacctatcttacctctactactgtgatataacgtagatgctactagtaattaagtacgcctgctgctgctcgccgtctactatgttgagtcgcgtatggttcgtgtagagggggttgtcgcctgctgtgtcatatatgtacatatgtttgctctgggctgcgatggagcttgctgcagtctgcagcccagcccgcagttcatcgct

SEQ ID NO: 23624 - DNA, 397 bp, Oryza sativa
  Clone ID: uC-osflM202095d10b1
cttcctccatattgctagctagctaccaccataagctgtagctatagctatagctagctaacctctctcgagatctcggagatatcatctctggccatgaagccgtcgccgtcgacggtggcggcgttctacgggacgctggcgagggggctggacgagctggagcggtcgctggcggcgtcgtcggcggcggcggagttcgtgtcggcggcgtcgctgcgggcggcgctggcgctgatccgcgcggcgcacgcggggctcgcccggctcgtcggctcgctccacctccccggcggcgccgcctggctcgacgagtacatggacgagacctcccgcctctgcgacgcctgccgcgccctccgccttggggccgcctcccttgagggctactccgact

SEQ ID NO: 23625 - DNA, 282 bp, Oryza sativa
  Clone ID: uC-osflM202095d11b1
gttcattcttgtgctaacaagcgactgtgatgggccagcggcagtcattcttctcctactgattgattaggcgatgcgctaaatgagatacatacgtgaggatgcaaagtatgtgacacctacgctggtgtgggagacatgccatttcaaaatccattgatgggacctagcgcatggctagggctcatgcagggtctgtctggacagacagcggagggtggcctatgaactgcggcagtatgagctctagggcacgcacaaaggccaaagggatcgaggact

SEQ ID NO: 23626 - DNA, 345 bp, Oryza sativa
  Clone ID: uC-osflM202095d12b1
tggtttctttttcttcatcgcgctactatcctatactttttgctgtcgatctgctgatgggtgagacagagatccatgtactccagtgcgacggaggtatgaacctaacaaggtcagagatagccaactgaagttggatggcactgattgttttctttgatacatgcatccaatccatatagtacgaatgctctctctgaagaagcatgtatgaacaacaggatcatgctagcaaaagaacttgcttaagacttatcatcagtgctcgcgagagcgaggaggatgtgacagccagcacgcttataactgaagcatagaacagtggacggagtcttggaaaacgct

SEQ ID NO: 23627 - DNA, 269 bp, Oryza sativa
  Clone ID: uC-osflM202095e01b1
atttgttcatggtgaagcggcggtacgaactcataaatggcgggcgagtagctcaccaagatgcgagaagccgatgccggcctctcggcaatcactgacagcgcaaagtccgggccaatcacactgccaggccgctacctcagtggcaagcaggagcatgtgcatatgggcaaagatccacacatcgaccgactaagtggcagggccgtacgactccctggtagccccaccggacgacttgcaggagaccaatactatgctcaacaagc

SEQ ID NO: 23628 - DNA, 242 bp, Oryza sativa
  Clone ID: uC-osflM202095e06b1
cccccttcgctcctcccgccgccagcccgtcgcagctgcagcccgtcaggcgtccctgacgagtggggcgactgctcgccctccgcgcccgagccgccctcccagcccgaccccccaatcgacgacgacgagtggggccgggacgacccctcgtcctccggcaccgggtggggcgagccgggtgtgtccgaaccccaatccacctccgccgccgacgacgagtagggtggggaactggggat

SEQ ID NO: 23629 - DNA, 207 bp, Oryza sativa
  Clone ID: uC-osflM202095e08b1
ttgatttgcaccaaaattgctctctactcccagaagtgcccccacccctccgggagaattccccccctccgccggtcgattcggggctagaatccggcgtctccgccgccaatgaggtcggtccggcggttcgttgatccactctctcgattgtatgaaattggactaccttcttgacgcggcgactcggggagtatgagctcggtt

SEQ ID NO: 23630 - DNA, 451 bp, Oryza sativa
  Clone ID: uC-osflM202095e10b1
ttttcacccgaaccgaattcccgcaagagcacgaggcatcgcggcggcggcggcggcggcggcggcatctccgtcgatctccggcgaacacttgtgcgcagtcgataggggttcatcctgtcctgtccggggtgaggcggggcgccggtgaaccacgaggccgacgacggtcctccatctacacctctgccgtcgccggcgagcttcgcgatgggatacaaccggagacgcggccgtggatcctcctcctcctcgtcgtcgcgccgcaccaagcaggaagccgcgtgggatgatggtcccgggacatcacttccaaggcaggaagacactgaagaagaaccaaaaggtccaaaaattcagcttgctatgtgggactttggccaatgtgatgttaaaagatgcactggtcgtaagctttcaagatttgggctattaaaggagttgcgagtga

SEQ ID NO: 23631 - DNA, 435 bp, Oryza sativa
  Clone ID: uC-osflM202095e11b1
tggttatatccctccccttgtctcctgcacacctgggtttgcacgccgccatcatggacgagacgaccaccgctctgcaagaagcagacgctcattaagctataggaggaggaggaggaggaaataccaagagcgatgtcgacggggccggtgaagaaggagatccggcacgccggtggggtaagtggaggggccggaccgtcggcagggggcttgcgcggtccgcaggggcaggcagcgaagttcgcgcggtggtcgtcaagcggacggtacgtgagcctgtcgtgggaggacatcgacatggagggcgagctggcggcggactacaccaactacacggtgcagatcccgccgacgcccgacaaccagccgatgctgaacggagtggagccggtgtctggggcgatgaaggccgaggagcagtacgtgtccaac

SEQ ID NO: 23632 - DNA, 409 bp, Oryza sativa
  Clone ID: uC-osflM202095f02b1
gtgtgtgctgctcagcagtggctcatccgaggcaggagcggcagcagcaggaggaggaggaggaggagacagcagcggaggtcggcgcggccatcgaaggacgccgagctattcgctgggacatcacaggaagcagagcctgtcgtccatctcgaggatgatcagaatggggtcgaccatccatgaaggcgacgagagcgagaaggtgaaagctgaggagctgcggttgccagcggtggccacatcgtcgtcgcctctggagaacaagttacgcaaggacatcgacacgctgctggaggagaacctcgagttctggatgaagttcagctcgtccctgcagcgggtgcaggagttccagcgcaagcacgacgagctgatgcagcagctgcagccggcggccaccgaccgc

SEQ ID NO: 23633 - DNA, 104 bp, Oryza sativa
  Clone ID: uC-osflM202095f04b1
ggtgcacctaacgaggagacagcatagatgaggcatgaggatatatctgctttagcatattgtgtggctctgcaagattaaaaagtgctgtttgtggcccttct

SEQ ID NO: 23634 - DNA, 372 bp, Oryza sativa
  Clone ID: uC-osflM202095f07b1
aataaaccaacccaaccgccgccgcatcgccctcgttagaacgatggccgcgtcggcgctgcaccagaccaccagcttcctcggcaccgcccctcgccgggatgagctcgtccgccgcgtcggcgactccggtggccgcatcaccatgcgccgcaccgtcaagagcgcgccccagagcatctggtatggacctgaccgtcccaagtacctgggcccgttctcggagcagacgccatcgtacctgaccggagagttcccgggagactacgggtgggacacggcggggctatcggccgacccggagacgtttgcgaggaacagggagctggagggtgatccactcgcggtgggcgatgctgggggcgctgggct

SEQ ID NO: 23635 - DNA, 456 bp, Oryza sativa
  Clone ID: uC-osflM202095f09b1
ttttcttctctcggtggtgtgatgtccactgtgcagctcccgtgcaggcgttccgctttgatggaaaccgccgcggccgtggtgtgccgaggcggcgggctgcgcgcgccggcgcgtcgcggtggcagtgacagcagcacgacgcgcgcgggtggcgttgctgcctccccggcgccctccaccaccgcgcgacggaggccgctgctcgtcgcgtcgctcggggagcccctcatcacggcgcaacccttgtcgtcgtccctgggagatggcgccgcggtacacgagacgctggctcgctccgattcggtgatcccgtcgctgaagccgtctactgcgttgatcactcggtccaggttgacgccgacgaggagaccggcttcaccaagacactcccacctcctgatgacgttcctacgaagacagtgcacgtcaaattcgtgctgcaaaagcggtgcg

SEQ ID NO: 23636 - DNA, 470 bp, Oryza sativa
  unsure (1)..(470): unsure at all n locations
  Clone ID: uC-osflM202095f10b1
tcgcttggagggaggaaggaggcctgaagtggcgcagagtaggcgcttgtaaacaaatccccccatttgcttcttttgcactgaagaatccctgaagaatccagcaggatggagaagaaggcgtccatcctcatgaaccggtatgagctcggccgcatgctcgggcaaggcaccttcgccaaggtgtaccatgcacggaaccttgcatccaaccagagcgtcgccatcaaggtcattgacaaggaaaaggtattgcgtgtcggcatgattgaccagatcaagcgagagatctccatcatgcgcctcgttcgccaccccaacatcggccagctgcacgaggtcatggccagccagagcaagatatattttgcaatggagtatgtccggngtggtgagctcttcagcagggtcgccagggggcgactaaggaggatgctgcgaggaagtacttccagcagttgataggggct

SEQ ID NO: 23637 - DNA, 448 bp, Oryza sativa
  Clone ID: uC-osflM202095f11b1
tcgcgtggtaagggcagagggagggagagagcggcggcggcgacgccgaaaacattcttcaggcagggcgagaaggtcgtcggccatgtcaacgaccttctcggacttcgatccgatcactgagcgccgccatgtcgagaggcagaggcaagagcgcaggcgcgtcatggttgcagccggcgccgcgtcggtcattcttatcatcatcgtcatgggcggcgcggtcgtcgcctacaacgcgagcttcggtgatggtggctcctcttcctcctccggttcagcgtcaggtggcggcgcgcagcccagcctgcacggcgtgtccaagatcatcaaggcgatgtgcgcgcagacggactacaaggacacctgcgagaagagccttgccaaggcccgcgcgaacgccagcgcgtcgtcgtcgtcgtcgtcgcccaaggacgttctgcgcgcc

SEQ ID NO: 23638 - DNA, 487 bp, Oryza sativa
  Clone ID: uC-osflM202095f12b1
tttttatgattcgtaatactaggaaatgtcccatccggtcctaggttatattttgggacggatgcagtatatactatggcatgtcacattttcaatatctgtggcagtgtttacctctttatgtggattatctaactcttgctttgctattctttgaagtaatttgtgtctaattgctgaattgttgtctttctatgcttgacctgactatttaattcaattgaaaaaaacaggcggctttttgcagaaaataaggaccagcttggtgtatctctgccctgctgagcacatccctccaaaaattgaggtggacctggcaaatcttgacattggagatagggtatcaatgaatgacatccccgttcatccgtcgttgaggttactgagtaaaaacgagaccatgcctgtctgcaagatcttggccctgaaaccagttgagtagaggaatccatgcaaatttttggagcttggtgacaatggaccccag

SEQ ID NO: 23639 - DNA, 492 bp, Oryza sativa
  Clone ID: uC-osflM202095g01b1
cctttctgtcccgtctcctcgcccgccgccctcgactgccgtctcctcgcctgccgctggcgccgatctccatcctgctagcagaggtggcgccggcgtcctcctgctcccgccgcattcgcatcctaatccatcccatccggcctcggcctcgaatttcgtctcctcgcccgccgcttgcgccgatccccatcctgcgagcagaggtggcgcccggcgtcctccttcttccaccgcatcgtcgctcgccgctcatggatcctgagatctagacgtcaacgtgcttcctggaaagagagaggctcaggcatgagagcatacctctaaaataatgtccgtgcttacctgtgtgcttgataacatgggctcatcctgtagcagatctcattctttaagtgaggctgaaacaaccaaaaatgcaaaatctgcagacattgacaggcgaattttgcaagagacataagccgagcaacacattcacaagctcttact

SEQ ID NO: 23640 - DNA, 472 bp, Oryza sativa
  Clone ID: uC-osflM202095g02b1
aataatttttctcctcctctttctcttctctctgtgtcactgcgtgtgaggagcgtagcttagagtgagaaaataatggcgttggagacgtgcttcagagcctgggcgactctgcacgccccacagccaccgtcctccggcggcagtagggacaggctcctcctctccggcgccggcagcagccagtccaagccaaggttgtccgtcgcctcaccgtcaccgctccggcctgcctcccgcttcgcctgccagtgcagcaacgtcgtcgacgaagtggtggtggcggacgagaagaactgggacagcatggtgctggggagcgaggcgccggtgctggtggagttctgggcgccgtggtgcggaccgtgcaggatgatcgcgccggtgatcgacgagctggccaaggagtacgtccgcaagatcaagtgctgctaggtgaacacggacgacttaaccaacatggcaccaacta

SEQ ID NO: 23641 - DNA, 381 bp, Oryza sativa
  Clone ID: uC-osflM202095g03b1
cattgatacgccattgccatacaccgctgctgccgaggtcgtcgttgacgggcgccgccgtcgtctcagccggcgtcggctccgtcgccagccaccgccgccaccgtcgtcggatccactatagatgccaaggtcgccgtccgctaccgtcgtctccgaggtcgtcgctgccagatgccgacgtcgtcggcaccgtcgccagatccgtcccgcgtccacccaagtttgaggtccttgccagaggctcgcttctaccgccaccatcacctgcccttgacgccgacccctaaacgaccttatacttcatatgtccaccccgcgcgcgcgtgccacaatatgatggagtgcacacttacgagacagttcaagcaccacaagcca

SEQ ID NO: 23642 - DNA, 533 bp, Oryza sativa
  Clone ID: uC-osflM202095g07b1
tgttaatctaacattgataatgggaaaccgtgaggctatttccaagatgcataatatgagtgcagctgttttgacatcagtacttacattgattgatgaatatgatttgtatggtcaagtggcatacccaaagcgtcacaaacactcggaagttcctgatatttaccgtttagcagtgagaacaaagggtgcttttgtaaatgtgccttactttgaacagttcggtgtcaccttgatagaggctgccatgcatggtttgcctgtaattgcaacaaaaaatggagctcctgttgaaattcaccaggtgctggacaatggtctccttgttgatccccatgatcagcatgcaattgcagatgcactctataaactcctttctgaaaaacaactttggtcaaaatgccgagagaatgggctgaaaaatatacatcagttttcttggcctgaacattgcaagaattacttgtcaaggatatcaactcttggcccaaggcatcctgcttttgcaggcaatgaagaccggattaggcacc

SEQ ID NO: 23643 - DNA, 346 bp, Oryza sativa
  Clone ID: uC-osflM202095g09b1
ttggtaagtgcgtcaagatcacacccgctcgtgccgagcatattaagcagtacaagtgcccggactgcaccaacaagaggacccgggcatgagtaacaagaagttgtgtcgaactgtgttagagtggagttgtcaatctccggatgtcatgatctcttagatattatcttgccctagcttttctagtttgtaagcttgtctctaatttaattttaaactgtaactgttgattaacctacctgtgtttaaagcttcatctttcctgtgttaattctagcattcatagtgtgtaaacttgcacatcttgtgtcaactgaagcctgaaggtactgcggctcccctgacc

SEQ ID NO: 23644 - DNA, 503 bp, Oryza sativa
  Clone ID: uC-osflM202095g10b1
gatatcggaatttctgataatgatgctgggactgtggagtctgttcaaaagatagatctgcagaaagatactagtgtttctctttctgcaaaccatctgcagaagttgcggttatcttttcaactgagtacaccactcgggaagacgtttaaacctcaccaggtgttcctcaagttaaagcatgatgaaagcaaggttgagcatttatttgttgtaccaggctctgcaaggcagtttaaaattgttctagactttcttggtttggtggagaaattctactacctttctggaagatatgacctggagcttgcagttggtgatgctgcaatggagaattcatttctacgagcccttggccatattgaattggacctgcctgaggccccagaaaaagccccaaagcctccggccaggctgttgatccattctaaaatttggtccgaagaggaaatatcgcacatattccgttcccagagaagaggccacccaaggaactctcattt

SEQ ID NO: 23645 - DNA, 501 bp, Oryza sativa
  Clone ID: uC-osflM202095g12b1
tgtttttttaaagctcgcaatattctcattgcatatacacaagtgtagaatttatacacatttcgtggttcgtaattcttaaacaaaactgtattgaaaaaaaaaaaagaataacaaggtttcagatgaaactagtagggtcatttgcgatgttaactcttgattccgacgaatttgcatattttatggagaaagccgccatcactagtactaactgcaacaggctcctgcacaggctctttgaagttagccttatcactcaactcttgaaatgcattaacaacgttctgtagtcgggcaacaaactcgattagaagggaggcaaatgtggccaaggacagagcacttgcactttcatatgtttttgtttcctcgtcttcaagtggcagatttggatggaatgatcttcgagcaggccaagacagtaacttgaaatctacagttgatgatgattcatgtctgctcagaaatgaattaacagcacagctttttgaatgatgc

SEQ ID NO: 23646 - DNA, 359 bp, Oryza sativa
  Clone ID: uC-osflM202095h02b1
gctgtttttgagccgcaatggaattgaatgcagggacggtgaagaattattcatcaaagatcaatcactgaccaacgaaaatgtggacaagatagttggctatgctgttagttatcaccttaagcacaataaagtcgagatctgcaaggatggtaaacttgtattggcgagcgaaagccttaagcatgggctcaacatgctgcagaatatgcaaagtgataacaagagctcaaaaaaatcactgaaggatgttgtcacagagaacgaatttgagaaaaggcttctggcagatgttataccacctgatgacatcggagtcacctatgatgatattggagccttggaaaatgtaaaagaca

SEQ ID NO: 23647 - DNA, 468 bp, Oryza sativa
  unsure (1)..(468): unsure at all n locations
  Clone ID: uC-osflM202095h03b1
gcgctcattttcgcgtagttttaggccatctgagggccttggaatggctctcggcctccttcatttttcatagcatttgtgtagtgtgtgcaaatccatcatcgcatcttcatatctgaagaaatgaaggtgaccactcagctcaagcccatggcctcctcgtcgacgtcgccgtcgccgtcgcggctgccgcggagcgcgagcggcaaggcgcccacctcgccgccgtccagctccaacgcctcgcgccgccaccaccagcagccgccgcgggcctcggcgtcgacgcccgccaccccggcgccgtcgcgccaccacctcaagtcgctgtccatcagctgcatgacgatcaggaccgacgacgactcgccgccgtcggacgtcacccacaaggacaaggcggcgacnggcaaacccgtggcctactactcgtcgatgctgtcgccgaggaagctcatgcagcgcgcg

SEQ ID NO: 23648 - DNA, 440 bp, Oryza sativa
  Clone ID: uC-osflM202095h04b1
aagtactctctttctcactcgattgattcaagcagcaaataattagcctagcttactctttccatagctagctagcttgttgcgagcaagatcaggttgccggtgcagtaacagagagcaaccatgggtgtattggacagcctctctgatatgtgcagcctgacagagaccaaggaagccctcaagctaaggaagaagcggccactgcagacggtgaacatcaaggtgaagatggactgcgaggggtgcgagaggagggtgaagaacgcggtgaagtcgatgcgaggggtgacgagcgtggcggtgaacccgaagcagagccggtgcacggtgaccgggtacgtggaggcgagcaaggtgctggagcgcgtgaagagcaccgggaaggcggcggagatgtggccctacgtcccgtacaccatgaccacctacccgtacgt

SEQ ID NO: 23649 - DNA, 328 bp, Oryza sativa
  Clone ID: uC-osflM202095h08b1
ctttagagctttctctttctgtgtgtagtgtgtgcaactaggaggcttgttccatactagtttgctaggtcatggaaaagagcgagattttcgtaggagcacactcatatgcagctatatgtgcttttacactcatcataggatggttagctcactgggtatacagatggataaatcctccatgcaatgggaggcttcctccgggctcaatgggcttccctattgttggtgagaccttccaatttttcagaacaagtccatcaatagacatgccaatttactacaagcgaagactggagaggtatggacctatattcaaaactaacat

SEQ ID NO: 23650 - DNA, 417 bp, Oryza sativa
  Clone ID: uC-osflM202095h10b1
gttgtactcgagcaaagaaggagagagcttggtgagctgcatagatggccccctccgtgatggcgtcgtcggccaccaccgtcgctcccttccaggggctcaagtccaccgccggcatgcccgtcgcccgccgctccggcaactccagcttcggcaacgtcagcaatggcggcaggatcaggtgcatgcaggtgtggccgattgagggcatcaagaagttcgagaccctctcctacctgccaccgctcaccgtggaggacctcctgaagcagatcgagtacctgctccgttccaagtgggtgccctgcctcgagttcagcaaggtcggatttgtctaccgtgagaaccacaggtcccctggatactacgacggcaggtactggaccatgtggaagctgcccatgttccggtgcaccg

SEQ ID NO: 23651 - DNA, 454 bp, Oryza sativa
  Clone ID: uC-osflM202095h11b1
ttttgaggccgcgaccgcgaccgcgacgagcagcgccaccaaacaagggcagtacgtgcccatgtacgcgcaggactctgatgagaaggcgacggagaagagcgtgtcgtcgccggtcaccgcctacccgccgccgtcgaacgccgtggtagcgcacccgccggtcgtgccgtacggcgcgccgtacggaggagggtacccaccgcatcagcagcagtacggttacgcgggtcagccgccgtacgcgtacaacgccggcccaccgccgccggcgacgtacagctacgcggcggcacaacagccggcggcgaggaaaggtggacgaatgggcatgggcctcggactcgggctcctcggcggcgcggtcggcgggatgatgctcggggaaatggtcggcgacatggaggctgacgccgcctacgaagccgggttcaacgacgcactggaattttag

SEQ ID NO: 23652 - DNA, 422 bp, Oryza sativa
  unsure (1)..(422): unsure at all n locations
  Clone ID: uC-osflM202095h12b1
ttttcctctccccttcccacgctccgccgccgccgccgtgattcctcgcattcgtccccactccccagcggcaccgcatccgagccagcgcgacctcctcctcgagccagtggtcgcccgcccgcccgccgtcgctacctcctcctcgagccagcggctggcatagatccggttgtcgatgtggttgcagatcacggacgacgtcggccaccaggtggatgaggtcgagggaggcctggcggcgctgagcaacgatgtccaggtatggtgcttcttctccacctctctccctcatctcaggatgcgtcagatggtgctctccgggccgggatccttctctctcgcgcctcggtgtcgtcgacggcagcgtgaggaggccacggngcacaggatggagcacgcatgggctagcgagaccgcga

SEQ ID NO: 23653 - DNA, 499 bp, Oryza sativa
  Clone ID: uC-osflM202096a01b1
ccacccgttttttttcgatcgcctcgacagcgaccacatgctttgctccttggttagtccgcggtgtaacaccaatagacaagagcaagtctataaaaacatggctgatgcaaatatttgaggaatgcggtaatactgacattgaaggagttgactcctcaaatgcatgctacggtggaacagctgctttatttaattgtgttaattgggtcgagagcaactcatgggatggacgttatgggcttgttgtttgcacagacgctgcggtttacgctgaaggtccggctcgtccaaccggtggtgcacctgctattgcaatgctgattgaaccaacagctccagtttctttcgaaagcaagatagaggatctcatttggcccatgtctatgacttttacaagcctgatcttgctagggaatacccggtggtcgatggaaagctatcacagacatgctttttaatggctttagatttcctgttcaatgttttctgcaaaaag

SEQ ID NO: 23654 - DNA, 180 bp, Oryza sativa
  Clone ID: uC-osflM202096a03b1
ctaaatttggtgatgcatgcttgcgagcaatgcgtggtgatgctggcgttgtggaatgttcatatgttgcatctgcggcgaccgagttgccgttctttgcaacaaacgtgaggttaggtcgcgctggagccgaataggcatctcctctggggccgctgaattgcttttcagagagctgcc

SEQ ID NO: 23655 - DNA, 181 bp, Oryza sativa
  Clone ID: uC-osflM202096a04b1
gtccacataccctcaccctcccgcaaaaaccctaatcccacctcctcctcctccccccatggcggccaaggcggcggcgctctcctcctccccgttcgactactcccgccgcctcttctgccccgcggcgtctatccgcgcccgcacgccgaggtgcgtgatggggagcgagcaggtgagg

SEQ ID NO: 23656 - DNA, 85 bp, Oryza sativa
  Clone ID: uC-osflM202096a05b1
ttcacgtgtccgcccacgcgtccgagcccgccgcccgctgtgaagggagcttcgaggccgcccactacgagccctagacatgcac

SEQ ID NO: 23657 - DNA, 77 bp, Oryza sativa
  Clone ID: uC-osflM202096a08b1
ttgatattacctaacctaaccctagctttgcaaggagacgggcggcggggggcgctgcgtgcggcgtgcggtgcggc

SEQ ID NO: 23658 - DNA, 201 bp, Oryza sativa
  Clone ID: uC-osflM202096a10b1
tcggactcctactgcgactatacttgacagtcggacgctatcttcttcttgtgcccaccaccaccaccgctgctatggcggctaccgtgtcgatcgacatggtggacccgttcatctggcgcgcgtggagaggctgaatggacagccccaatgtcatcaaggtgccccgcttgtggtctcaactagcgcagcctttgttcc

SEQ ID NO: 23659 - DNA, 78 bp, Oryza sativa
  Clone ID: uC-osflM202096a11b1
atcgtttgattacacagcctcagaccgaataggctaagctcgccggagcttccctaatcccaactgcgaaactgcgaa

SEQ ID NO: 23660 - DNA, 404 bp, Oryza sativa
  Clone ID: uC-osflM202096b03b1
gtcgcctccgcaagatcaccggcgccaaggccaaggagctcctcatctgggtcaccctccacgagatcgccgtcgacgacccccccaccggcaagctcacctgcaaggccatcggcggcctctcccgcagcttccccgtcgacgccttcgaggcccccccgccgccgcccaagaacccctcccccgccgccggcgacaccaccaaggtcgatgaggagaagaagaaggagggggaggtcgccggcgacgccgccgccgccgccattgacgagatcgaggggaagatgaaggagatgaacagcaaggaggtgcaggcgcaggccgagggcgtggcagccatgaactgaagaagaccgatcgagcgactttcacagaacaccatacatcttattatcatgatcagc

SEQ ID NO: 23661 - DNA, 344 bp, Oryza sativa
  Clone ID: uC-osflM202096b04b1
caggccgcccgccggaccggtccggaacggactgtggctcgacccacgcgcccgcttacatgaggaaattcatagcagcactgcggcttgcactagcagcagcagctcatctgctgctgacgctgccaccggcacaatgctactggctcaacccggagatctacgacgccggcgggctgagccggcgagccttcccggaggggttcgtgttcggcacggccgcgtcggcgtaccaggtggagggcatggcgaagcagggtggccggggccctagcatctgggacgctttcatagagaaacccaggaaaagcaatcagagattcagagtactaaactttagtgca

SEQ ID NO: 23662 - DNA, 473 bp, Oryza sativa
  Clone ID: uC-osflM202096b06b1
gtcgaactccgcgagagagtttcgctttcctcccgatcaccgcgacgcattctgctttcgtctacagaggcagacaagaactgtggcattaacagggacaaagatgtcaagcatggcaggcttggcagcgtctcagactacttcatctcgcacggggcctgagacgctgacctcatcgggccacaaggggctattgccatgaagatgctctacctcggaacaaatcttcgggaccatcaaccgttccaagggggctcccgcgccgttcgcaggcacccccggcgcttgaaccaccccgccggtacacgacctaaacgtgccctacaagggcacctgggagggagaccgccaccccccagtggaccatgctggtccccccgacccccgatacaaacccccgatccagaccccctcttccaggaacatgatcgggtgatgtccaacattcccactgggcctttaaactatgcccc

SEQ ID NO: 23663 - DNA, 221 bp, Oryza sativa
  Clone ID: uC-osflM202096b07b1
gttcacaccacccaccaactgagagctgagcaggcgagcgagcggacatggcagcatcgctccaagccgcggccaccctgctgcagccggccaagctcggcggccgggcctcctccgccgcgctgccatcgcgcccgtcttcgcacgtcgccagggcgttcggcgccgacaccggtgccgccggcaggatcacgtgctccctgcagtccgacatccggcag

SEQ ID NO: 23664 - DNA, 60 bp, Oryza sativa
  Clone ID: uC-osflM202096b08b1
tcggtggatggaaaggagatcgctgtacctcatggcattataatgggtgctgagcgaaga

SEQ ID NO: 23665 - DNA, 266 bp, Oryza sativa
  Clone ID: uC-osflM202096b09b1
tcgtcttcttccacctaaacacatacaccttttattcccaatggatctagccggggaggttgccaaacaactgttggaatgtatagcatgtgtgtgcacagttccttctgttactcttattaccacactaattagcagatatagattattcttccataaattgcaggctgttatcagttgatagctcatgctttattctttgcttcatccttttaggtatacctaatacctaacgggcttttcgttgtctctttaatctctctttt

SEQ ID NO: 23666 - DNA, 172 bp, Oryza sativa
  Clone ID: uC-osflM202096b10b1
tcgtttgcacggacaatagcaacactgccgaccaccaccaccgcggcggccctgaccccaccctgcgagccctagccatggacggcgacgacgaggatatgcgcgacgtctcgtccacgtcgtcctcctcctgcggcggaggggagggcgcggggttcgaggaggggatggt

SEQ ID NO: 23667 - DNA, 168 bp, Oryza sativa
  Clone ID: uC-osflM202096b11b1
atcggtttctgggtgaaatacctcgccgccggccaccactacagcggtggccctgaccgcaccctgagagccctagccatggacggctactacgaggatatgctcgacttctcgtccacgtcgtcctcctcctgcggcggatgggaggtcgcggggtacgaggagggg

SEQ ID NO: 23668 - DNA, 508 bp, Oryza sativa
  Clone ID: uC-osflM202096c02b1
tttgcatcgcctccggatgagcaattataatgtactgcttgcctgccccagtgctgactctagtgtattgtgcagtgcagcaacgattatgtggccatgggatgctttagttaaagggttggatttctcaccaaaacattttaaccaaccacctgatggtatatccttttcttggtacggtcactataggggaccccttgatgacttgttcttgaactcagagtcagatgactctatggcagagtcagaggactccctggcagagtcaagggactccaaggcttttcaaccacataccaagtcagtgaaaccacctattttacccaaatctgtggccaatggggttaggcaagtactgtactcctttcctgaaggtatcagtcttccaaatcttcgagcagagcttagaaagaatcatgtgttcatggataaaggattatttggcttcaaaaacttctcttctcttctccaagccatgcctgatgttgtgaagtttatagatcctcta

SEQ ID NO: 23669 - DNA, 216 bp, Oryza sativa
  Clone ID: uC-osflM202096c03b1
cgaggtcgtctccaaggtcggcaccaccgcgcgcatcaccgaggccgacgtcgaggccatgccctacttgcaggcggtggtgaaggagacattccggcgacacccgccgagccacttcgtgctgtcgcacgcggcgacgagggacacggagctcggcgggtaccgcgtgccggcggacgccagcgtggagttttacccggcgtggctgtttgtgta

SEQ ID NO: 23670 - DNA, 91 bp, Oryza sativa
  Clone ID: uC-osflM202096c09b1
tcggtgtggttcaaaaagtaaaccatcagacatgccttctcgggcggtattaggtgccaatcactattttgatgactagtctactgtacca

SEQ ID NO: 23671 - DNA, 220 bp, Oryza sativa
  Clone ID: uC-osflM202096c10b1
tcggttggttgcaaaatccaagacatactcacagaatcaaataataacaaaggtttcctagcctcaaaggatacatatatatagtttccctacaatacaatggagcctgtcaatgatttccaggaaggcatttcaacagagcatgcctttgaggcagagcctgtgccatcattgtcggaaacaataacgccacgatcaatggtgggtgagttcatcctta

SEQ ID NO: 23672 - DNA, 482 bp, Oryza sativa
  Clone ID: uC-osflM202096c11b1
tcgctgggtggcaaaacccaagacatactcacaggatcatattatagcaaaggtttcctttcctcaaaggatacatatatatagtttccctacaatacaatggagcctgccaatgatttccaggaaggcatttcaacagagcatgcctttgaggcatagcctgtgccatcattgtcggaaacaataacgccacgatcaatggtggtgagcttcatccttagggtaactctcatcatcgtcgccatgaaggtcaccttgagctctggcttcattccgtcgctcagcatcccagccggcctcctcggtttttgtgtatcccgtgcgtcgatccgcattcttgactacttagcagtggcacaactaccattcacacgccaagagaacaccatcatccagaccctgtgcgtcgcatgcacctcgatcacattcaccggtggctttgggacatatatccttgcaatgggaaagaaagcagcttaggg

SEQ ID NO: 23673 - DNA, 293 bp, Oryza sativa
  Clone ID: uC-osflM202096c12b1
gtaggaggaggatagcagcctggctgtcggtgcggtgcaggaggagctcatctgctgctgacgctgccaccggcacaatgctactggctcaacccggagatctacgacgccggcgggctgagccggcgagccttcccggaggggttcgtgttcggcacggccgcgtcggcgtaccaggtggagggcatggcgaagcagggtggccggggccctagcatctgggacgctttcatagagaaaccaggtaaaagtaatcagagattcagagtactaaactttaatgcaggtgagat

SEQ ID NO: 23674 - DNA, 323 bp, Oryza sativa
  Clone ID: uC-osflM202096d01b1
atcccttcctttaattctctcgaactacgactagcttcgagctttcatcactcgtcagcttgagcgcccagcagctatcgtcagcttaaaattagcgccccagcttagcttctgagctgactcgagcttgaagacagattttggtcgcatttcagctaacacaaagcttaacacacgagctcttgtcagctgatcgatccggggttgaagagatattgcagaaaaagaagaagaagaagaagaatcaagcttggtgcacggcgtcgccgccatggcggcattgcgcgtgggcacgagggcggtggagtgggaggttccaagca

SEQ ID NO: 23675 - DNA, 501 bp, Oryza sativa
  Clone ID: uC-osflM202096d02b1
ctttgtgagaattcttaattcatgagttgtagggagggacgtatgtcaccacaaacagaaactaaagcaagtgttggatttaaagctggtgttaaggattataaattgacttactacaccccggagtacgaaaccaaggacactgatatcttggcagcattccgagtaactcctcagccgggggttccgcccgaagaagcaggggctgcagtagctgccgaatcttctactggtacatggacaactgtttggactgatggacttaccagtcttgatcgttacaaaggccgatgctatcacatcgagcccgttgttggggaggataatcaatatatcgcttatgtagcttatccattagacctatttgaagagggttctgttactaacatgtttacttccattgtgggtaacgtatttggttttaaagccctacgcgctctacgtctggaggatctgcgaattccccctacttatttaaaaactttccaggtccgcctcatg

SEQ ID NO: 23676 - DNA, 108 bp, Oryza sativa
  Clone ID: uC-osflM202096d08b1
tcggttttgaattcttaattcatgagctgacgggagggttgcatgtaatcacaaacagatacttaagccagagttggatttaaagcttgtgtcaaggattatacaatt

SEQ ID NO: 23677 - DNA, 119 bp, Oryza sativa
  Clone ID: uC-osflM202096e02b1
ctcttctgttccttcctcgagtcgaaacctcgcgaagccgccgccgccgccgccgactctcgctagggctagggttttcctcccgccgtcagaagacccctaacctgcaaccgcacaag

SEQ ID NO: 23678 - DNA, 176 bp, Oryza sativa
  Clone ID: uC-osflM202096e04b1
gctggggtggctcttctgcgggcgatcaaaagggcagtgacagcatgtattgacgaacgcaatgtgcttgctggccgaatagacatgaacacatatcactgagagggagtgaaacagtgttgacgagtagcctgcttttgggtgatagaaatagcattgtagtagggtggtaatta

SEQ ID NO: 23679 - DNA, 507 bp, Oryza sativa
  Clone ID: uC-osflM202096e05b1
tctgagtacaaaataaaatacaacaaagattaatgatgcagttatctttttttacctgaatttgatttttctgaactaagtgttttctttcttctattacctaattttgatgtctgtgttttcacttcacttatgccatctttctcccaataatatttggctaagctacattaggaattctcgattagctgaacctagtctttattctttttcttttgtgaattgaacccatatgtcaagtagtgtatgctatattaactgaaacctttcctgttctatggatgtttataaaatagaatttgttgtttaagattcagatagttttttattttaatttgtacttggatgtcattacaagtaagtgtgcctgacgtagtgtttattgacatttgggaatctgtaaaattgtgttgctttgggcttaagaacaatgggtagatacttcacattataatcatacttcacatttactaatcaaacggttcaatgtaaaagttactcatgctc

SEQ ID NO: 23680 - DNA, 67 bp, Oryza sativa
  Clone ID: uC-osflM202096e06b1
ttagttttctctttgaatgagatgttagaagaaagttgcatgagtcctgttgaagggtagcctaaca

SEQ ID NO: 23681 - DNA, 79 bp, Oryza sativa
  Clone ID: uC-osflM202096e07b1
tcgtttgtgtcttctttgtattgctgctactaataaacttaccttctttatcttgcatgtaccatctaaggaatggtag

SEQ ID NO: 23682 - DNA, 78 bp, Oryza sativa
  Clone ID: uC-osflM202096e09b1
tttgggtcctgtatgagtggcaggtccggcgacagtactttgagctttcgataagtaaagccaaacaaataaattgtt

SEQ ID NO: 23683 - DNA, 170 bp, Oryza sativa
  Clone ID: uC-osflM202096e11b1
tcgctcgctcatcgccatctctctcagctctcacagctcactgcatcaatggccgcggccaccatggcgctctcctccccggtgatggcccgcgcggcgccgacgacctcctccgcgctcttcggcgaggcgcggaacaccatgcgcaagaccgtcgtgatgcccaagcc

SEQ ID NO: 23684 - DNA, 84 bp, Oryza sativa
  Clone ID: uC-osflM202096e12b1
tcgttgaaataccaagagagaaaaaaaagagagaataatttcccccttttctctcttccgtgccggagaatcgatggagattag

SEQ ID NO: 23685 - DNA, 117 bp, Oryza sativa
  Clone ID: uC-osflM202096f02b1
tgtgttttacaacaacaacatcatcatcatctattacacacactattagggcaggtgatcgaatagctaggaagcaagcaagcagagagttgtctatcgagtgatcggaggatgggg

SEQ ID NO: 23686 - DNA, 494 bp, Oryza sativa
  Clone ID: uC-osflM202096f05b1
atcgtctcctcctcctctcgccgctcgcagcgaaaaagccagcgcctcccagcgcccacgcgatcccgacgaatcgaatcgagtccgagacgccgatctcggattcgagaccgttgatttcaaccaacacaagccctcctccggatcgatccgctcctcttcagccatggcaggaatggcacccgaaggctcccagtttgatgctaagcactatgacagcaagatgcaggaactactgcaccaaggtgacaatgaggaattcttcacttcatatgatgaagtttttgagagttttgatgacatgggcctccaagagaaccttctcagaggcatctatgcttatggtttttgagaagccatcagctattcagcaaggggggattgttcccttctgcaaagggcttgatggtgatcagcaggctcaatctggaacaggaaaaactgctaccttctgttctgggatcctgaggcacttgactttggattggtggagt

SEQ ID NO: 23687 - DNA, 82 bp, Oryza sativa
  Clone ID: uC-osflM202096f06b1
gttgtttcttctatgaatagcagctctgaagacagtagcctgagctctgcataagagatgccaaacaattggtttgaatgga

SEQ ID NO: 23688 - DNA, 265 bp, Oryza sativa
  Clone ID: uC-osflM202096f07b1
tcggttgtgtcttctttcaatgacatgtttgaagacatttcgctgagtcctgtttaagggttgcctagcaatttgttttatagcatccagatggggcactataggatgtctgagtacttggattcggggtgccaacgacctgggtatgatactaccaagggataagatgtctgatcttgcaatagcttttatttggtaccgcaaggggtatttgatgactgagcaggtgctcaggaccgaggcgacgaggttaagtagcgatgtg

SEQ ID NO: 23689 - DNA, 87 bp, Oryza sativa
  Clone ID: uC-osflM202096f08b1
tcggttgggggctctgtgggggggaggtcgggcgggggtgccttgaggtctcgatgagcgatgcccatcaaacggattgtagtggag

SEQ ID NO: 23690 - DNA, 366 bp, Oryza sativa
  Clone ID: uC-osflM202096f11b1
atcactctctcggtccccatggagcggagaagatggcaaccgccgctgcagcctctcgagcctccacgtcacatcgccggcgccggctcatgtctctcctcacctcgcccacgccgttcggcggcgcggccgtccgccgccgcgcccctcccgcttccgccgccgcggcgacccggctcgacctcccgctggtgggcagccgggccgcgctgcacgtggcgcgcgcgcgcagaggcggcgtctcgtcccgcacgcatcggcgcctggaggagcgcggcttgaataagcgccggcgaggcgggagcgtttcggaccccgctccgatcgacatggactaggactcctctcgccggggaaggggtggcc

SEQ ID NO: 23691 - DNA, 102 bp, Oryza sativa
  Clone ID: uC-osflM202096f12b1
tcgtttctcctttctcccttccctatctatctcttttccgtttccagatcgccaaaaataagattccgcgtagcggctagagggatgtattctatcttttat

SEQ ID NO: 23692 - DNA, 425 bp, Oryza sativa
  Clone ID: uC-osflM202096g02b1
atctatttttgagctcaatcagcaacaacatctatctccttcttgcttagttaagtccttcgccctcccaagaagaagaagatgtcttgctgcggcggcaactgcggctgcggcagcggctgccagtgcggcggcggctgcggcggatgcaagatgttccctgatgtggaggccacagccaccaccaagaccttcgtcctcgctgctccatccaacaaggcgagctctggaggaatggagatggcggtggagagcggcgagaacggcggctgcggctgcaacacctgcaagtgtggcaccagctgccgcggctgctcctgctgctcctgcaactgaatctatcgttcgtcgtcgcccggctgcatgaggatttatcgcatggatgctgctactgtccatccgagctttggtcgaggccctaattt

SEQ ID NO: 23693 - DNA, 509 bp, Oryza sativa
  unsure (1)..(509): unsure at all n locations
  Clone ID: uC-osflM202096g03b1
ggatcttatccaccaccaccagcaagtctctgtcttgcaacatggaaccctgaattatcttttgttctcaaggctacaacaaaaccatctttgagtgtatcaggatatttccttctgagaactgtaggcaacttcgtctcagaagttatttccattggggattcagcaggagatttctgcttgtattttgagtcctcaggagacgcaaatcgtgaactggaactcaatacctggtcccttccactcattgcagtatcatcatctctgcgtgaggaataattactgccactctctacagcagataattcatctgttttctgttgagatctgcggcgagcaggtctctttttccctttctttccagaacggctgcgccttccttctgatcggnggacaatatgttgagatctagcagatgcttgaggctctttatgctgggatatggctctcctcttttcgtactccatttttaactgacttttaatcggctgctgcttcagaataaaaac

SEQ ID NO: 23694 - DNA, 174 bp, Oryza sativa
  Clone ID: uC-osflM202096g05b1
cttgcccaagaacgaactcaccacgctagtgttgagaagtggagagagttgagaggaatcaatggagatgatggttcatgggaggagagacgagcagtatggcggtctcaggctcgggcttgggcttgggctcagcctcggcgtcgccggtggtgcagcctacgactagctgct

SEQ ID NO: 23695 - DNA, 160 bp, Oryza sativa
  Clone ID: uC-osflM202096g06b1
atctgtatctccacctgagcacaggagaagccgcagccactgagatttgaccttctgtttctaccagaaaaacacaaacagtgaagatgtcgcagcctgctgagctttcccgtgaggagaatgtgaacatggctaagcttgcagagccggccgtgaggct

SEQ ID NO: 23696 - DNA, 236 bp, Oryza sativa
  Clone ID: uC-osflM202096g10b1
tcgctcaattcacaagtgtagactgtaggatggccacgctctttttctgcagccgcctgagttccggcggtttttcctgggaggagagattttttttttgtcttttttattctttttttttgtctttgtcttatttattcttctttattttttattacttttttctttttatttttctatattctcttttttttattttttttcatttatcttttcttttttatctttttttcttt

SEQ ID NO: 23697 - DNA, 75 bp, Oryza sativa
  Clone ID: uC-osflM202096g11b1
atcggtcattcaataagtcataactgtagcggggcgactttgtattctactaccggacgtaattcctacctacac

SEQ ID NO: 23698 - DNA, 389 bp, Oryza sativa
  Clone ID: uC-osflM202096g12b1
tcgttctcctgctgctgccgaagcggaggtggataccccggcatacgattctagatttttccaatcggcgaggttgccggagttctttggatgtactgatgtccttcaagtggaccatccttgatcggccagagctggcgttcgaggagatcgagaccagcaggctggtgagggcggagctcgacgccatgggcgtcgcgtacaggcacccggtcgccggcacgggcgtcgtcgcgaccgtaggcaccgggcgcccgccgttcgtcgcgctgcgcgccgacatggatgcactcccgatgcaggaagaggttgcaatggggagcacaagagtaaggttggcatgaagatgaacgcctgtggccacgactcacacaccatcatgcttcttg

SEQ ID NO: 23699 - DNA, 504 bp, Oryza sativa
  Clone ID: uC-osflM202096h01b1
gtttccatcgagggagcagtaaaaaaaccattccccggagcgctcgaggcgaatcgcgaattcgacatttcgagtttccacgcgcgccacctgttcgacgaaacgcctgcctgcgcggtttcgaggttccacgcgcgccacctgttggacaaaacccctcttcgcgcgtgctcgggccgcattggagggtccacctaccaggagcaggggggtcacgggcccagcgcacactgacgacggggactggttcagcgacgtcccggacgacatcattctcaatatcatgtccttcctgaccacgcgccaggctgtgcagacgtgtgtgctgtccggcggtggcgcaacctctggcgctccgtgccctgcatcaactccgacatagacgagttcacgcgggactccgactcggaaggatactatgatgaaaagacggaattggcgtcattatgttcatgggagggtgatggagctttttgcccttgttgcctttgatagacgtttcat

SEQ ID NO: 23700 - DNA, 452 bp, Oryza sativa
  Clone ID: uC-osflM202096h03b1
atttgatctaaagcctgccgctggttctaacaacgagataaatgtgctgaatcagtcccctttattccttgaacaagtgagaggggaggctcctcgtgttgatttttttaggaggggtgaggtggccaacatttgttagtaccaaattgacatattgttcggaacatgctcaccgagaatactaagatgacgttttctggtacacaggacaagtgcaatgcttgtgacatgaccgtgcatttcattgatctccttaccgcggtcagtattttctaccacaagtcttgctttaattgtcgtccctgtttaggcactttttttgtttttatttttcttttctttttcttattttttcttctttttttacttttttgagcagctttttaaggtaacaggactcctttatgaaaaaattcccttaggtacaaaggcaaacagtgaacaggtttaga

SEQ ID NO: 23701 - DNA, 88 bp, Oryza sativa
  Clone ID: uC-osflM202096h04b1
ctgtataccagatccgcaccgccaccgccgccgccgcgcgatcctccgccgcgcctaccggtcggggattggtggaggaggcccgcca

SEQ ID NO: 23702 - DNA, 140 bp, Oryza sativa
  Clone ID: uC-osflM202096h05b1
ttctctttctcccttcctcccctccttccttcctccccgcctcccgctcgttgccttcgccgccgcctcacgccgccgtgatttgagttaggttttttttttttttttgctatgaccagacttgacggcaaaggaaccac

SEQ ID NO: 23703 - DNA, 153 bp, Oryza sativa
  Clone ID: uC-osflM202096h06b1
gtaggttcaaggtcgcacggagcgcaactggaacaggggccgcaccttgcttgaggctcttgaccagatcaacgagcccaagaggccatcagacaagcccctacgtttttcccttcaggacgtgtacaagatcgtctcgcttgctacctatcc

SEQ ID NO: 23704 - DNA, 371 bp, Oryza sativa
  Clone ID: uC-osflM202096h09b1
tcgttatcaaagcctcccatcaacttcttgcacacaccctccctttggctttcatctgcatctattcagttgcagattgagagccaaagacattatattgattctatcaggagggttgtgctagcgaattcttgttagcaacaaattgacatattgctcggcacatccccaccgagaataccaagatgacgttctctggtacacaggacaagtgcaatgcttgtgacaagaccgtgcatttcattgatctccttaccgcggacagtattccctaccacaagtcttgcttcagatgcagcccctgcaaaggcacactttcgatgtgcaggtattcgtccatggatggggttctttactgcaagacccatttt

SEQ ID NO: 23705 - DNA, 396 bp, Oryza sativa
  Clone ID: uC-osflM202097a04b1
catctgcatccaaaaccaaacccaaactcgtattctccaccggagcagagcagcggcggcggcaatggacgccctcctcgtggagaaggtcctcctgggcctgttcgtggcggcggtgctggccctagtggtggccaagctcaccgggaagaggctccgactcccgcccggtcccgccggcgcgcccatcgtcggcaactggctccaggtcggcgacgacctcaaccaccgtaacctgatggcgctggcgcggcggctcggcgacatcctcctcctccgcatgggcgtccgcaacctggtggtggtgtccagcccggacctcgacaggaggtgctccacaccagggcgtcgagttcggctcccgcacccgcaacgtggtgttcgacatcttcaccg

SEQ ID NO: 23706 - DNA, 78 bp, Oryza sativa
  Clone ID: uC-osflM202097a06b1
aagctggtccgcctgcaggcgccgcggcagtaccggggggacccacgcgtccgcctgcttatactacagatgaccggc

SEQ ID NO: 23707 - DNA, 439 bp, Oryza sativa
  Clone ID: uC-osflM202097a07b1
cctgtgcaaagatcaatgttctgctgcaagcatatatttctaggctgaaattggagggtctttcgcttagctccgatatggtctacatcagacagagtgctggccgtctcttacgagcgttgtttgagatagttctgaagagaggatgggcccaactagcagagaaggctttgaatctttgtaagatgatagataagcagatgtggaatgtccaaactcccctgcgccaattccctggtattccgaaggaaatcctaatgaaactggagaaaaaagaattggcttgggagaggtactacgacctatcatctcaggaaattggtgaactaattcggttcccgaagatgggcaggcaactgtacaagtgcattcaccagttccaaagttgtatctttagcccatgttcagccaatactcgtacggtttgggttttgaggtg

SEQ ID NO: 23708 - DNA, 431 bp, Oryza sativa
  Clone ID: uC-osflM202097a08b1
gtacgatgtgatgccactgccagtatgccacacacaaccagtaaacctgggataatggttggtgtccggtgttcatgcattgactcgaatagcgagtcttctgttcagacatttgatgctatgactcgaatagcggtgactacacatcatatgccctgtgctaattgcaactcccaaacggaagcaaatctcccgatgggtaatcaccgcttgctgctgctcctcctcctcctgctcgcggtcgttggctctgatcatgtgggcgtgctcgccgccgacgagttcacctacaacggcttcggcggtgccaacctcacgctcgactgcatggccgccgtggcgcccaacggacttctcgtgctcagcaacggcacgaaccagatggtcgggcacgcgttccacccgacgccgatccgcctgcggggcggcgc

SEQ ID NO: 23709 - DNA, 465 bp, Oryza sativa
  unsure (1)..(465): unsure at all n locations
  Clone ID: uC-osflM202097a09b1
ttctcacctccacctcgcgcactcagtctgtactacctgtacgtacgtggccgccgctagctaagctaggaattgaaatggggatggagaggccgcaagagaaggtggccaccaccaccaccgtcgccttcaacctcgccgagtccggctactccgaccgccccgacctcgacgacgacggccgcgagaagcgcacagggacgctggtgacggcgagcgcgcacataataacggcggtgatcggctccggcgtgctgtcgctggcgtgggcgatagcgcagctggggtggtgtgatcgggccggccgtgctggaggcgttctcggtcataacctggctctgctccagcctactcgccgactgctaccgatctaccgaccccgtccatggcaagcgcaactacacctacggncaagccgtcagggccaacctaagtgtggccaagtacaggctctgctcggtggca

SEQ ID NO: 23710 - DNA, 452 bp, Oryza sativa
  Clone ID: uC-osflM202097a10b1
atccccgcgacgcgcacgcgacgcgacgaccacccagccacgcgcgacgcgccggaggagccgggcccgccatggcgaaccccatcatcccgagcagcagcggcagcgacggcgctgaggcgaggacgaagctcgggcggctgaacgcggcggtggcgcgctcgcgggtcggtcggcgggtcaagctggcggcacgcgggtcgacgttcaccacggagctccgcgccgggacgaccacgttgctcaccatgggctacatcctctccgtcaacgcctgcatgctgtgcgactccggcgccacctgcaccgccgacgactgcgacgcgccgtccccggcgtgcaggttcccgcccgtggaccccgggtacgccgcctgcgtggcccgcgcgcgccgcgacctgatcgtcgccacggcggcgtcgtcggagatcggctactcatcatgggcacct

SEQ ID NO: 23711 - DNA, 295 bp, Oryza sativa
  Clone ID: uC-osflM202097a11b1
tgtttcctcatcgagcataggtcggagtgcaaccggagtgccatggtgtatttcatggattcttttctacatggcatggatgctgataaacaccagatttttggggagcgtggccctatgattgagacaaatatgtgtgcatctgatggtcgttctgatgttggacaacgatgccagagacttgggtgttacaatggtgccgaaggacagacattggtctggaaacgccacaagctcatgcagccatgccaaatgctcggctgtcctcatattgtaccagatgggtcaccattat

SEQ ID NO: 23712 - DNA, 299 bp, Oryza sativa
  Clone ID: uC-osflM202097a12b1
gctatcttccacatgaatggcttgaatctacccataccgtcatcaagcatcttcggccagtcaactcagttgccatgttaagaattgctttccgcatattgagtcccttgttgcctcgtctagcctttgctcgacctctgttcatgaagaccttggctttgctgttcaatgtgttgggggatgtatttgggaaagaattctcaggcttcacctcctgtggaggcatcggaaattgctgacataattgacttcttgcaccatgcagtcatgtatgagggtcaaggaggtcccgttcagag

SEQ ID NO: 23713 - DNA, 395 bp, Oryza sativa
  Clone ID: uC-osflM202097b02b1
cgtgtgctcgatctccctatttctctctcccgtgtggtcggatctcactgctgcggcggccgcggctgcgaacgaggggggagagagagaggtcgaggtacagaggaaaggcacaggagggctgaagacgaccaacggctacggcttgctgcaggtccgggtggtggccgccatccgaccgaactccttctactcggagacggtggccaagatgctcgtctccaccacgctcacacggtgttgatatcctcacacgtaccttcaggacagcaccacgaccttcagaccaagttctctcatgagccccaaccgattgactgggagtactacagaaaaggaattgggtctaaagttgtagatatgtacaaggaagcttatgaaagcattgaaatccc

SEQ ID NO: 23714 - DNA, 479 bp, Oryza sativa
  unsure (1)..(479): unsure at all n locations
  Clone ID: uC-osflM202097b03b1
cgtcgtcgccgcgagtttgctcctctcggcggcgccctcctcgtcgtccccgcgcgctcgtgccgctgctccggccagcgggtactccccgtggcgaggcagcattagtagaatatgatcgcacccaacagctatggctaccacacaagcctcagaagcagccactgagaaaggattgcctttggggatggatgtctccatggtggatgaatatgcttcccagtccaagctgctgcaggaattcgttaaaattcccactattggcaacgcttggatcttcaattgcaagactgaaaacacatctagggcgatagtttctgttggccaaacagatctgttggcaaacaaaaagaggagctttctattaaattcccacatctcaaaaaattcctcaaaatctggggatngtcaaggggtcttcctttccaatcgaaatgagtgggagtttcagcagtaatttcatcggcatctgggagaaa

SEQ ID NO: 23715 - DNA, 463 bp, Oryza sativa
  unsure (1)..(463): unsure at all n locations
  Clone ID: uC-osflM202097b04b1
gttccttcaaggaggaaatcagcaaggttgttaagatccaggaagagcttgacatcgatgtccttgttcacggcgagcctgaggtcagtatccttgtgtactgtttgtgtctcctagactttgcacctggctgttcgagaaaacaaaataaatatattgatcgaagcattaacaaagtttggtttgttctgcattgaagtaagctaattggcatgtattttatactttcagagaaacgatatggttgagtacttcggtgagcagttttctggttttgcattcactgccaacggatgggtgcaatcttaatgatcacggtgtgtcaagccaccatttatctatngtgatgtgagccggcccaaccccatgactgtgttctggtccaagttggcgcatagcatgacctctcgccccatgatgggaatgttgactggtcccgtcacactccttaactggtcttttg

SEQ ID NO: 23716 - DNA, 506 bp, Oryza sativa
  unsure (1)..(506): unsure at all n locations
  Clone ID: uC-osflM202097b05b1
cctcctcccatccggatctcgccgggccgggccgggccacctttttccgggccgggtcgtcgggcatgggcgtcgccaccaacggctcctcctcctccacctcggagtcggcggagaccgcgcagtcgcaggcgtacaagttcctcatctacggccggaccgggtggatcgggggcctgctcggccagctctgcgccgcgcggggcatccccttcgcctacggcgccgggcgcctcgagaaccgcgcccagctcgagaccgacatcgacgaggtcgcgcccacccacgtgttcaatgccgcggtggtcaccggccgccccaacgtcgactggtgcgagacccatccgaccgagaccatccgcgccaacgtctgcggnacgcttacgctcgccgacgtctgccgcgcccgcggccttgtgctcatcaactacgccacgggctgcatcttcgagtacgacgccggccaccagctcggcacagggatcgggttcaaggaggaggacacg

SEQ ID NO: 23717 - DNA, 261 bp, Oryza sativa
  Clone ID: uC-osflM202097b06b1
tgctgttatggcatcctcctaccttctactcgcctgtgttgtggcggcggctatggtgtccgccgtctcctgctggccacccaaggtgccaccgggccccaacatcacgacaagctacggcgacaagtggctggaagccaaggccacctggtatggtgcgcccaagggtgctggccccaaggacaacggctgcgcctgcgggtacaaggatgtcgacaaggctcccttcctcggcatgaactcctgcggagacgaccccat

SEQ ID NO: 23718 - DNA, 269 bp, Oryza sativa
  Clone ID: uC-osflM202097b07b1
gctttgcaatctaatttggggccgaacacaccagggtctgcgactctggcgaaggccggcggtcgggaggcggcggcggaggaggaggtcgtgttgtggagggaggacgcgaggaggttcgagacgcccgacggcgaggcctaccttcagtaccgcctcctcgccgccgcccagccgcgctcctcctcctccggcgacggcggcggcggcggcggcgcgacgacgccggcagcggtgatggagatggcgcacacgtacgtgccggggag

SEQ ID NO: 23719 - DNA, 450 bp, Oryza sativa
  unsure (1)..(450): unsure at all n locations
  Clone ID: uC-osflM202097b10b1
tctcaagctctatttgcccctctagtcgctgctgaggaacccaaagtcagaccagcagctgagccagcttccaacccatctgagcaagctgtccatgtatcaaagaagcacaaggataacaaagtcagaggaccagaggtcaaggaagaaagagttgcacagtagcatcttgcccttcacagcctgaggagtttggattccatctttctgtgctggaggttgacaggctttggtgacaacatggggctgtgtaggtaacatgctaaccagctggggaccatcagtacaatgnggcggtgctcaaatggcattagattggagtctgtttccttttcttctgtaattagaccaacaatatcagtcatgtggtagtagtagtagtggccgaacaaaacagtagcaacgccatgaagtatgaactactcccgtncgtccgtgctaggctggtag

SEQ ID NO: 23720 - DNA, 369 bp, Oryza sativa
  Clone ID: uC-osflM202097b11b1
cgattcctcgccaccacacccacccacccaccaatggcgtcctcccgcctcctcctcctcgccgcgctgctcgccacggcggcggtgctggcggcgtcgcagaagccgaaggccgccacgccgacgaaggccacgccggcgtcgcccggccccgcggcggcggcggccgacggccccgcgccgacgaacgtgacggcagtgctggagaagtccggcaagtacaccaccttcctccggctcctccacgagagccgggtggacacccagatcaacagccagctgatggacagctacaacgggctgaccatgttcgcgcccacggaccgccgcgtcgcggcgctcaagccggcacgctcactcgctgtcgtc

SEQ ID NO: 23721 - DNA, 418 bp, Oryza sativa
  Clone ID: uC-osflM202097c03b1
aatttctcatcttttcgctctcgatctcctacagaagcaatagtagccagcaaatcaatcgatcgatccgtacaatggcggccctgaagatgaacaggatggccgtggcggcgctgttcctcgccgccgtggtggtggcgggcggcgctggcgctagcgcccacgtcggggttggggctggggctggggccgacgccggcgtcggcgccgccgtcggggctggcgctgacgccgccctcggagttggcgccgtcgccgccggcgccgccggggctggagttggagctggaattggagccgccgtcaacgtcgccgggtctctcaccggcgccgctgagggcgccgccggcgtggcacccaaggtgcatgtgtgagatcgatcgatcgatcgagcgcgccgggggtttcatctcacgac

SEQ ID NO: 23722 - DNA, 106 bp, Oryza sativa
  Clone ID: uC-osflM202097c05b1
ccttttcaacaaggtaatggccgtacgagcctgacgactgtccatggattgtagactgtattaagctacaacaagctactaatagatctcaagaatgagttccgct

SEQ ID NO: 23723 - DNA, 441 bp, Oryza sativa
  Clone ID: uC-osflM202097c08b1
ctggtggtgctgggggcagggaaccgtagattagagcaagtataatagtacagcaggctatcagccaaatctggcgagaaaattgcatatctactcgctagaatggcatcacttttaactggcattcgatgtaatgccattcgccgccgccgccgccttcttctcctccttccaatctctcctctgatcttctcttcactgtgtacgcttgcgtgtatcagtttgacgctctacaaactgagctataagggcaagcagaaattatggggaaatttaactatttgccattggatccatgccattgtaactggagtatttgctactcttcgacacttcggggccgcctccaccatgcggctggttgcctggatgctcatccatggccgtgcggcggcgttgggggccgggaaccgtaggctggtattgcctggtgtggcatca

SEQ ID NO: 23724 - DNA, 191 bp, Oryza sativa
  Clone ID: uC-osflM202097c11b1
gttcgacaagctcaaggccgagcgtgagagaggtatcaccatcgatattgccctgtggaagttcgagaccaccaagtactactgcacggtcatcgatgcccctggtcaccgtgacttcatcaagaacatgatcacgggtacctcccaggctgactgtgccgtgctcatcattgactccaccactggtggtt

SEQ ID NO: 23725 - DNA, 448 bp, Oryza sativa
  Clone ID: uC-osflM202097c12b1
gttgtcgccctttttttttttttttggacacaatgattagggatcacttattcattatagttcttccatgctgctctaccacagcaaaacgtttcagacaccatcaaaccagacttaaggatacacattacaggtaaatagtacacaatgaaacgggacacgaccaaggaccagaccagacaaccatagctccattggggaagacaaataggcagacttgtgaaccctagaacagcagcagctccatggctgaggacttactggccaccacggaggcggagcaccaggtggagctgtggactccttctggatgctgtaatccgcaagggtgcggccatcctcaagctgcttaccagcaaagatcagacgctgctggtccggggggatgccctccttgtcctggatcttcgccttcacgttgtcaatagtgtcggacgactcaacctca

SEQ ID NO: 23726 - DNA, 279 bp, Oryza sativa
  Clone ID: uC-osflM202097d02b1
ctctccgatccccacgtatggcggctgctgcggcatctgcggcggcggccactgccgctgtggacggtgcgcgtctgctgcagctggaggagcaggcggtgcacggcggcagcatcgcatgggagtacctctgactggacggaaggctacgcgcgcgcctagcgaaggccgtcctacggcttggcctgggcgtcctgaacgactcctccgcccgctcccgtctggcctcagaacagaggacgctgtatgatcatgtggccatagcttccatggattggc

SEQ ID NO: 23727 - DNA, 340 bp, Oryza sativa
  Clone ID: uC-osflM202097d03b1
ggctgttgagtactttctcaagcaaaaatgcagctcaaatccagagattgcaaaggtgttggagttcttccattttggatgtacttctgaagatatcaacaacttgtcacatgcattagctctaaaagagggggtaaatacagttatgttccctgttatgatggacatatgcaaagcaatgtgctccttggcaacacaaaattcaaccatccctatgctgtcgcgaactcatggacagccagcatcgccaacaactctgggaaaagagatggcgaattttgcggccagattgtcaagcataggaaatagtttttctgaggtcaagatactatggaaattc

SEQ ID NO: 23728 - DNA, 161 bp, Oryza sativa
  Clone ID: uC-osflM202097d04b1
gtcctcccgtggaaggaacaagggcagtgctatggtactggtcaatgccatgctcttggggcacatggaccaggtgcgacaatcgctattattaggcagggagaggtggttgcactgatgcaagcattgagctaaaaaacgaaagccccaatggacaagac

SEQ ID NO: 23729 - DNA, 373 bp, Oryza sativa
  Clone ID: uC-osflM202097d06b1
gttgtcccttactgggacgtccatcactctggaggtagaatagggtgacaccatcaacaacgcgcactccacgagccaggataaggaggtcattcctgagaccagaagagctaatgttgccggaagaagatgcgtattagccgacctttgccgactataacatgcagaaggagtccaccctgtaccttgtgctgcgcatacttggtgagatctgagcgcgtgctgtggtgcagatttggacttcattatacctatgccggtcgtctgtcatatcatcgagtcatgggtgtgtcgtctcctggtctagagcccctaggcgatgttgatactagtatgcatgctagtgcaacatgcctaactgtgcatcggtacc

SEQ ID NO: 23730 - DNA, 479 bp, Oryza sativa
  unsure (1)..(479): unsure at all n locations
  Clone ID: uC-osflM202097d10b1
cttctccctctccatcgccgtcgccgtccaagaagaggggaaaaggagatggatccggtcgcgggaagcaggtacaggtttggtccgcacgagatagccgagcggcaggtgttccgcacctcgcccctctccttcgccatcgtcaacctccgacccacccgccctggtcatatcctttatttctgccaattatgtgtatgcacagctgctctactcctctctctaatttagtgccttctagtatctacttcacattgcggtattatctgctctcaacttctcatactttattattattattattattattattattattattattattattattattattattattattattattattattnattatttgcaaaaaaaaaaacttctcttgctattcatcaatgaaatgtgcctctgtttcaaaaagaaaaaaaaaggaaagaaagaaagactctgcactgaactacatatgtaatgta

SEQ ID NO: 23731 - DNA, 430 bp, Oryza sativa
  Clone ID: uC-osflM202097d11b1
ataaaattcgaagccatccaccaacgaagaaaaaaaaaagggagaaaaaaaaatccacgcacactttgcgtgcgaggcgaggcggttcgattcgagaggagagagagagagagagagagagagagagatggacgccttctactcgacctcgtcggcgtacggagcggcggcgagcggctggggctacgactcgctgaagaacttccgccagatctcccccgccgtccagtcccacctcaagctcgtttacctgacactatgcgtcgccctggctgcgtcggcggtgggcgcatacctgcacgtcgccttgaacatcggcgggatgttgactatgctcgggtgcgtggggagcatcgcctggttgttctcggtgcctgtctttgaggagaggaagaggttttgggattctcttggccgctgccctgctgga

SEQ ID NO: 23732 - DNA, 444 bp, Oryza sativa
  Clone ID: uC-osflM202097d12b1
ctctccgatccccacgtatggcggcggcggcggcatctgcggcggcggcgacggccgcggaggacggggcgcggctgctgcggctggaggagcaggcggggcacggcggcggcggcgcgtgggagtacctctgcctcgcccgcaggctccgcgcgcgccgcccggagcccgtcctccgcctcggcctcgccctcctcaacgactcctccgcccgctcccgcctcgcctcagaacagtggacgctgtatgagcaggtggcagtggctgccatggattgccagcgtctcgatgtggcaaaggattgtattggagtgctttccaagcagtttcctggcagcatgcgggttggtcgattggaagccctgctgtttgaagcaaagggtgaatggactgatgctgaaagggcctatgcgcttatccttgaaaacaatccgttcgatcaga

SEQ ID NO: 23733 - DNA, 325 bp, Oryza sativa
  Clone ID: uC-osflM202097e02b1
gtgctgacgagctactacaagagcgaccacttcaagaaccggccgtacgacccgtaccacaactacacgagcccgacggcggccatcctctgcgccgacgcgttccagagcatgtacgcgcagatggtgtgcggcctgtgccagcgcaacgacgtgctgcgcctcggcgccgtgttcgcctccggcctcctccgggccatccgcttcctccagctcaactgggagcagctcgccgaagacatcgagtccggcgagctcacccctcgcgtcaccgacccgtcggtgcgcgaggctgtcgccgccatcctcctcccggaccccgagc

SEQ ID NO: 23734 - DNA, 191 bp, Oryza sativa
  Clone ID: uC-osflM202097e05b1
ctcttttagttgcggcggcggcgccgtcctcctgggctttcccactcgcccgcctcgtctcccgccgtggcctcgccggcaccgcaagacggcatgaggctgcacgggtcaacatttgacaagaaccgatcaacccatttaactggcatgctgaaccgagggccctaccgcgctctcccacttgtggaggc

SEQ ID NO: 23735 - DNA, 439 bp, Oryza sativa
  unsure (1)..(439): unsure at all n locations
  Clone ID: uC-osflM202097e06b1
tgtttttccggctgaatctgaggctgctcctccaggaccatcggaaggaggagagaagaaagaggatgcaaagccagctgaacctgaagcagcagctgctccaccaagcaacccaactgagccttccgcacccaaagctgctggtgctgctccagtagagaactccgcggacaaaggccctgaccaggacagccagccgacttccgccgccgcccccgccaaggagtcatcccctgtcaacaacgggcagctgccggctggtgcctctgccgtgaagtgcacctgaagatgaagatgaaaccccccaacgaatcatcatcctactgcccttgtgcgtgatgtacgccttttaggaatcattcgcatttgcattgtgtaatcaaaccgaccaaggaactgacgttgctgggtgacagccggntattatgctctgcatcag

SEQ ID NO: 23736 - DNA, 327 bp, Oryza sativa
  Clone ID: uC-osflM202097e08b1
ttttgtctgccaagtgacgtgctaccaatgtgggcgcttgactggacacacagcccaagaatcgaaaccttccagggcttactacatccacaatcggatgattcccacagactgcgcacctaaggacagcgcgacgcgtgtacaacgcaaacaagggtctcttaggaggagtacagcagcgccatcaaggtggaaaacagcaaggtctgcaagttccaggaggagagtcgacatccacgccaccgttcacggcaagtctccgagaaacgatacggccgagttgttcggagagcaggtttctgcatttgccttcactgccaacagctg

SEQ ID NO: 23737 - DNA, 323 bp, Oryza sativa
  Clone ID: uC-osflM202097e09b1
ttttcaccgactagtccaggcgtgatgactgccctttccagcatgtactgtgcggcaggaatgacccaccacttgataccaaggaaaatggaaacgaaatcaccacgtctgtgaatactgcggggctggggaatatatacaatttgccatccatcggagcaatggtcggactcgctgacgctgtatgcatcatggccaactaccccaagaccaacgagagcgtgtagattcatggctcacggacacatgctatatgcgtctgaggaacatgggctatcaggacacatattctgccacactcttggacatcaaggctcccagat

SEQ ID NO: 23738 - DNA, 413 bp, Oryza sativa
  Clone ID: uC-osflM202097e11b1
atcgaacgccatggccggcgccggcgccggtgaaggcggcaccgtcctggtgggcgtccgaggctacgacagcggccaccgcgagaaggagggaggcagcacggccacctccagaacaagcaacgggcgtcccatcgagatgacattctggaacgaggcccctcccgcgctctcccacttctccgcccacggcttcgatctgccgcccgccgcccatggcgatctgctcctggcgcccaaagtcatcgccgccgcctacggcttgctcctcctcagagtccccgtcaaccccgtgcccggcggcaagagtctcttccgtcaggacgactacttcgtctaccatcaccatcaacccgccaggctagatctgctccccaagccgtgccagcaatattgcttacgcgacgacgatt

SEQ ID NO: 23739 - DNA, 447 bp, Oryza sativa
  Clone ID: uC-osflM202097e12b1
gtaagtccggagttggaagcgatcgatggcggctactacgacgggacgagttgttgcactcggcgcggtggccgtggtggtggcgctgacattcctcgccggcggcgcggacgccgactgctacgacttctgcttcaaggactgcatggccagggagaacaacatggtcgactactgcagctacgcctgcgacaagacgtgccagccggacaagcccacgctgtactcgtcgtcgtcgtcgtcccgcctcgccggcgacatggagtgccaactctcctgcgccttgggctcctgccaccgcctccttccggacggcaagggcgccgtggaggcctgcttcgggcagtgctacgacggctgcaagaccacggcggcggccagactgccgaggcctctccgcgccggccactacgtgctctctagtccccctgatgacgtaaaccatga

SEQ ID NO: 23740 - DNA, 461 bp, Oryza sativa
  Clone ID: uC-osflM202097f01b1
cgtgctactacgcggcggcggcggcggcggcgacggcgagatggtgcagcgcctgacgtaccgcaaaaggcacagctatgccacgaagtctaatcagacgcgggtcgtcaagactccaggtggcaagctcgtgtaccagtacaccaagaagagggcgagcgggcccaagtgccccgtgaccgggaagaagatccagggaattccccatctcaggcctgctgagtacaagagatccaggttgtctaggaaccgcagaactgtgaaccgtccctatggcggagtgctctctggaactgcagttagggaaaggatcattcgtgctttcttggttgaagagcagaagattgtgaagaaagtcttgaaaatacagaaaaccaaggacaagtcagcctcaaagtagacaactcttggaagtggaagccaggcgatgtgctataaacacggaaaacatttttggtgat

SEQ ID NO: 23741 - DNA, 440 bp, Oryza sativa
  Clone ID: uC-osflM202097f02b1
tgatatgtgaggtggtaggagctagcattgtgaaaagtggatctggcatgtttgctgtatattctgtttctgtgactgatgccaatggtaatagttggtccatcaagaggagatttcgccatttcgaagagctacatcggcgtttgaaagaatattctcagtacaatcttcacttgcctccaaagcacttcctttcgtcagggctagaggtccctgttgttcgagagagatgcaagttgcctggcctattttttaaggaggtcttttagatatccacctgttcaaggcgtgtataaaggcttgggattttctaagtgttgattcacagacatacatcttcactgacactctctcagttatccagacgttgtcagtcaatttagatgaaagatcaaaagagaagaatacaaaatcattcaattcttcccaagctttgaatg

SEQ ID NO: 23742 - DNA, 299 bp, Oryza sativa
  Clone ID: uC-osflM202097f03b1
atttcgaataacccttgctgacaaaaatgcaccaaacgaagaagtgtggaggcagattgaggatatgtgtaggacaacaaaggctgctgctgttcctgttattcctgattctgaaggcacagattcaaatccattttctcttgatgctcttgctgtcttcatgtttcgtgtacttcaacgggacaatcatcctggtaatctggacaaggcatcaccaaatgctggctatgttctgttaatgttttacaacctctacgatggcaagagtcgaagagaatttgaaagtgaactatatgagc

SEQ ID NO: 23743 - DNA, 506 bp, Oryza sativa
  Clone ID: uC-osflM202097f04b1
aatgcatctgacaatgtgtattgcacactgttggcacacagtgtggttcatggagccatggctggatacactggtttcactgttggccaagtaaatggtcggcattgctatatcccgttttacaggatcacagagaagcagaacaaagtttcaattactgataggatgtgggcaagacttctctcctcaaccaaccagccaagtttcctcagcaagaaagatgtggaggacgcaaagatggaagaagagagagcatccaagtttttcgatgggccgcctcccaaccccaaggttgaagacaaagtcgcttccaatggcaaggctgtgaagcgaggcagaaggctactgatctattatgtgcagatggattaattattactcaataatgtcagtaatctatctatggctagcgagatggattagtaaataatattagtatatctatggcaagtgatgctcagctcttcctgtccaaattaaaatgccgagaatagatctcctctagc

SEQ ID NO: 23744 - DNA, 491 bp, Oryza sativa
  Clone ID: uC-osflM202097f05b1
gttttccctccgccgccgccgcctcccgcatccacgcgcctcctcctcctccgccgccggcgccgccaccgcagcatcagccatggccgaagtggagctcccgcagcaggaggtcaagctcttcagccgctggtccttcgaggacgtccaggtgaacgacatctcgctggcggactacctggcggtgaacccgacgaagcacgcgacgtacctgccgcacacggcggggaggtactcggcgaagaggttccggaaggcgcagtgccccatcgtggagcgcctgaccaactcgctcatgatgcacggccgcaacaacgggaagaagatcatggccgtgcgcatcgtcaagcacgccatggagatcatccaccttctgaccgacgccaaccccattcaggtcatcgtcgacgccatcatcaacagtggccctcgtgaggatgcgacccgtattgggtctgccgctgctgcgaggaggcaggctgtggatatct

SEQ ID NO: 23745 - DNA, 132 bp, Oryza sativa
  Clone ID: uC-osflM202097f06b1
gcatgatcgcccttactttatcgcggaggcatatggtggcaattccgctgattcgctagaggaattcacggggatcaagccttgggcccgggtcatcttcctaccaagctactagaagcggacccaagcttt

SEQ ID NO: 23746 - DNA, 167 bp, Oryza sativa
  Clone ID: uC-osflM202097f07b1
ttttgtggcggtgtacgctctcatcttaatgatcagatctattgactctcttagcggaattagatatatgagagacataggctacggactgctgtcaatgatgattaaatgaaaagagaatggtttgggaaccaatgtctgaacaaaagagatttcggagtaccaat

SEQ ID NO: 23747 - DNA, 420 bp, Oryza sativa
  Clone ID: uC-osflM202097f09b1
ttaagtttgaggatcactaccacttctcatgccagttcacaactgacttgattgcgatgaaccacgctgacttcatcatcaccagtaccttccaagagattgccggaaacaaggacactgttggtcagtatgagtctcacatggcattcaccatgcctggtctgtaccgtgttgtccacggtattgatgtttttgacccgaagtttaacattgtctcgcctggtgcggacatgtccatctacttcccttactctgagtctcgtaagaggctcacctccctccacccagagattgaggagttgctctacagcgaagttgacaacaacgagcacaagtttatgctgaaggacaggaacaagccaatcatcttctccatggctcgtcttgaccgtgtcaagaacttgactggtctggctgagc

SEQ ID NO: 23748 - DNA, 494 bp, Oryza sativa
  Clone ID: uC-osflM202097f10b1
ccgcttccccccttccccgctcccccgccgacggcagcacctccacctgcgccactgccggatcgacgggagccgacgatcgtcctcctccgccaaacaccaacctcgccgcacagagccgcgtccccatcccatcagtcgtcaggccacctgcgtgttccccttccccgtcgcccgggcctctccatcggtgatctcctgccttctcaccctgaaacgcccccgtggattccctgcagcccatcgtatcctaaaaccctacaaccactgacccacatcgtctgtcgccgatcagcgtcgccgtttgttcacaaggagagcggcaaaggaggtcgggactcggtgtagagcgacgagcccagcgaagtaggccgatagctatccgccatagcagtgatgaaggccgtctggtggagcgcccctgtcagcgcagctttgacgggatctcgcgcggccagacataggaatcgcacaaccttctgaatcccgacgct

SEQ ID NO: 23749 - DNA, 476 bp, Oryza sativa
  Clone ID: uC-osflM202097f11b1
gtccggatccgccaccatattgagcggcggcggcgggcggcgcggctacggcggcggcgggcggcggcttggcggcctcagctcggcggcccgccatctcttcctcaccgacgacgatgaggcgaccctccctcttcctcaatgccaccgctgcaggggcggcttggccgcctcgggtggcaccgccgcactgcgcggatccggtgccaccgatgacggcgggtggcgggggtgacggatccgccgccggcgacgacgccgggtggctggggcgacgcatccggtgccgccgccgacagatccagcgggggcgacgacggcgggcagcgtgggagacggatccggcggggcgacgatggcgggcggtgggggagacggcagcggcgggggcgacgtcggtgggtcggctggggcgatggatccggggctgccgcgacggatccgcggggcgacaccgctggcgggcgggggggggg

SEQ ID NO: 23750 - DNA, 360 bp, Oryza sativa
  Clone ID: uC-osflM202097g02b1
gtcctacttgcatgtaggactgttggcttgaggcgaaatacaacaaaggcagagtcaagcgtcacaagtgcatgaaacatggcatatttgccaaatgttactgcgaaatctgcgttacattttgagggaatcgatcgacaatttgtaaaagtctttggttgatttttagtctcgtctaataatctaatacgtcgtttggtagcctgaattctaaattaattgattagttttggcagttgctcttgttcggatgtaggatatatgattatttatttccttcctccaatgtatcagttatcactgtactctcattcgagattttttttaaataaagtataagtgataagtgcgcttaataaa

SEQ ID NO: 23751 - DNA, 482 bp, Oryza sativa
  Clone ID: uC-osflM202097g03b1
gtctccccctttctgaacacagcaccaccccttctgctgcatctcccacctccctctgaattgtgggcctgaggcgatggcggcgctcgccccgtccaagatgctcggcacccggctcaacttcgccggctcctcccgctacgccaccgtggcaccgaccaccggagcgcagaagatcgtctccctcttcagcaagaagcccgccccgaagcccaagcccgccgccgtcacctcctcgagccccgacatcggcgatgagctcgccaagtggtacggccctgcaggaggatcttcttgccggagggtctcctggaccgctcagaggtgccggactacctcaacggagaggtccccggagactacggctacgacccttttggcctcagcatgatgccagaggacttctccaagtccaggcctatgagctgatccatgcaggtgtgcgatgctcgcgccgctggttcatcatcccgagcctgcac

SEQ ID NO: 23752 - DNA, 408 bp, Oryza sativa
  Clone ID: uC-osflM202097g04b1
ggggtcgggaggagcgccgggatggaggtggcaatcgccaccgcggcggtcgtggccatgggtacggggaaccgcgtcctctacaagctcgccctcgtgccgctccgcgactaccccttcttcctcgcccagctcgccacgttcggctatgtggttgtctatttctcgatcctgtatcttcgccatcaagctggcattgtcactgatgagatgctgtctctaccacaaaaaccttttctggctgtaggcctcttggaggctttatcagcagcatcagggatggctgctggagccgttctttctggggcttcgataccaatactgtcacagacgtatcttgtttggcagcttcttttatctgctatttttttgaagaggcgctatagaataaatgagataactggatgc

SEQ ID NO: 23753 - DNA, 505 bp, Oryza sativa
  Clone ID: uC-osflM202097g06b1
ctcatcgccatcgtcgtcgtctccctctcccgtggcaacggggagcagaccgacctcacgcgggagacgttccccgcgggcttcgtcttcggcaccgcgtcgtcggcgtaccaggtggaggggaacgccctccagtatggccgagggccctgcatctgggacaccttcctgatgcaacctggtgtaactcctgataattcgaccgcgaatgtgaccgtcgacgagtaccaccgctacatggatgatgtggacaacatggtgagagtgggcttcgacgcgtatcgcttctcgatctcctggtctcgcattttccccagtggacttgggaagattaacaaagacggcgtggattattaccacaggctcattgattacatgcttgctaacaacattattccatatgttgtgctctaccactacgaccttccacaggtgctccatgatcaatacaagggatggctacaccccagaattgcgagagattctgtgagatttgcagacttct

SEQ ID NO: 23754 - DNA, 410 bp, Oryza sativa
  Clone ID: uC-osflM202097g07b1
tctggttccttgaccggaacgcgcgcaacagccaccaatacacttgcaagtacaatgatccactccagcagagcacggagaacaagccatcgccaccggccatcttcccggcaacctacaacacgccgaaccaggctctgaacaatctggatttcggcctgcccatggatggccagaggtcaattacagagctgatgaacatgtacgacaacaacttcgtggccaacaagaaccttagcaacgacaatgccacgatcatggagaggcctaatgcagtcaacccaaggatacagattgaagaaggcttttttggacagggaagtggcatcggcggcagcaacggagggtgtgttcgaagatgtcaatggcatgatgcagcaaccgcagcagaccaccccggcacagcagca

SEQ ID NO: 23755 - DNA, 366 bp, Oryza sativa
  Clone ID: uC-osflM202097g08b1
tgtcgagcatcgcatcgcatcgcatcgcggcggtgcccaagcgaggcaatctccccgtccgtcttccctcccggcctcggatcccggaggaggtctctcctcctcgctaggagcggcggcgggtgccgtcgtcctgctgcttcccttccgcctccggtccacccctgcaggcggcgatggcgttcttccggggcctgaccgcggtttcgaggattcgatcccgcatggcacaggaggccaccacgcttggtggtgtgagatggctgcagatgcagagtccatctgatcttgatcttaagtcccagctgcaggaattgattcccgagcaacaggatcgcttaaagaaacttaaatcagaacatggga

SEQ ID NO: 23756 - DNA, 363 bp, Oryza sativa
  Clone ID: uC-osflM202097g10b1
gtctgctgctcctccctctcctcggcgtcgccgcggaggtgctctcgtcgccgctcggccgcgcgctcgccaagacggtcaagaagagcaacgacatcgttaatggaccactgctcacctccaagatcaacgccaagcgcacgctgatcgtcggcccctaggacgagtccaagaccgtgcagtccggcatcgactgcgtgcccgtagacaacaccgagtgggccatcgcccacctccgctgcgggatctacagggagaaagttatgatcccggaaaccaagccgttgatgttcgtgaggggcaacggcaagggccggacctgaatcaaccacgtgttcgcttgctgccacatcgccgagtctg

SEQ ID NO: 23757 - DNA, 475 bp, Oryza sativa
  Clone ID: uC-osflM202097g11b1
tgttcatgcaagatggcacaccatggccaggaaacaatactagggaccatcctggaatgattcaggttttccttggtcacagtggtggccttgataccgagggtaatgagcttccccgcctggtctacgtatctcgtgagaagcgtcctgggtttcagcaccacaagaaggctggcgccatgaatgctcttgttcgtgtctcagctgtgcttaccaatggacagtacatgttgaatcttgattgtgatcactacatcaacaacagcaaggctctgcgggaagctatgtgcttccttatggatccaaacctaggaaggagtgtctgttatgttcagttcccacaaaggttcgatggtattgataggaatgatcgatatgcgaacaggaacactgtgtttttcgatattaacttgaggggtcttgatggcatccaggaccagtttatgtgggaactggttgtgtattcaacagaact

SEQ ID NO: 23758 - DNA, 278 bp, Oryza sativa
  Clone ID: uC-osflM202097h02b1
ctggataagttctgcagataggacatacatacagtgtccaaagaagcatacaaatgaatatacaaaaaaaaaaggcatagagatgcatatcaaagaaaagaagcattgaaatgaaagagagcgccatctgtcctagttgctagggtaaaattttgtttggtttaagttttaactagtgcctgaacaacttgggtcagatccttttggccatgcaaaagtattgattcttcaatagattggtgattcttttggtcccaaattaatattggaaaagaatg

SEQ ID NO: 23759 - DNA, 379 bp, Oryza sativa
  Clone ID: uC-osflM202097h03b1
gtttttaaaaaaaaaattcgcagcaaaaaagaaaaaaaaatcgcagctgcaaggtagaggaggagaagttggggtttgggagggccagcgattgagccgacgaactcaaggttcttcaaagtgatgattgggatcgaaccctggtaacctccatgtctggggcgccatgctccaaccttggacttgttcccagggatatgcatggtagtatccctattagcactacaaattcctctgggccaagcattggtgttagctctttggtgacggatgctaactcatcgctctccggaggtgcccagttgcagccaagtacgagcatgaatgctgattcattcatgcgccttcctgctttcccatgtcgttttcatacaataca

SEQ ID NO: 23760 - DNA, 494 bp, Oryza sativa
  unsure (1)..(494): unsure at all n locations
  Clone ID: uC-osflM202097h04b1
ccgctctcgccgcttcactggtgccctcgtggagtgcggtggtggtgctattctcctacctaggctaccttgccaccgctggcgctgtcctccctggcaagcttgtccccggagccgtcctcccggactcgtcccgcctccactaccgctgcaatggtttggtctcgctcctcctcttgctggtgctctctgcgctcggtgtctacatgggatggatgtcccctacggtcatagctgaccgtggaatagagctgttgtctgcaaccttcatttttagtgctatcgttactgtcttactgtattattcaggattaaggtcccatcataaaagctcttccttgaaaccgcatgtcagtgggaatttcatacaagattggtggctgggagtgcagctgaatccctatttatgggagctgacctgaagtcttttttgtgagaactgggatgatggcatgattacttncgtcatgaagaactcatgacttcacatggga

SEQ ID NO: 23761 - DNA, 476 bp, Oryza sativa
  Clone ID: uC-osflM202097h06b1
gttgtttagcaaccctagccgctttccccatctcctcctcccagaactagaatttcgccaccccgaatcccttccatggtaggacttccgtttgattccgggtcgaatccgtcgcctccgatgccggaacggtgaggttttccctccctttatatggacaacacgcgtttgttctttctgttgcgcaggtttcagatcttggatggacttgctcatccttcggcggccatggatctatcggcggaagctgctgctgctgctcgtcctcgcgttcggcgagtcagatctggagccgatctgacctcttagaggcccggttggggcatgctccgtacgagctggcgtggatgaagcggccgggccagggaagaggctggtcgtcgcctggatcctctccatcggggcctctcgcgccgatgcctccttgattgataattattcgatggactttcgttattattagatctagagatgtt

SEQ ID NO: 23762 - DNA, 268 bp, Oryza sativa
  Clone ID: uC-osflM202097h08b1
tgttcgctccttaaactcatgacaggtgatctcataccgctggacggcatggtgaggcgacacaaccatctcaggatcgcacaattccaccagcaccttgcagagaagctggacctggacatgtcagctctgcagtacatgatgaaggaatacccagggaacgaggaggagaggatgagggcagccatcggcaagtttgggttgtcagggaaggcacaggtaatgcccatgaggaacctgtccgacgggcagaggagcagagtgatat

SEQ ID NO: 23763 - DNA, 494 bp, Oryza sativa
  Clone ID: uC-osflM202097h10b1
ctctgctcccgcgagatctcacccccgctgcggcgacgcggccatggcggggaggaactaccacggctacggcggcggcggcggcgggggcatgtccatggtggtggcgagcacgccggggcaggagctggccctcaccaactgcgcgtacgtctcctccgtcgacatccgccgcttccccaacgccctcgccctcgtcggcgacgccttcgtcttcaccctgcgtgcccatgatgctgtttctgctggaagcatcgcattgaatgccattcagcgtcgccagacgaaggtttcagctggggattcaatcactgttagcagttttgcccctcccgatgatttcaaattggcattgctcacattagaactagagtataccaaggcatgaaccaaccgaaatgaggagctggatgctgatgtgcttgcccaacaacttcgaaggagatttcttgatcaggtcatgacatctgggcaaagagtaccatttgaatttt

SEQ ID NO: 23764 - DNA, 463 bp, Oryza sativa
  Clone ID: uC-osflM202097h11b1
tgttaaactggtcagctttggaacagtccattgtacgactggaaagctatggaagcaggtggatttgaatggtggataaaaaggattaatcgtgcccttgatttgtatgatgagttccgtatagaccatttccggtggcttgcaggtttttgggcagttccttctgagtcaaaagtagcgctggttggaagctggagggctggaccgaggaatgcattttttgatgcattattcaaagctgtcggtagaataaacataatagcagaagacctgggggtgataacagaagatgttgttgacctaaggaagtctattgaggctcctggaatggcagttcttcagtttgcttttggcggtggttctgacaattcacacttgccccataaccatgaatttgatcaagtagtatacaccggaacacacgacaatgacacgggtattggctggtggcaaactttaccag

SEQ ID NO: 23765 - DNA, 490 bp, Oryza sativa
  Clone ID: uC-osflM202097h12b1
ctctgctcccgcgagatctcacccccgctgcggcgacgcggccatggcggggaggaactaccacggctacggcggcggcggcggcgggggcatgtccatggtggtggcgagcacgccggggcaggagctggccctcaccaactgcgcgtacgtctcctccgccgacatccgccgcttccccaacgccctcgccctcgtcggagacgccttcgtcttcaccctgcgtgcccatgatgctgtttctgctggaagcatcgcattgaatgccattcagcgtcgccagacgaaggtttcagctggggattcaatcactgctagcagttttgcccctcccgatgatttcaaattggcattgctcacattagaactagagtataccaaggcaagaaccaaccgaaatgaggagctggatgctgatgtgcttgccaacaacttcaaggagatttcttgatcaggtcatgacatctggcaaagagtaccatttgaattt

SEQ ID NO: 23766 - DNA, 85 bp, Oryza sativa
  Clone ID: uC-osflM202098a04b1
tttgcaagtgcacgctttcccacagcggacgggtatgaagttcaattgtgagacgtatactgccccttcgctcttgcacgaactg

SEQ ID NO: 23767 - DNA, 71 bp, Oryza sativa
  Clone ID: uC-osflM202098a05b1
tttcaaggaaggggagaacttaaaggaggagtcttgattgtgaatatgcgccatgtattatttgaaatggc

SEQ ID NO: 23768 - DNA, 172 bp, Oryza sativa
  Clone ID: uC-osflM202098b01b1
tgatttactagctcccacagtcccaactgaacctgatactctggcctgattctccaggtcaagcttttgtgtatcagtgtatgcatatatgcgtgtagatctatcactaactaaacagtatgagcggcatgatcgacaggggattcagcatctggctggccggggttttcag

SEQ ID NO: 23769 - DNA, 185 bp, Oryza sativa
  Clone ID: uC-osflM202098b02b1
atcacctctacgtccacctcgtccaccatcggtgcgggtcgactagcaagtctgctctacacgtcctccgaaacagtgccgaacgaccatgggtgaccatagggaaatccatcactgctcttgctggagtggaaccggtatggctaaggctgacaccgccggagatgatgcgcccaggagctgct

SEQ ID NO: 23770 - DNA, 87 bp, Oryza sativa
  Clone ID: uC-osflM202098b03b1
ttggaagttaaacgggccgtacaaaagctaggggcggttttagagataccgtggggatagcgaaacaattgtttaggaccgaggaca

SEQ ID NO: 23771 - DNA, 114 bp, Oryza sativa
  Clone ID: uC-osflM202098b06b1
aagagattgggaggagagctgaactgaagtgggcgtccccttcttggagaagcgaagcccggctatctacccgaccgtggagagggagcatctcgtcggtgaggagagggggag

SEQ ID NO: 23772 - DNA, 177 bp, Oryza sativa
  Clone ID: uC-osflM202098b08b1
tctaaccatacattgaacgcgctagcgccacgcgagacccgagaggtttgcacccttgcagatgcggggtgggaggggtgattgtcatcactcgccgctagaccacgcaccaggtgaccaaggcttttagcgccgcgctgaaatcatcatttctccacacagtcttgaatcaggcac

SEQ ID NO: 23773 - DNA, 408 bp, Oryza sativa
  Clone ID: uC-osflM202098b09b1
gtggccctgaacagctgaccattgacggcgtcttagaagaccaaagttcacaaacagaggattcgaatcacctgaaactggcattcaacactgctctgaagaaacttaaccctgttttcaaggtttattcagctgtggtggtcccttcgctccctagaacagcctgaaacaaggtcatgaggagagtcctgcgaaaggagttcacccagcagccaaagcactccaaaatctaggtagttacaaaaaagcaaaattggttctattgcatcatacgtacacccaaaaggaaaaaacttcggcacagcagactgtgaatacacatgctctgataaaaatcactaaatcagctggatagcaaggcttttgttctctccggtgtgaaatgagatgatagatcaggtcatgatg

SEQ ID NO: 23774 - DNA, 219 bp, Oryza sativa
  Clone ID: uC-osflM202098b10b1
tttccgtttgaacaaggtgggcctccctagaggaacatacagaagctgaagtgcaagaagcatgtttgacagcttactgcttaactgaactagttgtctatgttttaaatatgctctatgctatcatattgaaatgacctgagtagctgtaatgaatgagagaaagtattgcctggggcttaagagcctgaggagttcaaagggagagaaaaggatctt

SEQ ID NO: 23775 - DNA, 440 bp, Oryza sativa
  Clone ID: uC-osflM202098c04b1
tgttttattatcttaatgtatgctggttatcatgcactcggacaatacatacatcttttctaaagtgtcctagtggaaagctgttttccagagttcacggtctgcagatctgttctcttaaatgtcatataatatgttcatttatcagttacttgattacttcagatctgttccctttaggtacgtttggtgcggattacagaaatggtccatgatgcatactattctcgattgtatcttgctaaggtaaaatgacttcacatgaactactccctccatactcgtaaaggaagtcgctttggacagcaacacggtctcccaaacacaactttgacttcttgtttctataaaaatatttattggaaagtgatatatcgatacttttatgaaaagattttttaagaccaaactatttataatatttttacattttcaaactc

SEQ ID NO: 23776 - DNA, 252 bp, Oryza sativa
  Clone ID: uC-osflM202098c07b1
ttagtaactgcagttcaggctgtttgtgatcttggacatctaaatggactaacacaaattcattgttatgcaaaccggcacttgttggagaaagatatatgctctggtaaaaacgtgttacttgattacgtcaagagttgcctgacattgatctgtcttacatgtatgttgataatgcatcaatgcacctcattttgaatcttaaccatattgactcaatttgtcacaaacaattttttctgtgacatatta

SEQ ID NO: 23777 - DNA, 295 bp, Oryza sativa
  Clone ID: uC-osflM202098c09b1
gtggacctcagccacaaccgcatcaggggcaccgtgccacgctccctcgccgcgctctccacgctgcagacgctggacctcagctacaaccgcctctgcggcccgctcccgaggctgcacggcgtcatccgccacggctgcaagccgtacgagcacaaccagtgcgccggcggcgccccgctcggcgggtgccaccaatcgtgagcatgcatccatccatcaccgccggcgagctgatgctgccacgtaaggtggagcccgggggtgcgtaacggcatacgtgtttggtggtttt

SEQ ID NO: 23778 - DNA, 144 bp, Oryza sativa
  Clone ID: uC-osflM202098c12b1
caacaagttccacacagaggcactgaatgagcttctggagtctgatgacaagtttggtttcataatcatggatggcaacggaacactgtatggtacacttagtggcaacagcagggaggttctttacaagttcagcttccacct

SEQ ID NO: 23779 - DNA, 152 bp, Oryza sativa
  Clone ID: uC-osflM202098d01b1
tgggctcttctctgtcagaccacatcctgcgtttcaacaacatacctcaggtgcaaaatgatggttgttcttggggagcttggaggaaaagatgagtattctcttgttgaagcccttaaacaaggaaaggttcagaaacctgttgttgcatt

SEQ ID NO: 23780 - DNA, 508 bp, Oryza sativa
  unsure (1)..(508): unsure at all n locations
  Clone ID: uC-osflM202098d02b1
ttagctcttcgtcctaccttcatacagctgaaaaaattccctcatatacaagataaaggtaggaggagggccgggagctcgacggatttcgatcaattgtggtttttttttttgtggnaaccgtttaagagaggagattttgtttaatgcatcttgatcatatttgaatttttttttttcatttttaatgttttcttttgtctgattatttattcttttctctcctctctttttgcttttcttcttctttttttctttctttttatttcttctttttattttatcactcttttacatttttttcatctctttatttttatatttcttctttatttctattatttatttctcctttttttctttttatttctctatttttcttttatttttatgtcttctttaattctttttttttttttctctttttttatttctttttttcctttattattttttcttttttctattaaattttattctttttatctattattttttatttaatttc

SEQ ID NO: 23781 - DNA, 93 bp, Oryza sativa
  Clone ID: uC-osflM202098d03b1
tctctttttttctccatccctctccccggcgtgcacggatctggccagatgctacggtcgtagggcggaggccgcgacggttaccggcggtgg

SEQ ID NO: 23782 - DNA, 318 bp, Oryza sativa
  Clone ID: uC-osflM202098d05b1
ttaagatataggatttgatccaacagggtgggaactcgcccttgttaccactccaagtaacacgaattcatctgctgcagatagtcaactgggtggtgggtttgacaagctcatcttggaaagcctatatgaccagggggactacaggcagagacagcaacagcagttatatggttcttcagctcccaacccgttcatgtcaaatgatcctttcggaatgtcgaaccaagttgctcctccaccatcggttcaaatggctgccatgtctcagcagcatcaacagatacccactatgatgccagcgaatccctttggacc

SEQ ID NO: 23783 - DNA, 121 bp, Oryza sativa
  Clone ID: uC-osflM202098d07b1
tcccattcggggcctctgcccggagccgaggtccgacgccttatcgactcactcaccaagtgctcgacgcaattccccaccggggagcccgcccgccatgccggagagcaacggcgccttg

SEQ ID NO: 23784 - DNA, 351 bp, Oryza sativa
  unsure (1)..(351): unsure at all n locations
  Clone ID: uC-osflM202098d09b1
tgtcgcgtagctcctattctcctcattgctggcttggcctttggctataccttcccttcatcacctcctagtataaagcaattcaattcccaatccccccggcccgaagtgaaggaagcggatcatggagctcgccatggattgtgcgctccgcctacgcgacgccgccaaccaccacctctcccgctacgagcctctcgtgctcctcgccgcgcccctcctcgccctcctcgctgcccgcaccctccacgccgncgctgccgccgtcgccgaccgcggtctccgcaccgtcctcctcgctctagccatgacagccatcaagttgcttccgggagttagcgcctacatcaa

SEQ ID NO: 23785 - DNA, 125 bp, Oryza sativa
  Clone ID: uC-osflM202098d11b1
taaaaaacccctacattcctccctcttctttgccgcggtgccgacatcgatctatccctaacaaataacacgatgttgtgcgccacggtcgtcatcctccactacatcctcacagccgataatct

SEQ ID NO: 23786 - DNA, 306 bp, Oryza sativa
  Clone ID: uC-osflM202098d12b1
ttgacgcgtgggctgagggcgactactccacgcgccacatcatgtgcgcgctgctccgcaagtgcggatatcgagttgccgcacactgtgatggtgtgaaagcgtgggacatactaaaggaaaaatctttcaatatagaccttgttttaactgaagttgaacttcccttgatgtctgggttcctgctgctctccacgatcatggaacatgacgcatgcaagaatatcctcgtcataatgatgtcttcaaatgaatccgttagcatggttttcaaatgcatgcttaagggtgctgcagatttccctt

SEQ ID NO: 23787 - DNA, 163 bp, Oryza sativa
  Clone ID: uC-osflM202098e01b1
tttccggtaagctcgcccgtatccagctctaccttcgccggcggtgaaacggaggcaggataggtctcctagcaaaggttctaaagaccatatctcttcaaactggataggaagcttacttaatgaagacacaatttggattgacttttagtgacctaaaccc

SEQ ID NO: 23788 - DNA, 485 bp, Oryza sativa
  Clone ID: uC-osflM202098e03b1
tggacgcttgggttttgccgccggcgtaaatgttttcgtagtagtgtaccttttcttttctgaaaaaaacattacattatttgaatgacttgaaaaagatgagtgtacgtgcacgcacttaggtcgtaaagagattgtctccattttaaactcggtcactcggaagtatttatgatgttggctgtttgttgttcattccatgagtgcactttcagggaacgtgcagtttttttttcttctgaacatttcaaactgtgctatagtcaaatacaaagattttttttcccgttttattcatccttcaagagtacacaacagatcatgctcaggatttaaataggtttacattatcccgccaagaaaaaaaaaggaaggtttacattacattggttttcgatcttgacgagtacaatctctgaaatttctctcattgaacagtcgtagtcatacataaacataatgtgtactcgcttcatcccataaaa

SEQ ID NO: 23789 - DNA, 162 bp, Oryza sativa
  Clone ID: uC-osflM202098e06b1
tttccaattcaaccgccgccgaatcgcccttgggagaacgatggtcgggtcggcgctgcaccagaccaccagcttcctcggcaccgcccctcgccgggatgagctcgatcgccgtgccggcgactccggaggtcgcatcagcatgcccctggccgtcaagag

SEQ ID NO: 23790 - DNA, 74 bp, Oryza sativa
  Clone ID: uC-osflM202098e09b1
tgaaagccagtcttggcttctttgagccccgacggactgtgacggcggttttctatctcttctcttcttgaaga

SEQ ID NO: 23791 - DNA, 77 bp, Oryza sativa
  Clone ID: uC-osflM202098e10b1
tttccgtcgcatctccctcctcgcctctcgctgccgggcgcgctttaacaagaggaacaaggagaggctcaaaaaga

SEQ ID NO: 23792 - DNA, 54 bp, Oryza sativa
  Clone ID: uC-osflM202098e11b1
ttatggtgagtccgtccaggagctggaccgtctcgtgctgacggtggtgaacca

SEQ ID NO: 23793 - DNA, 262 bp, Oryza sativa
  Clone ID: uC-osflM202098f01b1
ttccaattccctcctctctctctatctctcttcccggcctgtgcagagacggaggcaggataggccggcgagcaaaggtactaaagatcatatctcttcaaactggttaggaagcttacttaatgaagacacaattggattgattttagtggccaaacccaagccaacatacagactgtgcgcatatggctactcgcattcctggtactgtagcagctagcggggtgtactacaatgatcaatacagaatgccatgtaagct

SEQ ID NO: 23794 - DNA, 98 bp, Oryza sativa
  Clone ID: uC-osflM202098f03b1
ttagcactggtctttgttccttaggggccataacaatgaggtagcaactgcattgggatctcttactgatgagatggctttgttgagtgcaggtaagg

SEQ ID NO: 23795 - DNA, 339 bp, Oryza sativa
  Clone ID: uC-osflM202098f05b1
tatagatggcagggataacggcagtggcactgaagcgcagagctcatggacaaagcgcgctgttgagattgacagtccacaggctatgtctccagatcaattagctgatccacctgatagcacttgtgcacaagtgatccacctgaagtcagatatatgcagcaatagatggttaccatgtacaagcaacaaaaattccaagaaacaaaaagaaactaatgatgacttcaaggggaaggacttggaaataggttctcctagaaatttaaacacagcttatcaatccttttcgaatgagagatccattcttccaacagatagccggattgaatatccact

SEQ ID NO: 23796 - DNA, 406 bp, Oryza sativa
  Clone ID: uC-osflM202098f07b1
tttccgttgaagcaggccatccaagagaaagccgagcggtggcatcgaatcactccgtgccatcccatggatcttcgcgtggacgcaaactcgcttccaccttcccgtctggcttggcttcggttctgccttcaagcacatcctggagaaggacatcaggaacctccacacgctccaggagatgtacaatgagtggccgttcttcagagtcacgatcgatctggttgagatgggttttcgccaagggtgaccctggcatcgccgcattgtacgacaagctccttgtctccgaggagctatggcctttgggagagaagctgagggccaactgggaagaaaccaaacagcttttccttaaggttgttggacacaagggtcttttcgaaggggatctttacctgaagca

SEQ ID NO: 23797 - DNA, 125 bp, Oryza sativa
  Clone ID: uC-osflM202098f10b1
ttcccccccctcctcgctccccgccgccgccgccgttttcttggagaggagaaatccgtaggctcagaggatttttggtagtcttgtttcgtgatattcgtgaagagggggggagctaagggggg

SEQ ID NO: 23798 - DNA, 229 bp, Oryza sativa
  Clone ID: uC-osflM202098f11b1
tccgccgccgccgcagcctcctcctgtcgtcttctccttcgagttgttagctccctccttattcaaccatgggtaaggagaagacgcacatcaacattgtggtcattggccacgtcgactccggcaagtcgaccaccacgggccatctgatctacaagcttggaggtatcgacaagcgtgtgatcgagaggttcgagaaggaagccgctgtcataatcaagaggtcctt

SEQ ID NO: 23799 - DNA, 638 bp, Oryza sativa
  Clone ID: uC-osflM202098f12b1
ttttccttttcgcttctctagtctagaccaatggaaggttaccattcgagatgcgaggcgtgtagatgagatgagaggattctttcctcccctctctctttttttcttcttttcctttttttttttctttcttctctctttttcttccttttttttttttttctctctcttcttctttttttctctttttttttcctttcttttctcttttcctttctttttttctttttttctttttttttttttttctcttttttttctcttcttttttttcctttctttttcttcttttcttttctttatcctttttttttttctttcttctttttttcttcttcattcttcttcctctctcttttttttcctttcttctttttctcttttttttcttctttcctacttttcttttttctttttctctttcttctcttttttttttccttttcctttttttctctctttttttttcttttttccttttattttttttccttctctcttttttttttttcttctttcttctttctttttcttttcttttttcttctttctttttttttttctcttttttctttcttctcttctctttctcttttttctctcttccttctctttatttttttttctttcttttttct

SEQ ID NO: 23800 - DNA, 347 bp, Oryza sativa
  unsure (1)..(347): unsure at all n locations
  Clone ID: uC-osflM202098g02b1
gtaaaattttatatatacacactcctccattggtggtgacgccgcaaggtttgctccaacaccaacagggaggtaggctgcagcttatcatggcggcaaggagggctgcttcctccctcctctctcgcggcctcatcgcgaggccttctgctgcctcctccactggcgactccgctatccttggagcaggctcagcacggggcttcttgcctggatcacttcacagattcagcgctgcaccggccgncgntgccaccgncgcagccactgaggagccgatccagccgccggtggacgtgaagtacaccaagctcctcatcaatggcaacttcgtcgatgcagcatct

SEQ ID NO: 23801 - DNA, 169 bp, Oryza sativa
  Clone ID: uC-osflM202098g05b1
tttagttttggcgccccaccaccatacctttccgactccgggcgagcatcgccaccagcccaccaccgaaccagtagtagtgagtgctcagtgcgttccactccactccgagctaagcagcgaacagcttgtcgccgacgctctctctctctctctgtagatatggagc

SEQ ID NO: 23802 - DNA, 518 bp, Oryza sativa
  Clone ID: uC-osflM202098g11b1
ctcaaattagttggactgatagaaaaatattgcttttcaagattgtaaaataaccaactgactgggaagttgatgtcatatgttggaagcaatctgctaaaatgttaaagaagtgcatctaacttttgtacccagtgaattgcaaatctctatctcgtttttttttgtttacagtttctttggttttaaagtaaaataggttgacatgggaactttactagcagaggaattggcttatattcttggaaaaaatacattttttcatgcagaatgtgattacaataatgatacttgctggcatgatttttatcactcatgcccgcattgtccttgatgtttgtatgcagctgggatattatctttatttactacttttcttctctttctttttattttttctttttatttctttttatttacttttctcttatcatattcctttctttttacctctcttttttttcattttattatatttttcctctactttcttcattttacttatcatattttttctt

SEQ ID NO: 23803 - DNA, 349 bp, Oryza sativa
  Clone ID: uC-osflM202098h03b1
gtaatatatatgaaggttttcacagggaagtgggtctttttcttggccattatcctcttcgaaggatgcttggtcagatctcaaagtgttccatatgactactcagcaaacattgagtgcgtgaaggagccggagaagcctctgtacggcggcggtatcctgaaggagaccgaggctaaggggtatgccagcggcaagaagcttctgtcggagaatagcaagagcgccgctcctgtgaagggctccgccctcaaggtcgacctcaagaaggaccaccactacgccttgtccgtgtggctgcagctctccagggggaaggcgacatcagggccgtgctggtgacccccga

SEQ ID NO: 23804 - DNA, 181 bp, Oryza sativa
  Clone ID: uC-osflM202098h05b1
ttcgtatctcacctccgaccccgagccgcggggccgcgtataacgaccacttgacgtgccctatctttctccgcctcctcgctcacgagctcgttctcctcttcttcttctccttccacggaagactagggtcatatcttctctcctgtcctctcctcgagcgccaagaaacccaaaccac

SEQ ID NO: 23805 - DNA, 142 bp, Oryza sativa
  Clone ID: uC-osflM202098h08b1
ttgaaagacacgaacaaaaaaaggggggactggtcaatttataaaggcggtggcgcctccccccagccccgagcagtttctcgaaaccctcgcggcctcgattccggcgatggcggagcccaacccgcaagtggagagggag

SEQ ID NO: 23806 - DNA, 58 bp, Oryza sativa
  Clone ID: uC-osflM202098h11b1
gtgcgagagctgcgggaagattgatcgcgaggactattttttcttggagccgtatcaa

SEQ ID NO: 23807 - DNA, 169 bp, Oryza sativa
  Clone ID: uC-osflM202114a03b1
ttatattattataggaaataaaaaataatttcctgggtagaataaacacatttttaaaaaaaccaagaaaagattttcctcttctgttacattccttcttccttctccggccaccggagccgtagccgaattgtgcctcttctccggcgaggggagagggagagatggg

SEQ ID NO: 23808 - DNA, 293 bp, Oryza sativa
  Clone ID: uC-osflM202114a04b1
ttcactaccaccacccacccacccatccgttggccaccggcggcgtgggcggagggcggcgggccggcggccatggggaagaacctgcgtatcaagaccggcaaccgcgccccgctcctcgcccagggggagacgtcgagggcgctctccgatctcgaggaggggagcaacgtccagccggagaacgtcgggttctgccgcgtcatcaagttggcgaggcatgacgcggggaagctggttattgccaccatggcgctgctcgtcgcttcgctcagtaacattctcgttccgaa

SEQ ID NO: 23809 - DNA, 356 bp, Oryza sativa
  Clone ID: uC-osflM202114a05b1
ttattaaccatcggcgagcagaagaagagcagaggctcagctagcaggcgagagagatcagcgagcaggatggctggggctgcagggtcgtcgtggtcctctctgctcctcgcagcggtggcggtggcgctcgccgtcgccgcagcgccgtcgctcgccggcgacccggactacctccaggacatctgcgtcgccgacctcaactccgaggtgaaggtgaacgggttcccgtgcaaggcgaacgcgacggcggacgacttcttctccggcgtgctcgccagccccggcgccgccgccaacacccctcctgcgccccgtggtcaccggcgccaacgtcgaggaagggcccgggcctc

SEQ ID NO: 23810 - DNA, 429 bp, Oryza sativa
  Clone ID: uC-osflM202114a09b1
tggacatcggcatgatcgacgccgtgcccggcatgcgcgccctcgacatgaacaccgccgaggacgagatcgtccgcctcacccgcgaggtcgtccccggcatgatcgtcaccggcatggaggtcgccgagatcgacggcgccccgagaatgggcccgacgttcggagccatgatgatctccggccagaaggcggcgcacctggcgctgaaggcgctcggccggccgaacgccatcgacggcacgatcaagaaggcggcggcggcggcggcgcacccggagctgatcctggcgtcgaaggacgacggcgagatcgtggacgcctgagcgaatagaacagggtaaaaaaaaatccgaagacttggctggtgacacggaggcgttggggacgagaagaagattgtggactttccctgtgtttttttttttc

SEQ ID NO: 23811 - DNA, 327 bp, Oryza sativa
  Clone ID: uC-osflM202114a10b1
caccccagcagcagcagcagcagcagctgagcttgaagcagcagagcgaggtagacatggccgccgccaccatggccctctcgtccccggcgctggccggcaaggccgccgcgaaggtgttcggcgaggggcgcatcaccatgcgcaagtcggcggcgaagcccaagcccgccgcgtcggggagcccgtggtacggcgccgaccgcgtgctctacctcggcccgctctccggcgagccgccgagctacctgaccgtcgagttccccggcgatacggtgtgggacaccgcggggctctccgccgacccgtagacgttcgccaagaacc

SEQ ID NO: 23812 - DNA, 289 bp, Oryza sativa
  Clone ID: uC-osflM202114a11b1
ttctcgtatctatctcctctccctctccgcccattgtgtcctctccacctgcgatccatccgcgcccgcgaggaggagggagccggacgccgccgcggggagagcaggggagagaaggagaggttgctctttcttgtcgtcatcataaagccgtctttttttgtaaccccgactaccctcaggacatctgcgttgccgacctcaactccgaggtgaaggtgaacgggttcccgtgcaaggcgaacgctactgcggatcaatttcttctcctttattttctcttttatta

SEQ ID NO: 23813 - DNA, 251 bp, Oryza sativa
  unsure (1)..(251): unsure at all n locations
  Clone ID: uC-osflM202114a12b1
tccctagtctacccacgctttttttactctccccctgcgaagaaagaaaaagctttttctttttcctcccggcaaaccctagatcggcgccgccggagccgncactagagacgccaacacacatggccagggcctttacaacccttccacatatattttgctgtgcaacattggaaatgcttttgcaaaaccggtgagcaatcccaactacctgtctttttaagggaagcaaaaattgctgttgaaagccg

SEQ ID NO: 23814 - DNA, 397 bp, Oryza sativa
  Clone ID: uC-osflM202114b01b1
ttattctcccaggaacatcaagatgctgtagaatgtcataagcaacagagaaagaaagtttcacaattgaagaaaacaatcaggagtactaagggtttcaaagaatttcaaaagatcatcgacatgagaaactttacaaaagaaaagatcgagcgtttggaagctagatctcgtcgtttgactcggcggataagacaaattgaaccaactggttggaagggaatttttgcagattagcaaagtcatacaagaggctagagcattagatatcaatactcaggtaatctatccgctgggctgagacggcagcagccatacgaggggataacgagctttggcttgccatgggtcttaggaaccaggctcttttggatctgaagccttctcaacttgcaac

SEQ ID NO: 23815 - DNA, 252 bp, Oryza sativa
  Clone ID: uC-osflM202114b06b1
tccctccgcgtgagcggcagcaagtgctcactgcgttcttcttctcgatttatctaccttgggtactagatcagacgctaacaagcgaccatgtgcggcagagacaccatccgccgaggcatccggtcgtgcagatccctgagaactttatttctggaagagcgccacattactgataagggtggcgaatggctccatgaatctgctgccaacaataccgttctggtgacactgaactcctacatgactgaa

SEQ ID NO: 23816 - DNA, 380 bp, Oryza sativa
  Clone ID: uC-osflM202114b08b1
ttcagcttgtcagaagagccgagagagctgggttcaaggcgatcgcactgaccgtggacactccgcgactgggacgcagggaagctgacatcaagaacaggttcgttctgccaccatacttgacactgaagaatttcgaaggcctggacctcgcagagatggacaagagcaacgattccgggctggcctcctacgtcgccgggcagattcgatcgcacgctcagctggaaggatgtgaaagtggctgcagagcatcacgtcgctgccgatcctcgtcaagggcgtcataccgcgggaggatgcgaggctggccgtgcactccgggccgccggggatcatcgtgtcgaaccacggcgcgcggcagctggactacgtcccgg

SEQ ID NO: 23817 - DNA, 507 bp, Oryza sativa
  unsure (1)..(507): unsure at all n locations
  Clone ID: uC-osflM202114b09b1
tgaagaaggaacttcatcaagtgcatatggaggcaaagagacttattgctgagaggcagatgctcactgttgagatggataaagtaactaaagagctacataagttctctggtgacagtaagaaacttcctgaattactgactgagctagatgggctccgaaaagagcatcagagtctaagatctgcttttgaatatgagaaaaacacaaacatcaagcaagttgagcagatgcggacgatggagatgaatttaatgactatgaccaaagaggctgacaagttgcgtgctgatgtggcaaatgctgaaaaacgagctcaagtggcagcggctcaagcagtagcagcacagccgggggtggcacatgtgactgcttcacaaccagnggcagacaagctgtggcagtgccagctgcctcaacccatattcagtgcattaccgntcatcctctgcatatacaaggagccacccagtggggtttatagcagggaccaccagctgggcatat

SEQ ID NO: 23818 - DNA, 342 bp, Oryza sativa
  Clone ID: uC-osflM202114b12b1
tcggcatgggatacggatccggccatggccgcaccctgaccccgtcgaggtgatgcggtcgcaccggatcatggagcgcgtgcaggaggagcagcggaggtggtatggcgtcaaggagccgcgccatgtcctggtcgtgacgcccacctactcccgcgcgttccaggcgctccaccttaccggcctcctccactccctccgcaacgtgccctacccgctcacctggactcgtggtcgaggcaggcggtaccaccaacgccacccttggtcctccttgcacgctcctaccttaccatgttgtcacattccccttacctgttcgcaagaaatatgactgggctg

SEQ ID NO: 23819 - DNA, 384 bp, Oryza sativa
  Clone ID: uC-osflM202114c01b1
tttacccaaaactgcagttttacctggatttggtggtattgcacgtcctcaagatgtgcaggacaggagcgctaacttcacttgttcaaggcctagagcagcttcagtgactgaccagtcaacagcagagccagcaaaacccaggcaaaacaagcacactgttgatccttctgctccagaatttctgccactcccatcatttgaagaatgctttccaaggagcacaaaagaatccagagaaattgtgcacgaggaatctggccatgtcctcaagatcccatttaggagaatccatttgaccggagatgagaagcattttgacacatacgacaccagtggtccacaaaacattagtccaaggattggactttcaaagataaggaa

SEQ ID NO: 23820 - DNA, 206 bp, Oryza sativa
  Clone ID: uC-osflM202114c02b1
ctcctctacaagagagagaggcagacccaccaccatcaacaacatcaggaggagtagatagatgggcaactgcgggacgcgagaggagaatgccgtcgtcgcggcgcacgcccaaggtattcttcgcttcctcggattgatttcttgggggatttcccggtgattgttttcttaaggatgctggctgttgggactgggatctcggg

SEQ ID NO: 23821 - DNA, 99 bp, Oryza sativa
  Clone ID: uC-osflM202114c11b1
tgcaaaagacacacattccaaaagcatctgtggccatctcctcctagtcctaggctcgcgtcaatggcggcgtccaccatggcactctcctcccctgcc

SEQ ID NO: 23822 - DNA, 257 bp, Oryza sativa
  Clone ID: uC-osflM202114d01b1
tcctttcttcttctccatatcatatgcctctgttgtgctattctcttccctgcaacttgcaaacagtgctctgcagaatgaccaaagatgaggatttcaagctggtcaagatccagacccatgtactgagggtgaacatacactgtgatggctgtaagcacaaggtgaagaagctgcttcagaagattgaaggcgtgcacttggtggccttttatgactatctcttttcagttttattgacttatatttctgatcat

SEQ ID NO: 23823 - DNA, 340 bp, Oryza sativa
  Clone ID: uC-osflM202114d08b1
tccacgcgtccgcttcgcttcaattctgtgttggtagcaggcgacgctcggtgtcttagttcatggctcggagggatcagctggtctctttcctctgcttcttcctgatcgtctctgccgtcgccggcggcttgtgcgtctcggccaccgtgctcccgatgcgggtggggaagcagtaccgtcgtcggcggccgtagcggtgtgcaggacgccgccgccggctagcgtcgacttgcacgccaagcgggccgccggcatccgcttctacgtcgccgactccattgagttcgtgtacaagaacgattccgtgttgaaggtggacaagtttcgggtactacca

SEQ ID NO: 23824 - DNA, 458 bp, Oryza sativa
  Clone ID: uC-osflM202114e03b1
cttgggcatgctgacgatctcatcagtgatgcaaccaacgcaccaacacccggtgagctgccatgacgccgccgccgcctgctcgccgccgccaccgccaccgccatcgccatctctcggccgcctcgtcttcttccacgccgcgctctacctgcttgcgctggcgcagggcttccacaacccgtgctcggaagccttcggcgccgaccagttcgcgccgccgagcgaccctggcgcgcgcgcgtcccggagctcctacttcaactggtacaacttctccagttcctgcggctacgccatctccaacaccgccatgagctacgtagaggacaacgtcagctggatccgtcgggttcgccgcgtgcttggccaccacggcggtgtaccttcccgtcttcttgctcggcacggcgggggtaccgcgccgagcaaccgttcgacggcgcgccgctcgcgct

SEQ ID NO: 23825 - DNA, 525 bp, Oryza sativa
  unsure (1)..(525): unsure at all n locations
  Clone ID: uC-osflM202114e04b1
ttcttcaagggaccgatgctcctgggtgttaaagctgtgatcgctaagagctttgagcgtatccaccgaagcaacctggtgggtatgggaatcattcctctctgcttcaaggctggtgaggatgccgactcacttggccttactggacatgagcggtacaccatcgacctcccgaccaacgtcagcgagatccgtcctgggcaggacattaccgtcacaaccgacaacgggaaatccttcacttgtactcttcgctttgacacagaggtggaactggcatacttcaaccatggaggcatcctcccatacgtcatccgcaacctggcgcagaactaggagaaaatgcacaccatttcaagttttcaaccatgacaacaacattacaggctcctctccttcccctccnctctgttgtgatcagcctgcaccgacatcgagagttcgcctgggacaatcagcctccctttgttcaccatataaataaaaaaaaaccgaaaataaagccgcatgagacatggagccaca

SEQ ID NO: 23826 - DNA, 500 bp, Oryza sativa
  Clone ID: uC-osflM202114e08b1
tttaaggttggaggcaaggtagagagacagaggtttatgtagagcaggaggggttgtttttttctctctttttttttcgttcttctgtttatttttttatcttttcttttttttttcttctatatatactctttgtattctctcaatttcctttacttctatattttttttttttttatttttttttttattcttttttttttttttatcttcttttttcttatcttttttttttcgttctatgttatactcttttttttaacttttccctttttatttatttttttattttttcttattatataaattttttttaatttctcttggtttttttttatttttttaatacacatccatttttttttccttttttatgatcaatatccttttttttttaacccgttttgtttttcctcccctgtttttttggtcccacacccgttgggtgttttcctttccccctttttttttttttttggaaaaggggttgattttctctt

SEQ ID NO: 23827 - DNA, 360 bp, Oryza sativa
  Clone ID: uC-osflM202114e09b1
cggacgcgtgggcggacgcgtgggctcaccaccattattttcttctctcctcttctcttcttcctcctctcctctcctctcctcgctctccatccatctcgtcttcttcttcctcctcctcagcttcgagatttcagcttctccaaacccccattcttcccgccacaagctctgctctgtgctttgctcgctcgcctttcccgccattggcgtgctccgctttcttggcttcaaagatccgacgagctctgcgatagctggggagaagaagagagggagcaaggaatgctggggaagcgagccctacggccaagaaaggcgcgacggctgaagttcgggtcgatgaagaatcctcctcct

SEQ ID NO: 23828 - DNA, 253 bp, Oryza sativa
  Clone ID: uC-osflM202114e10b1
ttaccatagcatccatgcatatgtatggcttctctcttcaaccacgcctgtgcagcaccggaggaaggccagccaagatcaccaggactaagcctttggcgactcatgattcctctgcgcacatcccacctcgtttcaaggagcttcagcaagtattgaaaaccaaacttagggaggcatctgctgcaggaagcagtgcttccaagaaattgctggatgcgtttgtggactctatctttacattcagtcatga

SEQ ID NO: 23829 - DNA, 116 bp, Oryza sativa
  Clone ID: uC-osflM202114e11b1
tcccgcgaagccgtgaaagcaggagaagagggctcgaggagcaatcttcataaatcgttctataccaatgtgcctagtgagtgcttggatgatatggagcgatccgctgcggagaa

SEQ ID NO: 23830 - DNA, 307 bp, Oryza sativa
  Clone ID: uC-osflM202114f02b1
tcaatctcacaataatatcagttcatccacaacaatgtcggcctactgcggcaagtacaaagatgagctcataaaaaatgctgcctacattggcaccccgggcaagggtatcctcgccgcggacgagtccactggcaccatcggcaagcgcttcgccagcatcaatgttgagaacgtcgaggataaccgccgtgccctccgcgagctcctcttctgcacccctggcgccctccagtacatcagcgtcgtgatcctcttcgacgagaccctgtaccagaagaccaaggatggcaagcccttgcccgat

SEQ ID NO: 23831 - DNA, 448 bp, Oryza sativa
  Clone ID: uC-osflM202114f05b1
ttcatgacatacatgagctccatcaccagcaaaatatggagacaaaggccttgcatactataacaaagaagcgttcggtctggcacacaatacatatagatcccactcagctgaactcggagatgatttacttggcggttcagctggtcgggaacatattgctctggatgctcctaggtggagggacaagcgaacgcatacgtctgccggtgagctggaggatggcagaggcgctcagggcgtgccaggcctacacggggacagtagtgacatatcactgaaacaacaccctgcaaaagactagccggagatgaaacaggacctgcttggcttgaagctgctactggagcacacatgtttttggaagcaccggacgtagctcaggaaggtgcaagcccacagcatgcgctagcggaacaggataggcaggctgctttaactggtgcca

SEQ ID NO: 23832 - DNA, 147 bp, Oryza sativa
  unsure (1)..(147): unsure at all n locations
  Clone ID: uC-osflM202114f06b1
gtcgtgggtgacgtcagcaccaccaccatctgcttccccctccctccctccctcccgtctcctcccccattccatcgcatccgcatacaaaccccaaccctagccgtctccgtgctagggccgtcgtcnncttcgcgcgccctgacc

SEQ ID NO: 23833 - DNA, 178 bp, Oryza sativa
  Clone ID: uC-osflM202114f08b1
tttctctaaaatgagaaaagaagaagcacaaggaggtttagtttaaatggacctgcccggcatttcgaggaatgcaaccacatttaattctctcatcgacggtatgagcaaggacaacaagactgatgatgatccagagcccactaaccaaaagacatgcgaagggatgcaacctaac

SEQ ID NO: 23834 - DNA, 58 bp, Oryza sativa
  Clone ID: uC-osflM202114f09b1
tcctcaccgagcgagcagctagctagctgcggcgatggtctccagagcggcggctttt

SEQ ID NO: 23835 - DNA, 87 bp, Oryza sativa
  Clone ID: uC-osflM202114f10b1
tttttgagcttagctatggcaatggccgcgccgctgacgttggtggtggtgtcccttttttttttatttttaacctttataattttt

SEQ ID NO: 23836 - DNA, 160 bp, Oryza sativa
  Clone ID: uC-osflM202114f11b1
caaacggaggcgagctcgccgccgttcaccgccgccgccgctgccatggacgtcgcgtcgctgctcccgttcgcgctggcgctggtggcgatcccgatctcgctggcgctgctggaccggctgcggctggggcggatcccgccggggccgcggccgtggc

SEQ ID NO: 23837 - DNA, 444 bp, Oryza sativa
  Clone ID: uC-osflM202114g01b1
ctagattcctccacctcaatccgaaagagatctcgtgcgcgcacggcgatgcggtgaatcgggcatggcgccgccacaggagcgggactacatcgggctgtcgccggcggcggcggcggcgctggcaacggagctgcgccttgggctgccggggactgcggaggaggctgagtcggagggcggcggaagaggagggacggatgccgctccgctgacgctcgagctggtggccaagggcgggggccagcgcgggttcgcggaccgccatggtggggggcccggccgcccaccgccggagggcgcccgggggcaaggcggcggcggcggcggcggaggccgaggaggaggagaagaagaaaaaggcgcaggcgccggcggcgaagcacaggtgtagggatggccaccaatccgcagttacaggagaacaccagggcgatgagccag

SEQ ID NO: 23838 - DNA, 72 bp, Oryza sativa
  Clone ID: uC-osflM202114g02b1
gtatctgaatttgggcggacgacgacgaggataaaggggatctttaattcctgctcaattaattcccgaggc

SEQ ID NO: 23839 - DNA, 328 bp, Oryza sativa
  Clone ID: uC-osflM202114g05b1
tatttttttctccattccgagcaaaccgaaccgcccctcactagcttcgccggcgtacggactcgcgccgcggggaggaggtggatttcttataattttttttttttttattataatttttttatttattaatattttttattttttattaatttttttttattttaattattatatctaatttttttttatatattatttatattttttattcatttatttatattaattttttttaccttttaattttttatttttttttttttttattctttatttttatattcttatctttttatttatttacttttaatttaatcatattttt

SEQ ID NO: 23840 - DNA, 73 bp, Oryza sativa
  Clone ID: uC-osflM202114g06b1
tggaataataagaggcgcctctgatcgatggaggggccttcaggtgtggtcgcttaactacccctagctaagt

SEQ ID NO: 23841 - DNA, 58 bp, Oryza sativa
  Clone ID: uC-osflM202114g08b1
tccaaaaaccaaaggaacaccaaaccggaggggatcctttaaaacaaccttccctttt

SEQ ID NO: 23842 - DNA, 570 bp, Oryza sativa
  Clone ID: uC-osflM202114g11b1
tttcttttaccccttgctggaatcgctcgctccctagagctcctgttccctccccagccacggcggatcaggggcagtctggtctgttgtcgcatcgatttcgttcgtcttgtttttttgagtttctatttttttattctttatttctctttttttttttttctctttttcatattttttttttttttttttattctcttttttctcttttttttttcctcttttttttttcttcttttttttcttattttttttttttttttttttttctaatttattatttttttttttatcttcccttttctattttttttattttactttctttacttattatttttcttttttttcattctttcctctttttctttaattattgtcttattgttttgttctcatttattttttatttttttttttctttttcttcttttcaattttcttcatttttttttattctttcttttttttcctttttttattttttttcttccttatttatatttttctttttttctttttctttctttattatttatttttttcttcctttctatttttatttttttt

SEQ ID NO: 23843 - DNA, 94 bp, Oryza sativa
  unsure (1)..(94): unsure at all n locations
  Clone ID: uC-osflM202114g12b1
tgtttgaccaccgcgtgagtccaacccttcacggcgagggaaccatgacgaaaactagcgatcccctnctgaatcccccggcgccggctagcaa

SEQ ID NO: 23844 - DNA, 122 bp, Oryza sativa
  Clone ID: uC-osflM202114h01b1
ttatgcttccattgctctcctcctactccccaccatggtgtcgttgccgccgccgtcgccacagatgcgtgtgcgcgtcatggaaaccgtgtacctgtgtttctcctccggcggatgacgcg

SEQ ID NO: 23845 - DNA, 100 bp, Oryza sativa
  unsure (1)..(100): unsure at all n locations
  Clone ID: uC-osflM202114h03b1
ttgcgtgctggacttcagaaggcatctactgatcaggaggtgttgatggngacgaacccttttttcacactagtcacggtcgatgggcaggaggccctgg

SEQ ID NO: 23846 - DNA, 84 bp, Oryza sativa
  Clone ID: uC-osflM202114h07b1
tgacccggcgacactcgcgctgtaccagcaggacacggaccgaaacgagctcgacgtgacggaccgaacgctgcgctttttccc

SEQ ID NO: 23847 - DNA, 145 bp, Oryza sativa
  Clone ID: uC-osflM202114h08b1
tgcttccctccggctcgagccaatctctcgctgtgtctctctcgcgctctccactagcaccggctcggctcggctcgcgcggcggcggcggcggggcggcgtggcgccaagggaggggaacgccggagccgagaggcaaaccacc

SEQ ID NO: 23848 - DNA, 482 bp, Oryza sativa
  unsure (1)..(482): unsure at all n locations
  Clone ID: uC-osflM202115a01b1
ttgcaggcggcggcggcagagcacggcgacctagcccgacctcgcaaccatggcaaggggtttgaagaagcatctgaagaggctcaatgcgcccaagcattggatgctcgacaagcttggtggagcttttgcccccaagccatcttctggtcctcacaagtccagggagtgcctgcctctgatcctcattatcaggaacaggctcaagtatgctctgacataccgtgaggttatttctatcctcatgcagcgccatgtcttggttgatggcaaggtcaggactgacaagacctacccagctggtttcatggatgtcatttccatccccaagactggtgagaactacaggcttctgtacgacaccaagngacgtttccgccttcagtctgtcaaggatgaggatgctaagttcaagctttgcaaggtctcgtctgtgcagtttggccagaagggaatcccctacctgaacacctatgatggtc

SEQ ID NO: 23849 - DNA, 143 bp, Oryza sativa
  Clone ID: uC-osflM202115a08b1
ttcgaaatccccaacacacacaacgcgaaccccactccgcgatggcgtccgccggcgatcgccgcggcggcggggggcctcccggctccggcgacgactccgggggtggttgggagactgttgagatgagggtaaagaaacca

SEQ ID NO: 23850 - DNA, 318 bp, Oryza sativa
  Clone ID: uC-osflM202115a09b1
tgtcatttcaggggaaaaaaaaagatgaatcacttgcagtacccttgttggcgcgaattctgactcagcccgccttcagttgacaaacgaagaagaccaaatggcggctgctgctctgaaggggtctgaccaccgccgtgctaccaatgttagcgctagactggacgcacagcagaagatgctaacccttcaagtccttctacaaccacattggttcattcccacagactggggagctcaagagagtccgccgtgagtacaaggcaaaaaagaactctgaggaggggtacatcagtggcatcaaggaggaaatcaaca

SEQ ID NO: 23851 - DNA, 278 bp, Oryza sativa
  Clone ID: uC-osflM202115a10b1
attgctgcatgctccagaaagagtgcctggtggtaatgttattggtgcaggagcggaaaatctcccggatacccttgccaacaaagaaaataatggtgatggcttcttggcagagaagattcaagagctccgacatgctacaagggatgaaatgcgacgccgtgctctcaagaaaagagaaatgctactccaggggcctaggaatgcgacaagaatttgctttttgatggaggtagacctattgctgtgtctacgcctataattgaaggcttggatga

SEQ ID NO: 23852 - DNA, 208 bp, Oryza sativa
  Clone ID: uC-osflM202115b04b1
tcggcgcagccacacagcagcagcaggtgaggaggagaggagacccgccgccgccgccgccatgggtatctcgcgtgattccatgcacaagcgccgcgccacgggcggcaagcagaaggcatggcgcaaaaagcgaaagtatgagctcggaaggcagctctccaacaccaagctgttaagcaacaagacagtgaggagggtgcgtgtt

SEQ ID NO: 23853 - DNA, 224 bp, Oryza sativa
  Clone ID: uC-osflM202115b10b1
ttcgccttatgcaaatttccccacgcttcgcgaaccctcgtcgggtcgatcccgccgccgccgccgacgtccccaaatccaatccgcccatcgcaaggaggcagcatcagttttgctgcaatctgacaaagtggagggtctaaaagttgaagcttcttttatgtctgaacaagacttgctttacttgggatcagttggattacttggagaatattcttggacga

SEQ ID NO: 23854 - DNA, 419 bp, Oryza sativa
  Clone ID: uC-osflM202115b11b1
tgttatttggggtggttgataagctcaccaggtaaaaaggtagaaaccatgtaaagaaaacttccttcaatttagtttgtatgggcattaataagttacctaaaacaaatactaagaattttgggtcaaaaggtatgctttctccacataattttgatgtaagagtgatatggttcaacccataactctttttgatatgggtgttcagttgctacttttcttcttttttgcagaaaattaatttggcaagcacttcattttactgctctgcaattgcttcacaggtaacattcatgctttcaagtatgtactgttcattcatctatgcacatataaatgtgaattttatactgcagaaatagctcaccattcagtttcaatagtttatgttaatgtttcccgataacattggaaccatg

SEQ ID NO: 23855 - DNA, 193 bp, Oryza sativa
  Clone ID: uC-osflM202115b12b1
ctttctttttatctgcataaccatatatgggtctagcatgttcaatgcaaaatcgcaggagcggaagatctttgggaaaccgttgccaacagagaacataatggtgatggcttcttggcagagaagattcaagagctccgacatgctacaagggatgaaatgcgacgccgtgctctcaagaaaaggaaaaatg

SEQ ID NO: 23856 - DNA, 263 bp, Oryza sativa
  Clone ID: uC-osflM202115c04b1
ttctgtccttgcttagtcggcagaggagcggaccaaggcagagcgcgcgctggagggcgtggcgccggtggtgaacatccggcggtcggaccggtggtggagggcgttcttgccggagggggccgaccggaaccacccggcggcgcacgtcaccggcgacgcggggccggagcccgagctgcaagaagcgttcccgccggcgatggtggtcgtcaggggcctttacccgctgccagactgggaccggaggtacgccttcatgc

SEQ ID NO: 23857 - DNA, 202 bp, Oryza sativa
  Clone ID: uC-osflM202115c05b1
ctactgcgcactgggccgtgtactcatccacactagtgtgacaaagtatctgaatttcaaggctgacaacgacatgcttgtgtacaacaatggctagatccccaaagtctccagcaaccgatgtactgtactctcctcccagcggtggccccgccacaagaagcggtcctagtcccccgcctgcgttctgccactctccggc

SEQ ID NO: 23858 - DNA, 385 bp, Oryza sativa
  Clone ID: uC-osflM202115c06b1
tgtaagagctgcattagacactcttccgcatcaacctttgcctacaaaggatgataaaagctcacagaaccgcacgaaggatggcagctcaggtgatgatttcaacaaagattcaattgaacgtgatgataaacgacttgtagagcttggctggaagacactggaattttttgccttggcccatatattcagccgaatagaagtggcataccaggaggcagtggctttgaagcgccaagaggagctcattcgtgaagaggaagctgctgggcttgcagaaattgaacttaaggcaaaacgtagtgctgctgagaaggaaaaacgcatcagaaaaaagcaggcttaacagatgaaaaacaagtcggaaaataataaagggaaaaat

SEQ ID NO: 23859 - DNA, 148 bp, Oryza sativa
  Clone ID: uC-osflM202115c10b1
ttagagttttttttctcggggctagagatatatcccaaaccccaaccctcccaataatccgatctctccaagttttgttgggatcaaggttgtgtcgatcgcaaaaaagaaaaaaaaaaaaccaatttccttttgggggggttaatct

SEQ ID NO: 23860 - DNA, 468 bp, Oryza sativa
  unsure (1)..(468): unsure at all n locations
  Clone ID: uC-osflM202115c11b1
gtggtcgccgagactacggctttaaagccagcgaggcgaggaggagttcccccaaacacttcagtagctgctactgtagccagcagcggcggccatggaggacacggcggcggcggtcgagacgccggtgacggtgtccacattcggtgtatccaggcacccggacacggccaggctcgtgctgagcagccccaagccgccaggcgtgcgcgaggagttcgtcggcgtcgtccgcaaggcgttccggccgcgggcgagcggcggcggaggagcaggccgtacgccgcggcgcgggggngggtgggccctcacggcgctgcagaccgtgttccccgtgctgcagtggngggaggacctacaacttcaagttgttcaggagttgacgtcatggcaggcctcactcttgccagccttggaattcctcagagcattggattcgccaatttggccaagctggaccctcagtat

SEQ ID NO: 23861 - DNA, 256 bp, Oryza sativa
  Clone ID: uC-osflM202115d11b1
tgtgggctgttccttgcacccaaggagttggaggaggcggctggaaggacaccgaggacaccagcgagacgcccgccatcgacgtctgcaaggggctgatcggcgacaaggccaaggtgagcatctacgacccccaggtgacggaggaccaggtccagcgcgacctcgccatgagcaagttcgattgggatcacccgtgccatcttcagccgatgagccccacggccatcaagcaggtgtcctgcgcctgggacgc

SEQ ID NO: 23862 - DNA, 134 bp, Oryza sativa
  Clone ID: uC-osflM202115d12b1
gtactattttagcccactagccatcatggagcagaagcgttaggtcaatcgtcggcgccggcgcgagcggcctggccgcgtgcaagcaactgctggagcgcggctgccggccggtggtgttcgaggcggacacc

SEQ ID NO: 23863 - DNA, 366 bp, Oryza sativa
  Clone ID: uC-osflM202115e01b1
tcttcctcccttctttgacttcccctttcctcctccgtgcgcacgctctcctgattcatacagcatttcgtcggggatgacgtcgacggcgtactcccggccgtcgaagctgccgggcggcggcaacggcagcgaccgcaggctgccgccgcggctgatgaggggcctcaccaccaagatcgagcccaagaagctcggcgtcggcctcctcgccggctgctgcctcgcgctcctcacctacgtcttcctagccaagctctttgcaatctactcccctgtgttcgccagcacagccaacacatccgctctgatgcagaactcgccgccatcctcgccggagacgggacccattccgccccaaggaac

SEQ ID NO: 23864 - DNA, 256 bp, Oryza sativa
  Clone ID: uC-osflM202115e06b1
tttccgttcttgcctgtgttctttttagcatctatgtttttgtatctggagagttcatgttgagacaatgtatgcaattgtatttggagagttgatgtttaggcaatttatgcacaatttagatggagtctgtcgagagtaattttatgagaaattgagctgcaatataaaatttgtttttgagacttttttgcttttctatattatttatatatttttataatttttttattttactactaaatttttcattttt

SEQ ID NO: 23865 - DNA, 103 bp, Oryza sativa
  Clone ID: uC-osflM202115e08b1
ttcttcttcatcttctacctttgatagtttgattgaggtgttgttcctttgagtgcagcaagaagctcaccattttgatgatagcttaaggatcttgccaaac

SEQ ID NO: 23866 - DNA, 57 bp, Oryza sativa
  Clone ID: uC-osflM202115e11b1
atgaaataagcagagagagagagagagagggagagagattaatattaaacagcaatg

SEQ ID NO: 23867 - DNA, 340 bp, Oryza sativa
  Clone ID: uC-osflM202115e12b1
tcaaaacaacatcaagctgtacgtacgccgggtgtttatcatggacaactgtgaggagttgatcccagagtggctcagctttgtcaagggcattgttgattctgaagaccttcccctcaacatctcacgtgagatgctccagcagaacaagatcctgaaggtgatccgcaagaaccttgtgaagaagtgcgtggagctcttctttgagatcgctgagaacatggaagactacaacaagttctacgaggctttctccaagaatctcaagcttggcatccatgaggattccaccaacaggaccaagattgctgagctcctgaggtatcactccaccaagagt

SEQ ID NO: 23868 - DNA, 290 bp, Oryza sativa
  Clone ID: uC-osflM202115f01b1
ctctacttgtcaacttctcttcagcttgctttacaggaaatgcacctctgacagctgttcaacttctttgggtgaacatgatcatggacacccttggcgcccttgcattagctaccgagccacctaacgatgacttaatgaagagagagccagtgggcagaacagggaaatttatcacaaatgtcatgcggtggaacattcttttgccattcttattatttttcatatcatttttcactcctatttccttaatctctatcctcttctttttacttttcaccctttctttc

SEQ ID NO: 23869 - DNA, 53 bp, Oryza sativa
  Clone ID: uC-osflM202115f03b1
ataccacttcaaattggtcggagaagaagaggtctgttcgtgcatggggaagg

SEQ ID NO: 23870 - DNA, 78 bp, Oryza sativa
  Clone ID: uC-osflM202115f04b1
gtcagagattccaaagaaattggtggttattggagcaggttacattggtctggagatgggttcggtctgtatccctct

SEQ ID NO: 23871 - DNA, 227 bp, Oryza sativa
  Clone ID: uC-osflM202115f06b1
tttccgttcagattccggcgagccctcgcccccgacccccaaattggccgcggatccgagcccccctcgccgccggcttccgatcggatagtatggtgttttcgcacaacaaaaattccaaccagtttgaccctcttttttatgttaacctgagtggactagatgctgacagtcaatctgtttcatttactgacatgaactcaagagatgctccttcaaattcacat

SEQ ID NO: 23872 - DNA, 146 bp, Oryza sativa
  Clone ID: uC-osflM202115f07b1
ggtagcttcccgcggcaatgcaacgagtgctccgcgcggcggcggcggggattggccacgcgtcgggccaccgcgcgccgaggtggggcgcggcggcggcggcggcgaggtggctgagcgggggcagggaggcgatgagctacgac

SEQ ID NO: 23873 - DNA, 99 bp, Oryza sativa
  Clone ID: uC-osflM202115f08b1
ttacactacaggtacaagtcaaaagggtcgaggcagcttcaaaaagaatggagaatcttgcagcatttcctatgggtctggatcaatcgctggcttctt

SEQ ID NO: 23874 - DNA, 90 bp, Oryza sativa
  Clone ID: uC-osflM202115f10b1
taaagatattcattcttgctgttagaccttgtgagcataatgtggctagccgtgactccagagcaccacatgcacacacatttgatggcg

SEQ ID NO: 23875 - DNA, 495 bp, Oryza sativa
  unsure (1)..(495): unsure at all n locations
  Clone ID: uC-osflM202115f11b1
tttaattgtaaaaacctctgatggaacttctctggagtcacaactagttgaagttgatatcgtgacagcacgtttaaggaagttatacataaaggcttatcttggaatcacgtccgataaacccccaaagtattggctagtttttcaagcttctgtaccaccactcggctggaacacctacttcatatcaaaatctactggaacaggatctaatggaatggggtatgtctcaaccatggtttctccaagtaatgacacaatagaaattggaccagggcctctgaagatgtcctattcatcaaaatctggacaactcaagagaatgttcaattctatctctgcagnnggatttgccaattcaacagagctttctttggtatgcttcaagccgggagattctgaagattcacaggcattcggagcatatattttcagaccaaataggactacaccgactatagtttcaggaatggcgccattgaagttatccatgga

SEQ ID NO: 23876 - DNA, 82 bp, Oryza sativa
  Clone ID: uC-osflM202115g01b1
ctgcgccgccgctgcacgctcccgttgcaggacgccgtcgtcgactccaacgactcgctggccaccgccaacagcaccaacg

SEQ ID NO: 23877 - DNA, 286 bp, Oryza sativa
  Clone ID: uC-osflM202115g02b1
tgtcatggtgctgggggtgccagtatttcatcacactatttcgacctcctagtcaagctgaaaaatgatcaagaacatctcttcagaaatattcaaaggagtgaataccataacctcttcaactttatcaatggaaaacacttgaaaataatgaaccttggagatggtcaaggcgcaactggtggggttacagctgttctacgagacactgatgatgatgctgctgatccacatctagaacgaattaaaaatcaggctggggatgagggaagtgatgaagaggatg

SEQ ID NO: 23878 - DNA, 88 bp, Oryza sativa
  Clone ID: uC-osflM202115g03b1
ttcgcaggggcgtacggcagggcggacgcgctcgtcaagttccccggcggagaggcgctctccgtcgccgccatcctcgaggcgccgg

SEQ ID NO: 23879 - DNA, 200 bp, Oryza sativa
  Clone ID: uC-osflM202115g05b1
atcaaacagaagccgatcagagaccctaccctccgccgatgcgtcgagaagaagcctccgccgccgccgccgccgccgaggctgggaccccgcgctcaccggacctccacgacctttccgacgacttcgactacgccgccgccgccgccgtgttctccagtcactcggcgatgcggagcgatctggtggatccaagggtt

SEQ ID NO: 23880 - DNA, 79 bp, Oryza sativa
  Clone ID: uC-osflM202115g09b1
ttttcaatctttctttggcttggggcttggcttggcgttttcttttatcgagcaggttcccccaaatcttagggctagg

SEQ ID NO: 23881 - DNA, 53 bp, Oryza sativa
  Clone ID: uC-osflM202115g11b1
tttgcagtatgcgacgatacacaagcagaacgacttcaagcagtttggggaga

SEQ ID NO: 23882 - DNA, 334 bp, Oryza sativa
  Clone ID: uC-osflM202115h03b1
ctactggcgaccaagccgccgccgtctctcccctcgccatccgcgtcgccgtctaccccgccatccgcgccgccgacgccatccgccggcgccaaccagacgcgccgccgactatccccgacatcttccctggccatccgcgccgacgtctgtacccggcatccgcgccagcgtctaccctcaccatccgccaccgacggccagacgcgccgacgactttccccgccatccgtgcagccgacttccccagagcgtcgcggcgctctcctcgctgagcacgcagccgaaggagccgaaagctatactcgctccaccggcgccgtccctcgccacc

SEQ ID NO: 23883 - DNA, 106 bp, Oryza sativa
  Clone ID: uC-osflM202115h05b1
tcctccaccgcctggatgccgcccggggagcaggagtagcggttaatggccaactaccttcctccgcgggagcgtgcgtcgtcgtcaccggggatccccacccacc

SEQ ID NO: 23884 - DNA, 151 bp, Oryza sativa
  Clone ID: uC-osflM202115h08b1
gtttctcatctcacctgctcgcaatggcgagcaagaagagctcgacgcaggcgtctcccatggccgccgccgccgccagccttctcctcggtctcctcctcgtcctccccgtgccagccgtctcgtcgtcggacgcggatggaggcggtgg

SEQ ID NO: 23885 - DNA, 329 bp, Oryza sativa
  Clone ID: uC-osflM202115h10b1
ataaagcattcgcatccacgagaccactcgaacccgacccgcctcgccgccgccgccaccgaagtaatcccttaattggtcaaaatgtctcgggaggagaatgtctacatggccaagctggccgagcaggctgaaaggtatgaggagatggttgagtacatggagaaggttgcaaagactgtagatgtggaagagctcactgttgaggagcgcaacctcttgtctgttgcttacaagaatgtgattggtgcccgtcgtgcctcctggcgtattgtttcatccatcgaacagaaggtggagggttctctgcattgagcaacttcttttct

SEQ ID NO: 23886 - DNA, 322 bp, Oryza sativa
  Clone ID: uC-osflM202115h11b1
tcggtgtgcaccgccttgatgccgccccgggagcaggagtagcggctcatcgccaactacccttctccgtcggagcgtgcgtcgtcgtcaccggcgatccccacccacctacttactgtgccgcctcgccgtacgtcccttttccaccttggccttaacccgtcacagattcctttcccttccttacttgtgcccgggcttccttgacggaaacactggcccctttttttcgctttccttcctcctttccaccttaaacgccgggcacgattctctatccgagatctggaagagggtcttcttttaatttcagagccttaac

SEQ ID NO: 23887 - DNA, 460 bp, Oryza sativa
  Clone ID: uC-osflM202117a02b1
gtaagactatcgagggcgccctcgagagcggcttctccttcaagaactgcagcatcaagggagaagggcagatctacctggggcgagcatggggggaatcgtcgcgggtggtgtacgcctacaccgacatgtccaaggaggtggtgcccgtgggttgggacggctggaacatcgccaagccggagagcagcgggatctactacggcgagttcaagtgcaccggccccggctccgacgccaagaagagggtgggtttggtgcgctcgacctcaccgaggagcaggccaagcccttcatcggcacgcactacatctacggcgactcctggctcatcccaccagacgggacatcaacgtcatctagctcagcttcaacgtcgagcaactcaaccgcggaagcaccgacggcgagtagtaactcaactcattggctaataaaaagggaagcaattcaactgcag

SEQ ID NO: 23888 - DNA, 211 bp, Oryza sativa
  Clone ID: uC-osflM202117a07b1
gtggctcgatctccctatttctctctcccgtgtggtcggagctcactgcagcggcggcggcggcggcgaacgaggggggagagagagaggtcgaggtagagaggaaagggagaggagggcggatgaagattagcgggaaacggcgtgaagaaagtggcggcagtggccgcgaaggccggaaaggcgaccgcctgggaggggacgggcacga

SEQ ID NO: 23889 - DNA, 372 bp, Oryza sativa
  Clone ID: uC-osflM202117b08b1
actactcccccaccgctaccatccctctcctcctcacatcctccgcgccgcctccatctccgcccccagccacctcttcgctgcgccgacggcaacggcacccctccacacatccccgcacacccctccacccgccaccacatctcttttccccaactaccccccaccggccggcggcggctgcctcctccctcggagacttgtacggtggtcactgccgccgtcgccacctcgcctttacctccaagcaatcttgaccaagccaccaaccagggaactagctcctcctccgcgcacgcaaaaggaaaaaaatggaaaagaggggaaaagaaaaacctagctcgcctcggtttcttcgtccgcggtcatgat

SEQ ID NO: 23890 - DNA, 502 bp, Oryza sativa
  Clone ID: uC-osflM202117b09b1
ttgcgagaatggagagaacggacacggcgccgccgacgaggtggtggagccgtatcagcagacgccgcggcccgggccgaagctgaacgagaggatcctctcgtcgctgtcgcggaggtccgtcgccgcgcacccgtggcacgacctcgagatcggccctgatgctcccgccgtgttcaacgtcgtcgtggagatcaccaaggggagcaaggtgaagtacgagctggacaagaagacggggctcatcaaggttgatcggattctatactcgtccgtggtctaccctcacaactacggtttcattccgagaacgctttgcgaggacaacgaccccatggatgtccttgtcctcatgcaggaaccagttcttcctggttcattcctccgagccagggccattggtctcatgcctatgattgaccagggagagaaggatgaccagatcatagctgtctgcgccgatgatcctgagtaccgccatttcaataatctcagcgagctt

SEQ ID NO: 23891 - DNA, 402 bp, Oryza sativa
  Clone ID: uC-osflM202117b10b1
tttcgcataaacaaacccctctcactcccagatacctgctgctgccactagcccactaccatggatccttgcaagttccggccgtcgagctcgttcgacacgaagacgacgacgacgaacgcgggagctccggtgtggaacgacaacgaggcgctgacagtggggcccagggggccgatcctcctcgaggactaccacctgatcgagaaggtggcgcacttcgcccgggagcgcatcccggagcgcgtggtccacgcccgcggcgcctccgccaagggcttcttcgagtgcacccacgacgtcaccgacatcacctgcgccgacttcctccggtccccgggcgcccagacccccgtcatcgtccgcttcttcaccgtcattcacaagcgcggcagcccggag

SEQ ID NO: 23892 - DNA, 329 bp, Oryza sativa
  Clone ID: uC-osflM202117b11b1
gtgccgcccgaaccaatcgccccgaggaggaggagacctagggtttcctcgtcctcgtcgtcgtcgtcttcccccgcgccgccgcccgctcctcccttcgtctatccccggaggtttgagaagagttgcttgtcctaaaatgaggccagttttctgtggaaaccttgactatgatgctcgccaatctgagattgagcgcctcttcagcaaatatggacgtgtggagcgtgttgacatgaagtcgggtaaggcagttgctctcaattgttttttcttaaatttaagctgcactgtattcaaatctgcttatccatattgcaacctatctg

SEQ ID NO: 23893 - DNA, 334 bp, Oryza sativa
  Clone ID: uC-osflM202117b12b1
ttgccggatgaagaaggacaatttaagcggccaaaaaggaaatcattgtacagtatttgtcacaaggcagggttatggcaggttgcaaaccaatttggtcggagtgctgagcagttaggtcaccatctcacattgacgaagatacccgaagcaggagaacttgatagtgggaaagattctcctgaagaggttgctgcaaatttcacatgtgcaatgtttgaaacaccacaagatgttcttcggggcgccagacacatggtggcagttgagattgggtgtgagcctattgtaagaaagcatatccgtagtatcttcatgaataaagcttgtggtc

SEQ ID NO: 23894 - DNA, 78 bp, Oryza sativa
  Clone ID: uC-osflM202117c01b1
acgctttgctttagacacaagattatcctatgcatatcctttgccaaacatccaattttggcattatcccatggatca

SEQ ID NO: 23895 - DNA, 332 bp, Oryza sativa
  Clone ID: uC-osflM202117c02b1
atatagagtatgcgtcgcctctcctcctcctccctaacccctacgcttccagaaccttctcgaagctcccgctcccccccccttccgctccaatggcgaaggaaccgatgcgcgtgctcgtcaccggcgccgcaggacaaattggatatgctcttgtccccatgattgctaggggtgtgatgttgggtgctgaccagcctgttattctacacatgcttgacattccaccagctactgaatctcttaatggccttaagatggagctggttgatgctgcatttcctcttttgaagggaattgtcgcaacaactgatgttgtggaggcctgcact

SEQ ID NO: 23896 - DNA, 220 bp, Oryza sativa
  Clone ID: uC-osflM202117c04b1
atccccccgaaacctcgaaaccctagatcgccatatggcctcctccgccgccgccgccttctaccgcgacagggaggacgcggcgccgccgtcgtccggccccgggggaggcggcgccatggcggcgtacgacccgagctacgtgccggactcggtgaagacgctcgtgtcgtacctttaccgccacatccgtgaccgcatcgtgtacgagacgcaccag

SEQ ID NO: 23897 - DNA, 490 bp, Oryza sativa
  Clone ID: uC-osflM202117c07b1
gttcatcacaactcggcaaagatgagagagatcctgcacatccaaggcgggcaatgtggcaaccagatcggtgccaaattctgggaggtggtgtgtgatgagcatggcattgaccctactgggcggttcacaggcaacttatatctgcagctgttgcgtgtcattgtgtacttcaatttggtcattttctgttattttatatcttattctgctctcatgttcctttttgcttgtatcttattttttgtttttctcatttttccacttatttattatttttcttctctttaatacctttttttttttaccttttcttttatttttttttatttttcttattattatcattctttttttttttattttttcattttcttatccattatttattttctttttatcttttattcctctttttctttttatttttatttttccttttttatttttttctttttactctatttttcttattttttttctcttttta

SEQ ID NO: 23898 - DNA, 454 bp, Oryza sativa
  Clone ID: uC-osflM202117c08b1
gttgaccgccctcagaactacaccttggctcctgagtcaagcaaacaaatccgtgctaatatcaaggtttcatcaacagagactggagtaatatttgggaacattgtttatgaaacttcaaatgtgatggagcgatcagtggttgtgctaaatgatattcacattgacatcatggattatatctcaccagcaacttgcgctgatgttactttccgtaacatgtgggcagaatttgagtgggaaaacaaggtggcagtgaatactgtcattcagaatgagaaggagttttttggatcatattatcaagtcaacaaacatgaaagtgtctaacaccaccgtctgcgcttgacggaaaatgccggttttctcgccgctaacctttattgcaagagtgttttcggtgaagatgctttggtaaatatcagcatcgagaagcagttttgatggcaagctc

SEQ ID NO: 23899 - DNA, 116 bp, Oryza sativa
  Clone ID: uC-osflM202117c11b1
tcggttcaccgaattccattcctcgcgattcctctggcctcgtctactagacctccccctcctaggggatcgacggagaggaatagtgaggaggaaaaaaaaaaaaaaaggaaaaa

SEQ ID NO: 23900 - DNA, 449 bp, Oryza sativa
  Clone ID: uC-osflM202117c12b1
tcgcttagattgatcgaatcacacgtgttgcatttgaggttgctcgcaagaggcgcgggaagctttgctcagtagacaaagcgaatgtgcttgaggcatctatgctttggagaaaacgggtgacttcattagcttctgaattccctgacattgagctgtcgcacatgtatgttgataatgcagcaatgcagcttattaggaatcctaagcagtttgacacaattgtcacaaacaatatttttggtgacatattgtctgatgaagcatcaatgcttactggaagcattggaatgctcccatctgccagtgttgggtgaatcgggaccaggtctttttgagcctattcatggttctgcgcccgacattgctgggcaggataaggcaaacccattagctacaattcttagtgctgccatgctattgcggtatggccttggagaagaaaatgc

SEQ ID NO: 23901 - DNA, 84 bp, Oryza sativa
  Clone ID: uC-osflM202117d04b1
atcagatgtacctcagccgacacggcgacgcttccgtgttccaccctggttcgtgcagaatcactacatggagcatgcctattc

SEQ ID NO: 23902 - DNA, 56 bp, Oryza sativa
  Clone ID: uC-osflM202117d05b1
gtgaaatctcaagggaatcataggatatgttgaggaagacctgttttctactcccc

SEQ ID NO: 23903 - DNA, 216 bp, Oryza sativa
  Clone ID: uC-osflM202117d06b1
gtgctattatgtggatgtcactgagttccagaccaaccttgtcccataccctcgcatccatttcatgctttcatcctatgcccctgttatctctgctgagaaggcttaccatgagcagctttctgtgcctgaaatcaccaatgctgtttttgagccctcaagcatgatggctaagtgtgaccctaggcacgggaaatacatggcttgctgcttgat

SEQ ID NO: 23904 - DNA, 459 bp, Oryza sativa
  unsure (1)..(459): unsure at all n locations
  Clone ID: uC-osflM202117d07b1
tttcctactgcaaggcgctggagcggctcagcctcagggtgaggccccgcatggctgcgagcttcctcgtcggcggctgtggcttctgcttgggtctcctcgaccctgtctccaacatcgtcgccaacaccctcttctcctacgggcgcgcggtgggcgagacccggagcgagtgtgacgagctcgtctacatccccgaagaaaagctcagggacctggagcaccggtcgctggacggcatggtgaccttcctcacccgcttcttcccctacctcgccgacgccgaggccgtgcgcttccttctctacgccgaagccgacctgctcgtcgccgcccgcatcgtcgcgttcgacatcggcatgaggcgattcgggtcctccgggccagacatcgtcaacgaggccctcgagaatggcctcaagtgcgccgncctcgccgncaagcacccaaaccccgatc

SEQ ID NO: 23905 - DNA, 509 bp, Oryza sativa
  unsure (1)..(509): unsure at all n locations
  Clone ID: uC-osflM202117e01b1
gcgtacgcttgcaggttgcgatccaggaagagctcgccgccgccgctgccatggcgctctccgtggagaagacctcgtcggggagggagtacaaggtgaaggacctctcccaggcggacttcggccgcctcgagatcgagctcgccgaggtcgagatgccggggctcatggcgtgccgcgccgagttcggcccctcccagccgttcaagggcgcccggatctccgggtccctccacatgaccatccagaccgccgtcctcatcgagaccctcaccgcccttggcgccgaggtccgctggtgctcctgcaacatcttctccacgcaggaccacgccgccgccgccatcgccagggactccgccgncgtgttcgctgganaggggagaaccttgaggagtactgggggtgcaccgagcgcttgctcgactgtggcgtcggcggcggacccgacctcatcgtcgacaacgggggcgacgccacgctgcttattcacgagggcgttaaggccg

SEQ ID NO: 23906 - DNA, 117 bp, Oryza sativa
  Clone ID: uC-osflM202117e02b1
gatgctagtcagggttgcgagcgatctgcagcgtgggagatggggaagagtaccacgtccgtccctatcaaggctgagtcgatccgacaccagaaaaaaaaaaacaattcccttttg

SEQ ID NO: 23907 - DNA, 417 bp, Oryza sativa
  Clone ID: uC-osflM202117e04b1
gtgcaattctatggatcccggtgtgtcaagccaccaattatctatggtgatgtgagccgccccaacgccatgactgtgttctggtccaagatggcgcagagcatgacctctcgccccatgaagggaatgttgactggtcccgtcacaatccttaactggtcttttgtcaggaatgaccagccgaggtttgagacatgctaccagattgctcttgccatcaagaaggaggtcgaggaccttgaggctggtggtatacaggtcatccaaatcgatgaggctgctttgagagaaggtctgcccctccgcaaggcggagcatgctttttacttggactggggctgtcacctcctttagaatcacaaactgggggtgttcaggacaccacccagatttacacccacatgtgctacttttact

SEQ ID NO: 23908 - DNA, 437 bp, Oryza sativa
  Clone ID: uC-osflM202117e05b1
tttggataagacatttttcattgctgcacttcttgcgatgcaatatcagagagcattggttttacttgggtcaatggctgctctttccctaatgactattgtgagtgttataattggaaggatttttcagtctgtaccagcacaatttcaaacaacactacctataggagagtatgctgcgattgctctcctggcattttttggtttcaagtcaataaaagatgcatggcaacttccagataatgcaaatggaaaccttcagggaaactctgaatctggggagctggctgaggctgaggagcttgtaaggagaaggtggctaaaaagttgactagtcctcttgaggtcctttggaagtctttcaccttgttttctttgcagaatggggagatcgctctatgctggctacattgcgttaggtgctgctcagtctcttt

SEQ ID NO: 23909 - DNA, 282 bp, Oryza sativa
  Clone ID: uC-osflM202117e06b1
ctcctcctcccaaaccatcagcttatcccaaggtatgcttggattaattctgtttcttttagtgtttgtttagcttgatttgttgtggcatatgcacacaactgcttgactgcttcctgtcaactgaattcttgggtgggaattatctctggttcggatcaatttctcttctttttactttctttcaatatttttttggggctgttatcatgacttggatgtccaattcaagtttgctcatgtaatatttgtcgagacagatcgatggttaatcgcgaaata

SEQ ID NO: 23910 - DNA, 215 bp, Oryza sativa
  Clone ID: uC-osflM202117e08b1
ttattatttattttaaattattatattttttttatttaaatattttttttattattatttataattttttttttatttatttatattttttttttattctttttttattttttttatttttatttaattatttattttttcttatttttttttttcttttttttatttttttttctatttattttatatttttttattatatttttatttttttt

SEQ ID NO: 23911 - DNA, 120 bp, Oryza sativa
  Clone ID: uC-osflM202117e11b1
ttccaacatcctgagctccaatctcccactccattccggccgcgcattctcccgctctcgatcgatcgatcgatcatggtggtgccttccgcgacgacgccagcgaggcaggagacggtg

SEQ ID NO: 23912 - DNA, 119 bp, Oryza sativa
  Clone ID: uC-osflM202117f01b1
acgcttagtcttgcttgcctctctgcgtgatcccgatctgcagagctagccgactaccgagctaagcccgcaggggcgccgcccgtgagctcgttcgacacgaagactgcagcaacgaa

SEQ ID NO: 23913 - DNA, 205 bp, Oryza sativa
  Clone ID: uC-osflM202117f04b1
accgctcctcttcggtctggtcgattcgaagccatggagatatagcctgcaagcttcatggggctggagcgagctcgtatttcttgatgcaagtttcagcccctccaagaacagggtaggagagattatttgtgttccttccattgctggttggttgctgcagtctgcatgtggtggattcttgggaagaaggtggttggtgagg

SEQ ID NO: 23914 - DNA, 197 bp, Oryza sativa
  Clone ID: uC-osflM202117f06b1
gttcccctcactcccactcgcctgaaaccctagcaaggagctcccggcggatggacgagggaggcggcgctggtgctgcggctgccgccgccgggaacgcggcgggggcggaggtgcaccacaacgcgcggaccgtggaggacgtcttccgcgaacttccgcgcgcgcctcacgggcaccgtctaggcgctcaccac

SEQ ID NO: 23915 - DNA, 53 bp, Oryza sativa
  Clone ID: uC-osflM202117f08b1
cactcgtctgaaacgctagcaaggagctcccgatagatggacaagggaggcgg

SEQ ID NO: 23916 - DNA, 86 bp, Oryza sativa
  Clone ID: uC-osflM202117f09b1
tagcagacggtggccgccgacttcgacggcacgctggtcaggtcgcggagcgcactaccttactacctagggagtacatggaggcc

SEQ ID NO: 23917 - DNA, 369 bp, Oryza sativa
  unsure (1)..(369): unsure at all n locations
  Clone ID: uC-osflM202117g02b1
gtaccggatcgcatttcctttgaacttccacgctttctcttataacaaagcctagaacggggggtcgtcggaatacatggcggaaggtgcgccgatcatctaccttgaccccgccacggtggcggaagcgcgccgccgcggtgacgacccgcgcaagctggaggagtgcaccaagtacttgatgaccgcacatctacgggttgctccctggcccacccgtacccatcgncgtcgnccgcacccacgccgtctgcgccgccggagcctccgacggcgttgaccgcatcagcgcccttcccgacgcgatcctccgcaacatcgtcttccgccttcccggtaaggacgccgcgcgcaccgccgtgcttttcc

SEQ ID NO: 23918 - DNA, 73 bp, Oryza sativa
  Clone ID: uC-osflM202117g05b1
gtgagattcctcttttggatctatccattcgggtcaccgtggcagttcggtaattttggctgacaggaggacc

SEQ ID NO: 23919 - DNA, 325 bp, Oryza sativa
  Clone ID: uC-osflM202117g10b1
ctctgatcaagatgagtggcgcaacggcggactgggcatggtggctcggcctcgtcgccggcgccgtcccgctgctcgccctcgccgtctggcactgcaccgacgccttccacagcgccgccttcgcgttccgccgccgcgggacacgcgcgaggctccccccgggccacatgggcctgccgttcgtcggcgagaccctcgccctgatctggtacttcaacctcgcccgccgccccgacgccttcatcgaggccaagaggcggcgctactgctacggcgacggcgacgacgacggcggcatctaccggacgcacctgttcggctc

SEQ ID NO: 23920 - DNA, 213 bp, Oryza sativa
  Clone ID: uC-osflM202117g11b1
ttctcttccagtcttcctcttctcctctccaccaccaccattcctccccccttctcccctcctccccgcgacgcgaaggcgaccaccacgcccatgccctccgttcctcgcggcggcgcgaccgcgaccaccaccaccagcagcagcagctagccccatggccaagtcgacgcccgctgcggcggcggcggagcccgaggaggcgacggcggc

SEQ ID NO: 23921 - DNA, 257 bp, Oryza sativa
  Clone ID: uC-osflM202117h03b1
ggctgagctgacagacccgcaggcggaagcggaggcagggtaggcttgtaggagcaacaaattccgcaccttgcgcgatgtgcagcggatgcggcgcgagggcatatcatggcatcgaagcggatcctcaaggaactaaaggacctgcagaaagatcctccaacatcatgcagtgcaggtcctgctggtgaggatatgttccattggcaggcgaccattatgggtcctccagatagtccctatgctgttggagtttt

SEQ ID NO: 23922 - DNA, 449 bp, Oryza sativa
  Clone ID: uC-osflM202117h04b1
atgtgatcttatggagagagagtttgtcccaccacaacacttcattcgtttagtacaaagaagaatggaaaggcaacgttctgaggatgtaggtaaaaacatttcattttttattgctcatatttcttatatatttcatttattttcttttactattattcttttatatattttttctttttatttttttacttttttatattttatattatattttttataatcttttcttttcttttttatctttcatttttaactccttctttatctttttcttcatttctttatttttaattatttttttttctttacttacttctttttatttatttttaattctttcatttctttctcttctttctttccttattttcattctctcaatttttttcttcttaatatttttttcttttcttatttattatattattttatttttctatttcttt

SEQ ID NO: 23923 - DNA, 239 bp, Oryza sativa
  Clone ID: uC-osflM202117h08b1
gcgctgagactccttcccctttcccccctcacctgtgtgctcttctacgccgcaccaatccgccccctcgcgattcgaccagatcggcgcgagggcatatcatggcatcgaagcggatcctcaaggaactaaaggacctgcagaaagatcctccaacatcatgcagtgcaggtcctgctggtgaggatatgttccattggcaggcgaccattatgggtcctccagatagtccctatgct

SEQ ID NO: 23924 - DNA, 267 bp, Oryza sativa
  Clone ID: uC-osflM202117h11b1
gtagtttgtacgtacggtacaagctcgccgtccggcgatcatccttgataatctcaattaaaattatacatccctttgttatcgatcatcgatcatcagattggtggctggctggctaggccttatcagtttggaaccggatgctggttgaggagcagagttggaggatcatccctctggttccaggattcgttcctgttggcgttggtggagggcccagcacaccataaatataatgggcatcttctgctgctttcagtccgagga

SEQ ID NO: 23925 - DNA, 110 bp, Oryza sativa
  Clone ID: uC-osflM202117h12b1
gtagaatctacctcccctccccaaatgctcgcttccacgcctcttccttccgacttgcgacagaatggcgctcaatgaggagtacacatacgtggagctgtagaaggagc

SEQ ID NO: 23926 - DNA, 238 bp, Oryza sativa
  Clone ID: uC-osflM202118a03b1
atgcttcacaaatctcacgcactgtctctcgttcgcgcaaagcacgctgcttttctccgctttgcgagcaccatagcctagcccaccatgtgcggcggcgccatcctctccgacctcatcccgccgccgcggcgggtcaccgccggcgacctctggctggagaagaccaagaagcagcagcagcagaagaagaagaacaagggcgcgaggaggctgccactgcgccaagaggaggagg

SEQ ID NO: 23927 - DNA, 295 bp, Oryza sativa
  Clone ID: uC-osflM202118a06b1
tttatttgcaagccaaacctgatctcatcattggcaattacagtgatggaaaccttgttgccactctgctggctcacaaattaggagttacccagtgtaccattgctcatgccttggagaaaaccaaataccccaactcagacatatacttggacaagtttgacaggcagtaccacttctcatgccaattcactggtgatcttattggcatgaatcacactgatttcatcatcaccagtacattccaagaaaatggctggaagcaaggacactgtggggcagtatgaatcacaca

SEQ ID NO: 23928 - DNA, 124 bp, Oryza sativa
  Clone ID: uC-osflM202118a08b1
gtaccatacccaacaagcgtcaaatcgcgtcaaagccaattacctcatacaagtccaggaatctgtaatatattccgagacttttacacgcattccagtcatcactagtgtagcggctgctgtt

SEQ ID NO: 23929 - DNA, 282 bp, Oryza sativa
  Clone ID: uC-osflM202118a09b1
tgctcctcctcctcctcctactcgattcgcatccgcacctcgtcgtgccaatggaggccaccgtcgccgtcgtcgcagcgcccgcgagatccgcgctccccttacggagccgcgtagccgccgcagcacgcccaggacgcgcgccggcgctgtcggccgccccgggaaggcgcctcgccacgcgccgcgccgcggtcgacggccaggcggcggaggcttcaagaggcgctccccatcgagaaaaggttcccttcctttccgaggcgtatggacattaaccag

SEQ ID NO: 23930 - DNA, 276 bp, Oryza sativa
  Clone ID: uC-osflM202118a10b1
cttgctggaccgacgcacgcgtttgttagccctggcgttgctactacgatcgagaccgcgtatccgggtgaaaggggggattggccaagacagggcgacaagtggtggatccctacagttcgagtccctcccgagggtctgccagatgcgtggaaaaaatggattatgaaccagaaagaccttgtagggcaggtgcttgaggcagtcatggctatcaatgctgatgcacttacagagatggagatcccgtgagagtccattgaactctgcctaaga

SEQ ID NO: 23931 - DNA, 93 bp, Oryza sativa
  Clone ID: uC-osflM202118a11b1
gtgttttgcttagccttcgtgatctcatcattggccgtgactgagatggaaacgttggtggcaccctgacaggtcaccaagggggagctccct

SEQ ID NO: 23932 - DNA, 267 bp, Oryza sativa
  Clone ID: uC-osflM202118a12b1
gatcccacgcgtccgtttatttgcaagccaaacctgatctcatcattggcaattacagtgatggaaaccttgttgccactctgctggctcacaaattaggagttacccagtgtaccattgctcatgccttggagaaaaccaaataccccaactcagacatatacttggacaagtttgacagccagtaccacttttcatgccaattcactgctgatcttatcgccatgaatcacactgatttcatcatcaccagtacattccaagaaa

SEQ ID NO: 23933 - DNA, 165 bp, Oryza sativa
  Clone ID: uC-osflM202118b03b1
gttcttgttgagagttgagagaccaatcgaccatcggctgtgatctcaaaagagagagaggggcaaagcgaagtgggcagacttgggcggcaatccttgcgaatcatcaagggattctgtcttttctttggtgcgattcgattgtttctttgtagggggaaggga

SEQ ID NO: 23934 - DNA, 408 bp, Oryza sativa
  Clone ID: uC-osflM202118b05b1
cttatctctccccaactccgatccccacccccatggcgtcggagatcgaggtgctcgaggacaccaccaccacgatggccgcctccgccgcccccgtggcgcccgcgtccccatccccatcccccgccgtcgctgccgacggcgaggagggggaggggccggcccctgcggcggaggacgactcgctgaagaacgacgtgtacacggcggcggcgtacggcgatctggagaagctgcagcggctagtggagggggagggccacccggtcacggagcccgacggtctcggctaccacgcgctccagtgggccagcctcaacaaccgcgttgtcgtcgtgcagtacatcctcgagcatggagcagatgtaaatgctgtggaccacactgggcaaacagcacttcactgga

SEQ ID NO: 23935 - DNA, 327 bp, Oryza sativa
  Clone ID: uC-osflM202118b08b1
gttggtcatacaagtagatcagaagaatgaagctgtcctcttacctatttatggcagcatggttcctttccatgtttctactgttaagagtgtcacaagtcaccaagacaaccgcacttgcactatccgcatcttcttcaatgtgcctggcatgccattctcaaacgatagcaatctgaagtcgcaaggggctatctacttgaaggagatcacgttccgctcgaaagatccacgacatagcagtgaagttgttcagcaaatcaaaacgttgaggcggcaagttgcttcaagggagccagagagagcttgaagagccacccttgtact

SEQ ID NO: 23936 - DNA, 187 bp, Oryza sativa
  Clone ID: uC-osflM202118b09b1
ttacctttgatgagaagaaagccatggaagatgctattgaaggaatgaatggattggatttggatgggcgggcgatcactgtcgataaagctcagccacaaggacctggtagagaccgtaatggagaccgtgattatgatcgtgaccgtggatctcgatatgaccgtggccgagactttggtggttg

SEQ ID NO: 23937 - DNA, 279 bp, Oryza sativa
  Clone ID: uC-osflM202118b10b1
ttctctgcgctgctccgattcctacccccagggggttcttagatcgaggtgctggaggacaccaccaccacgatggccgcctccgccgcccccgtggcgcccgcgtccccatccctatcccccgccgccgctgccgacggcgaggagggggaggggccggcccctgcggcggaggacgactcgctgaagaacgacgtgtacacggcggcggcgtacggcgatctggagaagctgcagcggctagtggagggggagggccacccggtcacggagcccgac

SEQ ID NO: 23938 - DNA, 208 bp, Oryza sativa
  Clone ID: uC-osflM202118b11b1
ttgcttggttgcaaaaaccaagacatacacacggagtcaaataataacaaaggcgaggtcgcctccacggctacagacatctaggccgcccacaagacagccgcgtccgcatacgcatcccaggacggcgttgccgacggcgaggagggggaggggccggcccctgcggcggaggacgatttgttgaagaacgacctgtacacggcgg

SEQ ID NO: 23939 - DNA, 313 bp, Oryza sativa
  Clone ID: uC-osflM202118c01b1
ctcctctcacattttccccaaataataatagaggaaggggaaaaacacatttgcagccacatcatccatggcctctctccgcaccattccggtgatcttcggcatcctctcctatgtccttgccagcactgccactgtcaccgtcgcaccggactacgtcgttcacggccgtgtccactgatacacgtgcctcgtcccagtgttggctctaggattcaccaaccaggttgaacctgaaaatggaacgtgggttagaccgttataaatgacacccctcttaaacccttgctggcttgagtttcatcattacact

SEQ ID NO: 23940 - DNA, 276 bp, Oryza sativa
  Clone ID: uC-osflM202118c02b1
tgcctgtatctgaatttgacgggcagaatattggtgttgtgattgctgtaacacacaagtatgcccatatggcggctaagcaagctgtgatcgaatatagatccgaaaattttcatccaccaattctgacaatagaagatgctgttcagcataacagctacttaccagttcccccatttttagctcctacgccaattggtgacttcaaccaagctatgtctgaagctgatcacaagatcatagatggggaggttaaacttgcatcccatgtctatt

SEQ ID NO: 23941 - DNA, 329 bp, Oryza sativa
  Clone ID: uC-osflM202118c03b1
cgctcttgtagctctcgacccccgcatctcatccctcctctcgcttagttcagatcgaaatcgcaaatggcgaagattaagatcgggatcaatgggttcgggaggatcgggaggctcgtggccagcgtggccctgcacagcgtcgacaatgagctcgtcgtcgtcaacgaccccttcatcaccaccgactacatgacatacatgttcaagtatgacactgtgcacggccagtggaagcatcatgaggtctaggtgaaggactccaagacccttctcttcggtgtgaaggaggtcaccgtgttcggttgatgaaccctgaggagatccca

SEQ ID NO: 23942 - DNA, 72 bp, Oryza sativa
  Clone ID: uC-osflM202118c06b1
ctctttttctcttctcttcacttcaccaccgccacctctctcatcggatccctgcagaggaggagagggcag

SEQ ID NO: 23943 - DNA, 443 bp, Oryza sativa
  Clone ID: uC-osflM202118c07b1
gcatgtttgaaattgaacacagtggaagaccaaccacattactctcccaattactctcctaacaactcaaagaaggaccaaagaaagctgctatcatgcgtgaccaaccaactaaatggaaaacgcagatgcagcatatctgagatccttgcgacgcctgcacgatcagcatgctaggatgtgagtaatacttccactgtgtactcgagcatccaccaaccaggttcaacctgaaaatggaacgtggtaaagacagtagtaaatgacatcctctagaaaccttgctagtttgagtttcatatttacactgaataattgagagcttgatattacattacccgtgaggcaatcatcgagtttgttggctagaagagtagggttgtacagcacaaagtaatcaatatagggggactgcaaatcatcacgagagctcgatgcaattt

SEQ ID NO: 23944 - DNA, 442 bp, Oryza sativa
  Clone ID: uC-osflM202118c08b1
tcctgtttctgaatttgccggccagaatattggtgttgtgattgctgaaacacaaaagtatgcctatatggcggcgaagcaagctgtgatcgaatatagtaccgaaaatcttcagccaccaattctgacaatagaagatgctgtccagcataacagctacttcccagttcccccatttttagctcctacgccaattggtgacttcaaccaagctatgtctgaagctgatcacaagatcatagatggggaaggtgaaacttgaatcccagtactatttctacatggagacacagacggccttagctatccctgatgaagataactgtataaccctctatgtgtcggcgcatctacctgagattacttaaaatacctgtgcgaggtgccttggcattccatatcacaatgttcgtatcatcacgagaagagttggggaagtttt

SEQ ID NO: 23945 - DNA, 383 bp, Oryza sativa
  Clone ID: uC-osflM202118c09b1
tctcacgcgtacgggagcaggcacgcgcgaatccgaccgactccatgggccagtgctgcacggctggcggcaaggccgtcgccggcgacgaggcatagccggggacctccaaggcggcgccgacgtgccgcggcacctgctccaaaaatgggtccgccaagcagcagccgtgctcggcggcggccaaggcggcggcgacggaagcggcggcggcggcgtcgtcgtccaagaagccggcaggccccatcgacgaggtgctggagcggccgatggaggaggttcgcacgacgtactacatcggcaaggagctcgggcgcggtcagttcgttgtgacccacctgtgcacccacaaggtcaccggcgagaagctggtgtgcaagacg

SEQ ID NO: 23946 - DNA, 365 bp, Oryza sativa
  unsure (1)..(365): unsure at all n locations
  Clone ID: uC-osflM202118c10b1
cctctccctaccgcgaaataacgccgcgccggcgcccaccatcgtcaccgccgcccatcgctctccaccgcgcccccattgcacctgacgcgaaggaggagcccgaggaggaagaagaagaacaaggaggctgacgccgacgcctgcaggcaaagaagacgaccgagacctcttgtatgagggaacaccgaagaagtcgtccaccgcggggcgaccgggggcgaaccctagcccccggtcgtcgtcacccaccccttctctcaccgtctcgccgncgtcggaaaccacgcagacgctgggatggcggcagcggggccaaaacccccgacggcggatcgtctccggccaaggaggtggcacagcgc

SEQ ID NO: 23947 - DNA, 98 bp, Oryza sativa
  Clone ID: uC-osflM202118d01b1
ttcatttcgaacttcactgatgagctggggatgcagattctgagcctcctgccgctcaagtcggcaatccggacgggggccctctcgtcgcggtggcg

SEQ ID NO: 23948 - DNA, 253 bp, Oryza sativa
  Clone ID: uC-osflM202118d02b1
ataaaaatctctcttttttcttcttgttgtttctgcagttacctttgtcttgccttcaatgccaccgctttactgccggatctgaggaaagctcccatccttgctgagttcttgtgctgcttcttccacaattcttccttttgttgagaattttgccttccatctgcttaatcggtgacaaaggtggtgggatcttgcttctcttcctgcaagaaaaggctcgtttttttgtttcgccgtttgctgcttgctc

SEQ ID NO: 23949 - DNA, 128 bp, Oryza sativa
  Clone ID: uC-osflM202118d04b1
cttttactgtccaaagcgagatctcttcaaacatttgacgtcacatcacgactacagttatgaaagcaatggacgctatggaaatgcatgcagagaattaacggagtgccaaaaggcttcaccccaag

SEQ ID NO: 23950 - DNA, 144 bp, Oryza sativa
  Clone ID: uC-osflM202118d05b1
cctcgttagaaagtactggaatccattcacatgcccatccttttacctcaatttatttacggaataacgactcaaaacatggaatgagaaacacgcatatcttagcacaagctgaacaacccaaaacactcgtaagaggtggtc

SEQ ID NO: 23951 - DNA, 83 bp, Oryza sativa
  Clone ID: uC-osflM202118d09b1
tctttaaggatctcggacgactcaccaaagcacgaaagccagttagaaaatggattcctattcttagagtgcctaaccttatt

SEQ ID NO: 23952 - DNA, 353 bp, Oryza sativa
  Clone ID: uC-osflM202118d10b1
ttggtggacccactcagcgcgcttcagcaatggctgccttaacatcagcgttcaatccatcagcaaaacccaaaagcccaccacaacgtgcaggtcaaggttctcagcgagcagctgctgttgctgcgctgtctaatgttctgactgctgagggttcatctcaaagcccacgcataggtaggtcttccccaatggcaggtgatgcagatacagctgaactaactccgtctgctgcatcccctctgtctgaaggagcatcagaattttccgctgataaagatgccccaggagatggggcattatctgtgggagggcgaactgagcctgacgtattattggaacagactgcttat

SEQ ID NO: 23953 - DNA, 379 bp, Oryza sativa
  Clone ID: uC-osflM202118d12b1
ttctttatgtccctttgcttctaatgaactcattcaacactcatgatgacacacagaagattgttgagaagtactccaactccaacattgaaattcacactttcaaccagagccaatatcctcgcattgttactgaagacttcttgccacttccaagcaaggggaagactggcaaggatggctggtatcccccaggccatggtgatgtgttcccctccttgtataacagtggaaaacttgataccttgttggcacagggcaaggagtatgtctttgtcgcgaacttggacaacttgggtgctattgttgacattaagatcttaaaccacctgatccataaccagaacgagtactgttggtagggtactcccaaaacatt

SEQ ID NO: 23954 - DNA, 463 bp, Oryza sativa
  Clone ID: uC-osflM202118e03b1
gattcatctgtctcatcagatcagcgtgaagcagcggcaagaacacaaaaatggcggacgagaagctcgccaagctgcgtgaagccgtcgccggcctctcgcagatcagtgacaacgagaagtccgggttcatcagcctcgtcgcccgctacctcagtggcgaggaggagcatgtggaatgggcaaagatccacacgccgacggacgaggtggtggtgccgtacgacaccctggcggcgccgccggaggacttggaggagaccaagaagctgctcaacaagctcgccgtgctcaagctcaacggcggcctcggcaccaccatgggatgcaccggaccaaaatcggtcatcgaagtgcgcaacggattcacattcctcgacttgattgtgatccaaatcgagttcctcacaagaagtatggcagcaatgtcccactgcttttgatgaacttattcaacacccat

SEQ ID NO: 23955 - DNA, 488 bp, Oryza sativa
  Clone ID: uC-osflM202118e04b1
ttctgcggaaatcagagatcctcgcaaaggtgtccgcgtctggcttggcaccttcaactctcctgaggaagctgccagagcttatgatgctgaagcacgaaggattcgaggcaagaaggccaaggtcaatttcccagatggggctccagtggcttctcagaggagtcatgctgagccctcctccatgaacatgcctgctttcagcatcgaagagaagccggccgtcatgtcagcaggcaacaaaaccatgtacaacacaaatgcttatgcctaccctgctgttgagtacaccttacaggagccatttgtgcagattcagaatgtctcatttgttcctgcaatgaacgcgattgaggatactttcgtgaaccctgtctttgatcaagggagcaactcctttggttgctcggactttagccaggagaatgatatcaagaacccctgacattactctcatgcttgcaccgaccatgacaggtgttgatgac

SEQ ID NO: 23956 - DNA, 359 bp, Oryza sativa
  unsure (1)..(359): unsure at all n locations
  Clone ID: uC-osflM202118e05b1
ttcttcttcctggcttcctgctcagtcgacttggtgggaattccattcccctgcagttgcaatgcttgggtgaatccagctccgtcgtcgccatccccacccccacccgcaccggagaatgagcagctcatccaatgcacttgtgcagcactactactcttgcaagcccccaccgccccccagattagtactagtaccattcttcttctccggctccggctccggcaccaacaacaccgnctcctcccctgctgctgcatcctncacgcacactcacactcacacttgagatgccaacgcccagctggacgcacacctnctttccctccttcgtgacggccacaccgacngccgctacc

SEQ ID NO: 23957 - DNA, 99 bp, Oryza sativa
  Clone ID: uC-osflM202118e06b1
gtgccacccgcgcctgctccgcatggcgggcctcggcgcgcgacccgctcgtgtggcgccgcgttgacctccgcgactgggccgtcctgacctcggccc

SEQ ID NO: 23958 - DNA, 132 bp, Oryza sativa
  Clone ID: uC-osflM202118e08b1
gatgcactctttggcggcctcggcaaaggattcgccaaggaggttgtgaagaagaacaacaccctgcttgctgctgcgcctgcggcctctcgcagatcagtgacaacgagaagtccgggttcattagcctcg

SEQ ID NO: 23959 - DNA, 397 bp, Oryza sativa
  Clone ID: uC-osflM202118e12b1
tcggtggccaccatggcgctctcctccccggtgatggcccgcgcggcgccgtcgacctcctccgcgctcttcggcgaggcgcggatcaccatgcgcaagacctgcgcgaagcccaagccggcggcgtcgtcggggagcccgtggtacggtgccgaccgcgttctctacctcggcccgctctccggcgagccgccgagctacctcaccggcgagttcccgggcgactacgggtgggacaccgcggggctcttcgccgacccggagacgttcgccaagaaccgggagctggaggtgatccactcccggtgggcgatgctgggcgcgctcggctgcgtcttcccggagcttctcgcccggaacggcgtcaagttcggcgaggccgtgtggttcaaggcgg

SEQ ID NO: 23960 - DNA, 294 bp, Oryza sativa
  Clone ID: uC-osflM202118f02b1
tctagtttgagtgagagagcagcagaagggagtagtgcaagatgccgatccgcaacatcgccgtggggagccaccaggaggtgtaccacccgggtgcactcaaggcggcgttggtcgagttcatctccaccctcatcttcgtcttcgccggccagggctccggcatggccttcagcaagctgaccggcggcggagcgacgacccccgccgggctgatcgcggcggcggtggcccacgccttcgccctgtttgtggagggtgtccgtcggtgccaacatctccggcggtcacgtg

SEQ ID NO: 23961 - DNA, 85 bp, Oryza sativa
  Clone ID: uC-osflM202118f04b1
atgataatggaagctctcgctatcggatccgcacctccccgtccgccgggcctcgcacttccacccctcacccgttaccaccacc

SEQ ID NO: 23962 - DNA, 78 bp, Oryza sativa
  Clone ID: uC-osflM202118f08b1
tttttgtgaccaagaccagctccacggaaaccctggggcggatgtcgcggcccaaggacgagggaacccaaaccagcg

SEQ ID NO: 23963 - DNA, 310 bp, Oryza sativa
  Clone ID: uC-osflM202118f11b1
tttcggaaggatggggttcaactaacagctacattgtacctgcccccaggctatgatccttcacaggatggacctttgccatgtttagattggtcctaccctggtgagtttaaaagcaaggatgctgctggacaagtgcgtggctcacctaatgagtttccagggattggtgctacatccccactgctttggttggctagagggcttgctattttatcaggttcaaccatcccgattattggagaaggcgatgaagaggccaatgacaggttcgtggagcacttagttaccagtgctgtggctgcatttg

SEQ ID NO: 23964 - DNA, 217 bp, Oryza sativa
  Clone ID: uC-osflM202118f12b1
tttgtcgagcctgatccacacgcagagcatgctcggcatctggacgggccaggggggcattattgactgtacacacaggggcgccgtgcttagaacttgtatttttaattgcaatgtttatggacggttaattttcgaggttaactgcagattttttttaatttaatcgttgtttagctttttacattaatatttctgcttttatttttttaaatta

SEQ ID NO: 23965 - DNA, 94 bp, Oryza sativa
  Clone ID: uC-osflM202118g02b1
gcggtcaccatggcgctctcctccccggtgatggcccgcgcggcgccgaagacctcctccgcgctcttcggcgaggcgcggatcaccatgcgct

SEQ ID NO: 23966 - DNA, 59 bp, Oryza sativa
  Clone ID: uC-osflM202118g03b1
gtcctgagccgtgggcgcaggaggccgacgtgtgcgcgctcggcggctgctcgcgatcg

SEQ ID NO: 23967 - DNA, 79 bp, Oryza sativa
  Clone ID: uC-osflM202118g04b1
atgctatgttcctccgatcccgaccacttgctcttctcatggcgtactaccacatcattctttcgccggacgacgacaa

SEQ ID NO: 23968 - DNA, 83 bp, Oryza sativa
  Clone ID: uC-osflM202118g05b1
tctgtcgcgtgggcgccacgctacatcccgagctctcaccgagagacccaaaaccctttccaccgatggccaccgccgtagcc

SEQ ID NO: 23969 - DNA, 241 bp, Oryza sativa
  Clone ID: uC-osflM202118h02b1
ctctctcactcagtctgtactacctgtacgtacgtggccgccgctagctaagctaggaattgaaatggggatggagaggccgcaagagaaggtggccaccaccaccaccgtcgccttcaacctcgccgagtccggctacgccgaccgccccgacctcgacgacgacggccgcgagaagcgcacagggacgctggtgacggcgagcgcgcacataataacggcggtgatcggctcccgcgtg

SEQ ID NO: 23970 - DNA, 266 bp, Oryza sativa
  Clone ID: uC-osflM202118h03b1
attgtttatcagtagtttagtacttgcatatgttaaacacattaaatttatggccaattctgcttatatcagttatacattatataactattagttagaactatatgaaattatagatatcaattgtgaggcttagtgatgaattcagtcttacctctttctatttcgaatacccaaccttaaaatcctaggcccgctatcgtctattgggcgtggcacggatttggggatccattgggcacgaattttgggacccaatgagtcct

SEQ ID NO: 23971 - DNA, 275 bp, Oryza sativa
  Clone ID: uC-osflM202118h04b1
gtctctgtatggtttcgccatatgctgtccagcagcagcaacttgcttttatgaccccccagcagcttgcacttctgtctcagcagcaagctttactaatggctgctcttaaagctggaaatgcaccccaaatgattccagggaacgccagtctgctaaatggaaatggttctaatcctgccaatggaggcttgccttcacaaagctggacaaatcttgcttatcagaattctgggttggcttcagtagcagcacagaatggtgccaccaaggtt

SEQ ID NO: 23972 - DNA, 298 bp, Oryza sativa
  Clone ID: uC-osflM202118h05b1
catcgtccgaagcggaagcagcagcagcagcagcggcgacgaagccgtccatagattcttcttcctccccgtcactcctcaccaacaaccatcccccaccctccaagatggacgccgccgtcgaccgcctcaaggatgggttcgccaagttcaagaccgagttctatgacaagaagccggagctcttcgagccgctcaaggccggccaggcacccaagtacatggtgttctcgtgcgccgactctcgcgtgtgccccgtcggtgaccctgggcctggagcccggcgaggcccttcacc

SEQ ID NO: 23973 - DNA, 129 bp, Oryza sativa
  Clone ID: uC-osflM202118h08b1
ttataccgcctcgtaggcatgaagtcccgtggtgtatactagtcccccggtgggaccatcatggcagctgatgtccgtgagctcgagtccttgacttatggacagggagacaatgcagaggaaggacat

SEQ ID NO: 23974 - DNA, 387 bp, Oryza sativa
  Clone ID: uC-osflM202118h09b1
gttaaacacaatccgagaacagctttgcctgcgaggtttcagcatcgaagaagtgtagagaacccacatgtttctggtagaatcttctccctgctgaaccttccccttccatggcctcgctgctgccgcctactcatctcctcactcctcccccgctctgctgctgctcgtacgctctacttctcccgagagccaggagggcgcctccaagattctcgaatggggccttctccgcggcggaatcgctggtccggggtgagttcttggggaaagtcgggaccttggctcggagaatggggtgaaggcggcgccttgccgtggctagtgccgggagaggcccactttttggcggcggcggcggcggtggcgggcagcggtgctccggcc

SEQ ID NO: 23975 - DNA, 90 bp, Oryza sativa
  Clone ID: uC-osflM202118h11b1
tttctatctactctccctctccgcccatttctgctctccacctgcgatccatccgagcccgcgaggaggagggagccggaagcaacaacg

SEQ ID NO: 23976 - DNA, 358 bp, Oryza sativa
  Clone ID: uC-osflM202119a01b1
gtgtgacgcgcctcggttttatccgcgtccctagcttagagagagagagagagagaaagagagagagaagggcgtttgacctgtgaccccggcggcggcggcggcgacgacgagcgcgccatggcaggttcaccaccaaagccgtgggaacgtgctggggctgagggaacttctggcccagcaccttttaagcccccatctggtggcaccactagcgatgtagttgaagcttctggtacagctaaacccggagaaaccgtcaccgcgacagagaggaacctctctgccaatgtaaataaccctgtctcgaggcctatgccacaacgtccgtggcagcagacatctggctatggaaata

SEQ ID NO: 23977 - DNA, 380 bp, Oryza sativa
  Clone ID: uC-osflM202119a02b1
gtctgtggatgctaatttggagcagcagcaccggcggaggctactggcgtctctggggcagtcaaggaggcgctactccagctacctgagctccaaggtcacaacggaaggcggcttcgagggcatcatgaacaccgtcatcagggataagctccggatcatacccaaaaacgtcacctggagcgagcagtcagaccatgtgttcgaagctcttgcaggagacttcatgaaacccagaatccttgaggtcgacgagcttctcaaccttggcctcaacgtcacaatctatagcggacagcttgatctgagctgtgcgacccagggaacattggattggattcagaaactcaagtgggatggtctggagaacttcacaaact

SEQ ID NO: 23978 - DNA, 453 bp, Oryza sativa
  unsure (1)..(453): unsure at all n locations
  Clone ID: uC-osflM202119a03b1
ctccgtgggggtgctgtgtccaccttcggccgccgccatggacaggaatggtgttagccactaaaaaaaactaaataaataaaagggcctccgctgggaacacacaaaggccaaggcggaggtggggaggtgcctgtagagcgattggattcgtatataaagaaaaggtactcgtatatactatatatgttgagtcgattttgacgagaagggagccccttcccgagagattaggtctggtctgaggagaaaatacgctccgctccgatccgatatactgtcagcgaagtagttgtcgatggctgcgcttcgctatgcggcgcgcaagatctgcggccgcgcactacagcgaccgcggngtgtatatccggcggtcacatcgncggctttggaggcggagcggaagctgttgcccatgcttatacgtggcgagatgcctcacatctcatatac

SEQ ID NO: 23979 - DNA, 386 bp, Oryza sativa
  Clone ID: uC-osflM202119a07b1
tttactctctctctctctctctctcctcccctttgttccgccgcttcccctctctctctacctctcgcggcgaattcgccgagagggcgcagggaattttattaggagaaatcccctttttgtatccgtttctccggatccgcacacctcctgttaatccgccgattcttctttgatttgttcatattcgttttttttatttttttccctttgtttgcctttttattcgttcgattgtgggggaggagaagaggtttggtcgaccggatttcttggtggtttgcctggatctggcgtcctagaggccctcgtgcccgaatcccgattcgattcgcctcggcgcggcgccactcgcctcgacgggtttggatctcggagtggcatta

SEQ ID NO: 23980 - DNA, 491 bp, Oryza sativa
  unsure (1)..(491): unsure at all n locations
  Clone ID: uC-osflM202119a08b1
tctttccattcggtgcctctgcccggagccgaactccgacgccttatcgactcactcaccaagtgctcgacgcaattccccaccggggagcccgcccgccatgccggagagcaacggcgccgcgtgcggcgcggcggagaaggtgaagccggcggccagccccgcgtcggaggagccggccgccatcgccggtaacatctccttccacgcgcagtacagcccccacttctcgccgctcgcgttcggccccgagcaggccttctactccaccgccgagagcgtccgcgaccacctcgtccagagatggaacgagacgtacttgcatttccacaagacggatccgaagcagacgtactacctctgcatggagtacctgcagggccgtgcgctaccacgccgnnnnngcacctcggcatcaccggcgcctacgcggaggccgtgaaagagttcgggtacgagctcgaggccctcgtcgggcaggaaaaagatgc

SEQ ID NO: 23981 - DNA, 467 bp, Oryza sativa
  Clone ID: uC-osflM202119a09b1
cttctgtatttctttctgcccagaccaaaaccaaaccgaagcttccccatctcgcgtgaacttcggagcaaggacgaacaaggcgccgcgccggatttagccccgcccccctctccggggtatcccccctcctctcctctgggtttgattggagtgaggtgaatcggtgaggttgtggctcggttggcgtccggatcggagggggttcgggcccttcctgattaatccctcttctgattccgtgtgggggattcaatcactggtgggcaaaggcgagatatttcgtcacttctccccctcatctaaccatgtctggtttgatgtgcctggagatcaagatgggattgtaaccacgctggttatctcgcgatcgcagagggtttcctccatcctctaaagaaggaaaggaacccttgccctttcttctccatggctcctaattcgtagtgtgaaggatctgattttta

SEQ ID NO: 23982 - DNA, 392 bp, Oryza sativa
  Clone ID: uC-osflM202119a10b1
ggtgtggtctgcacgcgactcctcccccctccgccgccgccgccgccgcagcgagaccccggcgaatggcgtcccgcatcgcctctcgcctcctccgccgctccaacgcgactctaggcctcatcaggagttattcacatgccaggaactacagcagtcaactttcagctcttattccaattggttcccagagctcaaagcttacaagaagacgctattacttgccaaatgcctctccgtaccaactctggagtaggtcatttgcatctgacaatggagaccaggttgaagctgttgtccctttcatgggtgaatctgtaactgatggaactcttgctaacttcttgaagaaacctggtgacagagttgaggctgatgagcccatagcacag

SEQ ID NO: 23983 - DNA, 424 bp, Oryza sativa
  Clone ID: uC-osflM202119a11b1
tgcttatcgcgtgggtctccggcgatctcccggccatggcgactcgccgggccctgtgctccctcgtccgcgccgcctccaggctccgtggggcctcgcccgccccgcgcccgcgcgggccgctccaccgaccgtcgccatcggggtacctcttcaaccgcgccgtcgcgtacgccacggccgccgcggcgaaagaggcggcgcctcccgcgcccgcgacggggaaggccacgggtggaggtaagatcaccgacgagttcaccggcgccggcgccgtcgggcaggtgtgccaggctatcggcgccgtcgtcgacgagcgggttgacgaggggctgcctgccatcctcacggcgctcgaggtgctcgacacaacattcgtcttgtgctcgaggaggcgcagcaccttggcgagaacatggtgcgc

SEQ ID NO: 23984 - DNA, 461 bp, Oryza sativa
  Clone ID: uC-osflM202119a12b1
tcggtttaaccccccttctcccttgcgcctccgcttggcgagcctcatctcctcgatctctttcgattcagtggaaaacctaggagaccggcgcggcatggcggagtcgggctcgtcgggcctggaggagaagctggcgggtctctccgcgggctgcggcgaggagccgcagcagctctcgaagaatgccaagaagagggaggagaaaaggaagaagcacgaggaggagcgccggttgaaggaggaagagaagaagaagaaggccgctgcaacagcagctgctagtggagagcccccgaaggaatctgccgccgacgatgaggaaatggatcccactcaatattatgagaatcgcctcaaggcacttgaatcactccaggccacgggtgtaaacccctatccccataagttcctggctaatattaccgtagccgattatattgagaaatacacgagcatga

SEQ ID NO: 23985 - DNA, 522 bp, Oryza sativa
  Clone ID: uC-osflM202119b03b1
cttatctgctcaatctaagcaaattacttcaactggtcacagagaggtatcttcatcagatcgatctgcatctcttacacatgtgattgtgaaccaagcagtggccatggttccgtcgcaggaattgcaaccaaaggttgatggcttaaccgatacctcttccctgggcaatggcaatgcgatattgtctgagcgaaataaacaaacatcccagcatcaaaatccattttctatgccagcttcccatggaaaggacacaggggcagggcttgctgcacaaactttcccaactaaggatgctattgtttaaatggtgttgtacctagtagcagggatccaatttccagtgagaaggtgtgtggcttgcaaaaatccatcaagcaagatgacaaaacggtgaaagaaccttctataagtgagaacactatagtatcaggacttgaacgagtcaacgccagaaaacagactagctctgaagtttccatgaaggtagctgcagctgattcgtgcaatagcaacaca

SEQ ID NO: 23986 - DNA, 425 bp, Oryza sativa
  Clone ID: uC-osflM202119b04b1
attgcgtggacgagacggtcgcatacgttgcctcccggatgccagccatctacgccgcgtgccaccgtgtgctccgtgaggtccgtcggaggttaccagactttgcacctgccaaagtgttggattttggagcagggccgagttcagcactttgggcaatgagggcagtgtggccaaagtcgatagagaaggctaatttggttgagccatccaaagagatgcaaagagcagggaagaaccttctcgataatttgaaggggttaccacttattcatagctatgatagcatccaagagttgaaccgcaacattgaaaaacatgagcggcggcacgatctcgtaatttcatcttatgcactcggggagattccttctttgaatgaccgaataacaatagtgaggcagctctgggacctaacaggagat

SEQ ID NO: 23987 - DNA, 492 bp, Oryza sativa
  Clone ID: uC-osflM202119b05b1
gttgttgttgctgctgctgctactcttcttcccccttcctcgtgttcctcctcttcgcctcgtctctctgccctgcctcgtgcgcgtccagatccgggagggatgggggcgggggcgctgggggtggtggcgatggtggcggcggcggtggtggtggcgatggcgggggcgaactccgagggcgacgcgctgtcggcgctgcggcggagcctcagggaccccggcggggtgctgcagagctgggaccccacgctcgtcaacccctgcacctggttccacgtcacctgcgaccgcgacaaccgcgtcacgcgcctggatcttgggaatttgaacttatctggtcatctggtgcctgagcttggaaagttggatcatctgcaatatctggagctatacaagaataatattcaaggaacgatcccatcggaacttggtaatttgaagaatcttataagcttggacctgtacaagaacaacatttctgggactata

SEQ ID NO: 23988 - DNA, 435 bp, Oryza sativa
  Clone ID: uC-osflM202119b06b1
cttacaaccagtcagtatgcttaaatggaaatgaagtttcatttagcacttcagaaccatcacccagtcctaaaggggtgtgtattgagagaattggaaacgggacatacttgaacatggctcctcatccggatggatccaacagagttttcttgtctagccaagcaggtaaaatatggttggcaactgtcccagaacaaggctctggaggcattctgcaatttgatgaagccagcccatttattgatctaactgatgaagtccactttgattctgagtttggactcatgggtatagcatttcacccaaagtttgctaccaatgggcgcttctttgtttcttataattgtgacagaactcagtcatctaactgtgctggtaggtgttcatgtaattctgatgtaactgtgatccttaaagcttggatctgtaatg

SEQ ID NO: 23989 - DNA, 466 bp, Oryza sativa
  unsure (1)..(466): unsure at all n locations
  Clone ID: uC-osflM202119b08b1
ctcaaatcttctccaagtccaatcgacctcatttcattcgattcatcgatcgctcggcgcggcttagggtttttggcggcagcgatggcgtcggagaagcacttcaagtacgtcatcctcggcggcggcgtcgcagcgggatatgcggcacgggagttcgccaagcagggtgttaagccaggggagctcgccatcatctccaaggaggccgtggctccttatgagcgccctgctctcagcaagggatacctctttcctcagaatgctgcaagactaccaggatttcatgntgtgtgtcggcagtggaggagagaggcttttgcccgaatggtactcagagaaaggcagttgagttgatcctgagcactgaaattgtcaagctgatcttgcctcaagactttgactagtgcagttggagcaacctttacatatgagattttgatcattgcaactggctcctcagtca

SEQ ID NO: 23990 - DNA, 481 bp, Oryza sativa
  Clone ID: uC-osflM202119b09b1
gtgttatggtgggacagcagcgctgttgaattgtgtgaactgggttgagagtaactcctgggatggacgctatggccttgttgtttgcacggacagcgcggtttatgcggaaggcccagctcgtccgacaggtggtgctgctgctattgcaatgctcattggtcctaatgctcctattgcattcgagagcaaatacaaagcttctcacatggctcacgtctatgatttctataagcctgatcttgcaagtgaatatccggtcgttgatggaaaactatcccaaacatgctacttgatggcgctagactcatgctacagacagttttgtaagaagtatgaaaagctggcggggaaacaattctcaatttctgatgcagattactttgttttccattctccatacaacaagcttgtgcagaagagttttgctcggctttactataatgatttcacgcgcgactgcagcttttgtgacaatgat

SEQ ID NO: 23991 - DNA, 507 bp, Oryza sativa
  Clone ID: uC-osflM202119b10b1
tcgctcgaaccttgcgcaatctttttaaatcctcccgaccatttcctccgggtttgattctgggcagagattgcgaggggaaagatacgagcttttcttggcttctttcccctgcattgggaaagatacgagctgttgctgttcttgggaagaacagcttgggacattcttgggttggggtttgattcccaggggaagaaagcatgaggctatggtttctcatacctcttcttctctgtttccctacattgattcgatccgaggattactcggatgtgaccatcgtcgttcggggtgctgagacgatcgcttcgaccagcaacgagttcatttgcgccaccattgattggtggcctccagagaagtgcaattatgaccagtgtccatgggggcaagcttctatcttaaatttggacttgactaatcctttgctagctaaagctatccaagcctttagccctctacgtatcagacttggaggttccttacaagatcaggtggtgtatg

SEQ ID NO: 23992 - DNA, 429 bp, Oryza sativa
  unsure (1)..(429): unsure at all n locations
  Clone ID: uC-osflM202119b12b1
tcgattgaaaaggcctgtgtcaaggagagggtagtagcaccttgctctcctttgccttcagagaaaccggaagcaatggcgtctgctactctcctcaagtcatctttccttcccaagaagtctgaatggggtgccacccgccaggctgccgcccccaagccggtgactgtctccatggttgtccgcgctggtgcctacgacgatgagcttgtcaagaccgcgaaaaccattgcatcaccaggaaggggtatccttgccatggatgagtcgaacgcgacctgcggtaagaggcttgcgtcaattggccttgagaacaccgaggccaaccgccaggcttaccggacccttcttgtcaccgcaccgggcttgggacagtacatctncggtgctatcctcttcgaggagactctgtaccagtcaactgtagat

SEQ ID NO: 23993 - DNA, 469 bp, Oryza sativa
  Clone ID: uC-osflM202119c01b1
gtttttatcagtactgtatgatgttgatgaagtaactgttcgcagtcttaatgggtgcagagtagctgaccagattcttaggcttgttccaaatgttgagaactttcgaacaacgctaaggtgtttgaagtattgggcgaaaaaaagaggagtttactctaatgttactggttttcttggcggtgtcaattgggctttacttgttgcacgtgtctgccagctctaccctaatgctgtgccaagtatgcttgtcttaagattctttagagtttttactcaatggcaatggccaaatcccgtgatgctttgtgctattgaggaggatgaacttggttttcctgtgtgggatccacgcaaatatcaccgtgacagatctcattatatgcccattataacccctgcttacccgtgcatgaacttcagctataatggttcaacaagcacacttagggttatgatggagcaattc

SEQ ID NO: 23994 - DNA, 388 bp, Oryza sativa
  Clone ID: uC-osflM202119c03b1
ctcccaagaaaggatgtcaccaatccaacggggctcgattcattcattcattcaattcgccttgcttcatccatggcgtctgcggatgcggtctcgccggcgccggcgacgtccgccgcggcgcagcagcagctgcggaccgtggtgctgagggtgtccatccactgcctcggatgcaagaagaaggtcaggaaggtgctcaggagcatcgaaggcgtgaaggatgtgaaggtggacgccgcgatgcacaaggtgacggtgaccggcacggtggacggcgacacgctcgtcaagaggctgtacaagtccgggaagcaggccgtgccgtggcagcacccgcacgtggcgccggcgccggaggcggtcaaggcgatagaggccgcgccgc

SEQ ID NO: 23995 - DNA, 447 bp, Oryza sativa
  Clone ID: uC-osflM202119c05b1
gtggtggtggcggtgatggtggtggcgatggtggtggcggcgccgggagcgtcggcggcgatcacgtgcggtcaggtgggatcggcgatcgcgccgtgcatctcgtacgtgacggggaggagcgggctgactcagggatgctgcaacggcgtcaaggggctgaacaacgccgtccgcaccaccgtcgaccgccaggcggcctgccgctgccttaagagccttgccggcagcattaagtcgctcaacctcggcaccgtcgtcggcgttcccggcaaatgcggcgtcaacgttggctttcccatcagcctcttcaccgactgcaacaaggtcagttaaattaatcctgcttggatcgatcgatcgagcttaacatgcttgctcaatcggagttgatcagctagtaatttagcacgtacttgctccagcatttatgaacaaagtaattaa

SEQ ID NO: 23996 - DNA, 347 bp, Oryza sativa
  Clone ID: uC-osflM202119c06b1
atcgcttcctgagctagagctgtccctgccaaaggcaaataataccagatgaacacggcagcctctcgatctcgacaactcggggcggaataattctggtgttcttctcatcaccgatcgtttctgtacatgtaacaagttgaggatcgtggcgcctgcatgcatttggtggacgccacgtcaagaataaccgaggttacaggtgtctccccctgcatgcagcagggggcatctgcagcttgcggaactcggatggtttgagtttgaacgagttgcagcatgtcccccatggagtcccgtcctgatgatcttgttcctcccgcgatgcacaagccggcgatccaatg

SEQ ID NO: 23997 - DNA, 376 bp, Oryza sativa
  Clone ID: uC-osflM202119c07b1
ctgtgattctgtgtgcggtgtgatgttgctgaagccactgcatacacacttaatgggagcatagcaacggtcccctagcctcagaggatacatatatataggaaccctacaacacactgtaggctgtcaaagatttccaggaaggcattgaaacagagcatgcctgtgagcgcagagcctgtgccatcattgtcggaaacaataacgccacaatcaatggtggcgagcttcatccttaggggaactctcagcatggctcacaagaaggtcaccttgagctctggctgcattccgccgttcagcatacgagccgggctactcgggatgatgagattccgtgcgctgatccgcattcatgactactttgcagtggcac

SEQ ID NO: 23998 - DNA, 423 bp, Oryza sativa
  unsure (1)..(423): unsure at all n locations
  Clone ID: uC-osflM202119c08b1
aaaagggaaacggtacatttctatagattttccctgtacagaacaaaatgggtgaaaattgaaatcatgtttcataagcactggagaaagcccaaagaaaaacaatcagcatttctcaggagtctgaataatgacagcaggaaataaatggaagaaaaaaaagtagtgtattttgtcttctctctgcatgcttctatattattagctgtgaagcttatagtacctccatgactgttccctacagatacctccttgcgagagccctgaccttggtatcaaaatgagaagatgtgatgccgagatccaagcagatagaggggattgagggaatatcttgatataaaagctcatggacctcttgaaaaaagcttttaattccatcctcactacgngaatcatgaagcaacatgaatctagcatgac

SEQ ID NO: 23999 - DNA, 552 bp, Oryza sativa
  Clone ID: uC-osflM202119c09b1
gttggaaatgatcaggaaggcgacgacacagttgtggtttgccatgttccactaaacaatatgtttggatattcaacagctcttcggtcaatgacacaggggaaaggtgaattttcgatggagtatctggagcacaataccgtatcgcaggatgtacagatgcaactagtgaatacgtacaaggccagcaggggcacagagtaatacagaaaaaaaagaaacagtcacttagttaacgttgcattttgtggcccttaatgatgctaggacatcactagtagagtgattcttctagattacataaacaaattttggtttcactttgtatgttaacattgtattttacggccccccgttgtgatgagccatgacatcactaataggtttatacatgggtttctcgatacgacgatagaattgtgatacaataatctgcactccttatacgcaaacgtacgtgatgatcgaattagagcaagttctgtttggacaatgaaaatttcgtatttcttcaagaaaaaaaaaaaaaaaaaaagcggcgtcttttttttt

SEQ ID NO: 24000 - DNA, 447 bp, Oryza sativa
  unsure (1)..(447): unsure at all n locations
  Clone ID: uC-osflM202119c10b1
tcgtttccatagacgtacggacggccggctacaacacaacacagtaactgtaactgaagaagccggcgccaccattcccgccgccaatatgctcgccgccgccgcctccgtcaagctctccacggccgggaccgccacggcgcccaagatggcattattcaagcccctccacctccctcccctcttcgccgccgccgccgccgccgccgggccacgtcccctctccctctcggcgcgccccctgtaccggcagcaggacccgttattcctggcgtcgcgcgtcgggtcaccggcgccgccgtcgtcgttcgtcaccgncgacggcgcccggccggtggaggctgcaccggcgggcgcggcgcctgaggaagcggcgaggcgggccaagatcggggtctacttcgcgacgtggtgggcgctgaacgtgatcttaacatctacaacaag

SEQ ID NO: 24001 - DNA, 371 bp, Oryza sativa
  Clone ID: uC-osflM202119c12b1
tcgcttgcaccaccaccagcagctcaagcagcaacagctcaaacggaggaagatctcatcgccatgacgaccggcaatggcgacgcaccggtgatcaagaacgcccacagcgacatcgacagcaccaacaagacgctgctcaagagcgacgccctgtacaagtatgtcctggacacgacggtgctgccacgggagccggagtgcatgcgcgatctgcgcctcatcacggacaagcaccagtgggggttcatgcagtcgtcggcggatgaggcgcagctgctggggatgctgctgaagatggccggagcgaaaaggacaatcgaagtgggtgtcttcaccggctactcgctgctggcgacggcgctggcgct

SEQ ID NO: 24002 - DNA, 461 bp, Oryza sativa
  Clone ID: uC-osflM202119d01b1
acgccccattttaagctgaatctctcactgaagagggggcaaatatattctatatttcgattaaactttactgccccttggatcgagggagacaatgaaaggacctccagaactgtcatggttgagaactctaggactcccggggcacttatccatggtggggaccatactgaccatgggcccattacaattggacgagttactgctgggattgaatacagtcgaccattcagacctaaatggagtggcacacttggattaatatttcaacatgctggtgctcgcgatgacaaaggcaatcctatcatcagagatttctataacagccaattaactgccagcggaaatgcttatgatgatacactactagctaagcttgaaagtgtctacacagactctggagatcgtagctcaccatgttcgttttcaacattcgagcaggacttcctattcttctgagt

SEQ ID NO: 24003 - DNA, 334 bp, Oryza sativa
  Clone ID: uC-osflM202119d02b1
gagaatccataaaacacgttctgatgataagacttcgttttggtgggaacaattttcaaattgatggggtcaaaacaccagccctgccaggactttaagcaaaaggatctgtctattaactacccatgaataatgcgagtacaagctttgagcgttggagagaaatttttagaacttgacattttggtggggaacttatcacaagaaacacccgtttttgtcatcactgaagggggggggccccaattttttaccagggtttttacttgggactctgtaaaattaggcatgcttgggaacttattttaaaggggggtattttttgtgaagggtg

SEQ ID NO: 24004 - DNA, 441 bp, Oryza sativa
  unsure (1)..(441): unsure at all n locations
  Clone ID: uC-osflM202119d03b1
gtggtttgtgtgataaaaaattcggctactctggctggttcactgttcaccctgcattgttctcagattcatatcgacttacctacactgtctgatgaggacaaggaggttatcagaagatggggagctccaaacaagattgacttcctctctctgtcttatacaagacacgcggaagatgtgcgacaggcacgtgagttcctctcaaagttaggcgaccttagccaaactcagatttttgccaaaattgagaatgttgagggtttgaatcattttgatgaaatcctgcaagaggcggatggtatcattctgtcaagaggaaaccttggaattgatcttccacctgaaaaggtgtttttgtttcaaaagtctgctctgcacaagtgcaacatggctggaaagcctgctgnntgtactcgtgttgtggacagtatgactgac

SEQ ID NO: 24005 - DNA, 475 bp, Oryza sativa
  unsure (1)..(475): unsure at all n locations
  Clone ID: uC-osflM202119d05b1
tgcgattccagcagcagaagcagcagcagcagctcagccgccgccgatggcgtccacgatcatggccccaacctcccgcgtcctcgccgccaagacccccttcctcggccatccccgcccctccaatgcccccgtccgcgacgcgatgatgatgacgcgggcgtcgatgggggcgatggaaggcgcggcggtggacgaggtggtgcggcgcctcgtggagggcgggcgcggggggaggcaggtgcagctgtcggaggcggagatccggcagctctgcgtcgaggcgaagcgggtgctcctgtcgcagccgaacctcctgcgcatccacgcccccgtcaagatctgcggtgatatccatgggcaatttgttgatcttctgaggctgtttgatttgggcgggtatcctccaacttccacttatcttttccttggagattatgtggacagaggcanacanagcttggaaaccatatgc

SEQ ID NO: 24006 - DNA, 451 bp, Oryza sativa
  Clone ID: uC-osflM202119d07b1
gtacacgatccggagtcggaagagggttagacgggcttcggcaaatatcccaatcacccaaatccctgccatttccaaggaaatcaaggaagtgagggtggagcaagtcccaacaagcgattttgcagcacatgatggagtcctgatgacaatccaagacaagtctagtgagaaggagtcagacaaggtcatggtccatttgggtgtaagcaaatcgaagcgtggcgatgagagccactcaggatcattccgttacatggacaaggatttaggattccagtcagctgatgaaggaggctcaggaacatttcggcataattcagctcatgcaataactgctccttcacctttggttggcctgccagagttctcttacctaggctggggccattggtttactttgaggggattgggaagttgctacctagccgttttcaaaggataaacatct

SEQ ID NO: 24007 - DNA, 490 bp, Oryza sativa
  Clone ID: uC-osflM202119d08b1
gtgtcgccgtgccgctgcggctggaccgggagcgggacaacttcgtggaggcggcggagctggagcgtgcggtgagcaccctgctgggcggcggggacggcgaggcggggaggaaggcgagggagaaggccgtggccgtgaaggcggcgtgccggaaggccgtcgagaagggcgggtcgtctgacgccgcgttccagaggctcgccgaggaaatccggcgaggtgccgttaatgtcccgaagaagcgaaactgaaaggactgaaaatccgtcgactgacgactgtgcagtgcagagctggccaaaatcgaaacgcccatgcggctttgcgtgactgcgtctacacgtcgacatgtgtacgttttaaaatgcacgggttagagattctatctatcgactatacgtgtacgtctgtactggcgtttaatatgtgtgtatatgcatatctggtcattggtcaataataaaatctttcaaaacaagcagtttct

SEQ ID NO: 24008 - DNA, 111 bp, Oryza sativa
  Clone ID: uC-osflM202119d09b1
caacgtcgccctcgccgccgcggcggccggatccggcggatggcgaactcgaagcggctcccgtactccacggccggcggcggcgggggaggaggaggaggaggggggagg

SEQ ID NO: 24009 - DNA, 493 bp, Oryza sativa
  unsure (1)..(493): unsure at all n locations
  Clone ID: uC-osflM202119d11b1
gtggatatcaggaaggacttgtatggtaacattgttctcagtggtggatcaaccatgttccctggtattgctgaccgtatgagcaaggagatcactgccctcgcaccaagcagcatgaagatcaaggtggtggcaccgcctgagaggaaatacagtgtctggataggagggtccatccttgcctcccttagcaccttccaacagatgtggatctcaaagggagagtatgatgagtcgggtccagcaattgttcaccggaagtgcttctaagctctggctttttaatcgcttatctacaaggcagtttcttttcagttttcacaagcccttgtcatgtaagctactctgtttgggattggttggtgtcctatncagaatgttgttggatttgtttcatggctgaatattatgcaccttctgaactcttggtatgcatttgtccggtggctgctgtattatacatggcatgcatggtccaacttttgtcatgcta

SEQ ID NO: 24010 - DNA, 533 bp, Oryza sativa
  Clone ID: uC-osflM202119d12b1
tcggtcacgcgctccttcgattcctcttttctcctcctcctgaaatgaaagacaagaagagctggttgttttcgttttggctataaataaatctgttgcataagccctctccctgcttccgccttgttcaataatcaatatactcttctcctcgatctcttctcttgtccatctccaataattctccatgtacgccgccatgtacccggagaccttcggcttctctgcttacccccagcagcagcagccgccgcccgacgccgcctcctgcatctacaccaccgccttgccgctcatcgccgacccgcctgacatcctcggaaacatggcacaaccatcctttctatcagagtatgaccttggaggggaaggggacctgttcaaagctcctgaacccatcattgaagaaccagtgcttagccttgatccagttgcagcagccatttcgatgatgtctggcagtgagaaccgtatggatgaaactatagaggttgcagatatcagcgacattcagaatgactcttttttaagcg

SEQ ID NO: 24011 - DNA, 525 bp, Oryza sativa
  unsure (1)..(525): unsure at all n locations
  Clone ID: uC-osflM202119e02b1
attgtgggcctgaggcgatggcggcgctcgccccgtccaagatgctcggcacccggctcaacttcgccggctcctcccgctacgccaccgcggcaccgaccaccggagcgcagaagatcgtctccctcttcagcaagaagcccgccccgaagcccaagcccgccgccgacacctcctcgagccccgacatcggcgatgagctcgccaagtggtacggccctgacaggaggatcttcttgccggagggtctcctggaccgctcagaggtgccggactacctcaactgagaggagcccggagactacggctacgacccttttggcctcagcaagaaggcagaggacttctccaagtaccaggcctatgagctgatccatgccaggtgggcgatgctcggcgccgctgggttcatcatccccgaggcctgcaacaagtttggcgcanactgcggccccgaggccgtctggttcaagaccggcgccctcctcctggacggcaacaccctcaactacttncgcaacagca

SEQ ID NO: 24012 - DNA, 541 bp, Oryza sativa
  unsure (1)..(541): unsure at all n locations
  Clone ID: uC-osflM202119e03b1
cccctatctccccaatccgagagctccggaggagcagcgcggaggcggagatggcgctgcggcgagcgctgctcagatctgccgagatctcccccgatcgcaaggctgcacttgagtacctccattatctatcgagagcacagcctactcgttctctaacaggtgctggcctttattctgctggcaaatcattcagcactcaggctgctactacatcaagcacaccacaacctccaccaccacctccacctccggagaagactcactttggtgacctcaaagatgaggaccgcatttttaccaacctctatggtcagcatgacccttttctgaaaggtgcaatgaagaggggtgactggcatagaaccaaggatttggtgcttaaaggggcagactggatagtgaatgaaatgaaagaatcgggacttcgagggcgggaggtgcaggattcccttctgggcttaaatggtccttcatgccaaggtatctgatggacgcncttcttatcttggtgntaatgctgatgagagtgagccaggaa

SEQ ID NO: 24013 - DNA, 486 bp, Oryza sativa
  unsure (1)..(486): unsure at all n locations
  Clone ID: uC-osflM202119e06b1
gtcaggaatatctatactgttgtggcattttgtgctggtaacaaaataatggaactttacagactgcagcttgggaatattctttggaaaagcttggttcatggaatgggtattggttttgcctttggcttatctcagttccttcttttcgcctgcaatgcacttctgctgtggtatacagccgtagctgttaagaatgggcaccttagtctggtaacagcacttaaagagtacattgtcttctcttttgcgacttttgcactggtggagccatttggccttgcgccatatattctcaagcgtcgaaaatctctgacgtcggtatttgaaattattgatcgtgcacccaagattgatccagatgatgcaagtgggctaaaaccccccaatgtctatggtagcattgaattcaggaatgttgatttttgctatcctacacgccctgagacgatggntntgagtaatttcagccttagagtcaatgga

SEQ ID NO: 24014 - DNA, 176 bp, Oryza sativa
  Clone ID: uC-osflM202119e12b1
tcgcttgaaagttacatatgtatgtgctgatgtgcacatgagcaaactgtacgacaaggtcatattcatgattcatgccttgtggtagcaatatccataaatatatatcccttttgttcaacagaagaaatgtaattctgtctctttgcatgagatcgaagaaacaaagttgtttg

SEQ ID NO: 24015 - DNA, 387 bp, Oryza sativa
  Clone ID: uC-osflM202119f01b1
ggagggaagaaagtgatcacagaccttcatagaggggccatggaccactccaggcttacagagatgaagaggcaacgtggcggttacactggtggggaggctcgggatgagtataatcgtgatcctcaccgtgcctattaacagcctatgggcacaagccagaggatatggaaggaaacgttagggcccaagccgaggaaactgccgaactgggactaatgaaacccttgcccagaaatttggtgaggctgtcagcattgaagtgatctgttaccgccactggagaaaacgagcaagaatatgtgccacaatctgatgaagtcgagaaacacaacgagggtgaatgctatgaagaggaacataaggaaccttgaaacaagagatgac

SEQ ID NO: 24016 - DNA, 324 bp, Oryza sativa
  unsure (1)..(324): unsure at all n locations
  Clone ID: uC-osflM202119f02b1
gttgagagcatctagctagggagagaaaggaagagacgagaggagagagatggccactgcttatgctcccatggcgagccagctgatgaagagcagcttggtgtgctccaagccgagggggctgtctggtgcttcgctgacaaggaggccccgcttcacagtcaaggccatccagtctgagaagccaacgtaccaggtggtgcagcccatcaatggcgaccccttcatcggcagcctggagacgccggtgacctccagcccgctggtcgcctggtacctctccaacctcccggcgtaccgaaccgncgtcagcccgctgctccg

SEQ ID NO: 24017 - DNA, 432 bp, Oryza sativa
  Clone ID: uC-osflM202119f03b1
atcctagccgccgccgccgcagcctcctcctctcgccatctcccgtcctctccttcaagtcagctacctgcttaatcaaccatgggtaaggagaagacgcacatcaacattgtggtcattggccacgtcgactctggcaagtcgaccaccacgggccatctgatctacaagcttggaggtatcgacaagcgtgtgattgagaggttcgagaaggaagccgctgagatgaacaagaggtccttcaagtacgcgtgggtgctcgacaagctcaaggccgagcgtgagagaggtatcaccatcgatattgccctgtggaagttcgagaccaccaagtactactgcacggtcatcgatgcccctggtcaccgtgacttcatcaagaacatgatcacgggtaccttccaggctgactgtgccgtgctcatcattgac

SEQ ID NO: 24018 - DNA, 447 bp, Oryza sativa
  unsure (1)..(447): unsure at all n locations
  Clone ID: uC-osflM202119f04b1
gttatttacaccggcgtcaagagtatcaagcacggccatggcggcggcgaacggcgatgccagccatggcgccaacggcggcattcagattcagtccaaggagatgaagacggccatccacagcaacgatagccccaagaccctcctcaagagtgaatccctccacgagtacatgctgaacacgatggtgtacccgcgggagaacgagttcatgcgcgagctccgcctcatcaccagcgagcacacctatgggttcatgtcgtcgccgccggaggaagggcagctgctgtcgctgctgctgaacctgacaggcgccaagaacaccatcgaggtgggcgtgttcaccggctgctccgtgctcgccaccgcgctcgccatnccggacgacggcaaggtcgtcgccatcgacgtcagccgggagtacttcgacctcggcctccccgtcat

SEQ ID NO: 24019 - DNA, 429 bp, Oryza sativa
  unsure (1)..(429): unsure at all n locations
  Clone ID: uC-osflM202119f05b1
ctcttttgttctgtgccatttttgctctgcctgagctctgtgcttgttgcattggtcactccaagaaaaggattttgaaggctggttttattgttcttctgttcctgggatccgaattgcaggcgagctcgctgttcgtgtggaggtttctttctttcattcattcgcttgaagaattcggcaaagccatgcgagcaattcgggatgatttctcggggcctttggaacgcgtgatgattctttgacccaccattgcttcggttttttttttctgggagaattctgcaatttcgcgagtttggtcgttgagctcgagcccgtggtggtgttcttgatccggtccatgggtctttgtcatggcaagccgagccaaatcccggagcccgaggcggangaagcggcggcggcggccggtgtagccgtcccgcg

SEQ ID NO: 24020 - DNA, 322 bp, Oryza sativa
  unsure (1)..(322): unsure at all n locations
  Clone ID: uC-osflM202119f08b1
agctaatagtagccatctcgcactaaaatggcgatcccgaccctcgtgctgctgccaacctggggcaccggccacctcatgtccctgctcgacgccggcaagcggctgctcggctgccgcggcggcggaggcctctcgctcacggtgctcgtcatgcagccgccgaggaaggagtatgcgtccgccgtcgccgccaccgtgcgcgggaggaggcatcgggcctcgacatccgcttccgccacctccccgccgtcgagcccccgaccggctgcgcgngcgttcgaggaagttcgtctcccgcttcgtgcagctcaacgcggcc

SEQ ID NO: 24021 - DNA, 394 bp, Oryza sativa
  Clone ID: uC-osflM202119g01b1
atcaatgcgagcggcgccggctgcgcctcatcggggatgtcctgtgcgtacaacctctccagggaccgatctgcaagggtcagcgccatatagcatctgagaacctccagcgcgggtccgggcatcggatgccagctgttttccgccagggaggcccacaagcctgcacactggtctctcgacaagatcaggctctcctgcagggcgtgggcagcctgcagcatcatgtagcacgcctggatattgagcgctacagccatgaggctgctattgaggcgctgcaacgtgaagctgagcaacgccagggccgataggacctcacatgaacgacggacgtgtagaggcaagaggatcaaccaaccactggtacgactaaagcaacagacagcgagga

SEQ ID NO: 24022 - DNA, 475 bp, Oryza sativa
  Clone ID: uC-osflM202119g03b1
gataattcgtcgttcgttttgtgcatccatccagaattcgttccagatccagccagccagccatctcaagcttctctcttctcttgttattaagagcaagcaaacagtagtctagcgaagcgagactgcgagagcagagcattgttcttcttctctagctattagtggtggggaataatggctcccgccaccaccgcagcaatggccctcgcgccgcctccttcccatcaccatcaccatcaccatgtcaagcagctgcagctccctccgtctgtctccgtctccgtgcccctccgctccggtttccttggccgcgcactgcctgctgctgcccacccacagccgctgctcgccgccgagagccgccgcagcagcgccgtgtccgtgcggatgtcgtgggacgggcccctctcctaagtccgactcattatgcagggccgcaacgtcaagctgaatgagaaggtgaaggagcaca

SEQ ID NO: 24023 - DNA, 487 bp, Oryza sativa
  Clone ID: uC-osflM202119g05b1
cttattcgagcggctcccgctgcgcgtcatcgtgcaggtcctcttcttcgagcagctccagctacggagctccatcgccgagtgcctgatggtctctgagaacctcgaaggcggctcgaggcagctcatccccaccatctccggcgagcaataccgacccggctggcccctggcctcccgggagaaccaggccctccgggagggcatggacaacatgaagcagcgcgtcgccgacctggagaaggagtgctccaccatgagggatgagatcgagcggctgggccgcagccggagcaccggcaagggcagattctccctgaacatgaaaccacagatgtgcagcaccaaggagggtattccaacgacagcgacgaccacggcgacggctagcgaggagaagatggccgcggtgaagggtgacaccacgccacggctggagctcaacaggcacacagagaagctgtccatagaagcatgatgatgatga

SEQ ID NO: 24024 - DNA, 482 bp, Oryza sativa
  unsure (1)..(482): unsure at all n locations
  Clone ID: uC-osflM202119g06b1
ttcactcgtccgcccacgcgtccggcttcctcctcctcatcgtccgccatggcttctctcaccgatctcgtcaacctcaacctctccgacaccacggagaagatcatcgccgagtacatatggatcggtggatctggcatggatctcaggagcaaggctaggactctctccggccctgtgactgatcccagcaagctgcccaagtggaactacgatggctccagcaccggccaggcccccggcgaggacagtgaggtcatcctgtacccacaggctatcttcaaggacccattcaggaagggaaacaacatccttgtcatgtgcgattgctacacgccagccggagaaccgatccccaccaacaagaggcacaatgctgccaagatcttcagctcccctgaggttgcttctgaggagccctggtacggtattgagcaagagtacaccctcctncagaaggacatcaactggccccttggctg

SEQ ID NO: 24025 - DNA, 519 bp, Oryza sativa
  unsure (1)..(519): unsure at all n locations
  Clone ID: uC-osflM202119g08b1
gtgcttcccctctccgcttccacctcctctcgggttccctcccgtcgatgccaccgcgccattcctcttcttctcctcactcgccctgcggctgaagcaatggagctcccgtgcccgaggctgctgctgcttcttcgtcttcttgtgttcttggttgcggtttcttggccgctctgcggcgcagggactgaaggcctcggagttggagaggaggggttgagcagcattggtgcttcttctggttctaggaacgttagaagacttctgcagactggtggagtaaaccaaggtgcaccagctcctctaccacttgaacaatctccatcagcatcaggacccggtgtcttctccatcaccctcgccatgggtatccccaccgaaaggctcaccatcaccatcaccatcttcaaaaatcatagcacacagatctccacaccatccattcacaaccnctncacaattggttaggcctaagcctacaactcggcgagctgagcacgatcatttcagtgaaactac

SEQ ID NO: 24026 - DNA, 301 bp, Oryza sativa
  unsure (1)..(301): unsure at all n locations
  Clone ID: uC-osflM202119g09b1
ctctcctcctcagatctcccacctcgaaccctagccatggcgatcgcggcgcgcgccctgcgccgcatccccctccacctcgccccctccctctcgcgggccttctgcgcgctctcgccggccggccccgccccggccgctgcctccgccaaggtcgccgaccgcatcgtgcgccttctcgccatcgacccggacggcgcgcgccgcgaggtggtcggcctgtccggccagaccgtncttcgngcgctcgccaacgcgggcctcatcgagccggagtcccacccgcctcgggagatcgacg

SEQ ID NO: 24027 - DNA, 496 bp, Oryza sativa
  Clone ID: uC-osflM202119g10b1
tttaaaccctaacccctcctcgatccaagcagctcgacgggctcggcggcgcgcctctcgcccggcgggtctttgtccgaaaaaggcatgaccttggccttctaattggaaaggtgtgaagcaattaagtatggcttcaagggcggtcatcagaagaaggaagtatcttttggatcatgttaacgcacctaccctctcattgtcccccttctctaccttccaacatggaagatctggttctgaggatgaatcaagaatcggacagcgatttcttgagcaaagctctggggattccaaatgggagcaagggcagtatggtgtgaaattgataagggagatctactagcccttggtaatgggcttctgcggcgcccagcccatgggatttctctacctgcttatggaattggaaggaagggattttgggttgcctatgggtgctagacatttgctgcagtcagtccgcacagcctcaactgcaacagctgggcaacct

SEQ ID NO: 24028 - DNA, 511 bp, Oryza sativa
  Clone ID: uC-osflM202119g12b1
tcggtagctctctcttgctcgtagcgaggtcgcagatcctcaccgccggcgatcccccgcctccgtttcggtaccgccgccgccgccgccgcgagagaggggagcagaatgttgcagtgcgtcttcctcctctctgattccggggaggtgatggtggagaagcagatgacggcgcaccgcgtggaccgcggcatctgcggctggttctgggactacgtgctcgcccacgccgccggcgacgcttccaaggtcttgcaggtggtggtctcaccgacgcattacttgtttcaagtttatcgaaatggggtgacattcttggcatgcacccaagtggagatgccccccgtgttggctatcgagtttctctcacgggttgctgatgtcctaactgactatcttggagatttaaatgaagacataatcaaagacaactttgtacttgtgtatcagattttagatgagatgatggacaacggtttttcactcactactgagccaaacattttgaaag

SEQ ID NO: 24029 - DNA, 422 bp, Oryza sativa
  Clone ID: uC-osflM202119h01b1
gttagggcaattcgagctgcactgtccgagaacgttttaaggctgcagaacctttctatggtggcagtatgccctatgctcaacgaccatcaagttctggcaaccaacagtcagtatttgaattgaggatgctggaggaaagctggtacagaagtccagaagagatcagtcagttgaaaggcatacttccatcaaacatctacagccttggggttcttttgtttgagctcttttgctgctgtgaaacatgggaggtacattgtgctgcaatgtcagatctccgtcatcgcattttgcccccaaattttctttcagaaagtcctaaagaagctggtttctgtctttggttactccatccagatccctgttctcggcctaggcaagagatatttagggtgtgacttgataatgagggtcgagaa

SEQ ID NO: 24030 - DNA, 237 bp, Oryza sativa
  Clone ID: uC-osflM202119h02b1
gttgcttcaacaaatagccggtttacaattttttataacccaagagcaagcccttcagagtttgttatcccactttctaaatatgttaaggctgtatatcatacccgtatatctgtgggcatgcgtttcaggatgctttttgagacagaagagtcaagtgtacggagatacatgggcacgataacaggaattagtgatcttgatgctgctcggtggccaaactcacattggcgttct

SEQ ID NO: 24031 - DNA, 386 bp, Oryza sativa
  unsure (1)..(386): unsure at all n locations
  Clone ID: uC-osflM202119h03b1
gttgatttatggacagatatacattcctgaaataaattggatccttatggtgctctgtgtagctgtcacagttgcattccgtgatattacacttattggtaatgcctatggtgttgcgtgcatgactgttatgtttgtcactacattcttgatggcattgatcatgatcttcgtttggcaaaagaacataatatttgctctatctttctttttattattcggatccgttgaagttgtttatctctcctcatccctcatgaaggttactcagggaggatgggtgccgcttgtgcttgctttaatattcatgtctgncatgtatatttggcactatgggacaaggaagaaagtccagtatgatcttcagaataaggtatcaatgagat

SEQ ID NO: 24032 - DNA, 359 bp, Oryza sativa
  Clone ID: uC-osflM202119h05b1
gttgtctcctacccatttgaagaccaggacgaccgcaagaacattcggaaaaccatcaacagaataatgtcagtgcaatataagataccagattacgtgcacatatctgcagaatgcaaacagcttattgcccgcatttttggcaacaattcattgaggagactcacgatgacggaaataaagagacaccctcggttcttgaagaacctccccagggagctcacggagactgctcaagccatgtactacaggagggtcaactgcgggccctcattctaagaccacacctcatgagagatcatgaagatatgataagaagcatgaaccatgcctaaatcatagcacacaggctactggag

SEQ ID NO: 24033 - DNA, 510 bp, Oryza sativa
  Clone ID: uC-osflM202119h06b1
gttattatgaggtgtgcactgttcttgtacatgctggtaccaaggaggaactcacattgaaggatagcggtgggtttactcctgtggaacttgcaaacgacaaaggtcatcggcatctttcctatatcctttccaatgctacaaaagtaacatttgaagacaagtactgctcagggagatcgcggaagattggatatgcttctatcctgttttgctttcttattgtccttatcaccctttttctgaactcaattatttttgcaccgaatttttctagaataactgccgctgttggtatttggtcatggggtgctatttctcttgcctttgcttcattggtgatgttctacagagtaagcagaaaaaatccaggctacatccaagccaataccaagcgacttgatccaaaggaaccacttatggagattgaccttaattcttctgcttggacaggcaattggtctcagttatgccccacatgcaagataattcgcccaatgcgctccaaca

SEQ ID NO: 24034 - DNA, 353 bp, Oryza sativa
  unsure (1)..(353): unsure at all n locations
  Clone ID: uC-osflM202119h07b1
gttatggcgtcggcggcggagatgcagccgctggccccggcgggctaccgccgggcgccggagatgaaggagaaggtggacgcctccgcggtggacctggaggccggcaccggggagacgctgtacccggggatctcgcgcggggagagcgccctccggcgggggttcgtccgcacggtgtacggcatcctcgccgcgcagctgctcctcaccaccgccgtctccgcgctcaccgtcctccaccccacccttaacgccacgctcttctactncccgaccctcgccctcgtgctcgccgtcctccccttcgtcctgatggtcccattgcatcattatcagcacaaacacccaca

SEQ ID NO: 24035 - DNA, 411 bp, Oryza sativa
  unsure (1)..(411): unsure at all n locations
  Clone ID: uC-osflM202119h09b1
tctgttctctcttcttcctcccctcccacggcgactcgccgccgccgccgacgccgacgccgatccggtctccgctccaactccggcgagattggatttgggggcggagccgatccgatcggggtccatcgcacggaggaggaggaggagggggtgactcgccgtcgcgcggccagatctgcggcggctgcgcggggggaggcgccatggagggcaacaaggacgacgcggtcaagtgcctccgcatcgggaaggccgcggcggacgccggcgacagcgcccgcgccgtcaagtttctctacaagggcaagcgcctcgacccctccctacccatcgaccacctgctcgatcctctcctaaaccaggacgacccggccttgttcttcgncttgtcgtagtacccacaggccc

SEQ ID NO: 24036 - DNA, 383 bp, Oryza sativa
  Clone ID: uC-osflM202121a05b1
catgtctctgtctcgtcgtcctcgcatctccactcgccatgggcaagattaagatcggaatcaacggtttcggaaggatcgggaggctcgtggccagggtggccctccagagcgaggatgtcgagctcgtcgccgtcaacgaccccttcatcaccaccgactacatgacctacatgttcaagtacgataccgtgcacggccaatggaagcacagcgacatcaagatcaaggactccaagactctgctcttgggcgagaagccggtcaccgttttcggcatcaggaaccctgacgagattccgtgggctgaggctggtgctgagtatgtcgtggagtccaccggtgtcttcactgacaaggagaaggctgctgctcacttgagg

SEQ ID NO: 24037 - DNA, 323 bp, Oryza sativa
  Clone ID: uC-osflM202121a06b1
gctcatcctgttggacttcatgcagatggtttgtttagattctgtgatggccataagcaagccaattgcttggatcgatgatcatggtaaatgcttctctccggattcatgtgctggagtaataccatctgaacctctgcagcatggaaaaaatgagttcttgaaaagttttcatgatctaagcagtagttatgaagctcatgaacatgatgggatgtctgcagctgaaagctcaagttcagcgtcttttgatgcagagctttctgatgttcaggaggtcaataatgtagtggaggacaaacagaaggtactcaatgaaagtg

SEQ ID NO: 24038 - DNA, 305 bp, Oryza sativa
  Clone ID: uC-osflM202121a07b1
ctctgggggatacaaccctaccccgcccccaatccgcgcctccgtctctccgcctctcttcttcgataggcggatcatgacgcaggcggatcaggcggtgatcagcctgcgcccgggcggcggagcatttgcacctgcgcagcacggaaataaggactactggaaaggcttgcacgcactagccagcatctatgaaggtcctgaccatgatgctatgtctgcaccctaagaagctcgagtcaagcgcctttagacgcaccgccttaggatggtctggcggtcaatgatgtagtggcagacataca

SEQ ID NO: 24039 - DNA, 287 bp, Oryza sativa
  Clone ID: uC-osflM202121a08b1
tgaatgcacgaagtatgtgctgagccatgactttgattgacatttcttctctttatttgctgataaattagtgcggttcctaaaagatacttcattgcagtgctacaagcgttgatgttgaagagcatttgtacaagctagcaactagcatgggcatcactgtgattacttcctcgcaaaggccagctttgatccccttccattccttggagctgaaactcatcgacggagaaggaaactgggagctatgcgagatccaccaatgatttgtctgtccggttcgcatt

SEQ ID NO: 24040 - DNA, 71 bp, Oryza sativa
  Clone ID: uC-osflM202121a11b1
tctttgaacccggcagcggagccctccccaccggtctctctctatatctctctctaagcggcctggcggag

SEQ ID NO: 24041 - DNA, 115 bp, Oryza sativa
  Clone ID: uC-osflM202121b01b1
ttccctgatcgaccacgcgtccgctttctcgtggggtcgtcgagctgcttcctcacagagtctcaccatcaccacgccgccgccgccgcctcgagagatgctgcccgcggggtgg

SEQ ID NO: 24042 - DNA, 113 bp, Oryza sativa
  Clone ID: uC-osflM202121b02b1
attgcactacagtacaccagagctctctaacttgtctgccatggtccgctcctccaccgccttactagctcaattgcgcacaatgtctggggaggagtaagtctacacatcca

SEQ ID NO: 24043 - DNA, 508 bp, Oryza sativa
  Clone ID: uC-osflM202121b03b1
gctttcttgcataagaactcccccccctcctcgctccccgccgccgccgccgttttcttggagaggagaaatccgtaggctcagaggatttttggtagtcttgtttcgtgatattcgtgaagagggggggagctaaggggggattcgtaagatcagaattggatcacgcgggggcgcgctcgggatcgggggttccaaacacagcttcttcgttgaatttaagtggatgtactaatggagtcaaagggtggcaaaaagaagtctagcagtagtcgttccttgatgtatgaagctccccttggctacagcattgaggacgttcgacctgccggaggcgtgaagaagttccagtctgctgcttactccaactgcgcgaagaagccatcctgatagccctttcggcttctccatcctagtagtttaggatttcttgcaattccattttggcacttttcttctgacctatttctctggctgctgcttcctgataatcgaccagttctctagt

SEQ ID NO: 24044 - DNA, 124 bp, Oryza sativa
  Clone ID: uC-osflM202121b04b1
gtcctgcggagctctcgaggctatagccgcgattcggagggaaaccctagctagctcccgctctcgatcccgcgcccgccaccgcactcggcaagatgttcctcacgaggactgagtacgaccg

SEQ ID NO: 24045 - DNA, 415 bp, Oryza sativa
  Clone ID: uC-osflM202121b05b1
ccctgagcaagaagctcagctcctcctcctctcgcatggcagccatggccaccaccgcgtccagcctcctcaagacctccttcgccggcgtgcgcctccccgccgccgcccgcaaccccaccgtctccgtcgcgccgcgcaccggcggcgccatctgcaactccatctcgtcgtcgtcgtccactcccccctacgacctcaacgccatcaggttcagccccatcaaggagtccatcgtgtcccgcgagatgacccggcggtacatgaccgacatgatcacctacgccgacaccgacgtcgtcgtcgtcggcgccggctcccgggggctcttctgcgcgtacgagctttccaaggaccccttcgtcagcgtcgtcgtcatcgagcagtcggtgtcccccggcggcggcgcgtggct

SEQ ID NO: 24046 - DNA, 192 bp, Oryza sativa
  Clone ID: uC-osflM202121b06b1
gtgggatcgcacacaaacgtgcccggggggtcttctttactaccttcgctggcccccccgtcgtcaccgtcaccgtgaccgtgacccgcatgtgacctccgcccctggacgaggctcgccggcccgggcgccgccaggctgccttcgatgcgtggaagtctggtcggctttgcgcggatactcccttgccct

SEQ ID NO: 24047 - DNA, 331 bp, Oryza sativa
  Clone ID: uC-osflM202121b08b1
ctcgacgggatggcgcagaaggaggccaatggcagcagcaacggggagcacaccacccgcccgccgccgacgccctcgccgctccggttctccaagttcttccaggcgaacctgaggatcctcgtcaccggcggagctggcttcatcggctcgcacctcgtcgacaagctcatggagaacgagaagcacgaggtcattgtcgcagacaactttttcactggttcaaaagacaacctgaagaagtggatcggacacccaagatttgagctaatccgtcatgaagtcacccagcccctgcttgtggaggttgaccaaatctattaccttgttt

SEQ ID NO: 24048 - DNA, 453 bp, Oryza sativa
  Clone ID: uC-osflM202121b10b1
gcggaggagaggagaggagatcagggggaggaagggtggccggcgcagcagatcggggcgggcggatttaggggaggagcgcgctagccgggagcggcggcgatggatgaggagtacgacgtgatcgtgctggggacggggctcaaggagtgcatcatcagcggcctcctctccgtcgatggcctcaaggtccttcacatggacaggaacgattactatggaggagaatctacatcccttaatctcactaagctctggaagagattcaaaggcaacgagaccgctcctgaacatctgggtgtcagcaaggagtacaatgttgacatggttcccaagttcatgatggccaacggtgcactggtccgtgtactcatccacacgagtgtgacaaagtatctgaatttcaaggctgtcgacggcagcttcgtgtacaacaatggcaagatccacaaa

SEQ ID NO: 24049 - DNA, 435 bp, Oryza sativa
  Clone ID: uC-osflM202121b11b1
cgaaaaaagattgcgtgagaactcagaatctatgaaggctgtagaggagaactcacggaagctattaatggagatgtctattctaaagaatgaaaaagagatcttagcaaagtcagagaaaaaagctttggaggaagttcatgatttgaccacgagggtgcatcgcctgcaggcgaccattgacacaatacatgccaccgaggaggttcaagagaatgcaaggtctattgaaaggagaaatcaagaggagtacatcaagagactagaaagggactgggctgaagtgaaaaaagagcttcaagagcaaagggatcatgtccgcgtcctgacgcttgataagaaaaatgcctttgatggatgtctgaagcaggtagaggatatgagaaaagaagttacaaattcatggaaagctgctactgatgcttgatctagggc

SEQ ID NO: 24050 - DNA, 372 bp, Oryza sativa
  Clone ID: uC-osflM202121b12b1
cctctttttaaaatccaaaaaagaaattcattttttttcttctttactactttctctgttcccctcgccgtcgccgccaccgccaccgtgaccggcaagtgacctccgcccctcgccgcggctcgccgcccggccgccgccaggctgcctcggatgcgtggaggtctggtcgcctctgcgcggctactccctcgccctctcgtccggtggtttctccagcgacgagctcagcaggatattaatgagaacatgttgggtggcaagaaagttaaaattatatttgttctaggtggtcctggaagcggaaaaggaactcagtgcagcaatattgtagagcattttggttttatccatcttagcgctggtgaactc

SEQ ID NO: 24051 - DNA, 189 bp, Oryza sativa
  Clone ID: uC-osflM202121c01b1
tttctccacccacttttggttagggtctccgtcagccgccgtcggcgtatccacgctcagtagccatggtggcggccgctgacagactactcggccagctgctgctcccctcccactgcggttccctctgacctcgcctctgctagcctcgtcgccgtctcctacctcgtcgtggtggtcgtggggggt

SEQ ID NO: 24052 - DNA, 307 bp, Oryza sativa
  Clone ID: uC-osflM202121c04b1
cttcttcttcttttttcgccattgctgttgtctgcttcgttcttccaaaggatcacgagatgcaggggaggaagatgaagagcgcgagggagatggccagggaggagaagaatcatcatcatcatcatcatcagcagcagcagcagcagcaatcgagctccaaaggccaagcatggttctgcaccaccggactccccagcgacgctttgatcgaggtcggcgacatgacattccatctccacaaggtgccggtaatgtcgaggagcaagaagcttcacgacctcattaccaacagggagtctcgagc

SEQ ID NO: 24053 - DNA, 115 bp, Oryza sativa
  Clone ID: uC-osflM202121c07b1
gttctcctcgagcgaccggacgccaaaatggatcgatgactctcattctccaccaaccaattatataatacagttggctctgctggccaatcgatgataccacgccactacactc

SEQ ID NO: 24054 - DNA, 124 bp, Oryza sativa
  Clone ID: uC-osflM202121c08b1
cgcgcgatcttttagtgtgccatgccctagaagccaacacaattgggccgttttcctatgatgttaccccatgctcacgtatacagagcgatggcttgctatgagcactccaattttcttcaaa

SEQ ID NO: 24055 - DNA, 294 bp, Oryza sativa
  Clone ID: uC-osflM202121c09b1
attaaaaaaaggaaaaaaaaacaaaacacaccaagccaaataaaagcgacaatgggatcgctcaccaccaacatcgtcctcgccgtcgccgtggtggcagcgctggtcggcggcgggtcgtgcggcccggccaaggtgccacccggtccgaacattacgaccaactacaacgccccgtggctccccgccagggccacctggtacggccagccctacggctccggctccaccgacaatggtggcgcgtgcgggatcaagaacgtttacctgcctccttacaacgggatgatctcc

SEQ ID NO: 24056 - DNA, 286 bp, Oryza sativa
  Clone ID: uC-osflM202121c10b1
atacaaactagagagagaaagaaaccaccaccgccccaagaagagagagagaggacgcgacggttgccaggaggaggcagccaacggcgctcgaggcaagaaacgacgcggccatggtgggcttgccttgggagtcgtgacgcgctgtgtttgctgccgttgagagatgaaggtagtatccaagaagcatcatcagcaaggaggagggacgacgacgatggaggagggcgccatggacggcgctggcggaggagtggcggaggaagggtgctccggggaggagagg

SEQ ID NO: 24057 - DNA, 118 bp, Oryza sativa
  Clone ID: uC-osflM202121c12b1
tctcagtgtcgactggagggcccaaggcgccgttgtgccttccaagtcccaaacgcgaacatgcagtagctgctgggcgttcgtgacagctgctaccattgtgagcctgatctttatc

SEQ ID NO: 24058 - DNA, 84 bp, Oryza sativa
  Clone ID: uC-osflM202121d03b1
attctttgtcagagaaagcacctcgaggataaagatatacagtaaaaatttccaggagagaaagagtataagaccaccattttc

SEQ ID NO: 24059 - DNA, 69 bp, Oryza sativa
  Clone ID: uC-osflM202121d06b1
gttatcgcgaaggaagcggaaggcaatggggatgcgggacattcagtatgaaatggccgcacacactca

SEQ ID NO: 24060 - DNA, 145 bp, Oryza sativa
  Clone ID: uC-osflM202121d10b1
atcaaaccctagctagctagctagctaagctagcacgcacccatggcgtcgtcttccacctcgagctcgctcgccgcggcagcgatggtggccgtcgtcctcctcctcctgggtgccaccgccacgtccacccaggcggcgcgcc

SEQ ID NO: 24061 - DNA, 461 bp, Oryza sativa
  Clone ID: uC-osflM202121d11b1
ctcctctcttcgtccctgcgtagagagggagagagagagaaggaaccccttttgcctcctctttcctgccaagaaccacattttcccccaatctttcttcagattttccacacaaatctgtacgccttttcggtctaaagaaaaattcagcatcgatattggtgtctttctgcaagaaaggtgggcattggcagcaccaacgctccatccatttaccttctgagcaaacagcttcctgtgaagatcaccttttcttggtgctgcaatctgcattggcaccaaatcaagattcaacatttgctcccatatcatcaaaccaagattcagcagtgtgattttggttgccttgaagctgcattgaggaacctttcatgtgatttttttgatgcacattgatcatccatggctgcgaaaaaccatgcgagatcccaagactttctgaggagattctggtccatgct

SEQ ID NO: 24062 - DNA, 392 bp, Oryza sativa
  Clone ID: uC-osflM202121d12b1
gtaagatccaagtgttttggatttgttaactttgaaagtccagatgatgctgctcaggctgtccaagagctgaatggcaagaagtttgatgataaggaatggtatgttggaagggcacaaaagaaatcggaaagagagatggaattgaaagagaaatttgagaagaaccttcaagaagcagcagataagtatcaaaacactaacctgtacctgaagaacttggatgatagtgttgatgatgataagttgagggagctttttgctgagtatggcactattacttcctgcaaggtgatgcgggattcaaatggtgtcagcagaagttctggatttggtgcgtttaaatctgctgaagatgcttcccgagctcttgccgaaatgaacagcaagat

SEQ ID NO: 24063 - DNA, 107 bp, Oryza sativa
  Clone ID: uC-osflM202121e01b1
gtgtcttggggattctaagttccaacaatccaatctcctcctcttcctcctctccttgagatccgatccaatccaaccctgcggcagccgtctcgccggaggaggag

SEQ ID NO: 24064 - DNA, 150 bp, Oryza sativa
  Clone ID: uC-osflM202121e03b1
catagtaacgcaccaccggccatcaacctcctctcccctgcttctcgctcgctctcctgccctgtttcttggagaagcgagcttaagtgagagcctctgtccctcgcacacgctattggccatggtggttctcgctggtccgcccgccgt

SEQ ID NO: 24065 - DNA, 385 bp, Oryza sativa
  Clone ID: uC-osflM202121e05b1
gttatgatttgggtgtgggtggagcaagtgtgccagacactgcaccgccgtccactcccatgagaaagtcagctccatcaagatgagcgaacatccagccacttgcgcgctcctccatttgctgccgtatgaggatgaggcaggcagctacaggtaggtcactactctgctgcaaaaagaaaactgagtcctggtaccgaatctagcatttgcttgttctcctttcagatctggattttaattcactggtctgccttttgcgatttataattattttgttctactgattagtctcagtaatctttactctacaaatgatgatttacatggtcattattccatccagaagaaatgcacagactgctttacaaggcaaacatattga

SEQ ID NO: 24066 - DNA, 280 bp, Oryza sativa
  Clone ID: uC-osflM202121e06b1
gttctaatgtctcctctttcccaccaaggcagttttgcccatttgttatctattatgaaattgtattacattttgctgctactttgattgtttgttaagggttgccatgcaacatatagattaatgagttgagtccatgatcctggagatgcccaactctctattattgtaaactgtgatggtcttgttctttttggaatttctttggggcataggaactttacattgaataataggtttgcattaatatgatccaatatgaggtaaagagggtaatttt

SEQ ID NO: 24067 - DNA, 79 bp, Oryza sativa
  Clone ID: uC-osflM202121e10b1
tttacgatgatgagggtgagggcgagggcgaggatgacgatgaggatgaggaggaagaatacgcagcgcatcatgccca

SEQ ID NO: 24068 - DNA, 462 bp, Oryza sativa
  Clone ID: uC-osflM202121f02b1
gcgctctcgagctccccgcattccccgtctcccctccgcctgccccgggagctcctccggcgagatccgcctctgacagccaccctcccacggctgctcgtcgtcctcacctccggcgaccggctcaggaagaaagtaacttgagccatgggaaagaggaagtcagcggctaagccaccacctaagaagaggatggacaagcttgatactgtattttcctgcccattctgcaatcatggcagtagtgctgaatgccggattgatatgaagaacctgatcggcgaggcttcatgtaggatctgtcaggaaaacttcagcaccactgtcaatgcactgactgaaccaatcgacatatatagcgaatggattgatgagggcgagcgtgtcaacaatgtcgaagacgacgacggagcatgagcaacgcaaaatgcctgatgttgccgtacctgcactggtgctatt

SEQ ID NO: 24069 - DNA, 354 bp, Oryza sativa
  Clone ID: uC-osflM202121f03b1
atcttcctcgagagggctgacatgttcaagtacctcggtaacctgctctcctggaagagcaggggcagcaaggacctgctcttccgcgtatgcatcgtgtccgccattgccagtgcgctcttcaccaatgacacctgctgcgtcgtgctcaccgagttcatcctcaaggttgccaggcagaacaacctgccgtcgcagtcgttccttctcgtcctcgccaccagcttcaacatcggctccgcggcgacgcccatcggcaacccgcagaaccttgtcattgccgtggagagcggcatctcctttggacagttcttgcttggagttttcccggcgatgatcgtcggcgtcctgaca

SEQ ID NO: 24070 - DNA, 214 bp, Oryza sativa
  Clone ID: uC-osflM202121f05b1
cagagcgaggtagacatggccgccgccaccatggccctctcgttcccggcgctggccggcaaggccgccgcgaaggtgttcggcgaggggcgcatcaccatgcgcaagtcggcggcgaagcccaagcccgccgcgtcggggagcccgtggatcggcgccgaccgtgtagctctaccttggtccgctctccggagagccgtcgagctacctgacc

SEQ ID NO: 24071 - DNA, 160 bp, Oryza sativa
  Clone ID: uC-osflM202121f07b1
tcttctgtctcctgcagccgccgctagccacgcgcatcgctccgatcagccggaggtcgtcgccctctgtgaccgtctgtattcactccttgacgtttgattctatcctctttttgtcgtctttttattttctaattctttttttttattttattttttt

SEQ ID NO: 24072 - DNA, 422 bp, Oryza sativa
  Clone ID: uC-osflM202121f10b1
atcaccccagcagcagcagcagcagcagctgagcttgaagcagcagagcgaggtagacatggccgtcgccaccatggccctctcgtccccggcgctggccggcaaggccgccgcgaaggtgttcggcgaggggcgcatcaccatgcgcaagtcggcggcgaagcccaagcccgccgcgtcggggagcccgtggtacggcgccgaccgcgtgctctacctcggcccgctctccggcgagccgccgagctacctgaccggcgagttccccggcgactacgggtgggacaccgtggggctctccgccgacccggagacgttcgccaagaaccgggagctggaggtgatccactccaggtgggcgatgctcggcgcgctgggctgcgtgttcccggagctcctcgcccgtaacggcgtcaagttcg

SEQ ID NO: 24073 - DNA, 129 bp, Oryza sativa
  Clone ID: uC-osflM202121f12b1
tgtctccacgcgacaacgccctctctctctctctctctctctctctctctatttctccccatctccccgatccacccgtctctctccaaaccctagccgagctagatctccacctccgccgtcgtcgtc

SEQ ID NO: 24074 - DNA, 172 bp, Oryza sativa
  Clone ID: uC-osflM202121g01b1
acgctgctccccccctaccccccttccccaagccgacggcgtcgtcatggccatgaagggacccggcctcttctccgacattggcaagagggccaaggatctgctcaccaaggactacacctatgaccagaagctgaccgtttccaccgtcagctcctccgtagtggttcct

SEQ ID NO: 24075 - DNA, 264 bp, Oryza sativa
  Clone ID: uC-osflM202121g02b1
ccctgccgtgaacagtagtgatagcagccacatcgttcatgtccctcccggtgaaaatgccctttccgatgtgcttataagtactcctatcttcactggtgaagaaggtggaagcggttttgcctctttttctttttcttttctcttctttctttccttttttcctttcccttctccttttcctctctttctctctttctctcttctcttttacctcttttcttttttctcctcctttatattatcttttttcttctttatttt

SEQ ID NO: 24076 - DNA, 483 bp, Oryza sativa
  Clone ID: uC-osflM202121g03b1
gtctttcaagaggagatggagaggaagctgtatgagcaaatttctatgacaaactccatgagtaaaaattggcaggatgccatagctcaatttgccagcatgcgcgatgatctgggtgctctttctaagctattgttgccctcactacaagaatcacatatttctcacagcaagcatgaaacttcaagcaacaggagcaataggtggaagtacaacatctttggaaagaaaaacaaggaggatcattcatctcgcgcggaggaaaataagagtttcaggaaacagaagtccatggttgtcttggaaaaatctgacttccgtcacctgaatggtatgagtaaagaaggagatcataacttattttaagtccgaaatgagcaaattgaagaggatgcatgaattggatttgcaggagaagaccgaggagctcttcaattcaaacggtagaagggattgcttactctcaagaatgatgtggaattt

SEQ ID NO: 24077 - DNA, 182 bp, Oryza sativa
  Clone ID: uC-osflM202121g04b1
atatattctctcccctctcctcctcttcaccaccaccaccaccaccagcagcagcagagagcaccatctccatccaataatccccatgcttgcgcaccactcccggccacatcccgcgcgaggaggaggaggaggaggagggtgttcttgatccgcgctcccgcctggttggtggcggtggg

SEQ ID NO: 24078 - DNA, 571 bp, Oryza sativa
  Clone ID: uC-osflM202121g06b1
gcgtccgcaatataaaaaaagagaaaaaaagaaaaaaaagggagacgcggccatggcggtgacggggagcttcaaggtgactagtatctctttggtttctgtttatcttttttcttcttaatcttttttttattgttattttttttctttttttcttattcttattttatcttttttatattccttttttttttttttctttttctcctcttattttttttatttttttatattttctttatttttttttttttttttttttatatttattttttttttttattcttctttttctattattttcttttttctatttcttcatattaattttttttctttttttttttttttattttctctttttttttttttttatttatttttcttttttttttttatttatttcttatctatttctatttttctttattttttttttctttttttttattttttctattaatttttataattttatacttctattttcttttttattttttttttcttctttttttactttttttactctatttattatactttttttttcttttttctttttattttt

SEQ ID NO: 24079 - DNA, 452 bp, Oryza sativa
  Clone ID: uC-osflM202121g09b1
gtccgccctctttttcttttttttttggtgactagactttgctttactttgtttcagtgtccagaaataccttatgcaagagcatacactgcagtaatacatctgaattcctgcagcgactccctagtattcacatttacagaacgaacatgacaaaataagaaacagcagctgggatggcagcagccactttacaagctttgtgtgcatctatgatgcatacacacttctcctggatttgagggcatggcattatgtagttgtagtcactactgcacacttagaattatgagcagcatgaagaactgctcaccatcctctcagctggcctctggttgagaaccattccagccggtgtgtcttgagcctgctgtccttgaagcaatctctctgcgatctcgtggaatacattgttcacattgatcgttgttttcgcagatgttttcatgaag

SEQ ID NO: 24080 - DNA, 272 bp, Oryza sativa
  Clone ID: uC-osflM202121h01b1
cttctttcctgttgcagccgcctcagcggaaaaaccaaattcagcttcattcatgggttccccaagcaaaacacgtcggatgaagccattggggattcagctatatgagtgtgcccgggggagtcctatcttcttcagatcatgccaggctcttgtattgatactgacgttcttattccatgctagcttttattgccacttggaagacttcatgcattgtcaagagtgttcttgatccctattacagtattccttgttatttttccctttgt

SEQ ID NO: 24081 - DNA, 94 bp, Oryza sativa
  Clone ID: uC-osflM202121h02b1
tcgtcgctgtcgactgctgcagctccccgccggtggtttttttttagacggcatcaattggctactgcgaggttgctcctagtgctcacggtgg

SEQ ID NO: 24082 - DNA, 168 bp, Oryza sativa
  Clone ID: uC-osflM202121h03b1
gttgctgctgctgctcctcccgttttccgatcgcagccatgggaacccgcagcgtggccttggtgctcctcgcggccgtgctgctccaagccctcctccccgcttcggcggcggagggtttggagcggatcgcgctgaagaagcgcccgatcgacgagaacagccgcg

SEQ ID NO: 24083 - DNA, 396 bp, Oryza sativa
  Clone ID: uC-osflM202121h04b1
gcgccgcggaggcgtcgtcgtctccggtgggttgcaggaggcgaatgcgatggggtccaagacgaaggggtgctgcgggtggctgatcgtggcgctggtggcgtcgctggtggcgacggcggcggtggtggccatcatgaagaagaaggtcggcggggggagcgggcgcaagctcaagccgctgccggtgcccggcccgcccggggccatcgactccaagtacggcgacgcgctcggggtggcgctccagttcttccaggtccagaaggcggggaagctggagaacaaccagatcccgtggaggggggactcggcgctggatgatgggaaaccagcggggctggatctttccaagggaatgtatgatgctggtgatcatatcaagtttagttttcc

SEQ ID NO: 24084 - DNA, 550 bp, Oryza sativa
  unsure (1)..(550): unsure at all n locations
  Clone ID: uC-osflM202121h07b1
ctanctctcctctacagcagctcatcactgctcatgagattggagacggctacaatggcgacggcgaggttgctcctagtgctcacggtggtggcgtcttntgtttttttttttttgttttgtttttttgttgtttttttttttcttttttgttttttttttttttttttgttttttcttttttttttttttttttcttttttgtttcttttttcctttttttttttcttttttctcttttttctttttttcttctttttcttttttttttttcttttttcttcttttttctctcttttttttttctttttttcttttctgttcctttgctttttttttctctttgtttcttttttttttttttttttctctttttttctttttttctttttttttttttttcctttttttttttttttctcttctttctctttttttctttttcttttttttttcttcttttttttttttttttttctttttcttctttgttttcttcttttttttcttttttcttcttntttttcttttttttcttttctctcttttt

SEQ ID NO: 24085 - DNA, 97 bp, Oryza sativa
  unsure (1)..(97): unsure at all n locations
  Clone ID: uC-osflM202121h08b1
tcctcatctcccttctcgcggaggccgacggaacgcaaatgaaattcacaangataacgctcgatccagtccccgcgtctacggcgattataattat

SEQ ID NO: 24086 - DNA, 355 bp, Oryza sativa
  Clone ID: uC-osflM202121h10b1
tttcttcctacttcgtcttcttgctggtgtgttcgaggaggaggaggaggaggagaagctagcggcggcgtcggcaatggcgacgagcgggctgaggagctgcagcgcggtgggcgtgccgagcctgctggcgccgtcgtcgaacaggagccgcctgccggtctgcgcctacgccaccacctccgggcgcgtcaccatgtccgccgagtggatgccgggccagccacgccccgtccacctcgacggctcctctcccggtgacttcgggttcgacccgctgggcctcgccaccgtgccggagaacttcgagcggttcaaggagtcggaggcgttccactgccgttgggccatgctc

SEQ ID NO: 24087 - DNA, 316 bp, Oryza sativa
  Clone ID: uC-osflM202121h11b1
tgtcatggcaaaggagaaataacagctagcgggcttggggaagggaaaacagcaagtgggagatcggcagggagaggtgaattactacttgagtagaagtggtacaagaagagtcgtcgtctacctgtgagcgaattatttcgaggttgtgcgttgcgatgatgggaggtggtctggtgatggaccagggcatgatgttccccggcgtgcacaacttcgtggatctcctgcagcagaacggcggcgacaagaacctcggcttcggcgcgctcgtgccgcagacgtcgtcggtggagcagtgcgtgatgggggaggg

SEQ ID NO: 24088 - DNA, 146 bp, Oryza sativa
  Clone ID: uC-osflM202122a03b1
gtcgttaaacatgagaggaagtgatgttccaggggcgcctgtattatataggtgccgggttgaggaggatacccctgctacattatttgtggacttcaacaaaccatctgtagatgttttacacactctataacaggcttggagta

SEQ ID NO: 24089 - DNA, 249 bp, Oryza sativa
  Clone ID: uC-osflM202122a06b1
agtagtagcagcagctgagcttgaagcagcagagcgaggtagacatggccgccgccaccatggccctcttgtccccggcgctggccggcaaggccgccgcgaaggtgttcggcgaggggcgcatcaccatgcgcaagtcggaggctaatcccaaggccgccgcgtcggggagcgagggtactggaccgaccgcatgctctacctcggaccgctctccggcgagtccgacggctacctgaccggtgagtt

SEQ ID NO: 24090 - DNA, 116 bp, Oryza sativa
  Clone ID: uC-osflM202122b02b1
tttcttcccgtccggcaacgcagcctcaccgttgaggcggtggagaatgccgcggggaccccactcaccgcatgcgccatggccgccccggaggcaccctcctgctactgaaggga

SEQ ID NO: 24091 - DNA, 432 bp, Oryza sativa
  Clone ID: uC-osflM202122b05b1
ctcagtgaaaaaaaaatctcccctcgaagcgaagcgtcgaatcgccttctcaagatgcagatctttgtgaagaccctcaccggcaagaccatcaccctcgagggtgagtcctcggacaccattgacaatgtcaaggccaagatccaggacaaggagggcatccccccggaccagcagcgtctcatctttgctggcaagcagcttgaggatggccgcaccctggccgactacaacatccagaaggagtccaccctccaccttgtgctcaggctcaggggaggcatgcagatcttcgtcaagaccttgactggcaagaccatcacccttgaggtcgagtcgtctgacaccattgacaatgtcaaggccaagatccaggacaaggagggcatccccccggaccagcagcgtcttattttcgcttgcaagcagctt

SEQ ID NO: 24092 - DNA, 76 bp, Oryza sativa
  Clone ID: uC-osflM202122b06b1
acttttatttatatctacctctcgccttctacatgcgctgggttttataaacacaaacgcttctaaaccaccccta

SEQ ID NO: 24093 - DNA, 390 bp, Oryza sativa
  Clone ID: uC-osflM202122b08b1
tcggtctgaacatccatcggtccagattcatggtgctaggatatgttatatcttagtctgattcgttttttatgagacagagagtatgcgtgcacgtatatgcattctgatgtaattagtactgatttgcttactgtctcgtaccataatccattcattgccatgtgtgtataaatactacctccttggattccttgctgcagaacacttatcttctctcttgaaaaagctctaagggtaccaacatgatggcagagacgatgaccacgaagacgaagccagggatggcgtagtgggtactgctcccattgagcatcttacctgtcccagcttttaccataggtgcccttctcctcgcgaaactatctttcaatatcgccatttcacctt

SEQ ID NO: 24094 - DNA, 277 bp, Oryza sativa
  Clone ID: uC-osflM202122b09b1
tcgtttctccactccactctcccccaccacacgggaggggcactgaggcataccgacgaacacctttggagccatggctccctgcctcctcctcgtcctcttcctcctcccggggctcgccaccggccaccagcacccgtccaccctcggctcctccgccctctccgagtggcgctccgccaagggctcctactacgccgccgacccggaagacgccatcggtggcgcgtgcgggttcggggatctggggaagcacgggtacaggatggcgactgcg

SEQ ID NO: 24095 - DNA, 220 bp, Oryza sativa
  Clone ID: uC-osflM202122b11b1
atcgccttcctccacctccaccccccacccgccgatcgctttcctcgagctcgtgccgtttcaaagggcaaacgctctacccacccattcaccttcacctttctgcgcgataccccgagaggcgaggcgaggcgaggccgttatagatccgctccgttccctgaccaccacgacacggttggcggctggatcctccactccacccacttactccgatttc

SEQ ID NO: 24096 - DNA, 52 bp, Oryza sativa
  Clone ID: uC-osflM202122c08b1
tcgatactcatggagatcaactatatgcttgcgtgtagggttcaattgaagc

SEQ ID NO: 24097 - DNA, 139 bp, Oryza sativa
  Clone ID: uC-osflM202122c10b1
tcggtgagaataaggagagaaacatctagagtgaagaagaaagatgaggttcggccggaccctactagagcccaaaagcaaaagcccaccaccaccaccacaaggagtagttggagctttcttttcaacaccaccacca

SEQ ID NO: 24098 - DNA, 133 bp, Oryza sativa
  unsure (1)..(133): unsure at all n locations
  Clone ID: uC-osflM202122c11b1
ttcgttacacagtatccactcacacacatcgcggaggtgaggtttcattggacgggtggacatacggcttatcattgncgccgtataacaccaagagggcggttaacaaagaagtgtattccatctgctctaa

SEQ ID NO: 24099 - DNA, 89 bp, Oryza sativa
  Clone ID: uC-osflM202122c12b1
atcgctcttttcgactccactactgcgtttgaggctagttttacaatatcagcagccgagctttcccttaccccggatcttctcttcta

SEQ ID NO: 24100 - DNA, 465 bp, Oryza sativa
  unsure (1)..(465): unsure at all n locations
  Clone ID: uC-osflM202122d02b1
gttagggttccaagtctggtgcttccataagggggcgaggttgacaagggtgggggatgaaaatcaccatccgccagctggggccttccatgatacagcagatgcagcagccttgcaatgagtgtaaggggactggagagagcattaatgagaaggatcgctgcccangctgcaagggcgagaagggtattcaggagaagaagggtctggagggtcacgttgagaaggggatgcaacacaatcagaagatcactttccctggtgaagctgatgaggcgcctgataccgttacgggagacattgtattcgtcctccagcagaaggaccactccaagttcaaaaggaagggcgatgatctcttttatgagcacaccttatctctgactgaagcactttgtgggttccaatttgtcctgacacatctggacaacagacagctgctcattaagtcaaaccccggggaag

SEQ ID NO: 24101 - DNA, 546 bp, Oryza sativa
  Clone ID: uC-osflM202122d04b1
gtatggtgttgctgtaaagatgagtgttcacaggaagatccttgcagaaaatagtacctggtttgctgataagctctcaagacaatccccaatgtcaagcatggaggtgcctgattgtgaggatgtggagatctatgttgagacagttggattgatgtactgcaatgatgccaagcagaggcttatcaagcaaagtgttccacgcgttcttcggatcttgaaggttgcagaattattaggtttccaagcatgtgttttgtcttgcttagagtacttggaagccgtcccttgggtcggggaagaagaggagaatgtggtatcatctgttcagcatctgcaaagtgggaattatggtgttagcccaatactgaagagggtatgctctgacctaacaagcccaccaaatgacacatttgtgcatatcatagaattagtcttgaagagcggcgaggatagaaggcgccgcgaaatgaaatccctggtgctgaagcttctgaaggagaatagcagctgtaccagtacatctgtggatatctatgctgagac

SEQ ID NO: 24102 - DNA, 445 bp, Oryza sativa
  Clone ID: uC-osflM202122d05b1
gtagatgcgggtggtcatcgtcggcgccggcgtgagcggcctggccgcgtgcaagcaactgctggagcgcggctgccggccggtggtgttcgaggcggacaccggcgtgggtggcgtgtgggcgtggacgctggagggcaccgcgctgcagactccgcggcccatgtaccagtactccgacttcccgtggccggagacggtgacggaggtgttcccggaccaccgccaggtgatggactacctcggcgcctacgcgcgccgcttcggggtgctcgactgcgtcaggttcggccaccgggtggcggggatggagtacgtcggcgtcggcaaggaggatgtggcggcgtgggatgagtgggccgggaatggcgacgcttttggctccggctccggcgagtggcggctggaggtggccgacggtgagggccatcttgagacacacact

SEQ ID NO: 24103 - DNA, 509 bp, Oryza sativa
  unsure (1)..(509): unsure at all n locations
  Clone ID: uC-osflM202122d06b1
ctatcatgctgctgctgctgacgctgccgggggggggcgggctccagcggggggtgatctccgtggtgcggagcgcgctgaagccgatgatgtcggtggtgcccttctgcctcttcctgctgatggacatctactgggagtactagacgcgggccacctgcgacgacgagcaccactggaccccgtccgagcacctccggcaccagaagtgcatcatgaagtcgcagcgcaacgcgctcctcatcgccggcgcgctgctcctctactggatcctcttctccatcacctccctcgtcgtcaggctcgaccagctccagcagcgcgtcgacaagctcaagaagcgggacgactgatctgatcctgctacccctccctgattcagcgcgtcgactgacctgaccggnggcttcgctgtttcttccctactcggttgtggtcttagatatatcatgtgatgcgtggtgctgtggttttttgtagtatggatatggatgcttgagatcgtgatg

SEQ ID NO: 24104 - DNA, 113 bp, Oryza sativa
  unsure (1)..(113): unsure at all n locations
  Clone ID: uC-osflM202122d07b1
ttgctctccccctcccattctgcgcattgctctcggcnctcggtcacatgctgcgtctcgcgacgccccggagcgtctcctttgggggagaggagaggagaggagaggagagg

SEQ ID NO: 24105 - DNA, 290 bp, Oryza sativa
  Clone ID: uC-osflM202122d08b1
actctcccacactcttcatctaggggggggcttatcaaaataggggggttgaaactcccgaaataaattgcttttggaaaaacgattccataggagactgcacatacactcactattacaggaaaatatgtgattgacaccacatatatatatcatgtacatcgtcttctaccatataaaatagttcagtagcaggcacgctcacatatacctgtagatattgaacatgaagattataaatacctccaacactttgcaaatatgttttataaccaagctactagagccta

SEQ ID NO: 24106 - DNA, 471 bp, Oryza sativa
  unsure (1)..(471): unsure at all n locations
  Clone ID: uC-osflM202122d10b1
tcggttcacacggcgcaaaacaactcgtccccccgggcctcaaggaaggggaggcgagacgcgactagagcccaaaggcaaaagcccaccaccaccaccacgaggaggaggaggagctatctcgccaacaccaccaccaccaccagcgaggactaggaggaggagagagaggagagagcttcccgtctccgcgcggctcccgaggcgacgccgcctccgccgccgccgccgcccgccgatattggaaggatcccagagggctggagaggtgacctgagttgcatggggagaggatgccagagctgcgaagcagtactcgccaagcacgtctgaggtctaggaagcctgacgaccagaagccagcggaacaggctgcgaaaccagcgttgcctgctccacagagagcangagagcgtgttcctccccctgctatcaggggcagaaagggtgctcgctggagaagagggggag

SEQ ID NO: 24107 - DNA, 398 bp, Oryza sativa
  Clone ID: uC-osflM202122d12b1
tcgttttcttcttcttcaacctctcctttcaggctcgtcttcacatctcagggggcatttttcccttccccgggatctcctcttctattccttttcttccatcgccataagagcagccgcagatcgaattgcattgcagtctttgcagatttcagcttaattgccggacagtgaagtgaaagcatcttcaagggcgtggaagctctctgagattccaaagggtcacaaggcaggggatgagtacaaccaaagtgaacagacgtgtgggaaagtatgagctaggaagaacaatcggagagggcacattcgcgaaggtcaagttcgcgagggataccgagaccggtgatccagtagccatcaagatcctagacaaggagaaagttctcaagcataagatg

SEQ ID NO: 24108 - DNA, 413 bp, Oryza sativa
  Clone ID: uC-osflM202122e02b1
atcagttccatattggttattattacgcacatgagggatctttgtgcgttcagtgagttggagaagttaactttggagttgcacactctgttcatgtccagttttgataattcaaatacagcaatctctcagtgcaaaccatcaatggcttcatttatggcaattcttggtcacttgaacactactgaagacgatgcaaacccactttgttctgcaatgtgggatctgttccatttcttgctgagggagcggcattgggcactcattcaccttgcaatgggttcctttgggtactttgccgctcgcacttcttttgcacagctctggaaatttgttcctgtagatgctgccctttcctacacatgcacaggggtggacatagatgaggatgggtttatgtcagaattgaaagc

SEQ ID NO: 24109 - DNA, 497 bp, Oryza sativa
  Clone ID: uC-osflM202122e03b1
gtgaaaaagaaaaccaccgccaccgacatcgcgggggctcgtaacccccaaaggggcgcctcccttcctccccaataatcgaatccaatccatcttccacgcgcattccggatccgcggaccaagggaggatgtcatcgtcgtcgtcgccgcccgccgcctccgccgccgcgagggaggatctggacgggaaccccatcgcgcccctcaccatctgcatgatcggcgccggcggcttcatcggctcccacctctgcgagaagctcatgggcgagaccgcccacgtcgtctacgccgtcgacgtctactgcgacaagatccgccacctcgtcgaccccgcccctacccaccttcatggccgcatctccttccaccgcctcaacatcaagaacgactccaggctcgagggcctcatcaagatggccgatctgacgatcaacctggcggagatctgcacgccagccgactacaacacgcgccccctcgacaccatctaca

SEQ ID NO: 24110 - DNA, 398 bp, Oryza sativa
  unsure (1)..(398): unsure at all n locations
  Clone ID: uC-osflM202122e04b1
ctctctcccgcgtggtagccgccgccggttggggccggtaggggagcgcgacgggggagcggtaggggcgacccatctcgctctgtcgccccgcggctggtgggggtgcgcgcgggggagagcgggtggttagtatggtgctggatctcaatgtggagtctccgggtgggtcggcggcgacttcnagctcgtncacgccgccgccgtcgcccgacggtggcgggggggggtacttccggttcgacctgctcggggggagccccgacgaggacgggtgctcctcgcctgtcatgacgcgccagctcttgccttctccgtctgccggcggtggcgctggcgggggacgggtcgtcgacgccaccgctgacgatgccgattcccgctgaggatgaggaggg

SEQ ID NO: 24111 - DNA, 477 bp, Oryza sativa
  Clone ID: uC-osflM202122e07b1
tcgctccattctccagctcgcctcagccatccgttccttccgtctttaaaggcatcgctgccgggcggctgttagctgaatcgatcgcaaggaaagacaaaggaggagagttcagtcgacttgggatcgagtagaatcgccggcttctgctgctattgcgctgaccattatatccaatcccaatccaatcgacgatgggcctctctcgtcggtttctgaacctgatcgtggacaaccgcatccctggagccaaatcgctgcgctgcatcgacctcaccctcgcgcgctacaagttgttcaacactacaacacctgctgcactgatactgaatgggaaaatatctgaatcagaacgcccacaagactccaccccatgggcgggtgccgacaataacgagaaggaagcggcagcaacgttaaagataggaacgattcagcttcctacaccaatcatgaactttcgatcttcagctgagt

SEQ ID NO: 24112 - DNA, 412 bp, Oryza sativa
  Clone ID: uC-osflM202122e09b1
tcgtttaactagacgaacgtactagcataagaggaggatgaaaatgccggtgagccggatcgcggtgggcgcccccggcgagctgtcccacccggacacggccaaggccgccgtcgccgagttcatctctatgctcatcttcgtcttcgccggatcgggatccgtcatggtcttcagcaagctgacggacggcggcggcacgacgccgtcggggctgatcgccgcctccctggcgcacgcgctggccctgttcgtggcggtggcggtgggagccaacatcttcggcgggcacgtgaacccggcggtgacattcggcgcgttcgtgggggggaacatcagcctggtgaaggcggtggtgtactgggtggcgcaactgctggggtcggaggtggcgtgcctgctgctcaagatc

SEQ ID NO: 24113 - DNA, 450 bp, Oryza sativa
  Clone ID: uC-osflM202122e10b1
tcggttctagatcgcgagcgccgccctttttggttgttttttataaagcgaagaggtggtcaaacattgattactcaagatcgatcacacatcaagagtacacttctacaagttcactagacggccacaattctgatcatagacacgaattgcataatcgaatcaatttgcagtccttttatttccatcacatagttcatagccagctctgatgccatccaagcggcagcctagaactgaacatgatgatcaatggatggcaacttcaacttcagtctgcgtgtctttcattctcagtgctttagcatgtccctgaaccagtaggccgacgccttggggtggcgctcgagcgtgttgaagtcgacgtagacgataccaaacttggacgtgtaacctgacagccactcgaagttgtccaggagagaccaggcgaagtagccagccacattg

SEQ ID NO: 24114 - DNA, 540 bp, Oryza sativa
  unsure (1)..(540): unsure at all n locations
  Clone ID: uC-osflM202122e11b1
tcgatcctagaaacagaaagaaatcgcactcggggggaagccgcagcttcttctgggcgtcgccgccgccgcactgctactcgtcgttgcagcctccgccaagaaatccggcgacgtgacggagctccagatcggcgtcaagcacaagccagaatcctgcagcattcaagctcacaaaggcgacagagttaaagttcactaccgtggaaaacttactgatggaacagattttgattctagctatgaaagaggtgacccaatcgaatttgagttgggcactggccaagtgatcaaagggtgggatcagggcattctgggcatgtgcgttggcgagaagaggaagctgaagatcccttcaaagctcggttatggtgctcaagggtcaccgccgaccatccctggtggagcgactctcattttcgataccgagcttgttgctgtcaatggcgagccagccagcaaatccgatgaggacgatgatgacagcgagctttagatagccaggatggttcacatcttacgcgccanaacanagtctag

SEQ ID NO: 24115 - DNA, 479 bp, Oryza sativa
  Clone ID: uC-osflM202122e12b1
tcggtggcacccgctgaagcaccggaggttcggcggggggggcaaggcggcggggggggccggcgctagggaggtcggggaggcgaccaccgtggcggaggcgacagcgacggggcctccgaaggggagcgacgaggatgacgaggctaggtacatttgcggcggatggacgagtgatgatggaagaatgagttgtggatactcaagctttagagggagaagagcaaacatggaagacttctatgacataaaatcatcaaaagttgatgataaccaaataaacctctttggaatatttgatggtcatggtggttcacatgctgctgagcatttaaagaagcacttatttgaaaatcttctgaaacatccgtcattcatcactgatacaaaatcagcaataagtgagacctacagaaaaactgactctgatttcttggatgctgagactaatattaatagagaggatggggcaactgcat

SEQ ID NO: 24116 - DNA, 344 bp, Oryza sativa
  unsure (1)..(344): unsure at all n locations
  Clone ID: uC-osflM202122f01b1
ggcgatgatcaaccggaaccacgtcgtgtcgttgctgggcggcgccgcgctgccgacggtgctgctcttcttcctcgcgtccgacagggtgagcgagaagctggcgatcgtgtcgagctgggggagtggtggatcatcgtcggcggcggcggcggatcatgatctcagaggcgccggtggcgacgctgctcctcctcctgctcaacaggagaaattcccgggcttgccggagttgctgccgaaagtggcgatggaggacaggacggtgatcatcacgtcngtgaaccaagcgtgggcggcgcccgggtccctcctcgacctctaccgggacagctttaagaacg

SEQ ID NO: 24117 - DNA, 454 bp, Oryza sativa
  Clone ID: uC-osflM202122f02b1
gaaaaggcctgtgtcaaggagagggtagtagcacctggctctcctttgccttcagagaaaccggaagcaatggcgtctgctactctcctcaagtcatctttccttcccaagaagtctgaatggggtgccacccgccaggctgccgcccccaagccggtgactgtctccatggttgtccgcgctggtgcctacgacgatgagcttgtcaagaccgcgaaaaccattgcatcaccaggaaggggtatccttgccatggatgagtcgaacgcgacctgcggtaagaggcttgcgtcaattggccttgagaacaccgaggccaaccgccaggcttaccggaccctccttgtcaccgcaccgggcttgggacagtacatctccggtgctatcctcttcgaggagactctgtaccagtcaactgtagatggcaagaagattgtcgacatcctcactgagc

SEQ ID NO: 24118 - DNA, 496 bp, Oryza sativa
  Clone ID: uC-osflM202122f03b1
ctccagtcagccgaactattacaagtgggcttgggcctccaggttcatctaggcctgatatgaagattcatcgcaacttgcctggtgatagcaatagtactgccattttgtttgataaggagacgtgtacaacaaaggaaccatcaccaaactccgatgatgttgaagctgaagctgaggctgaagcagctgcctctgctgtagctgttgcagctattagtagtgatgagatagttggatctggagctgatgcaacggcagcttctgcttcagacaacaaaagtttcggcaataagaatcttgctggattagcatcaggaggtcaatcatccacagatgaaccactcagcgtcgctcttccagcagacttgtcagttgatactccaccaatgtccctgtggcaccctctgccaagtccacaggcatcaggaccgatgctttctcaatattctggtgcacagccatcccactattcctgctttgagatgaacacaat

SEQ ID NO: 24119 - DNA, 549 bp, Oryza sativa
  unsure (1)..(549): unsure at all n locations
  Clone ID: uC-osflM202122f05b1
ctgacgcgtggggtttgttgatggatttttcaggccactgtatgcaaagcttggatttgatatatttggccttgggtttttgacttccttgctattcatattcctagttggaatatttgtttcttcatgggtgggttcaactgtcttttggattggagaatggtttattaagaaaatgccttttgtaaggcacatatattctgcatcgaagcaagttagcactgctgtttcaccagatcaaaatacaacggcatttaaagaagttgcaataattagtcatccccgtattggtgaatatgcatttggattcataacatcgacgatgatccttcagactgacaaaggtgatgaagaactgtgcagtgtatatgtgccaaccaatcatctatatatcggtgacatcttcttggttaggtctgaggagattataaggccgaatttgtccattcgagaagggatagaaatcattgtttctggaggaatgaccatgccgcangtgattgcagcaccaggacaaacaccccataagggtcagagcacccgtttaaa

SEQ ID NO: 24120 - DNA, 306 bp, Oryza sativa
  Clone ID: uC-osflM202122f07b1
tcgggatcaggaggcattctttaaagactacgctgaagctcatgctaaactgagcgagcttggtgcaaagttcgatccacctgagggattttcactggacgatgaaccagccgtctaagagaaggatcctgaaccagcaccagcgccagcagcagcaccaccacctccaccagtcgaggagaagaaggaagctgaaccaactccagtaccagtaacggtaggagcagcagtggcatcatcgccagcggatgacaacaacggggcagcaccgcaaccagagcccttcgtcgctgcgaaatactccta

SEQ ID NO: 24121 - DNA, 247 bp, Oryza sativa
  Clone ID: uC-osflM202122f08b1
tcgctacgactacgccttctactactctttcttccaggacgccgccgccgccgccgcgtcgccgctcggcctcgacgacgccgccggtatgaccaacggtggacggaagcggaagaggggaggaggaggggatggggcggcctatccatcatctcaagccgatctgaccctaggctaggacggatcagatgaggtcgtctataaccacatctgtcaacgtcgtacagagcaaggccctctttcgggg

SEQ ID NO: 24122 - DNA, 536 bp, Oryza sativa
  Clone ID: uC-osflM202122f09b1
tcgctggaggaggcgcagcagcactagccgcgggataaaacatccaagcgctcctccatcgtcgccaccgctccggtttgcctcccgcgcgagccctcgtcgacgccgccggtatattgctgaaggaagaagagcaccaacctatttatcatgtcaggaggatcttcaccaaggtcaagacgaagcagctttaattctttatcaagagatctcgaactcccttcagagcaaggttgtctctctgttattgtcctcggggcttctggagacctagccaagaagaaaactttcccggcactcttccatctttttgcacagggatttatacaatcaggtgaagtgcatatatttgggtatgcgagatcaaacctttctgatgatgggttaagggaacgcattcgtggatacctcaaaggagcctcagaagaacatctctcagactttttgcaacatataaaatatgtcagtggttcctatgacagcggagaaggatttgagaaattgaccaaggaatttcagagtttgagaagtcaaac

SEQ ID NO: 24123 - DNA, 339 bp, Oryza sativa
  Clone ID: uC-osflM202122f10b1
tcgttcacctccgttaaccccgttcgttttatttgcgtttacttcgtttcttgggaaggcacttccttcctcttcctaggaaggcttgaggagccaagaggaagaggagagcaatgggggaagctgccggcgaccgcgtcctgagccgcctccacagcgtcagggagcgcatcggcgactccctctccgcccaccccaatgagctcgtcgccgtcttcaccaggctggttaacctcggaaagggaatgcttcaggcccaccagatcattgctgagtacaacaacgcaatctctgaagctgatcgtgagaaagctgaaggacggtggcttttgaggatgt

SEQ ID NO: 24124 - DNA, 528 bp, Oryza sativa
  unsure (1)..(528): unsure at all n locations
  Clone ID: uC-osflM202122f11b1
tcgtttgcttcttcttccgctacgcttgtgggcacgatgagaagggcgaccattcttgtactgctcattgcactctcatctgttattgctccccttccattggaagctctcaatgtaagaggccatctactgaaatccaagacatttctgtctccggcattcttcctgcaccctggatcagtttcaaacaagttctactatgatgtccccttccctagaggccaccttgctctcaagagctttaatgctgaagtcgtagacgagaatggcgtccctgttccgctccatgagacttacctgcatcactgggttgtggaaccatactatgctttaaagaacagtgatagcgcagacgcgcaaaagctacccaaggggatcattgcaaggaactctggtgtgtgcaagaaaacattaggccagtactacggccttggttctgagactcgccatactgccacatgggtacctgatccttacggcatagagaatggtaaatccgagaagcccnctgaaggatatgaggagaaa

SEQ ID NO: 24125 - DNA, 515 bp, Oryza sativa
  Clone ID: uC-osflM202122f12b1
tcgttgacattgtcatcctcaactctggcctggacggcgggtgctactggaccagggtccgcgcatatgtgcaggctgctgagtatgctgcacaattctgggctggagttatggctgaagtgcggtcgcgtgggcatgccgtgccgaggatgttctaccgaacgaccatcgcgaccggcgggtatgctcgggacctggcattcaatcctagcaagatggaggcgttcaatggggtgctcgtcgagaagttgaggcgtcatggggtgctcactggtgggttgatcgacaacttcgatatgaccttcccatggcactatgacaatcgttgcaatgatggtgttcactatgggcgtgcaccggcgaagttgatatggcgggatggcaaggtcgggcaccaagatttcgtggacctcatgctggggcatgtgctcctcaatgccatctgcaatggatgaagggtcttgctttcatgctcagtaaagttgtgcggctcaatcgtgacactagagtaggat

SEQ ID NO: 24126 - DNA, 288 bp, Oryza sativa
  Clone ID: uC-osflM202122g01b1
cttgatctgctaatcagtggacttccagacatgggctgggacgatctaaaagcggggcagaatattctgggtacagcatagcttctccagtcattcagtggttctgggagattgtccaagggttcagcaaggaggacaaagcccggttccttcagtttgttactggcacctcaaaggtccctctggaagggttcagtgcactccaaggaatatctggaccacaacgattccagatacacaaggcctacggaagcaccaaccatctgccttcagctcatacttgcttta

SEQ ID NO: 24127 - DNA, 475 bp, Oryza sativa
  Clone ID: uC-osflM202122g02b1
tctcttttctcctcactctcctcggctgctctcgtccgctgtcggtggtgcactgcttgctcgatcctctgcaatggcggtcgacccgcgccaggtggtggccgggttcctgaccctgtccatgttcgtcatgctcggcaacatgatcaagcacgaccacttcacccccgtcggcgccggccaggaggagttgggcttggaggcaacaggcatagaatcaaacgaaattaaaattgcagatactactgaaatgactaaggtcaacaaggctggagtggatctcccaaaggagactgctgaggagattagaccctgctggtctaaaccaagatcaaatgttcaagagtctaagggttttgttacattctcattgactatgggccctgaataccacatctcacagattactgatgctgtggttatcgcaagatatttaggtgcaacacttgtgcttccagaaattagaggaaatgag

SEQ ID NO: 24128 - DNA, 371 bp, Oryza sativa
  Clone ID: uC-osflM202122g03b1
atcgatctctttccaaaacattcagtagtagtttacgggtcaactctgcatggcttgctctgcagcttactttgctttctctgtgcttgtggctttacacttgtgttgctgtcatggacaagctcctgatgctgctggtaatagcagtgatgtaactgcgatctatagccttggtgactccatcactgacaccgggaatctgatcaaggaggcgcctcctggcatgtttgagaccatcaagcatctcccgtatggcatcacgtttgggtacccgactggacgctgctctgatggcctcctcatgatcgatttcctcgctcaagacctgggtcttccatttctgaacccttacctgggcaagaacaagagct

SEQ ID NO: 24129 - DNA, 435 bp, Oryza sativa
  Clone ID: uC-osflM202122g07b1
gtggagggacgcctccggcgaccgccccggatcgccagcaccagcgagacgtgggaacaccgtgcccacgctaggctcccacggcggcgccgccgccgccttctcctccatgtccgccagctattcggcagctcttacagttgctcggggagatctcctaccgcccgccgaccaccacccaccagcaactccgaacccaaccccagtcgcaacgatcacaccatccgcgggagcagccgagcagccgccggaggaatccagctccatcctatacggcggcggcggcggccatccccgacgctccgatcccccggcttagcgcgacggcgatggtcaatccgcgagggtggagaggcagctaaatccgcactggagcacagattccagccgatggatggctggaccagataggggttattgcctacacgaacgaga

SEQ ID NO: 24130 - DNA, 423 bp, Oryza sativa
  unsure (1)..(423): unsure at all n locations
  Clone ID: uC-osflM202122g09b1
cttcacctcgcaatctccgcccaaatccagcgcgtcgtctgaacacaaaaccggggagaaaatctccgcctccgccaccgccaccggcgccgacgccgccatgggcgccaccgccgccgcgggccacaccctcctccacctcgcgggcccgagggagcgctccgcggggcccccactcccgcccgccaccctccggctacccagccgacggctcgcccgtctcacgggcagctgcagcagcgggtccgggaacaacagcgcgcgcgacttccccaaccccaacgggatcctcggcgcgcccccgtccgccgcggcggtggcggacgcgtcntcacatatcgatgttgacgtggcgacggaggccgacctgagggagaacgggttccggagcacgcggcgcaccaagctcgtctgcaccgtggg

SEQ ID NO: 24131 - DNA, 195 bp, Oryza sativa
  Clone ID: uC-osflM202122g10b1
tttctctctcctctttctctctctctcttcctcccaatctgcgaagcgagagagagagagagagagctcgaggcgagctctccccgcccttctcccaaaccctaatccttccgccgcgcggaggagagccgcgtctcgggcgcgcgcgtggaggcgtgaagcgatctgtattggtggaggggagggggaggggat

SEQ ID NO: 24132 - DNA, 566 bp, Oryza sativa
  Clone ID: uC-osflM202122g11b1
tcggtgaactcgaactctcgcctaccatttcgcccccctccgcaagcaatccaccactgcatcggcggcgagggctcaccggcggcgagccatgtgcggcggcgccatcatccaccacctgaaggggcacccggaggggtcgcgccgggcgacggaggggctcctgtggcccgagaagaagaagcccaggtggggcggcggcgggaggcgccacttcggggggttcgtggaggaggacgacgaggacttcgaggccgacttcgaggagttcgaggtggactccggggactcggatttggagctcggggaggaaggacgacgatgacgtcgtcgagatcaagccggccgccttcaagagggccctctccagagataacttgagcaccattaccactgccggatttgatggtcctgctgcaaagtctgccaaaagaaagagaaagaaccaattcaggggcatccgccagcgccctggggtaagtgggctgctgaaacagagatcctcgcagggtgtcgtgtctgctggcactttaacagtgctgaagagctgcagagctatgatgctg

SEQ ID NO: 24133 - DNA, 267 bp, Oryza sativa
  Clone ID: uC-osflM202122h02b1
attgttccctcctctcctctcccatctcgccgtgcgggcggggcgactcgagagacggcgctgccgccacccccttcctcttcaacgcctcctccctcacctcgccgccgcctgagcgggcgctggcaaaaccgtgcgctcgcaaggacagtggcggctgggccttgtctcacctcccctttgcgcccaacggctggggacgccgcttatagtggtggtggcggtgcccagatccgcgccgcggccggccggatctgggggagcgat

SEQ ID NO: 24134 - DNA, 142 bp, Oryza sativa
  Clone ID: uC-osflM202122h03b1
ggtggagaagcgaagcgaggaaggtcaagccgtggatggcacgcacgcacagagccctcccctctcctcgctgcccatctctctctctctcttcccctcgacgcggcgagatcaggaggaggaggaggagaggggggaaggg

SEQ ID NO: 24135 - DNA, 473 bp, Oryza sativa
  unsure (1)..(473): unsure at all n locations
  Clone ID: uC-osflM202122h04b1
gttgggagctgaatggaaacatcanacccgtcgggggacccaattgtaaaagggggtttgccacggccctttgggggtttgtcacaaactgtacttccaaaaaaacaaaaaaactttggctcattcgttctttaccgcagttcatgtatttgattccattgaactttcaagaacaagtcccaaatgttgcatgagaggccgcacgtctactgtgacagctcttttgatctcatacatacttatctttcatctcatgtcctttcaagcttctgaataaacttataagatctgttcagggaagggtatgtttctatttgttccgtttgggtatgagtttattcatcctaaatgttagatcatttacttttaagcaatattacacaagcagctgcaaacgatggccattctgttaatcttgtgatttaattgttcctttttgttgattnttcagctgcactaactatattttcttt

SEQ ID NO: 24136 - DNA, 501 bp, Oryza sativa
  Clone ID: uC-osflM202122h05b1
cttctcttcacgcctccctcctctcctcttccctgtgcggcgacctcctcctccggcgtccagctcggccgcagcggcggcggcgacgacgaagccggccacaccgccgccattctcatggcagacaagatctccacggttgtgctcaacgttgacctcgaatgcgatcgatgctacaagaagatcagaagagtcctttgcaggatccaagataaggcgaacatcaagacgatctcgtacgacgagaagaacaatgcggtgatggtgtcggggccgttcgacgccgacaaggtgtgcaagaagctgtgctgcaaggccggcaggatcatcaaggacatgcaggtcaagggcaaggagaacaagggcggcaaggacgccgccggcgacaaggcgaagccggcggagaaggacggcggcggcgggaaggcggagaagaaggacgccgccggcggtgacaaggcggagaagaagacggtggtggcaagccggagaaggaggcgg

SEQ ID NO: 24137 - DNA, 361 bp, Oryza sativa
  Clone ID: uC-osflM202122h08b1
tcgggtcttcgtactcgcctctctccgcgcccggctgcgccgccgctcgccggcgggcgtctccgccgccaccgccgccgccatgagggagtgcatctcgatccacatcgggcaggccggtatccaggtcgggaacgcgtgctgggagctctattgcctcgagcatggcatccagcctgatggacagatgcccggtgacaagaccgttgggggaggtgatgatgcttttaacaccttcttcagtgagactggtgctgggaagcatgtcccccgtgctggcttcgtcgatcttgagcctaccgtgattgatgaagtgaggactggggactaaccgcagctcttccaccctgagcagctcatc

SEQ ID NO: 24138 - DNA, 422 bp, Oryza sativa
  Clone ID: uC-osflM202122h09b1
tcggtttttgcttttgttgttccaatcaaactggagggggataaaagaaaactggggcgattatcatgctactgtgaatcttgaatgctcccaacttattgcaataaaggcttgctgttggtcatcagttcttccttatcagctggttccacagatttggggtttgggttttaattcagaggaggcattttcttttggttatgatgccaattttgggcgcttactgctccaattaggaccgattttgagtcttccactttggagtttggacatgactggtttggtagtaacttactaccagtgatcaaaatgaactatcccagatatccttcaatcatgatgcatagctccagattgggttgcatactgttcttggtaaccctgaagacagacgagaaaccgggctatccttactaattatc

SEQ ID NO: 24139 - DNA, 337 bp, Oryza sativa
  unsure (1)..(337): unsure at all n locations
  Clone ID: uC-osflM202122h10b1
cttcgctctggcgccgccgccgcctcnaggggggggaggcggaggaggggaggtcgaccacttcgtggtggtggacttcgaggcgacgtgcgagaggggcaggcggatctacccgcaggagatcatcgagttccccgcggtgctcgtggacgccgccacgggccgcctcgtgtccgcgttccgcgcctacgtccgcccgcgccaccacccgcggctcaccgacttctgccgcgagctcacggggatcgcccagggcgacgtcgacgccngggtgggcctcgccnaggcgctcctcaggcacgacnagtggctgcctgcggcccgggtcggcgagggc

SEQ ID NO: 24140 - DNA, 487 bp, Oryza sativa
  Clone ID: uC-osflM202122h12b1
tttgtaacgcgtacttacccacaagttaggtgcatgggcatggcaccattcatggggggcgcctcaccaccggtactcacgctggccctgctcgcgtcgtgcggtgcccttctcgccacctccatgctcccggcgcgtgcgacggcgggcagttgcttggacgtcggcgacatggtgatgatggacaggttccgcgcttggcagggagctcacaaccggtcgtacccgagcgcagaagaggcgctgcagcggttcgatgtgtaccgccgcaacgcggagttcatcgacgccgtcaacctgcgcggcgacctcacttaccagctcgccgagaacgagttcgcagacctcaccgaggaggagttcctggccacgtacaccgggtactacgccggcgatggccccgtggacgactcctttatcacgaccggtgccggagacgtcgacgccagcttcttctaccgcgtggacgttcctgccagtgtcgact

SEQ ID NO: 24141 - DNA, 202 bp, Oryza sativa
  Clone ID: uC-osflM202123a01b1
gtttgtttacaacaagttctacgaggccttctccgagggtctcaagcttggcatccaggaggactccaccaacaggaccaagattgctgagctcctgaggtatcactccaccaagagtggtgatgagttgaccagcctcaaggactacagtacccggatgaatgatggccagagtgagatctattacataactggtgagagc

SEQ ID NO: 24142 - DNA, 295 bp, Oryza sativa
  Clone ID: uC-osflM202123a02b1
gttgcttgagacaaggagccacacctggagatctgggggtgaggaacaaacaattttgcctgctgcgtttagttgtgatgttgaaccctactagcttgtgttgatgatgaaccctactagcttgtgttcagagaaaaggacctttttattcatggattgagttagtttggtcgggtgccctgttgataggcagggtgaggtcacgaggtgtacatggtatggtgcgacttgcgtacatctagagttcttactgcttttctaccttttctactaccgttttcacttgccattggcc

SEQ ID NO: 24143 - DNA, 150 bp, Oryza sativa
  Clone ID: uC-osflM202123a03b1
gttgcctgagccgcttcgggatcgggaagcggaggagaggggaaggaagggagagaggcatgcgacccgtccgcgcagcttacctcctttcgtctctgtctctctatccgacgctcctccctatactctaccaataccactacttccctt

SEQ ID NO: 24144 - DNA, 135 bp, Oryza sativa
  Clone ID: uC-osflM202123a04b1
gttatctttatacagatgcgttcctaaaatcccggccggagtgccacttttacgcgcggattctagctccatgccgccggtgagggttgtaagatgcagacagacgcctcccgtacagtagaattgtataggcag

SEQ ID NO: 24145 - DNA, 331 bp, Oryza sativa
  Clone ID: uC-osflM202123a06b1
cgtcgtttcccatctccgacaagcgcctacaacggcggaggtagccctaaccctaggtcggtggatgcgccgatggccgccgccgccgcagcctgcgtagagagccccgacgagggcgtggagatccgggaggtatgggcggggaacctggaggcggagatcgcggcgatcctggacgaggcccaccgggacccgaacgtcgccatggacacggagttcccgggcatcatgggccgcccccccggcggcttccgcaccaccgacgagttcaactactccaacctcgaggcccacgtcaacatgctcaagctgatacagctcgggctcaccc

SEQ ID NO: 24146 - DNA, 349 bp, Oryza sativa
  Clone ID: uC-osflM202123a07b1
tttgtttgattcactttttcaccactcaactacgggggggcaagtaaaagtaaggcggcgtggttcgatgcaccgataggcatcgccttcttatcttgcgtttagagccacaccctagtaccttgagatccgagacgagtggtctctgaacctggaggcgcctatggttggcaatccgggactagatctaccggtgctcttcccacaccatgtacacagcgtttctccgcatggtgtgctgtccagaatgtacattaacaccacttaaagattctctactccaacactctatgcaaccagaacatgctgcaagtgcagcacaatcggactcaccctctgcgaggagggc

SEQ ID NO: 24147 - DNA, 128 bp, Oryza sativa
  Clone ID: uC-osflM202123a08b1
gtttgcttcagtggctacgatctctagcccgggggggctataccaagcactacggtagtctcctaatccaaatactatatgtcctatcgtgtgcgtttctaaaacgaaccttccgtatggcaatcctg

SEQ ID NO: 24148 - DNA, 486 bp, Oryza sativa
  unsure (1)..(486): unsure at all n locations
  Clone ID: uC-osflM202123a11b1
tcggtttttaaccccgtccactcgccgactcgggtgtgctcctcgctcgccggcgccggggcgggagactccggcgagcgcgttgacgtggccatgtcggggacggtgtgcttcccggcgggggagatggcggccgtggcgagggtgtgccgggacggggcggcggcggcgaggctcaagacgggctccctgctcgccatcctcgtggcgagcgccgtcggcatctgcctccccgtggcgctcacggggtgcgttccgcgggaaggccgggtacgcgcgcggcctccttctcgtcaagtgctacgccgccggggtcattctcttcacctcgctcgtgcacgtactacccgacgcgcacgccgngctcgccgacccaccaaccgtactccccaatccccaccaccaagaagtcccccgtcgtcgagcttctccgcgagatgagcctcaagaagcgcgcgcactcagacgacacggaccgggacgacg

SEQ ID NO: 24149 - DNA, 568 bp, Oryza sativa
  unsure (1)..(568): unsure at all n locations
  Clone ID: uC-osflM202123b01b1
gtctcgtcgccgtcggcggaggagccgttccgggggggggtcggctacgacccgcgggaggacgaggcgtacgaggtgtgccgccgcagcctgctccgccacgcctccatccccgtcgacgtccgccccatccggcagccggatctccgcgcggcggggctctactggcgggagcgggggcccaccgagagcaccgagttctccttcacccgcttcctcacaccctacctcgccggctaccgcggctgggcgctcttcgtcgactgcgacttcctctacctcgccgacatcgccggcctcctcgcctgcctcccctgctgcgaccccgaccaccgcttcgcncgtcgcctgcgtcaagcacgagtacgcccccgccgaggcgaccaagatggacggcgccatccagaccgtgtacccgcgcaagaactggtcgtccatggtgctctacaactgcggccaccccaagaacgtcgccgtgctcaccccggacgccgtcagcacccagaccggcgccttccttcaccgattcgcctggctcgatgacgacgagatcggcgagatccccttc

SEQ ID NO: 24150 - DNA, 565 bp, Oryza sativa
  unsure (1)..(565): unsure at all n locations
  Clone ID: uC-osflM202123b02b1
cctcttcccttcctcccgctccggcgaaggcgagggcgcggatcggcgtgatggcgggggcggcaccctctcccccacccgtcgcggcgctggagcagatgagcaggaccaaaatgttcggcggccacaacctccgcttccgccaccacagcgccacgctcggctgccccatgaccttctccgtcttcctcccgccgtcgccggcatccgacctccccgtgctgtactggctctccggcctcacgtgcaacgacgagaacttcgtcaccaaggccggcgcgcagcgcgccgccggcgcccacggcatcgccctcgtcgcccccgacaccttcccacgtgggcttaatatagagggagaggcagacagttgggattttggtgttggtgctggattctatttgaatgcaacaaatgaaaagtggaaaaattggcgcatgtatgactatgttgtgaaggagcttncaaaagttttaagtgacaactttgaacagctgaacacttcacgggcatctatttttggcactcaatgggagggacggtgcactaacaatctacttaaagacac

SEQ ID NO: 24151 - DNA, 586 bp, Oryza sativa
  unsure (1)..(586): unsure at all n locations
  Clone ID: uC-osflM202123b03b1
cttgaagctacttggcgccgccaccgcggtgttccgccccgtcgagctcgcggggctggccggcgcccttgccaccttgccgtccagctcgcagagctgctcggcgctgcagcggcgttccatcccgtcggcctcgcggaaccagccggcgccatcgccacctttctgtctggctgctcagcggcgccgcccccgcggtattgcaccccgtcgagctcgcgcagctggccggcgccattgccaccttgccgtccagctcgcagaactgctcggcgctgcagcggcgttccatcccgtcgagctcgcggaaccagccggcgccatcgccaccttgctgtccggttgctcagctttcctctcctcttcagtgctgcttggagattaggatcacagatgtttgagcaagcagtaaatcgacagaaggtgctcactttctggacttaatttgtttttgtcatagatcacgaacacactgagagatataaatacgagggttcgtatgtaagttgtatcttaccaactatntaccagtttgtcagtgggtgctaatctctgttaaaagaaaataaatgatttcactttgcag

SEQ ID NO: 24152 - DNA, 270 bp, Oryza sativa
  unsure (1)..(270): unsure at all n locations
  Clone ID: uC-osflM202123b04b1
gttatctttgtacccgcacgcgcagcaccagttcggccgggattgatcattgtggggggcaatctacttcatattcgggaactcgcaggttgttcttcagaactgcttgctccagcctcgtaagccgatggacaaccaggtgaacatcataacggcgcangggctgcgggagaataggtcgcagggagggactgttatccacaactgcacggtggcgccgcacccggacctggagaagttcacggacaaggtgaagacctaccttgcgct

SEQ ID NO: 24153 - DNA, 459 bp, Oryza sativa
  Clone ID: uC-osflM202123b06b1
cttgtttaatcgacctcatttcattcgattcatcgatcgctcggcgcggcttagggtttttggcggcagcgatggcgtcggagaagcacttcaagtacgtcatcctcggcggcggcgtcgcagcgggatatgcggcacgggagttcgccaagcagggtgttaagccaggggagctcgccatcatctccaaggaggccgtggctccttatgagcgccctgctctcagcaagggatacctctttcctcagaatgctgcaagactcccaggatttcatgtgtgtgtcggcagtggaggagagaggcttttgcccgaatggtactcagagaaaggcattgagttgatcctgagcactgaaattgtcaaagctgatcttgccttcaagactttgactagtgcagttggagcaacctttacatatgagattttgatcattgcaactggctcctcagtcatcaagc

SEQ ID NO: 24154 - DNA, 401 bp, Oryza sativa
  Clone ID: uC-osflM202123b07b1
cttagctctcacagctcactgcatcaatgggggcggccaccatggcgctctcctccccggtgatggcccgcgcggcgccgtcgacctcctccgcgctcttcggcgaggcgcggatcaccatgcgcaagaccgccgcgaagcccaagccggcggcgtcgtcggggagcccgtggtacggcgccgaccgcgtcctctacctcggcccgctctccggcgagccgccgagctacctcaccggcgagttcccgggcgactacgggtgggacaccggggggctctccgccgacccgagacgttcgccaagaaccgggagctggaggtgatccactcccggggggcgatgctgggcgcgctcggctgcgtcttcccggagctcctcgcccggaacggcgtcaagttcg

SEQ ID NO: 24155 - DNA, 416 bp, Oryza sativa
  unsure (1)..(416): unsure at all n locations
  Clone ID: uC-osflM202123b09b1
tcttaggttcatcgtgatgcagctgagcagggtgagcagcagaataagcaaaagggggaagttgctcgacaaattgctttggctgatgaagctcgccgcaaggctgaagaacagaggaaggcccagttagaaagaaggaagcaagaggacgagctaaagcaagtaatgcaacaggagcaacactttgagcgtgtcaaggagcaatggaaaacctcaagtaacactcctggcaagagaaaagataggtctaagcatgaagatgaagaggggggaggtgaaaagaggaggaagaagggtggttgaaagnggaaaggattcacaagacaaaggcacactantgggaagaggaagaagacgaatatatagatgaaccataagcagaagatgattatgcagacacggcgaggagtaaccat

SEQ ID NO: 24156 - DNA, 428 bp, Oryza sativa
  Clone ID: uC-osflM202123b12b1
ttggtttccccccctatctttgtcttcatgtgcagaggctcaaagatctctctccctcacctatattacctgcaccaacaccactgaccactccctcctcctgttcttgctccttcctcccagtgtctctcaagagcggtgcagggttcacaaggcaggagaaaatgggggagatcaccaatgtcatggagtaccaggccatcgcgaagcagaagcttccgaagatgatctacgactactacgcctctggagctgaggatgagtggactctcaaggagaacagggaggcattctccaggatcttgtttcgtccccgcatcctgatcgatgtctcaaagatcgacatgtccgcaactgttcttgggttcaagatatcaatgcccataatgattgctcccagtgccatgcagaagatggctcaccctgac

SEQ ID NO: 24157 - DNA, 326 bp, Oryza sativa
  Clone ID: uC-osflM202123c01b1
ctcaccccgccgcacgccgccgcatcgatcggggccggaccctaaccctaaaccctagcccccccacctcgccttccaccccccacgctcccatggcggggcgcggaggctacgcgtagccacatcgatcgaacaccctgtatggattgaggtgggtttcccgaggcatgggtacaaaccctagcctgcacgagctggcggcgggggcggcgccgcggggacgcgtggtgcgtatcctcgtgcgcgacgccgacgccaccgactcgtcctccagcgaggacgaggcggttgcggtggcgcaacctcggccgcggcggaggggtaag

SEQ ID NO: 24158 - DNA, 440 bp, Oryza sativa
  Clone ID: uC-osflM202123c03b1
gtctctctctctctccctttctcctctcctccaaggggatggcaaaggagaaataacagctagcgggcttggggaagggaaaacagcaagtgggagatcggcagggagaggtgaattactacttgagtagaagtggtacaagaagagtcgtcgtctacctgtgagcgaattatttcgaggttgtgcgttgcgatgatgggaggtggtctggtgatggaccagggcatgatgttccccggcgtgcacaacttcgtggatctcctgcagcagaacggcggcgacaagaaccttggcttcggcgcgctcgtgccgcagacgtcgtcgggggagcagtgcgtgatgggggaaggcgaacttcgggacccgccgccggagagctttccggacgccggtgaggacgacagcgacgacgacgtggaggacatcgaggagctggagcg

SEQ ID NO: 24159 - DNA, 487 bp, Oryza sativa
  Clone ID: uC-osflM202123c04b1
gttgggctactcgttgagggtgggtttcagaggtggggggggtcgcctccatgggggaggacaagggaggcctcgatgccgtcctcaaggagtcggtcgacttggagaacatcccgatcgaagaagtattccagaatttgaaatgctgccgacaggggctcacttccgaagaggcgcagctgcgcctgcaactttttggtccgaacaagctcgaggagaaggaggagagcaaattcctcaagttcttggggttcatgtggaatccgctgtcatgggtcatggaggctgcagctatcatggccattgcattagccaatggtggggggaagccaccagattggcaggactttgttggtatcatcacactgctacttatcaactcaactatcagtttcattgaggaaaacaatgctggcaatgctgctgctgcgctcatggcgcgtcttgcgccaaaagcccaggtgctccgaaatggtagttggactga

SEQ ID NO: 24160 - DNA, 505 bp, Oryza sativa
  Clone ID: uC-osflM202123c05b1
gttggatgcaaacagaatcaagatcaagaaagccgtgcggggcgtgaaagttgaagtcactcaccggggaaatgtgaggcggaagtatcgcatttcagggctgacaacacaaccaactcatgaactgattttcccaatcgatgaccaaatgaacatgaaatctgtcgtagagtatttcaaggaaatgtatggcttcaccattcagcatccccatcttccctgccttcaggtgggaaaccaaaagaaggcaaactatctaccaatggaggcctgtaagattgttgagggtcagagatatacaaagaggttgaatgaaaagcagatcacatcattactcaaggttacttgccgcaggcctagagaacaggagatggatattctacagttcaacaaaatggatatgagcaagacccttatgcaaaagaatttggaatcaacattagtgagaagctaacctcagttgaagctcgggtccttcctgcaccttggctgaaatatcatgata

SEQ ID NO: 24161 - DNA, 494 bp, Oryza sativa
  Clone ID: uC-osflM202123c07b1
cgccgccgccgccactttatgctcgtctgcgtgccggcgacgaggcctctcgctcctccggcagcgcccgccccgccccttcccccctctcccgcgcccgcgcagcagcccaccccgcgtcgcctccctccgccccctctccgccgcggcgatgggggagaactccgccgccgccgccgggaaggggaaggaagcgaaggggaaggcgacgacctcggcctcggcctcggcaccgaacgtcgagcccgacgtggcctaccttgaggcggtgacgcagaagcggatccggcagttcgaggagatccaggccaagcaggccctcgagcgcctcaacatcggaggcgagcccatcaggataactttgccagatggtgcagtcaaggacggaaagaaatggatctcaacccctatggatattgctaaggagatatcaagtggattagcaaatagctgcttgatagctcaagtgaatgggacactgtgggatatgacga

SEQ ID NO: 24162 - DNA, 569 bp, Oryza sativa
  Clone ID: uC-osflM202123c08b1
attggatctgagcacttgcttcttggactggtcggtgagggtgaaggtgtagcagcccgtgtgctcgaaagccttggagccgatcctagcaatattcgcacgcaggttatccgaatgattggcgagactacagaagctgttggtgcaggagttggaggagggagtagtggcaataaaatgccaacacttgaggagtacggaactaatttaacaaaattagcagaggagggaaagctagatcctgttgttggaaggcaacctcagattgagcgtgtcgtacaaattctgggcagacgaacaaagaacaacccatgcttaattggagagcctggtgttggaaagacagcaattgcagaaggccttgctcaacgcatttctactggtgatgtgcctgaaacaattgaaggaaagaaggtcattacccttgatatgggacttcttgttgctggtacaaaataccgtggagaatttgaagaaagattaaagaagctgatggaagaaatcaagcagagtgatgagataatactatttattgatgaagtccacactctcataggagcaggagcagc

SEQ ID NO: 24163 - DNA, 477 bp, Oryza sativa
  Clone ID: uC-osflM202123c10b1
tcgatcgaacgtcatgttttagtcggaatactggtgctctaaggatggaggttctctgtgataattgcccagctggtggtgttggcatttataacccagggttctggggcatgaacatagaagatggaaagatctacaatttagtgatgtatgttaaatcaccagaaactgtggagttgacagtttccttaacaagttctgatgggtcgcaaaatttggcttcaactaccataccggtttctggtgcatcgaattggacaaaactggagcagaagttggttgctcaaggaacaaatagaacctcaaggcttcaaataacaactaacaagaagggagttgtatggtttgatcaagtatcgctcatgcctgcagacacttacaagggacatggttttcgcacagaacttatatctatgatgttggacttaaaaccacgattcttgagattccctggaggttgctttgttgaaggggaat

SEQ ID NO: 24164 - DNA, 385 bp, Oryza sativa
  Clone ID: uC-osflM202123c12b1
tcgattgctcctgaccacaggaattggagctggggggagtttatactgtctcctagtcgtttctctggaggctgctgtcagttatgcttttggagttgctttcagttgcttgtatcttcaacttctctatcggcacacagataatttgtcaaagaaagatgttccagaaatttttatgaagaagaaagtgaaaagaatcggcataagaagcgaggatttgaagaatacaatagagaaggtgttgggtggtatttcagtagctctttcgtctccaaggcttgtgatacccgctatattttttggattgtcaaccttgtcagatcactttcaaaatagcattttaaattttgagcttgttccaggaatgatgggtttctttgcatac

SEQ ID NO: 24165 - DNA, 320 bp, Oryza sativa
  Clone ID: uC-osflM202123d02b1
cttaattctccaccgaatcgaagcccccacacacgctgagctggcgcgggaggcgggcgacgcgagcgcccggaagcgcaaggcggcggacggcggcggggagggcgacgccgcggcgacggtcccggaggaggcggtgatgggggaggcggcggcggcagccgcggcccccgagccggtcgtctaggggggaggaggggggggggattttttttattctaaccctttcggctgtgtgggagggggtgtgtgatggttctttttcttttttttgttcttgtttttttttttttatttactttttatttttttgtcttttg

SEQ ID NO: 24166 - DNA, 449 bp, Oryza sativa
  Clone ID: uC-osflM202123d03b1
gttaatatcaagacctatggtgagtcattggccgaggggctgtggatgattggggggcgcccggttgctgacacctttggccgtgtcaaccgtgtggaacctgtcagccttgaggagcttggacgtcccaggattgacgttgttatcaactgctcgggtgtcttcagagatcttttcatcaaccagatgaatctactggaccgggcagtgaagatggttgccgaactggatgagccagaagagatgaactacttgcgtaagcatgcacaagagcaggcacgggaacttggcgtttcattaagagaggcggcaacaagggtgttctcaaatgcatcaggctcttactcatcgaatgtgaacttggcagtggagaatgcatcatggactgatgagaagcagctccaagacatgtacctgagtcgcaagtcttttgcatttgattgtgatgc

SEQ ID NO: 24167 - DNA, 156 bp, Oryza sativa
  Clone ID: uC-osflM202123d04b1
tttgcttcgaagcttctctcctctctctcaactccggggagaggaggaggcggcggtggggcgttcgtcgggagagagaccagggccggggggctagggttcggccgttcagagaggcggcggctgaggaggaggaggaggaggaggagggggtga

SEQ ID NO: 24168 - DNA, 514 bp, Oryza sativa
  Clone ID: uC-osflM202123d08b1
ttataaaggctgctgctgctctgaaggggtcggggcaccgccgtgctaccaatgggagcgctagactggacgcacagcagaagaagctcaaccttccagtccttcctacaaccacaattggttcattcccacagactgtggagctcaggagagtccgccgtgagtacaaggcaaaaaagatctctgaggaggagtacatcagtgccatcaaggaggaaatcagcaaggttgttaagatccaggaagagcttgacatcgatgtccttgttcacggcgagcctgagagaaacgatatggttgagtacttcggtgagcagctttctggttttgcattcactgccaacggatgggtgcaatcttatggatcacggtgtgtcaagccaccaattatctatggtgatgtgagccgccccaaccccatgactgtgttctggtccaagttggcgcagagcatgacctctcgccccatgaagggaatgttgactggtcccgtcacaatccttaactggtcttt

SEQ ID NO: 24169 - DNA, 463 bp, Oryza sativa
  Clone ID: uC-osflM202123d09b1
gtacaaggaattcccctatggctggtgggggggggttgttggccacttggagggatgtgatggaagtgagcacttttgtcggtgtcatcttagtgacactgttgttctggagttcaaccaatacacacctggttcaagatggaggcaggcgctggtgaaccggaaggaccacagggaagagggcaatgagggcgacggtttctactgtggaatcaggaagctccgcagcaaggatgagatctcaaagtggagacagttgtggccaacagacattcttgagtagcaaggacagagattattattccactgttgttattcatcaagttgccaaattgatgctctccaattgctcattctgtattctgaaacctgacgaaaacgccacccatctactccactcaagttgtatacacaaaggattggaacatggggtgacaaaatttggtagcttgggacacaattg

SEQ ID NO: 24170 - DNA, 531 bp, Oryza sativa
  Clone ID: uC-osflM202123d10b1
tcggttctccacatatcttcagattcctgaggcgatggtcagactcatcattgggagatacacgcgagaagctggtgtacgtaatcttgagcggaacctagctgcattggcccgtgcagctgcagtcaaggttgcggagcaagatagtgcgcttagacttggcaaggaaatacaaccaattactacaactctactggattctaggcttgctgatggtggtgaagttgaaatggaagttattcctatgggccaggacatatcaaatacttatgagaatccatcacccatgattgttgatgaggctatgctagaaaaagtgcttgggcctccaagatttgatgatagcgaagctgcagatcgtgtggcgagcccaggagtgtcagttgggcttgtttggacttcatttggtggggaggtacaatttgtcgaggctacagcgatggtgggtaaaggtgatttgcatctgacagggcaacttggtgacgtaattaaggagtcagcacagttagctctgacatgggtgagagcaag

SEQ ID NO: 24171 - DNA, 426 bp, Oryza sativa
  Clone ID: uC-osflM202123d11b1
tcggtttcctgataactacaagtatttcataggtgttcaaaagtgccttggtctatactcagagaatggtcagtattccactgatgatgttgaccgattatgcgaattgtatagctcacttaaagaagaatatggttggtcatctgctgttaagcgcataccccttgatttcctggaaggagagaaatttcaggaggcagcagataattatgtcagacccctattaaccaagggagtaccatcactattttctgatcttagcccattgtacgagcaacctggcaaggcaaacatattggaggaattgtttcttaagctagaacgttcaattaggacttcaggatgcttcccaggaagttcgcatacggaacctccatccacactcctgtggactcttgttttgatctctcagcactatgacagaag

SEQ ID NO: 24172 - DNA, 436 bp, Oryza sativa
  unsure (1)..(436): unsure at all n locations
  Clone ID: uC-osflM202123d12b1
tcgtttagctgaacaccgcatcagcagcagcgggcaggtaatcttgcacgtacgcacaccgtggcccggggcgagatggcgcagtcgatgctggtgtcgggagccaatggcacggtggccgccgcgagcaccagcaggctgcagcccgtgcggccgacgccgttctcgcggctcgtgctgtcgcagccgtcgtcgtcgctggggcgcgcggtgtccgtcaagacggtggcgctgttcggcaggtccaagaccaaggccgcgcccgcaagaaaggctgagccgaagccaaagttcaagaccgaggacggcatcttcggcacgtccggtgggatcggtttcaccaaggagaacgagctgttcgtcnggcgtgtcgccatgctcgggtttgccgcgtcgatcctgggtgaggccatcaccgggaagggaatcctggcgc

SEQ ID NO: 24173 - DNA, 101 bp, Oryza sativa
  Clone ID: uC-osflM202123e01b1
atcagtttaggcacacggttttttttctatcccagtctattggttcatttaattgggatggcatgtcatctcttaagggatattcataattcaccgctgtt

SEQ ID NO: 24174 - DNA, 463 bp, Oryza sativa
  unsure (1)..(463): unsure at all n locations
  Clone ID: uC-osflM202123e02b1
aaccatgagtgggtaaaacagtaatttgactgaacactgctgcttctttatgtctatattatacatcataatggatctcacagtagcctatcaaatggaatcaatatcaccaggactacagtgagatacagaagcagcaatgctccagctggcccacaaaggccaacctgatctttttcttcagtactgtagtgcatacattacaagttaccctaaaacaagagaaatgaagcatggaaatactcttggaattattccttggattaaattctaggcttacaatgttttccctattcggtggtcgtggcaactctagatcttctgcttgagcacttgccggagctggaccttctggctctccatccgtgcctccatgagcttggatttcaggctgtgcttctgggatgtccgtgggtactccatgcagcccttgaagccccngttgaattgcatgctcattgaa

SEQ ID NO: 24175 - DNA, 422 bp, Oryza sativa
  Clone ID: uC-osflM202123e03b1
atccgtcctagcgagcgagagagagggaagggtggcgacttgcgactcgcgagcggggagatggcgaaggacgtggagatggcggtgcggaacggagacggcggcggcggcggcggctactacgccacccacccgcacggcggcgccggcggcgaggacgtcgacgacgacggcaagcagcggcgaaccggtaacgtatggacggcgagcgcgcacatcatcacggcggtgatcggctccggcgtgctctctctcgcatgggcaacggcgcagctcggctgggtggtcgggccggtgactctgatgctcttcgccctcatcacgtactacacctctgggctcctcgccgactgctaccgcactggcgatccggtcagcggcaagcgcaactacacctacatggatgccgttgcggcctactt

SEQ ID NO: 24176 - DNA, 473 bp, Oryza sativa
  unsure (1)..(473): unsure at all n locations
  Clone ID: uC-osflM202123e06b1
ataagatagaaattaaaaagaaaatcacggcgcgggagcttgcagagacagcagtggtgagagttggtgccgccgcggcggtgctcgtgctggcggcggcggcggcggccatggccgccgagccgcccaccgatgacggcgcggtccgggtggcggcggggctgacgaagtgcgtgtccgggtgcggtagcaaggtgacctcctgcttgctcggctgctcngcngcggcgnctgncgccgccgccgccgcgacggcgatgccgttctgcgtcatcggctgcaccagcgacgtcttgtcctgcgccaccggctgctccacctcgctctgattaagtactaatgaagtaattaaccgcgctaattaataataaatcgcacctacgtatgccacatgtggactcgcttgactaattaaatactgccatgcgaatgcgattagtgggatatgaaaagaggaaatgtaagaactcatg

SEQ ID NO: 24177 - DNA, 492 bp, Oryza sativa
  unsure (1)..(492): unsure at all n locations
  Clone ID: uC-osflM202123e07b1
ctcgtcgtccccgatcccctcctcctctccggtcgtctccactcctcgagatctggcaaggtcagggagccagcaaattcacccgcgattccgcgcgccgccgccgtcgccgccgccgacgtcgccgcctgggtgggggaggagatggccggcctcgggaaggccttctacgcggtagggttctggatccgggagaccggccaggccctcgaccgcctcggctgccgcctccaggggaactactacttccacgagcagctctcaaggcatcgcacacttatgaacatctttgacaaaacccctcatgttcacagagatgcatttgttgccccaagtgcatctctcattggtgatattcaagttggacaaggagcttcaatttggtatggatgcgtcttaagaggggatgcanacaacgttcaaattggatctgggaccaatatacaagacaattctcttgtccatgtggcaaaatctaatcttagtggaaaa

SEQ ID NO: 24178 - DNA, 524 bp, Oryza sativa
  Clone ID: uC-osflM202123e08b1
tttagagtggagatattgatgaagcttttagggggataagggagctgggccttgcatttttccatcatgaggttgttaaacgcgctctcaccttgagcatggagaatctgtcatcacagccattaatcctgaagctgttgaaggaatcaactgcaggttgcctgatcagttctaatcaaatgtctaagggtttttgtcggctagcagagagtattgatgatctgagccttgatattccttctgccaagattctctttgacaagctggttctgactgctacatctgaaggatggcttgatgcttcattcactacatcttctgcccctaatgaagatatgcgaaatgcaagtggtgaaaagatcaagcatttcaaagaagaatctggacacataatccaagagtattttctctcagatgatgtcccagaactcattataagccttcaagagctttctgcctcagagtacaatcctatcttcctcaagaagcttatcaccctcgctatggacagaaagaatagggag

SEQ ID NO: 24179 - DNA, 331 bp, Oryza sativa
  Clone ID: uC-osflM202123e10b1
tcggtttggaggaacaaaccctactcactcccggatacctgctgttgccactaggccactatcatggaatcgggcaagcatcacgcatgcagctcatgcgacacgaagactacgaccacgaacgcgggagctcctgtgtggaacgacaaccaggcgctgacagcggggcccagggggcacaggctccttgaggactatcagctgatccagaaggtgatgcacttggtccggtagcgcattcggagagcgcgtggtccacacctctggggccttcgccaagggctattgagagagcacccacaacgtaacagacaatacctgtaccggctaa

SEQ ID NO: 24180 - DNA, 309 bp, Oryza sativa
  Clone ID: uC-osflM202123e11b1
tcggtaataactggtcctatggttgtggaagatgttgtttatgaaaataatgaggaagaccaaagttctatgactgaaaagatgttccggcgccttatatttaaaagaaattctggcttagtgcaatctgaagcattgcttgtcaaagattccaccagtgacaaggcagatgaaaacaacaaaaaatcaccttcagcatccaaaaaaaggaggaaccagaaaaaaggtccctcaggatccaagaccgttctgaggattgatcatagctaccttggtagctcttatcacagcagtatcatatctggcttt

SEQ ID NO: 24181 - DNA, 228 bp, Oryza sativa
  Clone ID: uC-osflM202123f01b1
gttgttatgcaggtaatcgcatcatgagccacaggcgaaccatcaataaaggggtctactacatcgccgacattggtagacgatcggacacgtaccgagtatcaacgggtatttatgtaataaatgtcgtgcaactcattccattctctccattagtaagagcaccaggggaaaaaaaaataatccggtgccatctaacatttctagttcaaaatgtcgatccttggc

SEQ ID NO: 24182 - DNA, 482 bp, Oryza sativa
  unsure (1)..(482): unsure at all n locations
  Clone ID: uC-osflM202123f02b1
ggatgaagtcggccgtgcaggcgcggaacgcgtgggcggcggcgcactcggcgtacgccatgtcgctgcgggacacgggcgccgcgctctccgagttcgcgcacggggagggcgtgccgccgccgccgccgccgccccaaccgccgccgctcccggagttctcgccgtcgcccgcgaagatccaccggtccaagagcatgcccctgcccccgcagaccaagggccccgcggtgctccacagcgactcgattagggaggatgacgaggaggaggcggagatagaggaggaagaggacgaggacgagcatctcgatgaccggcggcgganggctgcgtcaccggccgcaggtaccgccgctcgtgtcttcgcccgcaccgggaacgccggtgacgcctcagncgncgtcgtcgncggcggcggcttcaccggactcgaagcccggagttgacacgtgggactatttcttctccatggacgaggg

SEQ ID NO: 24183 - DNA, 486 bp, Oryza sativa
  unsure (1)..(486): unsure at all n locations
  Clone ID: uC-osflM202123f04b1
ctttcgtaccaaaaaccgaatcgaacgccgcgtgcgtgagagagagagagagagagagagagagaaaccaccccaaaattagcgaggcgaggaggaggaggcggaggaggggagccgcaggaatggcggcgatgcagagctggcgcaaggcgtacggcgcgctcaaggactccaccaccgtcagcctcgccaacctcaactccgacttcaaggatctggatgtggcgatcgtgaaggcgactaaccacgtggagtgccctcccaaggagcgccacctgcgcaagattgttgccgcgacgtccatcgctcggcctcgggcagacgtcgcctattgtattcacgcgctttcccgccggcttggaaaaacacgcaattggattgtagcctttgaaacacttgtagtgatccatagacttcttcgagagggtgaccctacttttcgagaagagcttcttnaatttgcacagagggggcgtattttgcagc

SEQ ID NO: 24184 - DNA, 476 bp, Oryza sativa
  Clone ID: uC-osflM202123f05b1
aagtgtcatcgagtgtggttgagagagtttgagacttgaggctgcgctgcgctgaacctgtcgttcggtgggaggcaagaagaaggtggtggtggtggtgcagcaatgccgcggcgcgcgagggcgaggggcggcggcggcggcggcggggaggaggtgaaggtggaggatgacttcatcgactcggtccctcatcctcgccgactggaagcagatctccgggcccatcccgccgtgcgtcgccaccgccctcccttacctccgcatcctcgagctccccggcaaccgcctcaccggcgagatcccgcgctccatcggcagcctcttccgcctcaccgtgctcaaccttgccgacaacctcatcgtcggcgaaatcccaagctccatcacctcgctcgcgtcgctgaagcacctcgacctcaccaacaaccagcttaccggcgggatccccgacgacgtgggcgaccttaccatgc

SEQ ID NO: 24185 - DNA, 241 bp, Oryza sativa
  Clone ID: uC-osflM202123f06b1
catctttgttttgggctatgttgatgatatatcaatatataatatgctatatatttttattttacagtttggttatgtaccatctcaatggcctctgctcttaacacatatgtaataatctcttccctccctctccgaccggttttattgtaagagtactacaattatcgttgggtgaggatatgtgaaaacaaagctccggctatatacacacaagatatgtatctagagcatatctgat

SEQ ID NO: 24186 - DNA, 543 bp, Oryza sativa
  unsure (1)..(543): unsure at all n locations
  Clone ID: uC-osflM202123f08b1
gtctcctttcccctttcccgcaaggctcccacgctgacgaaatcgacgccgatttcccgaaatccccaatccccaatccagaatccactcgcttttcgataaaatttctgttgattgcgtcgaaaccttcgcaatcctctcgcacgcatcacgccttgcgcgccgcatctcgtagccctgaattttgatttgattctgctgcctccggcgcgcccctgattggcgaggagggtggtggtggttgtggtgggtgcggccatggcggcttcgacggcggcggcggtggcaccggactggtggaacgacgtgaacaactcgccgatgtggcaggaccgctccttccacgccctcgccacgctatacggcgccgtctcgttcgtcgcgctggtccaattgatcagaatcgaatgtagagtacctgagtacggatggacgacacagaaggtgttccatttcatgaactttatggtgaatggagtgcggtcaatcgtgtttgtgctccgacgagatngtgcacttgtgcagnctgaggtatttcaacat

SEQ ID NO: 24187 - DNA, 466 bp, Oryza sativa
  unsure (1)..(466): unsure at all n locations
  Clone ID: uC-osflM202123f10b1
tcgctgggctccggtatctggaggcggtgaacggtattgtgcgcaaggacagcgtcgcgagcctctcgtcgacgcagaactccgatggcgggccgcctccgccggcgccgacttcgggtggtggcggcggcggcggttctccgaccgcgctctcccccacctctacttgctcgaatgatgccgcgagatcggcgtttggtgtggcggcgccgccaccgcttgtcgatgtgttcagcaatgccgctgctccggctcctgtccctgtgaagccacaggagattgctgctgaagtgagggctccaccgcaggcgaatccacagccggaagcagcgaggtaccggcagccgctgtcgcagctaccaccgttgccgcctgtgttcatgaacgatcatagggaggccatgcaaggtctgaatcaggcgatgccaggaaatggnggaaggctggaagactgcaatatgtgctt

SEQ ID NO: 24188 - DNA, 516 bp, Oryza sativa
  unsure (1)..(516): unsure at all n locations
  Clone ID: uC-osflM202123f11b1
tcgcatcactccatttctgagctcttctagtttgagtgagagagcagcagaagggagtagtgcaagatgccgatccgcaacatcgccgtggggagccaccaggaggtgtaccacccgggtgcactcaaggcggcgttggccgagttcatctccaccctcatcttcgtcttcgccggccagggctccggcatggccttcagcaagctgaccggcggcggagcgacgacccccgccgggctgatcgcggcggcggtggcccacgccttcgccctgttcgtggcggtgtccgtcggcgccaacatctccggcggccacgtgaacccggccgtgaccttcggcgccttcgtcggcggcaacatcaccctgttccgcggcctcctctactggatcgcccagctcctgggctccaccgtggcgtgcttcctcctccgcttctccaccggcgggctcgccaccggcaccttcggcctgaccggcgtctncgtgtgggaggccctggtgctggagatcgtcatg

SEQ ID NO: 24189 - DNA, 506 bp, Oryza sativa
  Clone ID: uC-osflM202123f12b1
tcggttagctcatcgtcgataccaatggcgactaccggggccacatcgacgctgctgctgctgctgctgctggtttcggcaacatgggcggcatcggcgccgacgacgagtcgggcgaggaacgtgataacacacgtgaaggggttccaagggaggctgccgttccacctggagacggggtatgtggaggtggacaacaccgataccgttgagctcttctactacttcatccagtcggagcgcagccccgccgatgaccccctcatcctctggatcaccggcggccccggctgctccgccctctccggcctcctcttcgagattggccctctcaagtttgacgtagctgggtacacggaagggttccctcaattgttctacttccaagattcctggaccaaagtgagcaacgtgatatttctggacgcgccggtggggacggggttctcctacgcccgtgaggaacaagggtacaacgtcaccctcacacagacgggacagcagct

SEQ ID NO: 24190 - DNA, 552 bp, Oryza sativa
  unsure (1)..(552): unsure at all n locations
  Clone ID: uC-osflM202123g01b1
gttagtttatcctctttccccttccaccgccacggggccgcaattcgccttcgctgcgggcatctgcagcagcagaatcatgggctgaaatcgaaccactgcgcgacaagggtgccaaggataactttattgtgctgctgaaggaagacatcttattgacctgctagttctgtagatgatttttggagtgctataaatatcgaggcgcgagttcggactgcaagatacaacacaagagtgagaaaagaaaggctttagctgagttacaggatggaacaaggtcagggagatagatactggtgccaccactgcgaggaagtgatcgaacctgtggagcctgatatgaagtgtcctagctgtgacagcgggttcgtggaagagatggggtctgcaggctttgagccatcgaccaacttgaggtctgatcgtatctccctctgnggcaccactgctgctcggatgatgggaggctcatcgcggcgagcaaggcggctccgaaggcagatcatggaggatgatgacgacgacgatgacgatgaggatgatgaagat

SEQ ID NO: 24191 - DNA, 425 bp, Oryza sativa
  Clone ID: uC-osflM202123g02b1
cttattttcaactcagggcattggtggactcccaggagattatttgatatgggctgctattttgaggctggaggtttgcttaaactaggtacatccattaattctgctttcaaaatggcacttgaaacatgggcttcatgggtgaaggaaaaggtggatttaaaacgaacacatgtctttttccgcacgtatgagccatctcattggagtggttcaaatcaaaaggtatgtgaagtaacagaatttcctacagctgaggccaaaggagatgacagaagtgaatttggagatatactcgctggggttgtggtgaacatgagcgttcctgcaactatcttgaatgtgactttgatgggggccttcaaaagtgatgctcatatcggtatatggagtcattcttcaaccatacttgattgcagtcattg

SEQ ID NO: 24192 - DNA, 334 bp, Oryza sativa
  unsure (1)..(334): unsure at all n locations
  Clone ID: uC-osflM202123g04b1
cttacgcgtgggttcagaggcatcttcagtgggaggggctacactccttgatctgtgctctggttgtggcggtatgtctaccgggctctgtttgggtgcggcacttgctggactcaatcttgaaacgcgatgggctgttgatttcaatagttttgcgtgcgagagtctcaagtataatcatccaagaactgaggtccggaatgaaaaggcggatgagtttcttgctcttcttaaaggatggcataacctttgtgatgaatatgtcaagaaagatattgatttcagttcagctggtgcctcanagaacgaagaggatgatgatgagcctcttgag

SEQ ID NO: 24193 - DNA, 571 bp, Oryza sativa
  unsure (1)..(571): unsure at all n locations
  Clone ID: uC-osflM202123g05b1
tgtagttttaggccatctgagggcctttgaatgggtctcggcctccttcatttttcatagcatttgtgtagtgtgtgcaaatccatcatcgcatcttcatatctgaagaaatgaaggtgaccactcagctcaagcccatggcctcctcgtcgacgtcgccgtcgccgtcgcggctgccgcggagcgcgagcggcaaggcgcccacctcgccgccgtccagctccaacgcctcgcgccgccaccaccagcagccgccgcgggcctcggcgtcgacgcccgccaccccggcgccgtcgcgccaccacctcaggtcgctgtccatcagctgcatgacgatcaggaccgacgacgactcgccgccgncggccgncacccacaaggacaaggcggcgacggccaagccgctgtcctactactcgtcgatgctgtcgccgaggaagctcatgcagcgcgcgtcccgcgcgttccgccgcagcaagtcgtctcgccggaggaagagcaaggacgacgtcatcctcggcgtcngcggcggcggcggcgacatctcggcctcggtcaacggcaaggggct

SEQ ID NO: 24194 - DNA, 430 bp, Oryza sativa
  unsure (1)..(430): unsure at all n locations
  Clone ID: uC-osflM202123g06b1
gttcatgctgatagcaggaaacgacgccccattaggcgccttcctctaggtgcatggaagaagctaacttttgaggtgggcgcgtccgaaggaaaggatatagatacagctgttgtttcagaaagggtgcagaattagcctccattgatgggaaaaaaaagggcaccgtcaatcctgctggtgctcagaggacaagagcttcctatatgaaatagaagctacaatttcacgccatcggtcttcactggcaatggacgcgtttgaatcaagtccttagttatgtgctctgctcttgttctgtgattcttgttcacgcgaaggtcactgactttacggtattggagttggagtagaagatcagctgctccatcatcgacgatggcctgatccacaaagatgaattntggtgctgatactttcagggagatac

SEQ ID NO: 24195 - DNA, 458 bp, Oryza sativa
  Clone ID: uC-osflM202123g07b1
atcgaatccaatccgaattccccccccccccgcagctctcctcccctcctccagaaatcctaacccccactccccatcggagagagatcgagaggtggttgccatggcgaagtgctcctcctccgacgactgggtcatgctcgactccgacaaccccgcggactcctccgacgacgacgactacgtcctcgcgctctcttcctcctgcaacacccccgcctgctccgacgaagaggaggacgacgacgacaaggtggggagcgacgctgacggcgacgacctctacggcggagaactcgaggaggaggactcgccgcgcccgccgccgccgaggccgctctcgggcctcttctaccacaccgcctccgacaaccagcccgggtacctcgccttcgacgcgatccgcagcgccaagcacctcatccccgacccgcgcttctccgccttcccggagcacg

SEQ ID NO: 24196 - DNA, 465 bp, Oryza sativa
  Clone ID: uC-osflM202123g08b1
gttcgcgaaggacgtgccgcggacggcggagaacgtccgcgcgctctgcaccggcgagaagggcgtgggcaagagcggcaagccgctgcactacaaggggagcaccttccaccgcgtgatcccggagttcatgtgccagggcggcgacttcacccgcggcaacggcacgggaggggagtcgatctacggcgagaagttcgccgacgaggtgttcaagttcaagcacgacagccccggcatcctgtccatggcgaacgccgggcccaacactaacgggtcccagttcttcatctgcaccgtgccctgcagctggctggacgggaagcacgtcgtgttcgggcgcgtcgtcgagggcatggacgtcgtcaaggccatcgagaaggtgggatcccgcggcgggagcaccgccaagccggtcgtcatcgccgactgcggccagctctcctagatctgtgctgatcccct

SEQ ID NO: 24197 - DNA, 340 bp, Oryza sativa
  Clone ID: uC-osflM202123g10b1
tcgaatttaaggaggatcctgccaccaacaagaggtgcgtagacagttgcatcgtcgatgctaaggaactcaatggacacttagcgaaaggtggcgcttctagtgttcccgcacgtgcatgattgtgtcgagctgcacatctgttccttcatccatgatcgagggacgatacccattaatggttcccacccagcggtcggccttgtattacattgtcctgttgttccttttgcctcttcaattgtttcattatttggtgttcataacttctatgtgatcgatctggtctgttgttctacccaatattgttactaaaagcatttgttatctttaattgatt

SEQ ID NO: 24198 - DNA, 426 bp, Oryza sativa
  Clone ID: uC-osflM202123h02b1
cttactcgtgggtcgagggggcttggggggagggaagaagatggcggcgggggaggtggagctgaaggagaaggcggggacggcgtggagccactcgtacctgaaccagaagccatggcacccgctctcctacccgaaccagcggcggaagtggatcgccgagcagatccacgccaaccgcgcgcgccgccaggaggaggtgcagcgtgagttcgcgcaggagcaggagttcttccgccagaccgccctcttctccaagaaggacaaggagaagatggagataatgaaagctgtgagtttcatgtatgtccgcccacctggctacaacgcagagagtgcaaaagcagctgaaattgaagatgagaacaggaggtctggtgaaggtcatgcaacccaaaatgctgctgctgcaagcacctcttcaat

SEQ ID NO: 24199 - DNA, 424 bp, Oryza sativa
  Clone ID: uC-osflM202123h04b1
tgtcatttaagtaaatcagctttccaagaaaaaggggtggacatacatacaaaacttatgaggagatataagcaggttcctgagtggtgggttgtctgcatcctcattggtaacattgccgtcaccatatttgcttgtgaatactacattgagcaactccagttgccctggtggggtgttttacttgcatgtgccattgccttcttcttcaccctcccaattgggataattacagcaacaacgaaccagactccaggcttgaacatcatcacagagtatatcatggggtacttgtaccctggacgaccggtagcaaatatgtgtttcaaggtatatggttacatcagcatgagccaggccctgacatttcttcaagatttaagttgggtcactacatgaagattccaccaaggaccatgtttat

SEQ ID NO: 24200 - DNA, 445 bp, Oryza sativa
  unsure (1)..(445): unsure at all n locations
  Clone ID: uC-osflM202123h05b1
gttccttaccccaagaagcgcaagcccgactaggggggcgcggccgtggcctcctccccggccgcgggcgccgccgcgctcggcctcacccgcgacgacctcctccgcctcgtcgagccgctctcccgggaccagctcgccgacatcgccgccaccgccgcgctcgcctcgggggtggccctcgacgccgtgcgcgccgccgccgaccgggacccggccctccgcaagctcttcgtgcgggggctcggctgggagaccaactccgactcgctccgggccatcttctccgccttcggcgacctcgaggaggccgtcgtcatcaccgacaagtccaccggccgctccaagggctacgggttcgtcacgttccgccacgccgactccgncgtnctcgccctcaaggagccctcgaagaagatcgacggccgtatgaccgttacgcagc

SEQ ID NO: 24201 - DNA, 500 bp, Oryza sativa
  unsure (1)..(500): unsure at all n locations
  Clone ID: uC-osflM202123h07b1
cttgtttgatccatcacactcacacaacacaaccctccccaaaacctcccgaagagagcaagatgttcggcttcgggcaccacggccaccatggccaagaccagccgccccagcaccacggcggcggcggcggcggcgcgcaccagcccaccttcaagatcttctgccgcgccgacgaggggtactgcgtcgccgtgcgcgaggggaacgtcgtcctcgccccgaccaacccgcgcgacgagcaccagcactggtacaaggacatgcgcttcagcgccaagatcaaggacgaggagggcaacccggcgttcgcgctcgtcaacaaggccaccggcctcgccatcaagcactccctcggccagggccacccggtgaagctggcgccgttcaacccgagtacccggacgagtcggtgctgtggacggagagcggtnacgtgggcaagagcttccgctgcatccgcatgctgaacaacatccgcctcaacttcgacgcgtcca

SEQ ID NO: 24202 - DNA, 544 bp, Oryza sativa
  unsure (1)..(544): unsure at all n locations
  Clone ID: uC-osflM202123h08b1
ggttctcacctcctccccccttgacagtgcggacgccaaaaccaccgctaactcccacctctcgcccacacctccctgatccgatcccttcccccctacaaccctagccgaattccgcctccgccgcgatccgctcgtcccgcgctccaattccgtccttcatccgctctttgttttttttgcgattgtttttttgggtgcgattggtttggtgatccgcgtgttagggttcgggagtcgccggggcgggggtttgggtggtggattggaccggtaggtggccgggagggttggcccttgtggtttcggggtttggtttcacccgccgcatgtggagaatcggaggacctgngagaggttagggttagggttatggggagcacggtggagcccgaccggagcggcggctcagtagctccgtcgcgcccggcggcggggcccctgtttctcctgccaagcggctggcggntgcacccacctccgaagataagaagctcgattttactgtactcaaatacaaaaaccaaaagctctcagagcaact

SEQ ID NO: 24203 - DNA, 506 bp, Oryza sativa
  unsure (1)..(506): unsure at all n locations
  Clone ID: uC-osflM202123h09b1
gttcagccaaggcggcggcgcacagccaggagaagccgtcgagcggcggcgcaccgcgcaccgcgcacggagcacccctcccccccctgttaccgtcccctcccgctgcagaaggcgccggcgcacggcgtcgtcccatccctaattccggccccccctctggttcactccccacgtttgaagtcagcttggttctgactccagggatctcaactatcctgtccaggatcaagaccaaacccgtcagccatcatgcaggctagcgacaggttcaacataaattctcaacttgagcatcttcaagcgaaatatgtgggcacagggcatgctgacttgaatcgatttgaatgggcagtaaacatccaaagggatagctatgcatcctatattgngcactatccaatgctggcatattttttcattgctgagaatgaatcaatnggaagagagcgttacaattttatgcaaaaaatgctacttncgtgtggtctgcctnctgagagaga

SEQ ID NO: 24204 - DNA, 492 bp, Oryza sativa
  Clone ID: uC-osflM202123h11b1
tggtttaatctccttggcccgccgccgccggcgccgtcgtcgtgcggagatctgcaccaccgcgacgcgagcggcggtgcccggtggcgtgcagctgttcccgtcgccgcgtaccctcgcctctggctgctcctcgccgcgcccaagccaatctctccccacccgccacctcggcctctcgactcgcgagcgagttcgccgatctccatccatcacccctcgagccagcggtgccggccgacggcgtgcttccggtcctcccctgccaaagtgttggtgttgatttgaagcctcaaggattccagcgaaatgacttcttccatgagcaaatacgtcacgaagaaggtgctagattttgcggcgtggagtttcaacatcaccacatccgttggaatcatcatggtcaacacggctctggtggctacaacatggattcagtttcgccacaacatttacctggtctttattttgtgacaaccaccttgatgacta

SEQ ID NO: 24205 - DNA, 341 bp, Oryza sativa
  Clone ID: uC-osflM202123h12b1
ttcgttaacccttttctccatcgcctccccctgcgccgcgccgccacttctctgctgtcctcctctcgccgctcccagggtttcgcgcgagatctactctagcattcgggcgttagggttccccgagatggcgagcgagcaggcggcggagagctacacggtggaggagctcgtcgccgtgaacccctacaaccccgacatcctcaacgaccttgagggcttcgtcaacgatcaggtttccaaccaaacatataacttggatgcaaatcttagtcttcttcggctgtgccaggtcgaaccagaaagggtgagtgtgcagattgtatctcgcatattgatta

SEQ ID NO: 24206 - DNA, 399 bp, Oryza sativa
  Clone ID: uC-osflM202124a06b1
ccggccggacttcccggctcgcccaccatcgtttcatctcttaaccacagatgaaataaggaggcgatgaatccgaggattcaatcctgcagcgttaaggctgatgatgaagaaactgaaatctcttactttgtcgaaattatgaaaactctttcagcccatcgcttgcttattgtgggtgacaactttgaaaacaaaactccttatttatcaaaagttaattaaggatctctctcaaaagttttacacgtgttggatgagtaaagaaggcagtgtcacaattgtggagtatgactctcctaacactgaagagaaagagaccaaaagattggtggttatgtttggtgggacaatggcactggatgaatatatccaccaaaaaaatctctgtacagttgt

SEQ ID NO: 24207 - DNA, 504 bp, Oryza sativa
  Clone ID: uC-osflM202124a07b1
tttgaatatggggatcggagaagccgcaactggcagccaaagccttgccggcgacggcgatgcaggagatgcaagcgccgccgccgccgccgattcttcttttggcgcctcaggtacccaaaaatataatcctgtttttttttctactgcttatccaaattgctcctctgttgcttaattacctacttgtattcgtgcaatcgtgcttgccttctctgggatctaaattattactagccctattctagttcttatgatgttttcgaggttggatttgaactgatttagaagaattattatagaatagaatgatgcctccatagaatgggtagatttccaaccatggtggaagatggaggaactaatgtacctcactcagatggcaaaacatcgtggatttgtggctacttgctaaagcagaagggcgttttggtgtcactgtcagtgtcaccagagccaattggaatggacccctagctggcaaggacgcatcgtgttcttcat

SEQ ID NO: 24208 - DNA, 467 bp, Oryza sativa
  Clone ID: uC-osflM202124a09b1
ttccacgccaccttccctcctccctcctcggcggcgacgaactcccggccatctcgcgccatggcgtcggagaagaagcagtcgaacccgatgcgggagatcaaggtgcagaagctcgtcctcaacatctccgtcggcgagagcggcgaccgcctaacccgcgcctccaaggtgctggagcagctcagcgggcagaccccggtgttctccaaggcgaggtacaccgtgcggtcgttcggaatcaggcgtaacgagaagatcgcgtgctacgtgacggtgagaggggagaaggcgatgcagctgctggagagcgggctcaaggtcaaggagtacgagctgctcatgaggaacttcagtgacaccggatgcttcggcttcggtatccaggagcacattgatcttggcatcaagtacgacccctcaacaggtatctatggaatggacttctatgttgtgcttgagcgtgc

SEQ ID NO: 24209 - DNA, 341 bp, Oryza sativa
  Clone ID: uC-osflM202124a10b1
tcggtgatttaatgagctcattcctgaggagctgatatcaatctttaatgacaaagaacttgaactgctaatcagtggacttccagacattgacttggacgatctaaaagcaaatacagaatattctgggtacagcatagcttctccagtcattcagtggttctgggagattgtccaagggttcagcaaggaggacaaagcccggttccttcagtttgttactggcacctcaaaggtccctctggaaggtttcagtgcactccaaggaatatctggaccacaacgattccagatacacaaggcctacggaagcaccaaccatctgccttcagctcatactt

SEQ ID NO: 24210 - DNA, 309 bp, Oryza sativa
  unsure (1)..(309): unsure at all n locations
  Clone ID: uC-osflM202124a11b1
tcgcctgaggccacggaggggcggtgacgagcggagcggccacagcggccggaatgatagggcggcggcggtggctgctaggaagccgtcaccgcctccatcctccggntcctcctcctgctccttctgcccctcaccgccctctatttcttctacacgctgcaccttctgctcgactccgacgtctcgtcatactcctcctcctgcccacctgacgctgcctcctcctcctccttcgtgcgcttgtcgaccaatggcaccagcgcgggtgctgctgcggtgacggtggcggcagggaagaaggccccc

SEQ ID NO: 24211 - DNA, 317 bp, Oryza sativa
  Clone ID: uC-osflM202124a12b1
ttgttgcggcggcgaggaggagagaggaggggaggcggatatagccgcgatcggatcctgcaacgtcagggttcagctgctgaagaaatcgggctggaaggagggcaccggcctcggcgcgcaagagcagggaagattggagcctgtagaaactagcgtgaagaacaaccaggcgtggttatgggttccaaggaaccaaacttaaatcaaaggttgacgaggatggtgaaaaagaccctaaaaaacccaagctggaagcaccgaagaagaaagccaagttggccgcgaagaggataccgaagatgcaagaagaagag

SEQ ID NO: 24212 - DNA, 560 bp, Oryza sativa
  Clone ID: uC-osflM202124b01b1
attttaaggccgctggttttgcagctgcacaaggcggaggacggggtgcaggagtgcgctgagttcttgcatatgcccaagcgccggttcaacgattttgctcttgtgcggaaggaaattcaagatgaaactgataggctgacagggaagactaaacaaatatcacctgttccaattcatctcagcatttactcaccacatgtggtcaacttgacattgattgatctgccgggtctaactaaagttgcagtagaaggacagcctgaaagcattgtccaggatattgaaaatatggtgcgctcatatgttgacaagccaaactgcatcatacttgctatatctcctgccaatcaagatatagcaacatctgatgctattaagcttgctcgagatgttgatccaactggtgaaaggacatttggtgtgttgactaagcttgatttgatggacaagggaacaaatgcacttgatgttctcgaagaagatcgtacagactgcagcattcatgggtcgggattggtaatccgtcacaagcagatatcaataagaaatattgatat

SEQ ID NO: 24213 - DNA, 512 bp, Oryza sativa
  Clone ID: uC-osflM202124b02b1
gttctaggcgaagatggacgaggtggcgctcgtgatccacaacccgggcgtgggggaggacccggcgtgcggcccgctcatcgacggcgtcgccatcagggcgctgtacccgccgacgctggccaaggggaacatgctcaagaacggcgggttcgaggagggcccctacttcctccccaacgcgtcgtggggggtgctcgtcccgcccaacatcgaggacgaccactcgccgctcccggcgtggatgatcatgtcgtccaaggccgtcaagtacgtcgacgccgcgcacttcgccgtgccgcagggcgcccgcgccgtggagctggtggggggcaaggagtcggcgctggtgcaggaggtgcgcaccgtgcccgggtggacgtaccgcctgtcgttcgccgtgggcgacgcgcgcgacgggtgcgcgggctccatggtcgccgaggcgtacgcggcgagggcctccatcaaggtgccgtacgagtccaagggcaccggcgggtacaagcgcg

SEQ ID NO: 24214 - DNA, 553 bp, Oryza sativa
  unsure (1)..(553): unsure at all n locations
  Clone ID: uC-osflM202124b03b1
attcctcaccgagcgagcagctagctagctgcggcgatggcctccagagcggcggcggtcgccgtcctcctcctcgccgtggcggcggcgccgctcttcgccgcggcgagcgcgcatggccgaggctaccttggtgccaagtcctggcctcctgacggcagcctgagctcatcaagctccggcgaggctgcagcggcggacgtcgacgacggccacacggactggaagtgctactcctcctgcatgagcaagtgctgtcaccgccacgacgacgacgacgacgacaaggccaatgccaaggccaacgccaccgccggcgccgccgccgtcgggctcgacgatgactacaagtgcaagaagcagtgcctcggcaactgcttcaaggacgtgccggccgtttgctaccacangtgcgtcgacgactggtgcgcgaagctgccaccatatagctccgcgaaggtgcagtgctacaagaagtgcggcgataaatgcttccaccacggcccgaagcctgtgcccaagcccaagcccagccgagcccaccaaacccaag

SEQ ID NO: 24215 - DNA, 523 bp, Oryza sativa
  Clone ID: uC-osflM202124b04b1
gttgctcaagttcctcacgcgggaggagcgggggaagctggcgctcgagcgccggcaggccgccgtcaccgaccagcgccgctccgccctcgacctgctccagtcgctcccccgcccccctccggcgccgccgcctcccctttccaacccccctcgcgactcctcctcctcccaccaccgcgactcctccgaccgtgaccgtgaccgtgaccgggaccgggatcgggacagggaccgggaccgtgaccgggagcgccgccgcgacgacgactcccgccgcgaccgagatcgggatcgggaccgcgaccgaggcgactcctcccgccgcgaccgcgacagggagcgcggtgaccgcgaccgcgaccgtgaccgggagcgcggggacagggacagggagcgaggggacagggagaaagatcggctggagaagatggcggaaagggagcgggagaaggagctggacgcgatcaatgagcagtacctgtggttcaagaagcccaagaagcgggtcatcaagccggct

SEQ ID NO: 24216 - DNA, 455 bp, Oryza sativa
  Clone ID: uC-osflM202124b05b1
tgagattaagggttgggctgttagagccgcagaacctattccacagggcacatttgtatgtgagtacattggagaggttttgaagatgaaggatgatggggccataagacatgtagaaagggaggcaaaaagtggtagcagctacttgtttgaaatcacttctcagattgacagggaaagagttcagactacagggactactgcatacgtgattgatgccacaagatatggcaacgtatcccgttttattaatcatagctgttccccaaatctcagtacgcgtttagtttcggtggagagcaaagactgtcagcttgcgcacattggtttgtttgcaaaccaggatatcttgatgggagaagaattggcctatgactatggacaaaaattgctacctggtgatggatgcccctgccattgtggtgctaagaattgccgaggacgtgtgtattgag

SEQ ID NO: 24217 - DNA, 464 bp, Oryza sativa
  Clone ID: uC-osflM202124b09b1
tttgtgcatctgcaactcatctcggcaccaccgggccgctcttctcactcagggcgcgcatggccgccgccgccgccgcggcgctcatcaccgccgcctccactcctttcccgctggtctccttccgcagccggcgggatggccacctgagcctttcgcctcctcgccgccccggcgccgggcgctgcagggcctcggcgccgacgttccaggggggacccgccgccagctacgcccgcgagatggagcgcctctccgccaaggagtccctcctcctcgccttcagagatgctggagggtttgaatccttggttagtggaaagactacagggatgcagaagattgatgtcaatgagcggattgttgggctcgagcgtctaaaccccactccacggcccacaacatctccctttctggaaggtcgatggaactttgaatggtttggtgacagcagtcctggagca

SEQ ID NO: 24218 - DNA, 481 bp, Oryza sativa
  Clone ID: uC-osflM202124b11b1
tcgctcacgactccagagagcggaggcaatggggacgtcggggtcgaaggggatcgacggcgtcgggggagtcggcggcggggcggcggggttggggggaggggaagcgggcgacggcggcggcggggtgggcggcgcggcgtcccggtcgtggcacggcggggcgcagctgtacgtgtcgctcaagatggagaacgcgcggatcaccggcgacctcgtcccgcacgtctacggctccgagcccatcatcggatcctgggaccccgcccgcgccctcgcgatggagagggagctggcgtccatgtgggcgctcagcttcgtcgtgccgcctgaccacgaaacactcgacttcaaattcttgctcaagcccaaggatgcagacaccccgtgcatcattgaggaaggtccgacccggcatctcactggaggcatgctcgagggcgatgtgaggattgcatggttcaagatgaatggggatcat

SEQ ID NO: 24219 - DNA, 402 bp, Oryza sativa
  Clone ID: uC-osflM202124b12b1
tcgcttttcgtcgccctccagagctcgtggatctctcacttcggggcgggcgcgcgctagcacaatgttcaccggatgtggtctcttcgcctgcgtgcgccggtgcgatggcggcgacgtcaggaagcgcggggaggcaggtgcaatgagctcgcgggtggcggccgatccggccggcgtggaggaggaagggagctgcaagaacgtcgccgccgcgtcggcgaggcagctcgcgtgggcggacgtggagtccgtcacgggggggttctcgtcccgggtgatcgggcacggcgggttcagcacggtgtacctcgcgtcgctctcgtcctcccgcctcggcgccgtcaaggtccactgcagcagcgagcgcctgcaccgcgccttccgccaggagctcgaggt

SEQ ID NO: 24220 - DNA, 562 bp, Oryza sativa
  unsure (1)..(562): unsure at all n locations
  Clone ID: uC-osflM202124c03b1
ctccgtcttcgatgcgaagcgtctcatcggccggcgtttctctgacacgtcggtgcagagcgacgcgaagctgtggccgttcaaggtgctacccggccccggcgacaagccgatgatcggcgtgcagtacaagggagaggagaagcagttctccgccgaggagatctcgtccatggtgctcaacaagatgaaggagacggccgaggcctatctcggaagcaccgtcaagaacgccgtcgtcaccgtcccggcctacttcaacgactcccagcgccaggccaccaaggacgccggcgtcatctccggcctcaacgtcatgcgcatcatcaacgagcccaccgccgccgccatcgcctacggcctcgacaagaagtcgagcagcgtcggcgagaagaacgtgctcatctttgacctcggcggcggcacattcgatgtctccctcctcaccatcgaggagggcatcttcgaggtgaaggccaccgncggtgacacccaccttggaggcgaggacttcgacaaccggatggtgaaccacttcgtgcaggaattcaagaggaagaac

SEQ ID NO: 24221 - DNA, 490 bp, Oryza sativa
  Clone ID: uC-osflM202124c06b1
gtgatgtctgaggcatatggccatggctgccacgtcccgcgcgccgtccacgctggccccggcgtcgttctccgccgccggcggcagcaggaggcggcgccggtgcccgaatcccagggtgcgggtgggggtgggggtgcggtgctcgctcgacagcaacgtctccgacatggccgtcaacgctccgaaaggattgttcccgccggagccggagcactacagggggccgaagctgaaggtggccatcataggggccggcctcgccggcatgtccaccgcggtggagctcttggaccagggccatgaggttgatctgtacgagtcccggccgtttatcggcggcaaagtcggttcttttgtggataggaaagggaaccatatcgagatggggctgcacgtgttcttcgggtgttacagcaatcttttccgccttatgaagaaggttggagctgataataatctgctagtgaaggagcatacccatacattt

SEQ ID NO: 24222 - DNA, 409 bp, Oryza sativa
  Clone ID: uC-osflM202124c07b1
ttgacgcgtgggccgttcttgttatgctttgcaacaccggaggcgaagacaggtttaggggccacctgaacctggctggaagcatttactcaaaacaactcaacaccatcacagagagacgagaggaaaagcttgtgaagaagtaactcaaactccctttgcttggagcctctgcgaaagatttggcttaatttctcccccaacaagatgtagttgccgatttagaccatgggccctcgtgaagctcaactgtacataggagagcgacccacccccttcggcaaaacatttatgttttcgaaattgaattttagagaaaagaacaagtggatttaaaaattttcagtgtctttccagctgttaattctttctgaagagaagtggtcgatatcgaaatatcgagcatggt

SEQ ID NO: 24223 - DNA, 474 bp, Oryza sativa
  Clone ID: uC-osflM202124c08b1
ggcgtgcccttccgccgcctcaccggccactggcacttcgtccaggacgtcgtcctcagctccgacggccagttcgcgctctctggctcctgggacggcgagctccgcctctgggacctctccaccggggtcaccacccgccgcttcgtcggccacgacaaagacgtcctctccgtcgccttctccgtcgacaaccgccagatcgtctccgcctcccgcgaccgcaccatcaagctgtggaacaccctcggcgagtgcaagtacaccatcggcggcgacctcggcggcggcgagggccacaacgggtgggtctcctgcgtccgcttctcccccaacaccttccagccaaccatcgtctctggctcctgggaccgcaccgtcaaggtgtggaacctcacgaactgcaagctgcgctgcaacctcgagggccatggcggctacgtcaacgctgtcgcggtcagccccgacggttct

SEQ ID NO: 24224 - DNA, 193 bp, Oryza sativa
  unsure (1)..(193): unsure at all n locations
  Clone ID: uC-osflM202124c09b1
ctctcttcatcttctcgctctcgatctcctacagaagctatagtagccagcaaatcaatcgatcgatccgtacaatggcggccatgaagatgaacaagattgccgtggcggcgctgttcctcgtcgccgtggtggtggcgggcggngccggcgctagcgcccacgtcggggttggggttggggctggggccgg

SEQ ID NO: 24225 - DNA, 464 bp, Oryza sativa
  Clone ID: uC-osflM202124c10b1
atgaaggcgcccgacctggacatcaagggaatggagggcgtcgtcaagcagtacgtggccgtctggaaggggaagcgcatcacggccaatttccccttcaaggtggagttccatctcagcgtggagggccaggacaagccggtcaggttcttcgtccacctccgcgaggacgagttcgagttcatcgacgaatgagatcgatcagtaaccgtgaccaagtaagcctagcgccttttgttatacaataatgaccgcagctgtggcatgtgtatattgtttcggttgtgtggtgagagagatgagagagactgaagagagtagggaacatggcaaggaagttgtttgcttactgtcatgctcttcctcctccagttcgacatctaatttttcagatgtgggaaatgtttggatgatgatgatgatcgatagctataaatagtgatcattctgttgtcttgcttgct

SEQ ID NO: 24226 - DNA, 412 bp, Oryza sativa
  Clone ID: uC-osflM202124c12b1
tcggttcaaaggaggaagaagaagaagaactcactggcaggagcaccaatggcgaattctgcgtcagggctggcggtgaacgacgagtgcaagttcaagttccaggagctgaagacgaggagggggttcaggttcatcgtgttcaagatcgacgacaaggccatggagatcaaggtggagaggctcgggcagactgccgagggctacgaggacttcgccgccaccctccccgccgacgagtgccgctacgccgtctacgacctcgacttcgtcaccgacgagaactgccagaagagcaagatcttcttcttctcctggtcgcctgacacggcgaggacaaggagcaagatgctgtacgcgagctccaaggacaggttcaggagggagctggacggaatccagtgcgagattc

SEQ ID NO: 24227 - DNA, 466 bp, Oryza sativa
  Clone ID: uC-osflM202124d04b1
gagcatcctctccttcctcttcctctggtcgctcagctatcccccgcgcgcgcgaccgtcgtcgccatgtcgggcaacatcgccttcggccgcttcgatgactccttcagcgcggcctccctcaaggcctacctcgccgagttcatctccaccctcgtcttcgtcttcgccggcgtcggctccgccatcgcctacaccaagttgaccggcggcgcgccgcttgacccggccgggctggtcgccgtggcggtgtgccacgggttcgggctgttcgtggcggtggccatcggcgccaacatctccggcggccacgtcaacccggccgtcaccttcggcctcgccctcggcggccagatcaccatcctcaccggcgtcttctactggatcgcccagctcctcggcgccatcgtcggcgccgtcctcgttcagttctgcaccggcgtggcgacaccgacgcacgggctgt

SEQ ID NO: 24228 - DNA, 417 bp, Oryza sativa
  Clone ID: uC-osflM202124d05b1
ttcgtcaccacaaaaccctagccgccgccgccggcggcgccgccgccgccatgggcacccaaacccgccccctcgtctccgtcaaggccctggagggcgacatggccaccgacaacagcagcagcctcgccctcgccgaggtgttccgcgcgccgctccgccccgacgtggtccgcttcgtccacaggctgctctcctgcaacaagcgccagccctacgccgtgtcccgccgcgccggccaccagacctcggcggagtcgtggggcacggggcgcgccgtgtcgcgtatcccccgcgtccccggcggcgggacgcaccgcgccgggcagggagccttcggcaacatgtgccgcggcgggcgcatgttcgcgccgaccaagacatggcgcaagtggcaccgccgcgtcaacgtccacc

SEQ ID NO: 24229 - DNA, 497 bp, Oryza sativa
  unsure (1)..(497): unsure at all n locations
  Clone ID: uC-osflM202124d07b1
ttgataaaaaaagaaaactgtagcgcaatctctgcccctcgcgtctcgcgtcccggcggcggcggcggcggcggcgtgcctcctcccggcgacctcgagccttccgctcatccatctctgcagaggacaccaccagggtcccatggaagcagcggcggcggcggaggcggaggcgggaacaggcggaggcggcggaagggacgggacggcgacgaagaagaaggcggcggcgtgcgacgtggcggcgctgcgcaagtgcctcgaggagaacaagggcgaccgctccaagtgccaggaccacatcgacgccttccgctcctcctgctccaccaaccccccgccgcctcgcaggtcctagagctttcgcccaatcagccaaagcaactcttgngtctttctttttttcttttttgcttttactatcctcgatccgaataaatggnnntgtttcagtagctgtttcgatcaaacaagcagagtaaaaacaattggcatat

SEQ ID NO: 24230 - DNA, 517 bp, Oryza sativa
  Clone ID: uC-osflM202124d08b1
ctcccactcatctcacttcactctctttctgttctcttcacttcaccaccgccacctctctcatcggatccctgcagaggaggagagggcagtggcggcgaaaggcgacatgggctcgctgtcctctctcgccgccgcggcggtgtttctctccctcctcgccgtcggccactgcgccgccgccgacttcaacgccaccgacgccgacgccgacttcgccggcaacggcgtggacttcaactccagcgacgccgccgtctactggggcccctggaccaaggccagggccacctggtacggccagcccaacggcgccggccccgacgacaacggcggcgcgtgcgggttcaagcacaccaaccagtacccgttcatgtcgatgacctcctgcggcaaccagccattgttcaaggacggcaagggatgcggctctggctacaagatcagatgcaccaaggaccagtcgtgctccggcagggtcgagacggtgatcatcaccgacatgaactactacccg

SEQ ID NO: 24231 - DNA, 439 bp, Oryza sativa
  Clone ID: uC-osflM202124d11b1
attcgagattaacatgctgtctggtacgagcagaagctcattaggctgttcagactctggttgggaggatgacacccttacctcagactacacttcagttttcgttactaatgctgccatgccagcatatggagaacctgcttacctgacaggtggagcgccaaatactaatgaggaacaactatggtatcgacgcgccccagggaaatggcatgcctaatctcgtacaaaacatgcccaccttagatcccgagatgatagtatctagtccattaccatctatgttcgagatgcagactcgatatgacatcaagtggacataccttctgcaaaatgatgctacacatgactgagcatgcatcgagggcatatgtagccttgatgagctgctcatggcagctggtgcctactgaggagaccaaaagttctgctcagagtg

SEQ ID NO: 24232 - DNA, 460 bp, Oryza sativa
  Clone ID: uC-osflM202124d12b1
tcggtctgcgcatgacatggcgaccagcagcaagctgcggtcgccggtgctcccgcgccgtcgacttgcggagcccttccttctgctgctcctgctcctgctcctggccgccgtagcccgcccaacggcggcggcggacgtcgtcgagctgaccctcctcgccggcgctcaggagaagggcgcagtgtgcttggatgggagcccgccggggtaccacctgcagagaggcttcggctccggtgagcacagctggctcgtctttcttgagggaggagcctggtgcaacagcatcgaaagttgttccaggcgcaaaatgggcgtgtatggttcatccaaattcatgaaagcagcagagttcaatggaatactcagcaatgaccaacaactgaattctgatttttataactggaacaaaagttgccataaggtattgcgatggggcatcgttttctggtgatgc

SEQ ID NO: 24233 - DNA, 484 bp, Oryza sativa
  Clone ID: uC-osflM202124e01b1
ttccacccccgaaaaatttctccccaatctcgggaggctctcgtcgacgaatcgaatcctctcgcgtcctcaagatgcagatctttgggaagacattgaccggcaagactatcaccctcgaggtggagtcctctgacaccatcgataatgtcaaggctaagatccaagataaggagggcatccccccggaccagcagcgtctcatcttcgctggcaagcagctggaggatggcaggacccttgctgactacaacatccagaaggagtcgacccttcaccttgtcctccgcctccgtggtggcatgcagatctttgtcaagactctgaccggcaagactatcacccttgaggtggagtcttctgacaccatcgacaacgtcaaggccaagatccaggacaaagagggcattctcccagaccagcagcgtctcatcttcgccggcaagcagctggaggatggcaggacccttgctgactacaacat

SEQ ID NO: 24234 - DNA, 545 bp, Oryza sativa
  Clone ID: uC-osflM202124e03b1
gcggtaagttgcagtttatgggtgtgacagctaatggggagctagtatgaacctggtatatgcttatgtattcagaccatctacatttttaattatttaatcgaatgagcttctagacatgtattgaaatgctctggggttgctaaccaatatatatgggattctgatttaatgcatgggaaactaagttgagtgcctacatgtgcactgcttggttccttttaaaactataattatgtgcataactacagatttatgatttaactaaactgtgggttgtttcaaaatcccaccaaatacgtggtgtagagcattctttagtgattttccgaagtgtgatatattgttgaataatagttgtgaagttttcaataagtgagatatatttttcctaattggtacatgtgtgctttccaattagcattatcaatagtattaacatttcctctttcaatctgtaggtacattcttcatgcaagggaactggcatattgagcatgattgagaaaataagacctaaatcatgactagagtggacatgaagc

SEQ ID NO: 24235 - DNA, 521 bp, Oryza sativa
  Clone ID: uC-osflM202124e04b1
tgtatttatctgcggcttgctggacacccaaagcagggggctggatgacctgtttggcagacaatgcatcacggagacattataaggctgcgcacacactgtggtcaccggtagagcaaagcttggtggaattccagttggtgtcatagctgtgcaaacccagactatgatgcatgtcatccctgctgatccatgtcagtttgattctgctgagcgtgtgtttcctcaagcagggcaggagaggtttcctgattctaccaccaaaacagcccaggcattgctggatttcaaccgtgaagagcttacgctgtccatcctcgctaactggagaggcttttctggtgggcaaagggatctgtttgaaggaatccttcacgctggttttaatattgctgagaatctgaggacatataaccaggctgcttttgtgtataatccaatgggcggagagcctatgcgagtgtcatggattgtggaaaaagcaaattaaatcaaacacattgaatgtatgctgaaagact

SEQ ID NO: 24236 - DNA, 571 bp, Oryza sativa
  Clone ID: uC-osflM202124e05b1
gtcactacctcgcctccgattcagatctccctcccccccttccattccacgcccatcggattccctcccgattccgctccattcctccccgcctccgcccccatctccgccgacctcgtcgtcgtcggcgtcctcatccaggcagtctcggcggcgattcgatcgccgccacggtcgccgatggaggccatccggaagcaggcgtccaagctccgggagcaggtcgcccggcagcagcaggccgtgatgaagcagttcgggggcgggtacggcgcggacggcgcgttcgccgacgaggccgaggcgcagcagcactccaagctcgagaagctctacatctccacgcgcgccgctaagcacttccaaagggacatagttcgcggggtggagggatacattgtcacagggtcgaagcaggtcgaaatcggtaataagttatgcgaggatggcaagaagtatggagcggagaacacttgcaccagcggaagcacgctgtcgaaggcggcgttgtgtttcgccaagcacgctcactgatggagaaggagagagggaacctgctgaagcactgggt

SEQ ID NO: 24237 - DNA, 515 bp, Oryza sativa
  Clone ID: uC-osflM202124e06b1
gtcggttgcctccaggttcattgaaccaagccaccccgacacgaatcgctcaggcctcccccctgttgttcatccctcactcaacttttgggcagcttggctttattcaattccccttcctttttattgcgaatttgcgactgcgagcgagcttttcttcctcaaaggaagacgacgacggaggagcagccctgcagagcataaagagaggagaggagaggagagggggccggtcaaggaagaggagggaagatgagcagcacagctccactcctcacaccctacaagatgggaagatttgatctttcccacagggtagttctcgcaccactgacaaggcagcgatcctatggtaatgttcctcagcctcatgccattctgtactatcagcagagaacaaccaaaggaggccttttgattgctgaggccactggaatctcggacactgctcaagggtacaaagatactcctggtatttggacaaaggagcaagtggaagcgtggaagccaatcgt

SEQ ID NO: 24238 - DNA, 400 bp, Oryza sativa
  Clone ID: uC-osflM202124e07b1
tcgctcaggtctatcttccttcccctaccttcgttccccaaatccaacgcacgcgccgtggccccacccaaatccgatggcgagctgagtccccggcgtgcaaccacggcgccgacaaactcccgccccaccgctggaggcggcggcggaggccgtcgcgctgccggatgctgcggcggtggcgtcggcatggacgcggcgctgtgcgacgacctgctgcaggaggtgttccgcctgctgccgcgcgcctccgcgccggctgtgtccctcgtctcccgccgctggtacgccctcctccgcgcgtcgattgcctccctgaccctccgcctgccggtctcctccgacgcctcggtgttggcgccgctctctgcgctgctgtcttcgttcccctatctctccg

SEQ ID NO: 24239 - DNA, 289 bp, Oryza sativa
  Clone ID: uC-osflM202124e09b1
tcgtttttcatccaatgattattgcatctcatggcgggtttaaatacacggggcataaccatctagattgcactcgaatatgctgggggcttatcggctgcggaagggcatgaaactatacttctagagacacacgcggcattcagccagttgggaacacttacatgctggaactactgatgcagataacacccacatgtctacctttttacggtggacctctcaagctgcaacatctgctgttagctggtgctctacatacgactcatgttctaatacattgtctgtg

SEQ ID NO: 24240 - DNA, 491 bp, Oryza sativa
  Clone ID: uC-osflM202124e10b1
tcggttctgcatcaccctcagcaccaattttgcctgcgacggctcagcatgtgacaccatcttctgcttatcatgctaatttgcctcggtcatatggtgtggtctcagctggatcgtcggttcacccccacaactctccaagctttacattcactcgtccaagacggatagttgaagaagcttctggcagcagaagagatgcagcatgtccatctagaaatgcagaaaatgttgctgcaagagctgccattcctgaaatgcctagctcttcctctggtggccggcatgcgcgaagaactggtccgatgaagctcactcctggggccaagcatatcctgatgccgagtgacaccacaggggacggcacctccatgccagtgtactcttgtgtttctttcggaagtaagagtggaaatgcttcagcaactcgcaacatgggagctgggcttgacagttatagtccaaataatgcttaaacttggacatgtttt

SEQ ID NO: 24241 - DNA, 497 bp, Oryza sativa
  unsure (1)..(497): unsure at all n locations
  Clone ID: uC-osflM202124e11b1
tcgttggcaccgtgccagcaagggtgctcctgagcagatcctgaccctgtgcaactgcaaggaggatgtaaagaggaaggtgcatgctgtgattgacaagtatgctgagcgtgggcttcgttctcttgctgttgcaagacaggaagtacctgagaagtcgaaggagtctgctggtggaccatggcaattcgttggtctgctgcccctgtttgatcccccgaggcacgacagtgctgaaactatccggaaggctctccatcttggtgttaatgttaagatgatcactggtgaccagcttgctattggtaaggagactggtaggaggcttggaatgggtacaaacatgtatccttcatccgcattgctcggacaaaacaaggacgcttcacttgaggcacttnccgtggatgagctcattgagaaggctgatggttttgccggagtcttccctgagcacaaatatgagatcgtgaagaggttgcangagaagaagcaca

SEQ ID NO: 24242 - DNA, 465 bp, Oryza sativa
  unsure (1)..(465): unsure at all n locations
  Clone ID: uC-osflM202124e12b1
tcgtttgtcgtcgtcgttgacgtcatcaatgggggggggtttcgccgtcgaggccaaggtcgccggcggcggcgagcggcgggagttcaaggggaagatcacgtggtacgtgtggctgtgcggcatcatcgcggcgacgagcgggctcatgttcggctacgacgtcggcatctccggcggcgtgaccgccatggacggcttcctgatcaagttcttcccgtcggtgtacgcgcggaagcaccgcgcgagggagaacaactactgcaagttcgacgaccagcggctgcagctgttcacctcgtcgctgtacctcgccgcgctggccgccagcttcgcggcgttcaggctgtgcacgcggctggggcggcggcgcacgatgcagctcgcgtcggtgttctttctcggcnggacggcgctgtgcgccggcgcggcgaacctggcgatgctgatcgtggggaggatctg

SEQ ID NO: 24243 - DNA, 432 bp, Oryza sativa
  Clone ID: uC-osflM202124f01b1
ttttatttagtatctctctccaaagtccaagctggccaggtacacacacgtagagattgagggatcgaggcctcttccgttcgctccgcctctcgccgtcgccggcggcgatgccgaacgccggcgccgccaggaggtgcggcagggccacgcacgacggtgagccggtaccgcgccccgttcccgtggccggcgagccgcggcgtggtttgggcggggaactcggcccgcggcgccaaggccgccgccgacgccgacggcgacgacaacaagtgggcgcgcgtcgacggcgacatgctccggttcaccgacgccgccgccgtccgcgcgtacgcctacgtcgtgctccggctagtcgccgcgcccgtgcgcgccgtcgtcgacgtcggggccatgcatggagggagctgggcggcggagctgatgtcccgc

SEQ ID NO: 24244 - DNA, 447 bp, Oryza sativa
  Clone ID: uC-osflM202124f03b1
ctaattcctagctcgagcgctcccttcttcccgccagctctgctgcggcggcgggcggcgagatggcgaaccttctttgcttgcagccttagaacctgctgtgcacgctgcggcgggagatcgcgcaggccttctacgacaagaaggaggcgggcgaactcgccgcgcaggccgccgcgctcgaggcgcccgcgctgccggtccgcgcgcctccgctcgctggcaatgattccggcggctcccgcgccgcctccagctcggcatcggccatggacgttgagatggcggatgaaggaaataacaagtccaagtccttcttgaagccaattggtagcattagcaagaagaaggtacaacttcacttgaagatcatgaaagataaaacaaaagctaggaagaaggggaggtttagtaaaaagtaggtgtcaaagcttactctgttatgag

SEQ ID NO: 24245 - DNA, 534 bp, Oryza sativa
  Clone ID: uC-osflM202124f04b1
ccaccacgaaaaaaaatgcctcgggcgacgccgctcttgcgacggcggcggaggacccgacgccctcgggcaaggcggcgctggacggcggctcagcaatacgtggcggcggtggtggtgcggaggcgaagcggcgaggtggtgcggcggcgcgtggcggcaacggctcagcggtgcgtggcagcagcggcggcggtgcacaggtgaagcggcgaggtggtgcggcggcgcgtggctgcgagcggcggcggcagtacccccatcctcctcccccttctttctcccctgctctcccttctcttatttctcaatccggtttttcttgaagtggcagcggcgtggagttctcaacggcgcgcggcggtgctgcggtgcggcggctcgacgcagcggtgaggaggcgaggaggaggtgaacggcggcgccactgtctccatccacgaccgacgggggccaccttcatcccccaactgacgggcgccaccttcgaccgcctggctctagatccgttctccacaagtcaggggacgcgga

SEQ ID NO: 24246 - DNA, 551 bp, Oryza sativa
  Clone ID: uC-osflM202124f05b1
attctgtgtgtgtgtcttggttgcaaaaaccaagacatacacacagaatcaaataataacaaaggtttcctagcctcaaaggatacatatatatagtttccctacaatacaatggagcctgtcaatgatttccaggaaggcatttcaacagagcatgcctttgaggcagagcctgtgccatcattgtcggaaacaataacgccacgatcaatggtggtgagcttcatccttagtgtaactctcagcatcgtcgccatgaaggtcaccttgagctctggcttcattccgtcgttcagcatcccagccggcctcctcggtttttgtgtatcccgtgcgtcgatccgcattcttgactacttcgcagtggcacaactaccattcacacgccaagagaacaccatcatccagacctgtgtcgtcgcatgcacctcgatcacattcaccggtggctttgggacatatattcttgcaatgggaaagaaagcagctgtaggggatgtcaatgcccaaaataacgttgaggagccaagctttgcccagatgatcacctt

SEQ ID NO: 24247 - DNA, 517 bp, Oryza sativa
  Clone ID: uC-osflM202124f06b1
gttgtgcacccatctcggagcaggaagggactcctacgaggtggggtcactgacatgtgggcccatacctgtggggcccacatgtcagcaactcaaagtccgccgccattttcttctcgccccatccctgcgccccttccgcctcccgcttgctagggtttataccgccgccgccgccaccgccgcagcaacagcagccggcggcgtgaggaggagaagaggcgacctaggtcgaattcgaggtcgagggagatgaggctcctgacgcacaacatgctggcgtctaacgcgcggggcgcggtgacgggctacccgctgaagctgcaggtggtgaagtggtcgaccaaggaggcggagcccaacccggagttcctccgcggcatgctccccaagatcgactggcccgcgctcgtcgtcgccacccaggccctcggccttccggagctcctccccgaggcgccctccaccgacgccgagctctacgccgagggcgccgacgtcgacgagggcagtgcgc

SEQ ID NO: 24248 - DNA, 524 bp, Oryza sativa
  unsure (1)..(524): unsure at all n locations
  Clone ID: uC-osflM202124f08b1
ataacttcagaaagcactgcccgccactttgcgtcattgtttatggacatgataaatcaaggaaaaattcctcttgatgtggttgatgacatgattcgagatcattgtaaagaaggaaatctggacaaggctttaatgctgcgagatgttattgttgcgaaaagtgcaccaatgggctgctcgtcttatcttgctatagtggacaatctatgccggaagggaaaattaagtgaagcgttgaatttgctgaaagaaatggacaagagaggtatttgtcccagtgagaatcaatgcttgatactattaactaatcttcatacatctggatatatccaagaacacaatacggtacttgataatatgttgtgtcacaagtggttacagaaggacagcanattctgtaattcagctggtgataatctggaatctgtcaatgcagaatanacatagagcagaatccttcctataaaagaaagtctgattctattattcatgttgcgaatgcatgtcttagccttgttttt

SEQ ID NO: 24249 - DNA, 503 bp, Oryza sativa
  unsure (1)..(503): unsure at all n locations
  Clone ID: uC-osflM202124f09b1
gtgagccctagccctgcccccagccggcgcgggcggtcgctagggttagggtctccccccgcccgcgccttccttccttccggccttttcccgtcccctcacctgcggcgtgtgcgcttttctcggcctcgcggcggcgcggcgcggcgcgagccaatgccgtgtgtctgagtctgacccgttgattcttggcggattgatctggaggtgggcttgttggggttgctgtggtagccgggagggaggggaagcggcggcgtttgtttctgaggatatttttggtgcgagatccggcggggcggcgagatgcagcaggatcagcgcaagaagagttctacagaggcggattttttcacggagtatggcgatgcaagtcgatacaagattagngaagttattggtaagggaagctatggggtggtgtgctcagcgatagatgtccacactggagagaaagtggcaatcaagaagatacacgatatctttgacacatatctgatgct

SEQ ID NO: 24250 - DNA, 437 bp, Oryza sativa
  Clone ID: uC-osflM202124f10b1
ctcaccttcgaaatccggcggcggcaatggcggcggcagatacggcgaggtccggataccggcgcatgtctctccatctcggccttatccacgtccaagtcgaccaccggacacagaaagagctaccattccggcatcctcttcatctcatgctgaactaacacttacatcaacaaatggctttaaagaatcttgtggaaagctcgaacactaaatacatgctcgagtagccacatagcgaccaactgcattctataccgcgacggccttcataggggatgctacagctgcggatgcatgttaaggaatagaaggaacggatggaaagctgccggatcgatcgccaatgcttgctgaatacgctatacccacaccacgaccagattaaccatagataaactcacagccacaacaatcatggggcccttcatctagtt

SEQ ID NO: 24251 - DNA, 562 bp, Oryza sativa
  Clone ID: uC-osflM202124f11b1
tcggtcgaatccgtcgcgtcagttgccaagtctgctcaagctagcagcgcggctattgtttttgcttcagtgggtgggatccaggaagattttaagctgactgctgcggcagcaattgcttcaggaactgtgcttgggctgcacgaggacagcagatacaagtcggagtcgaagaaggtgcatcttaaacaagtagatcttatcggatttggttctggtccagaggttgaccagaaacttaagtatgccaatgatctctcctcgggtgtgatattcgggaaagaacttgtgaactcacctgcaaatgttcttactcctgctgtgcttgccgaggaggcatcaaacattgcttctacatacagtgatgtattcactgcgacaatattagatgtggagaaatgtaaagagttaaagatgggctcctacttgggagttgctgcagcttctgcgaatcctccccacttcatccacttgtgctacaaaccacctggtgggaatgccaagagaaagctggccattgttgggaagggtctaacttttgacagtggtggctacaacatta

SEQ ID NO: 24252 - DNA, 488 bp, Oryza sativa
  Clone ID: uC-osflM202124g02b1
gcgttccttcctttcatttttattttattaaagaaggggtagcattacacactggaatgatgcatcatgtataacatgcaacatgaaagtttatacacaaataggacagtctgcccgaaaaaacaattgtacataggatacaatataacccttttttcccagcacgttatttttttaataaaactactatatatatgcgctgtttttgaggatgcatttcattaggacggatgttacgcattgcttggagcaatatgagtaatagggcatatatttagggtaatgagttaagctgcaaccattccaaacgtttaatgcatatcaaggtccttaggcgccattccattgggtagcttccagtcaaaatgataaagaagactagctaatggtagctccaagttggccaccccaaggtttatacctggacaaattctacgaccagagccaaatggagaaattcgaagttattccctttatattctacacta

SEQ ID NO: 24253 - DNA, 437 bp, Oryza sativa
  unsure (1)..(437): unsure at all n locations
  Clone ID: uC-osflM202124g03b1
ctcgttcgatcgacaaagctatagctagcccaggcatggccgcctctcccgcaatggcgacactcctcctcctcctcctccatgctgtcctcgtcgcggcagccgatgccggcgccgccgataaggaggcctatgcggcaacaggatcaaccgctggcaaggagaccgctgcggcggccgacaaggagacctctgcagcggccggatcaaccgcgggcgccgtccctgaccccaacatcttcaacaaggaggccgtgtgccccaagacgacggacgagaaggcgtgccagcaactggtgaaggtcctgccgcccgagtttgcagagacgaaagacgccaagggcctcgccaagctgtgcatctccagcgtcgggttctcggcggagcagttcaccaaggacgccatcgccgncgtgcaggagtgcaagaagcccgac

SEQ ID NO: 24254 - DNA, 510 bp, Oryza sativa
  Clone ID: uC-osflM202124g04b1
gtagtagctgagcttgaagcagcagagcgagggggacatggccgccgccaccatggccctctcgtccccggcgctggccggcaaggccgccgcgaaggtgttcggcgaggggcgcatcaccatgcgcaagtcggcggcgaagcccaagcccgccgcgtcggggagcccgtggtacggcgccgaccgcgtgctctacctcggcccgctctccggcgagccgccgagctacctgaccggcgagttccccggcgactacgggtgggacaccgcggggctctccgccgacccggagacgttcgccaagaaccgggagctggaggtgatccactccaggtgggcgatgctcggcgcgctgggctgcgtgttcccggagctcctcgcccgcaacggcgtcaagttcggcgaggcggtgtggttcaaggcggggtcgcagatcttcagcgagggcgggctcgactacctcggcaacccgagcctgatccacgcgcagagcatcctcgccatctgggc

SEQ ID NO: 24255 - DNA, 590 bp, Oryza sativa
  Clone ID: uC-osflM202124g06b1
gttgctgataaccagtcatgtcctaacagattcaggcgaaggagaaacactgcttataccagaagcattgcaggttggattcccctatgtagttgaagtagcacagcatcctgtagttgcactctcatggtccataataaatttttctcgacagtgtctagatccaggaatcagggcaaggtacttcagtccgcgactcatggaggctgtgatttggttcttggccagatgggtcgcaacctatttagtaccacttgatgtgagtagggggcaagtaaacagagcagaaattgacagtgtggataaacacatgctccaacattctagaaaaatgctaaacagttttgcttgggagaataaccaaggaggagcgtgttcttgattttgttgttcttatttcaatggtagcacttactacatatcagggagaaattgagctgcagacacttacatgccagaagctacttgctacagttgttcgacggaagcacacatgtacttatgttgttcagtttgactcgtggcgtgatcttacaagagcttttgcaagtggacgttcttattttcattaactggacgcttacagagat

SEQ ID NO: 24256 - DNA, 394 bp, Oryza sativa
  Clone ID: uC-osflM202124g08b1
gtcaatccaagctaatcccctcatcaaaaccctagccttgtcgcctcgtcggcggatggcgccgccggcgccggcgacggcgcggcgcccgatggcggccgtccgctgctccgcggcgaagaggagctacaacgtcacgctcctccccggtgacggcatcggcccggaggtggtcgccgtcgccaaggacgtcctctccctcgccggcgctctcgaaggcgtcgagttccgcttccaggagaagctgatgggcggcgcggcggtggatgcgtacggcgtgccgctcccggaggagacgctcgcggcggcgcaggcgtctgacgccgtcctccttcgcgccataggagggtataagtgggataacaatgagaagcacctcaagccagagactggg

SEQ ID NO: 24257 - DNA, 511 bp, Oryza sativa
  Clone ID: uC-osflM202124g11b1
tcggtagaaggtgagagagtagttcacttccctgctctcctctctcctcttctctcttcccactctcacgtctcctctcttcccctccgcgaagcaacggggggcgaggcgaggcgagccgacggcagcggaggaggcggcggcagccgaaaccccaagaaaacgccgccccttgtttctttcttgccttgcacagcctcctcctcgatccgtcgcgcgttcgtcgggcgagatccctcctcctcctccggtttccccgcgtgcgagattgagccccgttttcggtggaagcccaaccagccgcggggttggggttgcgaggcgagagggcggctggtgtgaggttcttgatttgatctgtggttgttgttgtggtggtggttgggcgccatggcggcggccggagggctggagcacaggcaaaaagaccggttcttccaggcggccgaggaggtgcaggagtccgcggacttgatggaatctatttatagaacttggatgcgggaatgcg

SEQ ID NO: 24258 - DNA, 513 bp, Oryza sativa
  unsure (1)..(513): unsure at all n locations
  Clone ID: uC-osflM202124g12b1
tcggtgcaatataatagccgcgcttagcgtaactaggcgaacgtactagcagaagaggaagaagaaaatgccggtgagccggatcgcggtgggcgcccccggcgagctgtcccacccggacacggccaaggccgccgtcgccgagttcatctctatgctcatcttcgtcttcgccggatcgggatccggcatggccttcagcaagctgacggacggcggcggcacgacgccgtcggggctgatcgccgcctccctggcgcacgcgctggccctgttcgtggcggtggcggtgggagccaacatctccggcgggcacgtgaacccggcggtgacattcggcgcgttcgtgggggggaacatcagcctggtgaaggcggtggtgtactgggtggcgcanctgctggggtcggtggtggcgtgcctgctgctcaagatcgcgacngggcggcgccgcgtgggtgccttctcgctgtcggcgggcgtgggcgcctggacgcggtggtgttcgagatc

SEQ ID NO: 24259 - DNA, 395 bp, Oryza sativa
  Clone ID: uC-osflM202124h01b1
tttgcttgaagagtcgagttatggcggggtcggggtgccttagaacgctctacctgtgtacgcagtcgccatcaccgtcaccggtggcgtccgcccgcctcgtggcaccggctgtcctcggtttcgccggggccccgcggatcccgacgctgcgggccgcgccaccgagggtgacggcgcgagcggtggccggggacgccgaggacaagtgggggaaggagccggcagccgaccagggccgagcctgcgctgaagcggccgaggcgcccgcggatgtgccggtgactagcgaggtcgcggagctcaaggcgaacctgaaagaggcgctgtacggtacggagcgcaggctgcgcgcgttcagtgagacacgcgcggaggaggtcgagctcatcacg

SEQ ID NO: 24260 - DNA, 254 bp, Oryza sativa
  Clone ID: uC-osflM202124h04b1
agatcgctccaccccaatcccccacccgcagcatggtcctatcctcccgcgcggccgccttcccccacatctccctcccctcccctcgcccccgcgactacctccgaccgccacccccggccccgcgctccctgcgcctcgaccgcgtcgtcgccgacaccaccgccgagctgggcctcgatggcggcggcggcggcaggctgctcgccgacgccatcgagcacctcgagcgggagccggcgttcgcgggggaa

SEQ ID NO: 24261 - DNA, 522 bp, Oryza sativa
  Clone ID: uC-osflM202124h05b1
tttgtgcaaagaaggagagagcttggcgagctggggggatggccccctccgtgatggcgtcgtcggccaccaccgtcgctcccttccaggggctcaagtccaccgccggcatgcccgtcgcccgccgctccggcaactccagcttcggcaacgtcagcaatggcggcaggatcaggtgcatgcaggtgtggccgattgagggcatcaagaagttcgagaccctctcctacctgccaccgctcaccgtggaggacctcctgaagcagatcgagtacctgctccgttccaagtgggtgccctgcctcgagttcagcaaggtcggatttgtctaccgtgagaaccacaggtcccctggatactacgacggcaggtactggaccatgtggaagctgcccatgttcgggtgcaccgacgccacccaggtgctcaaggagctcgaggaggccaagaaagcgtaccctgatgcattcgtacgtatcatcggcttcgacaaccgtaggcaggtgcagctcatcagcttca

SEQ ID NO: 24262 - DNA, 483 bp, Oryza sativa
  Clone ID: uC-osflM202124h06b1
tttctagcaaagaaggagagagcttggtgagctgcggagatggccccctccgtgatggcgtcatcggccaccaccgtcgctcccttccaggggctcaagtccaccgccggcatgcccgtcgcccgccgctccggcaactccagcttcggcaacgtcagcaatggcggcaggatcaggtgcatgcaggtgtggccgattgagggcatcaagaagttcgagaccctctcctacctgccaccgctcaccgtggaggacctcctgaagcagatcgagtacctgctccgttccaagtgggtgccctgcctcgagttcagcaaggtcggatttgtctaccgtgagaaccacaagtcccctggatactacgacggcaggtactggaccatgtggaagctgcccatggtccggtgcaccgacgccacccaggtgctcaaggagctcgaggaggccaagaaggcgtaccctgatgcattcgtccctatcatc

SEQ ID NO: 24263 - DNA, 384 bp, Oryza sativa
  Clone ID: uC-osflM202124h07b1
tcgataaaaatcccaaaaacaaaaaataataaaaaaaagaaagagagagacatttcgcatctgctgccctgcctcctctcccatcacctgcccattttttcacattgaggcccctctgaaaatattatatttacaactaggtccctggccgggccggccggccaccggaaggagcacctcgccggagaaggctttgtctcttctttttcttctcctcctcctcctccatcggcggcggcatggggttctcgctgtaccccatgaagacgtcgacgcgcatgctgtggagcaccagcttcttccgccataaggtcgcctcctccttctaagcccacgccctctcgggcggcggcggcgagcccggcgcggagcgcgccggtggta

SEQ ID NO: 24264 - DNA, 466 bp, Oryza sativa
  Clone ID: uC-osflM202124h09b1
tcgctttcctccacctccaccccccacccgccgatcgccccccgcgagctcgtcccggcgcggcgggcgatcgctccacccacccatccacctccaccttcccgcgcgattccccgagaggcgaggcgaggcgaggccgctatagctccgctccgctccccgaccaccacgacgcggctggcggcggatcctccactccacccacccaccccgcttccgccgatcggatcgcgtgctccccccgaggtagaggtgatgataaatcatagttagtgacttagcttgcagcagttctttcttgcagctaagacaaataataattggcgttatggcatatagaaatacggtatgcactccccaagtaattgatctagaaactgaacaagggcactctcatattcattctgaaagttttaatcgcactgtgaatgattcatctgaccaaagtgcacaacatgctgtcaga

SEQ ID NO: 24265 - DNA, 581 bp, Oryza sativa
  unsure (1)..(581): unsure at all n locations
  Clone ID: uC-osflM202124h10b1
ttcccaccctgcctctctccgcaccggtctcgggcccacctgagaccggccgccgtttctcggtgtctctctctctctctctctgcccgctccggcgagagggggtgtcacacacacgtacgtacgggaggatcagggcaacaagtgaccgcgcgcgtgcgtgctctccccccgaccgatgacaacgatgcgcgcctccgccgcgctgctgctggtggcggcggcggtcctcgccgccgtgcgcgccgaggacccgtaccacttcttcgattggaaggtgacgtacgggaccaggacgattatggacgtggcccagaaggtgatgctcatcaacgacatgttccccggcccaaccatcaactgcagctccaacaacaacatcgtcgtcaacgtcttcaaccagctcgaccatccactcctcttcaactggcacgggatccaacagaggaagaactcgtggatggacggaatngccgggacgaattgcccgatccagccgggcacaaactgtacgtacaaatggcaggccaaggaccagatcgggaccttcttctacttccccagcatgggcatgcagcgcg

SEQ ID NO: 24266 - DNA, 435 bp, Oryza sativa
  Clone ID: uC-osflM202124h11b1
tcgtttactgcgacctaccgcaaccgaagagtcgtgcgattcgtcgacaccggcaccgacaccgtcggcagctcgatcccccgcactcaggggggatttggaatagacgaatggtggcgaacaaagtggttgcggcagcatccgtggtggaagaaccggctccctcttcagcggcggcggcagacccgatgaggctggcctcttggcggacgtatccggcgaagcgcagggccgatgtggctcgagatggatgcggagccagcgccgctcgagctgaacactaccaacaggtcgggcctcttagccgacgatctcataccgaccggatgtccgtcagtaacctcactgtcaaccagcacgggcacgacttccgcgtaaggcagagcaaccggcgtgccaccacacgccgaacgaagtactacttccagatgggcg

SEQ ID NO: 24267 - DNA, 467 bp, Oryza sativa
  unsure (1)..(467): unsure at all n locations
  Clone ID: uC-osflM202124h12b1
tcgttcgatcccgacggccacaatgccggcctccggcaaggaggcgcatagccgggccggcgccggcgtccgcatgatctcctcggaggagctccgcgcgcacgcgtcgagggacgacctgtggatctccatctccggggacgtgtacgacgtcacggcgtgggtgccccaccacccgggcggcgacatcccgctcctgacgctggcggggcaggacgccaccgacgcgttcgccgcctaccacccgccgtcggcgcgcccgctcctggggaggttcctcgtgggccggctcgaggactacacggtctcgccggcgtccgccgacttccgccgcctcctcgcgcagctctccttcgcggggctgttcgagcgggtggggcccaccccgaaggtgcangtcgccgggatgctgctccttctctgcgccgcgctctactgcgttctcgcctgcgcgagcgcgtgggcgc

SEQ ID NO: 24268 - DNA, 409 bp, Oryza sativa
  Clone ID: uC-osflM202125a01b1
gtttagttggatggggagggggagaaaccccagggggggcaacattaaccccacgcggggatggcttccgccggcaatcgccgcggcggcggggggcctcccggctccagcgacgactccgggggtggttgggagactgttgacaagagggtaaagaaaccagcgcaacaagtagggaaggggcagtggggacaatggaattctacaaatgctggacctgcacctactgcaccacggaaaggatctggagcttttcatcatgctggaaacactatggttcgacattctgatcgtaggccaccaagaggcactcctaggccaccaccacaaaacaagtctatagaggcaggactgcaagcaccccacggaggtgagactgcacctctggcaaatggcaggcagaagagag

SEQ ID NO: 24269 - DNA, 483 bp, Oryza sativa
  Clone ID: uC-osflM202125a03b1
cttataattgaaagagcggtatggtggtactatagtgggtcaattgcaccgccttggggcctcacttgattggtctcgtgaggcttttacaatggatgagcaaaggtcaaatgctgtaactgaagcttttgtaaggttacacaaggaaggcctgatatatagagataaccgccttgtgaattgggactgcacacttctgacttcaatttctgagatagaggttgatcatattgatcttaaagaagaaacaatgttaaagatccctggttatgctactcctgtacaatttggtgtgttgatatcttttgcctatcctcttgaagaagggctaggtgagattgttgttgcaacaactcgaattgaaacaatgcttggtgatacagcaatagctgttcatcctgaggataaaaagtatatgcatctgcatggacggtatgcagtccaccccttcaatggccgaaaactcaaaataatctgtgatgc

SEQ ID NO: 24270 - DNA, 139 bp, Oryza sativa
  Clone ID: uC-osflM202125a04b1
ctttcatgttaccaccacggtcctcctcccccccgccggggcttctttaaaagcctgtgcggcctcaccaccgacatcgactttgcctttccagctaccaacccccccacattgccgggagacagctcgccccgggcgg

SEQ ID NO: 24271 - DNA, 124 bp, Oryza sativa
  Clone ID: uC-osflM202125a05b1
cggtttacagggggtcgtgtacgtacagggcgaggaccagaaaaaactcgacatgatgtccaacgtggaggtcatcaacttcctcaactgcagcgggcgcaccacgttgattatgaaccaatat

SEQ ID NO: 24272 - DNA, 530 bp, Oryza sativa
  Clone ID: uC-osflM202125a07b1
tcgcgtctcggcgcgcgcggcgggcgtcgggctggggggggagaacacgctgccgcgggacgacggcacggagcacgaccaggtggtcgccgtcgccgccgaccgcgcggcggaggaccggatggtcgccttcacctacctccggatggggcccgacctcttccacccggacaactggcgccagttcgtcgccttcgtccgccgcatgttcgagtctggctcgccgcgggaggccgcctagagcgccgcgcacggcgtcgcgcaagccaccggctctctcgagcacgaggccgcggtcgcgctccggagctagcacggtcagacgctcatatacaccgtcgcctcgaggtcggattccgatgtgggatcattcgatctccctttgtttattcttctttttgccattttgtacagccttttggggagctttggatttgtgcttttttgtctcgggaggaaaaccgctctggagggcgaagagagcgtcatttccttcccgtgaaatcacgaatcatttacggtagagatga

SEQ ID NO: 24273 - DNA, 551 bp, Oryza sativa
  Clone ID: uC-osflM202125b07b1
cttactccccccaaaacccacgccgccggcgccgtctcttccctcccttctccgccgcagccgccgtatcccccctctctctccgggagctgaaagcgcccgaggaggagatcaggttctttggccatggtgggctggcgggcggcgggcggcgctcgtgccgttcttcgccggctcagcgcggcggcggaggcggcggcgaagcaggacggccgtgtgttcgctgccagctatagcggcagcagtggcggcgtgaatgctccgtttggcttgggccaatatgcaaaccttttgagggcacaagcttttgcatccaggggagtcgcgctgaacttccatcagctgatccgcaatgctggaatatctaccacaaggaacctgcttgctgcagatgatgctatggttcctgtttcttctcctttgacacctccacttggtgatggagaacaaactgacaaaaagggagcaattgttaagcggctgaaggtccaagccatcaagaaggatatcaagcagagccccagaaggtgaatctggtagcaaaagctggt

SEQ ID NO: 24274 - DNA, 476 bp, Oryza sativa
  unsure (1)..(476): unsure at all n locations
  Clone ID: uC-osflM202125b08b1
tcggtgtatagagaggcttctcccccccagatccgatccccgcacagagcccagatccaccgaccactcccccagatccaccccccaccggcggccgtgcagcggcggcgtcggcggccatggagaagccatgcaccctcctggtccacttcgacaagggctccccctccatggccaacgagatcaaggccgacctcgagggcagcgacgtcgccgccaaggtcgacgccatgaagcgcgccatcatgctgctcctcaacggcgagaccctcccccacctcttcatcaccgtcgtccgctacgtcctcccctccgaggaccacaccatccagaagctcctcctcctctacctcgagatcgtcgacaagcgcgacgtcgcctccggcaaggtactcccggagatgatccctatttgccagaacctncgcaacaaccttcagcaccccaacgagtacatccgcggggtcacgctgcgc

SEQ ID NO: 24275 - DNA, 439 bp, Oryza sativa
  Clone ID: uC-osflM202125b09b1
cctctccccaccaccgcctccctccctccgtccctccccgatctcgcctcgcctcgcctcgccgcgccgccgcgccgccccagatccgccccgcctccggccatccccgccgccagatccggtgggggaagccccctctctccgctctcgcccaagggggggttggtttatccggtaggaggaggagtagtgagggtggtggtagtggtttaagcggccatggcggcggcggaggagaacagctcgctgttcctcatattcatcctcaccatgatcgcgctccccctcgtgccctacaccatcatgcgcctctgccgcgccgccaacgtcaaggccaagaccatccactgccgctgctccggctgccaccgctccggcaagtaccgcaagtcgatctacaagaggatatccaacttctcgacatgcagtaacctcacca

SEQ ID NO: 24276 - DNA, 467 bp, Oryza sativa
  Clone ID: uC-osflM202125b10b1
tcgatttattttcatgcaggaggtgctacgcagcaagataattgcagaggtgaagcaggcagtggtaataaatgaagatggctctgaaaagttaaagctgaaagatctttctgatgcgatttaccaagatatcgggagcaaaataatgggtcaaatctcagacgagatatggggtgtcatcctatcaaatgaaattgatatccgaggaacttctgaaactgtctacaatagaatgatgaaccctgagcagcagcaggaccctccttcaaagaaactgaagaggaatgccaaagaggagcaagtgtccccagcaaaagcatcaacttctgttgcagtccagctggaagatgatgatccagaggaaccaccaggatttggtttcagtgatcatcagcgcagcaacatcatggcaactcagcagcagcagtcgtcaaatactgagaatcataaccaagtgaaaccaaatg

SEQ ID NO: 24277 - DNA, 404 bp, Oryza sativa
  Clone ID: uC-osflM202125b11b1
tcgcttggcctcctgtgccgctgcacatatatgtaggtcccaccaccacgagtgatctagcagaataaatcatgggaccaggccacgggccccttggtcttcttgtcgccgcggtggcgttgctggcagctggcttcctcccgcacgctgtggcgaaaaaaggcggcgccgtgccaccggcgggtgctgacatatgctctcgcactccatttccagacacgtgcaagagcaccggcgggcgggacgcgttcaaaaacccggtgatcgacatcgtggctgtgctcaacatgcaggtggacgcgttttctaaaagcacagggcatacgagggagcgcgtgaccaaagtgtgtcccggggcgcacactctaaaaacacacgcgctctgattttgtgacaccctgtgc

SEQ ID NO: 24278 - DNA, 472 bp, Oryza sativa
  Clone ID: uC-osflM202125b12b1
tttcgtatatcagctatcacaattcacaagaagcgggggtcggttagccacgctggctttctgcacccgcctgagcaccggcggcggcgccgtccagcgccgtccccggcggtcggcaagcgctgcgaccatcacctgccaccggagctgctcctcctcctcgtcggccagggtagtccgcacaggcgccgacgcggcacctgccgcggccacggcgcccgccgtgccgcagaccaacgagtgctcgcttccgacatgggcggagttcgagctgggcaaggcgccggtctactggaagaccatgaacggtcttcctccatcggctggagagggcctgatccttttctacaacccggcagcgaccaagatgacccccaacgctcagcttggcatcgcgtataatggtgggtttaaccagccgatcatgtgccgtggtgagccgaggcatatgacgctgcaagagaggggatca

SEQ ID NO: 24279 - DNA, 353 bp, Oryza sativa
  Clone ID: uC-osflM202125c01b1
cacctcctcctcctccccccgatcgggtgggcccggctcctcctgcggcggcgccgccaccggcgccgcagataggagaagatggccgcacttgataccttcctctttacctcggagtctgtgaacgagggccaccctgacaagctctgcgaccaagtctcagatgctgtgcttgatgcctgcctcgccgaggaccctgacagcaaggtcgcttgtgagacctgcaccaagacaaacatgggcatggtctttggggagatcaccaccaaggctaacgttgactatgagaagattgtcagggagacatgccgtaacatcgggttttgtgtcacctgatggcgggctcgatgctg

SEQ ID NO: 24280 - DNA, 406 bp, Oryza sativa
  unsure (1)..(406): unsure at all n locations
  Clone ID: uC-osflM202125c03b1
cgtcactgtcaagtacagggtgttcgccggcacgtgggacgtcgccggcgtggcgccgccggacgacctggacctcggcgactggctggacgccaaggccgactcctacgacatctacgttcttgggttgcaggagatcgtgccgctgaacgcgaggaacgtgcttggcccgacgaggagctcggcctccatgaaatggaactcgctcatcggcgacgcgctgaacaggttcactaccggaagaagaagacgagacgacgacgacgacggcgacgacgacgagggggcgcagcggcatggtcagcagcagcagccgttcaggtgcgtggtgagcgagcagatggtgggcatcttcgtctccgtgtgggcgaggagtgggctccgncgacacgtncgacacgccgcc

SEQ ID NO: 24281 - DNA, 441 bp, Oryza sativa
  Clone ID: uC-osflM202125c04b1
gtttatttctttctgaacacagcaccacccctggtgcgtcatctcccacctccctgctgaggggagaacctctaagccatggccatgccatcgccccctccaagatgctacagcacccaccgtcaacattcatccgttcctaccactacgtccaccgaggcaccgaccaccggcgcgcataacataccctccctcttcaacaagaagccccccccgaagcccaaaccccatgacatcacctactcccgcccgaacatcagcgatgagctcgcccaactgtacggccatctcatgaggagactacttgtccgaaggtctcctgaaccgctcagaggtgcctgactacctcaactgatacgattccccaaactacaggtacgacccttttggcctcagcaagaagccagaagacttctccaagtaccaggcctatgagctgat

SEQ ID NO: 24282 - DNA, 515 bp, Oryza sativa
  unsure (1)..(515): unsure at all n locations
  Clone ID: uC-osflM202125c05b1
gtcgccttaaccaccgccgcctcgccgcagcatcacgggcagccgccgccgccggcgccatggactacggcgcgtcgtgggggctgaccccgttcgtcgcgggcgacccgatcgtccacgaccttctcgagcgggagaagctgcagcagcggagcggcatcgagctcatcgcctcggagaacgtcacctccttcgcacgcatggacgccctcgggtccgcgctcaccaacaagtactccgaggggatgcccggtgcgcgctactacggcgggaacgacgtcatcgacgagatcgagaacctgtgcggcgaccgcgccctcgccgcgttccgcctcgacgccgcgtcgtggggcgtcaacgtgcagccctactccggctcgccggccaacttcgccgnctacacggcgctgctcaacccgcacgaccgcatcatggggctcgacctccccttcggtgccacctcacccatggctactacaccgcgggcgggaagaagatcttcgcgacgtcgatct

SEQ ID NO: 24283 - DNA, 454 bp, Oryza sativa
  Clone ID: uC-osflM202125c06b1
agtagttgatctgctgctgcaacaagatggatgggaggactcccaagtactccgaggcccgttatgatgaaatcgtgaaggaagtctcatcctacctgaagaaggtcggctacaaccctgacaagattccctttgttcccatctctgggtttgagggtgacaacatgattgagaggtccaccaaccttgactggtacaagggccccaccttgcttgaggctcttgaccagatcaacgagcccaagaggccatcagacaagcccctacgtcttccccttcaggacgtgtacaagatcggcggtattggtaccgtgcctgtgggtcgtgttgagactggtgtcctcaagcctggtatggtggtgacctttggtcccagcggtctgaccactgaggtcaagtcggttgagatgcaccacgaggctcttcaggaggctcttcctggtgacaacgttgg

SEQ ID NO: 24284 - DNA, 495 bp, Oryza sativa
  unsure (1)..(495): unsure at all n locations
  Clone ID: uC-osflM202125c07b1
catcgttgcaccagatacagaaatattctgtgatggggagcctattaagagggaagatgaggaaaggcttgatgaggttggatatgatgatgttggtggagttagaaagcagatggctcaaatcagagagcttgttgagcttccactgcgtcatccccaacttttcaaatccattggtgtgaagccaccaaagggcatattgctgtatggaccacctggttctggaaaaaccctcattgctcgtgctgttgcaaatgagactggagcctttttctttttgattaatggacctgagattatgtcaaagctagctggagagagtgagagcaatctcaggaaggcatttgaagaagcagagaagaatgcaccatctatcattttcattgatgagattgattccattgctcccaagagagagaagaccaatggagaagtggaacgtcgtattgtttcacagctgntgactcttatggatggactcaaagctcgntctca

SEQ ID NO: 24285 - DNA, 421 bp, Oryza sativa
  Clone ID: uC-osflM202125c10b1
tcggttgcaacatcaccacagatcgatcgagacaggggctgacatcaacgtgagggggggaagaacaactaaccatgtccatgcaggagatgctccgcattggagacgacgaccgccggagcgatgctctggaacgcgagctcaaggagaatctgaggttgcgcggcgatgcctcaccggcgaaatgcaccacgcaggagcagcggtggcggtctgatcatggcatcgtcgacgcccgcgagaggttcgtgcaggcgtacggccgactcagggacgatctcctccgcgactactcgtgcgagctcaccgactaagtcaggcgctggcttgctcagatgatcgactacaatggacctggaggaaagttgaaccgatggctgtcaatgatagacagttacctgctgctgaaacaaggaagtga

SEQ ID NO: 24286 - DNA, 397 bp, Oryza sativa
  Clone ID: uC-osflM202125c12b1
tcggtttgtaaaggttgtaatgctctacgaagggggggactatgtgcactcgggggggcggtaagatgagtttttgtccatgaaattggacactgtgaatccccacctggacttcaacagtatgcctaacctccttgctaaagatatgcaccagtcatgcatgccgatacagagctcacattctccactagagacctcaggtgctccgatgacctacattaaccagctctcagcaagggaaccctttccgttgtggcctgacgaacggcatggacaaccagggttctatgcacccattgcacccggcattttgtcctccaatgggctcacaccatcctattctcaatggggatagagatgcggcttctcaggttgatgctttctggcaagatgatct

SEQ ID NO: 24287 - DNA, 367 bp, Oryza sativa
  Clone ID: uC-osflM202125d02b1
ggtttgttcgggagaaaatatcaaagcaaatggggaagttgtatcactggcctaagcttatacaaattcctattttagatgaagcgagtggtgcgacaaagaaaccagttggaatattacatgtaaaggtaattcgagccatgaatcttctcaagatggacttgcttggaaaatctgatccctatgtcaagctccgtttgagtggtgagaaactgccttcaaagaagacgtctattaagatgagcaacctgaatcctgagtggaatgaacacttcagatttatagtcaaggatcctgaaacacaaatccttgagctccgcatgtttgattgggaaaaggttaaaaatgcatgataaactgggtatgc

SEQ ID NO: 24288 - DNA, 386 bp, Oryza sativa
  Clone ID: uC-osflM202125d03b1
ctttgtttgtgagtccaagaaatttttgaaggcgcacgttgagcctgaccaagtgggtttcttggttgaaggaatactttgatggtaaattgtctccattcaggaagtctgaacctattcctgaggtcaacgacgagcctgttaaggttgtggtcgctgataacgtccatgattttgtcttcaagtctggcaaaaacgtccttgttgaattctatgcaccatggtgcggacactgcaagaagctggctccaatcttggatgaggcagctacgacgcttaaaagcgacaaggatgttgtcatcgctaagatggatgcaactgcgaacgatgtgccaagcgagttcgatgtgcaaggttaccccaccctgtacttcgtcacccccagt

SEQ ID NO: 24289 - DNA, 479 bp, Oryza sativa
  Clone ID: uC-osflM202125d07b1
tcgcttcctcctccacacacgagcgcgtcccggggcgccgcgccgagatctaggggtgggcgcgcgcgacgccccccccccgcggcgaggaggatgagcagcccccatggcggcctcgacgaccagatcgagcgcctcatgcagtgcaagcccctccccgagcccgaggtcagagcactttgcgagaaggcaaaagagatattgatggaggagagcaacgttcaacctgtaaagagtcctgttacaatatgtggtgatattcatgggcagtttcatgaccttgcagaactgttccgaatcggtggaaagtgcccagatacaaactacttgtttatgggagattacgtggatcgtggttattattctggtgaaactgtcacgcttttggtggctttaaagggtcggtatcctcagcgaattactattctcagaggaaaccacgaaagtcgacagatcactcaagtttatggattctatga

SEQ ID NO: 24290 - DNA, 396 bp, Oryza sativa
  Clone ID: uC-osflM202125d10b1
gttcacgtcgactccggcaagtcgaccaccaggggccatctgatttacaagcgggggggtatcaacaagcgtgtgatctacaggttcgagaaggaagccgctgagatgaacaagaggtccttcaagtacgcgtgggtgcttgacaagctcaagggcgagcgtgagagaggtatcaccatcgatattgccctgtggaagttcgagaccaccaagtactactgcacggtcatcgatgcccctggtcaccgtgacttcatcaagaacatgatcacgggtacctcccaggctgactgtgccgtgctcatcattgactccaccactggtggttttgaggctggtatctccaaggatggccagacccgtgagcacgctcttcttgctttcactcttggagtg

SEQ ID NO: 24291 - DNA, 468 bp, Oryza sativa
  Clone ID: uC-osflM202125d11b1
tcgcttacgcgtgggtgacggcggacgtgctggcctgttctccggctctctctgtcttctcctcctcctcatctcggcaaaaccaccaccgcattgccggtatatttagttaagccgcgatagaggagggagggatagcgtatagggagagggaacaggggagggtggcgagctcctgaccatctctctccgccctctccgtttcgccgctcctcgccggatccatctccaaaagaggacgtcggagaagatgatgggcggattcctctcccgggtcctcctgttggcctttggctacgcctatccagcatatgagtgctacaagactgtcgaactgaataaaccagagattgagcagctcatattttggtgtcagtattggattctagtagctctgatgacggttatggagagatttggagattttacaatatcatggctaccattttactcgggagcaaagctgat

SEQ ID NO: 24292 - DNA, 414 bp, Oryza sativa
  Clone ID: uC-osflM202125d12b1
tttgtgttctcatcgtcctaccttcatacagctgaaagaattccttcatatacaagatgaaggtaggaggagggccgggagctcgacggatttcgatcaattgtggtttttttttttgtggtaaccgtataagagaggagattttgtttaacgtagctagatcatatctgagttgagttttagcaatggaggtgctgatccggtggagcaaactgccggcggccggctccttggtgctgtacgccgtcttcttgctgtcggcggcggccacatcggaggccaacatcggcgagtacgacgagtactggcagaagcgcaagctcatggctgatgccgccgccgaggctacctacaagcgtgaccccttcgaggtcaccaacagctttaaccgcgccgttcacaaatcggaagaag

SEQ ID NO: 24293 - DNA, 348 bp, Oryza sativa
  unsure (1)..(348): unsure at all n locations
  Clone ID: uC-osflM202125e01b1
cttccttttgctcctcctcctgcaattccacttgcatgcgtcggcacangaggaagggggctaangggggatcggctccattcctcattcttcattccatttgcgcgcgtgattcgggtttcttttccttcttggcacctggttcttggtcggtttcccgccttctcagaggtcggtcgattggatttggagcccggggcccagccttgcctcaacggctgtgttggcgtgttcttattggattcttgaccggattggattttggcggttccaatttttggtgggttgctcccattcttgggtgatttggtcggaagatgatcaagtggggcattcgtagcaaccgga

SEQ ID NO: 24294 - DNA, 423 bp, Oryza sativa
  Clone ID: uC-osflM202125e02b1
attgtttatatctctctgtttttttccacctgtgcggctttctttgtcgggtctggctgtgtcactctctccatttccaaccgcatcgtcgtgctgatgggccatgtacgaccaagccggagagtgagctcgctcgccgccgtgcatgatgggtttgggccgagcgtggactggccaacctacacgcgtgatccatggttgctctgcccggatctgtaccggtggctaggagagctcgcttcaaaggactgtggaatatttggtgttccctactatgtcccctaaggcgctggagcctgcacatgtctgcgcgtgttcagagaaatcaggttaggctacgatactacgggggatctcattcttggctccacagatgcagatcaggccgagtgtgatggcttactttcaacgctggatgatcat

SEQ ID NO: 24295 - DNA, 428 bp, Oryza sativa
  Clone ID: uC-osflM202125e03b1
tgttggttcaatgtgtaggccgtttagatgttgcaatgtttaatgcaatccttcgtgaatcggctagtgagatacccactgatcctatatctgacccaattgttgacccaaaagtcctgccgattccagctggtgatctaagctttgggtcaggcgctcagctgaagaattctatcggaaattggtcgagatggttaacagataactttggaatcgacgctgatgactcagaggaggatggtaccgacacaggaagtgaaagaagtgcagctgaatcaaagtcttttcaactgcttaatgaattgagtgatctccttatgctcccaaaggacatgcttatagaaaaatctatcaagaaagagatctgcccttcgattggcctcccgttagtaacaagaatcctatgcaacttcactcctgatgagttc

SEQ ID NO: 24296 - DNA, 303 bp, Oryza sativa
  Clone ID: uC-osflM202125e04b1
aatccagcagcagaagcagcagcgggaggttattctccgccgatggggtccacaatcatgggcccaacctcccgcgtcctcgccgccaagacccccttcctcggccatccccgcccctccaatgcccccgtccgcgacatcaccgtcgccgccaccggccacatcaccatgagcaaggagctgtggtacgggccggatagggtgaagtacctggggccattctccgcccagacgccgcccaacctcatgggcgagttcccgggcgactacaggtgggacaccagcggggctctcctcggaccc

SEQ ID NO: 24297 - DNA, 295 bp, Oryza sativa
  Clone ID: uC-osflM202125e05b1
attacttttcatccccaaaagccccaaacccggggaggctagaggaggaggaggaggagctcgtctgcggcgagcgatggcggcggcggtggcggagctgtgggagacgctgaagcaggcgatcgtggcgtacacggggctgtcgccggcggcgttcttcaccgccgtggcggcggcggcggcgctgtaccacgtcgtgtcggggatcttcgcggggccgcccccgccgccgccgcggccgagggacgagcccgaggcggagccgctcccgccgcccgtgcagttcggggggggt

SEQ ID NO: 24298 - DNA, 403 bp, Oryza sativa
  Clone ID: uC-osflM202125e06b1
ctgtttgtgagcgctcctcccgtctctcccccaacccggcgccagccaccgagctcgccaccgtctccgttgcctcgccgtgctctaggttctcggatggaggccgaggcggcggcgaagagggcgcgggagagcggtgacgcggcggcggccggtgccggctagcaagccggtatctctgccgtcatccctggatggttctccgagattagccccatgtggcctggtgaggcacactcattgaaggtcgaaaaggtactattccaaggaaagtcggactaccaaaatgtgatggtgtttcagtcctccacgtacggcaaggtgcttgtgctggatggagtgattcaggtcactgagagggatgagtgtgcttaccaagagatgattacccacctcccccttt

SEQ ID NO: 24299 - DNA, 321 bp, Oryza sativa
  Clone ID: uC-osflM202125e07b1
gttccagtcaccaacccattccggcggcggcgggggaggagaccgagatggggagggagaacccgccgctccggtggccgccggggttccgcttcagcccgaccgacgaggagctcgtcctctacttcctcaagcgccggatcgccaccggccgccccaccccctacatcgccgacgtcgacgtctacaagtcccacccctcccacctccctgagaggtcggcgctgcggacgggggacaagcagtggttcttcttcagccggatggaccgcaagtaccccaacggctcgcgggcgagccgcaccaccggcgagggctact

SEQ ID NO: 24300 - DNA, 447 bp, Oryza sativa
  Clone ID: uC-osflM202125e08b1
tcggtttctctctctctctctctctccgccttgccggcttccttcgccgtctctccctctttccctctctcgattcccaaccgcaacgccgagcggcgtcgccatggacgacgaagccggggagtgagctcgccggcggcggagcatgatgggtttgggccgtgcgtggtctggccaacctacacgcgtgatccatggtcgctctgcccggatctgtaccggtggcgaggagagtttgcttcaaagtcctgtgtaatattttttcttccctactatgtccccttcggcgctgctgcctccacaggtctgcgcgtgttcagtaaattcagtttaggcgacgattctacggtggatctgattcttggcgccagagatgcagatcaggccgaggctgatggctttcttcgtcggctggatgatgataggtgatacgggggatctgattct

SEQ ID NO: 24301 - DNA, 484 bp, Oryza sativa
  unsure (1)..(484): unsure at all n locations
  Clone ID: uC-osflM202125e09b1
ttggtttcaaccacagcaaggcaatagcgccagccaccgctcgcatccacagctgctgattcgtaggaggagcaggccagggagggattcgttgattttatttggcagggaaggagatccgagaggaagaaggggaatatagatcgatggggaagtacgtggagctgctcgacatgggggtgcgcatcgccgcgcggttccactcccactgcccgcagacggcgaggatgtactaccacccgccgccgtcctcctcctcgtcgccgtcttcctccgccgccgccggttcggccgacggcggcggcggcggctgcgcgggcttcgccgcgaagaggatgccccgggccgccgccgacaccgcggagatcatcctctacgccgtcgtctagagttagcctctagactctcgatccagacgcttcacgcggaaatggaggaatgnatttttcttttggttttctttaaagaagaaaaaaacaaagtg

SEQ ID NO: 24302 - DNA, 479 bp, Oryza sativa
  Clone ID: uC-osflM202125e10b1
tcggttcgctcatcgccatctctctcagctctgacagctcactgcatcaatggccgcggccaccatggcgctctcctccccggggatggcccgcgcggggccggcgaacttcttcgggctttttggggaagcgcggatcaccatgcgcaagaacggcccgaagcccaagcccgggggggtcgccgggaacccgtggtacggcgccgaccgggttctctaccttgggccggtcttcggcgagccgccgagctacctcaccggcgagttcccgggcgactacgggtgggacaccgcggggctctccgccgacccggagacgttcgccaagaaccgggagctggaggtgatccactcccggtgggcgatgctgggcgcgctcggctgcgtcttcccggagctcctcgcccggaacggcgtcaagttcggcgaggccgtgtggttcaaggcgggctcgcagatcttcagcgagggcgggcttg

SEQ ID NO: 24303 - DNA, 369 bp, Oryza sativa
  Clone ID: uC-osflM202125e11b1
tcggttactgcagtattgccttccactgcattgatgcttgctgtgcctgcacagattgctggttgcaaaactgttgttcttgccacaccccctagtcgtgatggtagcatatgtaaggaggttctttactgtgctaaaaaagctggtgtgacacatgtattgaaagctggaggagctcaggccatttcagccatggcatggggaacagtctcatgcccaaaggttgaaaaaatatttggacctggaaatcagtatgtcacggctgcaaaaatgattcttcagaacagtgaagccatggtttctatagacatgcctgctggcccttcagaagtattagtgatagcggataaatatgcaaacccagatcat

SEQ ID NO: 24304 - DNA, 411 bp, Oryza sativa
  Clone ID: uC-osflM202125e12b1
tcgttttcctctcgccttctcccgtcttctccttcgggttagctacctccttattgaaccatgggtaaggagaagacgcacatcaacatcgtggtcattggccacgtcgactccggcaagtcgaccaccacgggccatctgatttacaagcttggaggtatcgacaagcgtgtgatcgagaggttcgagaaggaagccgctgagatgaacaagaggtccttcaagtacgcgtgggtgcttgacaagctcaaggccgagcgtgagagaggtatcaccatcgatattgccctgtggaagttcgagaccaccaagtactactgcacggtcatcgatgcccctggtcaccgtgacttcatcaagaacatgatcacgggtacctcccaggctgactgtgccgtgctcatcattgac

SEQ ID NO: 24305 - DNA, 379 bp, Oryza sativa
  Clone ID: uC-osflM202125f03b1
accactttaaaattagcgaggcgaggaggaggaggcggaggaggggagccgcaggaatggcggcgatgcagagctggcgcaaggcgtacggcgcgctcaaggactccaccaccgtcagcctcgccaacctcaactccgacttcaaggatctggatgtggcgatcgtgaaggcgactaaccacgtggagtgccctcccaaggagcgccacctgcgcaagattgttgccgcgacgtccatcgctcggcctcgggcagacgtcgcctattgtatccacgcgctttcccgccggcttgcaaaaacacgcaattggattgtagccttgaaaacacttgtagtgatccatagacttcttcgagagggtgaccctacttttcgaga

SEQ ID NO: 24306 - DNA, 434 bp, Oryza sativa
  Clone ID: uC-osflM202125f05b1
ctttgttttggatttagttattgaggctgttatggaaaatgtgaaattgaaacagcaaatattttctgacttggagaagtactgggcttcccattgcgtccttgctactaatacatatacaatcgatcttaatctaattggtgagaaaacaaggaccaaagaccgtattgtcagcgcacacttctttagccctgcacatgtcatgccacttctggaaatagtccggacccagcacaccttaccacaagatgtcgttgattagctcgatgttgggaagaaaatcatgaagacaccaatagtggctgggaactgtaccggtttcgcagacaacagaaagttctttccttacactcagtcagcacttctgttccgtgatcttggaatggatgtgtacaaaatcgatcgtgcatgtaccaaatttggaatgcccatgg

SEQ ID NO: 24307 - DNA, 438 bp, Oryza sativa
  Clone ID: uC-osflM202125f06b1
gtgtgagtcacggttgggagagacccgaggcaggtgggcggggagggaatcgatgacttcttcccctcccacacgcatcccgtcgtctcccctgctcccctcttgcacggatcctccaccggtgactggatcccgtcctctctctggccgctagcggcggccgtggccttccccaccgtgagcggccacggcagctccctccactacttccgatgggtggatccggcggtggcggtggcggcggcggtggcggtggccaagggcggatccggcggcagtcggtggtggtggcatcggtgacggccaccgcctctcttctgccttcggtggcggtagtggcgtccggtggatccggcggcagcggtggcagtggtggcagcggcgagtggatccggcggcagtggcggccgccgaaggcgatcccgcggcagtcggcga

SEQ ID NO: 24308 - DNA, 328 bp, Oryza sativa
  Clone ID: uC-osflM202125f07b1
cttcagagacacagtgctttctccctctcgaaccttccgcctccttctagaaccttccactcccgctcctcgtccgggcaaggaggtgccgcctccctccgcctcgccggagatggcgacgatggagaacgtgatcgtgctcgtgaaccgcatccagcgagcctgcaccgtcctcggggaccacggggggggggacggcaccggctccctccccacgctgtgggaggcgctcccttccgtcgccgtcgtcggtggccagagttccggcaagtcatcggtgctggagagcatcgtgggccgcgacttcctgcctaggggctcaagtatc

SEQ ID NO: 24309 - DNA, 397 bp, Oryza sativa
  Clone ID: uC-osflM202125f09b1
tcggttcaagggccccaccttgcttgaggctgttgaccagatcaacgagcccaagaggccatcagacaagcccctgcgtcttccccttcaggacgtgtacaagatcggtggtattggcaccgtgcctgtgggtcgtgttgagactggagtcctcaagcctggtatggtggtgacctttggtcccagtggcctgaccactgaggtcaagtcggttgagatgcaccacgaggctctccaggaggctcttcctggtgacaacgtcgggttcaacgtgaagaacgttgcggtgaaggatctgaagcgtgtgtacgtggccttcaactccaaggatgaccctgccaaggaggctgccagcttcacctcccaagtgatcatcatgaaccaccctgggcagatc

SEQ ID NO: 24310 - DNA, 467 bp, Oryza sativa
  unsure (1)..(467): unsure at all n locations
  Clone ID: uC-osflM202125f10b1
ctttacgatcttggaggagtacttctccacggacgacgtcgcggcgacggcgaacgagctgagggagctgcgcgtgccgtgctaccactactacttcgtcaagaagctggtctcggtggccatggaccgccacgacagggagaaggagatggcggccgtgctgctgtcctcgctgtacggcgacgtcatcgaccggccggaggtgtacaaggggttcggcaagctcgccgagtcctgcgacgacctgtccgtcgacacgcccgacgccgtcgacatcctcgccgtgttcgtcgcccgcgccatcatcgacgacatactcccgccggcgttcctggccaagcagctgacgtgcctgccggagggatgcaagggcgccgaggttcttcacagggcggagaaaagctacctgtccgtgccgcaccacggcgagatcatcctgcanaggtggggcgggagcaagagcatca

SEQ ID NO: 24311 - DNA, 465 bp, Oryza sativa
  Clone ID: uC-osflM202125f11b1
tcgtttatggacacctgttcctgtgactaacacagtgagaagtacacatagcaacagtatttcatctacatctgttcccagttcatcaagtcctgataacaaccccagtatgcaaacttctcagcaagagaagcctagcatagacatcaagcatgggaatgatgtgcctggcagcggttctattctgactgaactagatactgtgaactccaatatgaagaatctgaggataagtttggatagccatgataccatacatgttaagcagcagtggccggacaatgtcttgcagcagtttggcccctcacctttagtccagggtgatcctattcaaatgattcctcaaggaacacatcttccccatgttccttttgttgagaacttgtcgcatactcaattaaaattaccaactggtgacatgcagcaatttttaccaccgcctggtatgacaacacctttttatgc

SEQ ID NO: 24312 - DNA, 394 bp, Oryza sativa
  unsure (1)..(394): unsure at all n locations
  Clone ID: uC-osflM202125f12b1
cttcgatcgatcggctcgtctctccccttccccgcctccatgccaccgacacgcgcctcaagctagaaccctagccccgatccccgatggccgcgccgcccgtctcgggggatggggcggcggcggcggcccccgtggtggccctgggcgccgcgggggcggtgggggggccgaggccgtacgaggtggccgtcgcggcggcggagctccggcccgtggactgcaacctcgcggcgctgtgcgaccacgtgcaggcggaggggttcgggtccggggcgttctccgacgtcgtcgtcgaggccatgggcgccacctaccgnctncatcgcctcatcatctcccgcagcgcctacttcaggaatatgctacatggtccttggagggaggctggagc

SEQ ID NO: 24313 - DNA, 298 bp, Oryza sativa
  Clone ID: uC-osflM202125g01b1
gctagttatgtggtggtaggggatagatccggggcggggggcatgagcatggatgatgtggtgggtagtccaccaagtccgtacatgggcagggatgagaagaagaagaggtggaagtggaagcttgggccggccaccatcctggggttctagctgctggagagcatcgccttctcctgcgtggcgctgaacctggtggtgtacctggacaccgggcttcactggaccctcgacttcaacgccgcccatgtcgacacctggaatggcaccaccttcatcgtccccgtcatcggggctt

SEQ ID NO: 24314 - DNA, 257 bp, Oryza sativa
  Clone ID: uC-osflM202125g02b1
attttatctaaggatgtacaactgttacatgaaggccgaggttttttcaagcataacggcattaacgtaccaatggaaatacctatacacgggacacaagaggacctcgatatccataaaccaggcagataacaactgggaaatcgattaaattcaacgctacaaggatgcgaggtgggtgaccccttcaaaagccttggggcgtatatatgggtttgacatatgccacatctcgccgtctgtgaggcagttgcaac

SEQ ID NO: 24315 - DNA, 328 bp, Oryza sativa
  Clone ID: uC-osflM202125g03b1
attcgttcccctccttttgatttcgagcctttgccccggttactcctatcctcctgtggctctttccccttcctctctctcgtgctcctatcaggcggacgccgcgagatcgggaggaggcggacgcggcgggagaggccatcggccatcgccatcgccttcaccatcaccgaccgcgcgccggcagcggcggtgctcgcgactcgcgcggtgtggatttgtggggggcaggggggattcgagtggcggcgcgtttggggttgtcgcgaggcggattccaggggggcgctgtgggagttggtctggggggagagatctgtaagggagc

SEQ ID NO: 24316 - DNA, 271 bp, Oryza sativa
  Clone ID: uC-osflM202125g04b1
ctttgtttctggacatactctactactactagcgagggggctagctaactaactgcgtggctatggcccccaccgtgatggcctcctcggccacctccgtggctccattccaagggctcaagtccaccgccggcctccccgtcagccgccgctccaccaactcgggcttcggcaacgtcagcaatggcggaaggatcaagtgcatgcaggtgtggccaattgagggcatcaagaagttcgagaccctatcgtacctggcaccactcacccg

SEQ ID NO: 24317 - DNA, 416 bp, Oryza sativa
  Clone ID: uC-osflM202125g05b1
agtaaatttcgagagaacaactaccgcgtgagcggcgtcaaggcagcgatttacccaggaaatgtgctctctcttcacatgaagaagccgccgggtttcaagtacaagagcgggatgtacctgtttgtgaagtgccctgatgtctctcctttcgaatggcatcccttctccatcacttctgcacctggagatgactacctgagtgtgcatatccgtacactaggtgactggacgactgaactcagaaacctgtttgggaaggcttgcgaggcacaggttacttctaagaaggctaccctttcaagacttgaaactacagttgtggcggacgctcagacagaggatactaggtttcctaaggtccttattgatggggcctatggtgcacccggcgcaaaactacaagaagtatgaca

SEQ ID NO: 24318 - DNA, 403 bp, Oryza sativa
  Clone ID: uC-osflM202125g06b1
ctttttatggctgcaacataacctaccgaagaagagtggatataatacgcgagtttttgagtgcaaagaggctgcccgtgctcttttatgtgcttcaggctgtgaagatgcatcaagtattcttcgtaatgttaacccagccatatacgaggctcagaagtgtatattagaagaaaatctcgctaggagagctgagcactacttctctgagatgaagcgagttgtcaagggaagagatgcgtgggctcgtggagatcttcgtgagtttggccagctgatctctgcatctggtcgcagctccatactgaactatgaatgcgggagcaaggagatgatccagctgtacgagatcctcctcaaggcacccggcgtcctcggcgcgcggttcagcggcgccggcttc

SEQ ID NO: 24319 - DNA, 427 bp, Oryza sativa
  unsure (1)..(427): unsure at all n locations
  Clone ID: uC-osflM202125g08b1
tttgttcgcgtccgcaaagaaactagtctacgccggggcctcgtcaacctccccacggcggccaccgccgcacgggctccggcgacgaacgagggcgctgctctcgagcgcgatggggggccggaagcgcgcgctgctggtgggcatcaactacccgggcaccaaggcggagctcaaggggtgccacaacgacgtggcccgcatgcgccgcgccctcgtcgaccgcttcggcttcgacgaggccgacatccgcgtcctcgccgacgccgaccggtcggcgccgcagcccacgggggccaacatccgccgggagctcgcgccgcctcgtcgcgacgcccgccccggggacttcctcttcttccactacagcggccacnggacgcggctgccggcggagacccggcaggacgacgacaccggctacgac

SEQ ID NO: 24320 - DNA, 542 bp, Oryza sativa
  Clone ID: uC-osflM202125g10b1
tcggttaaaaagttcttccggcatatatagatgcaaatccgcagtggagaaaatggatcactcactgagacatatctgaaatgcattctccctccatttgcatcactaatttttaaagttgtttcataatataagacgtgcatgcaaacatgtcattaactagcacatcttttcattgaaatattattatttaaatcctccatcattaagatctctaattttattaggtgcatgtattctattaaaatattattatttaaatctttcatcatcaagatctctaattttattgggtgcatacattctatttatcagggtaatctaaactatgagaagataattattttttggtctttgagttaatgattgatgtgccttatattattttggaatggagggagtaattctgtagcagtattactaggagcattgctacacgtattaaatttcttttacaaaactcttacaaacaatgatctcaaccattttatttaaatagatggaatttatagaaaatttatatgtccttaccgcgtgacaca

SEQ ID NO: 24321 - DNA, 320 bp, Oryza sativa
  unsure (1)..(320): unsure at all n locations
  Clone ID: uC-osflM202125g11b1
tcggttaacaccggcggcggcggcggcgtcctggtcgtgtcacgccgcatgatccggccggagttcaaggagctgccgccggagcatgatacgacggttcaccttacgccgtgggatctccggctgctcaccgtggagaacatccagaagggcatcctccttcccaagccacccaccggcggcgagactctcgtcgaacacctggcgtcgtcgttcgctcgcgcactcggccgcttctaccccttcgccggccgcctcgtcgtggaagaggtggatggcggagcgtcncctgcgagcagcgtatctgtctcgctgcgctg

SEQ ID NO: 24322 - DNA, 379 bp, Oryza sativa
  Clone ID: uC-osflM202125g12b1
tcggtttgatctaattaatttacctcctccacctcggcctccttcccccgatcggatcggtccggctcctcctcctccgccgccgccaccgccgccgcagataggagaagatggccgcacttgataccttcctctttacctcggagtctgtgaacgagggccaccctgacaagctctgcgaccaagtctcagatgctgtgcttgatgcctgcctcgccgaggaccctgacagcaaggtcgcttgtgagacctgcaccaagacaaacatggtcatggtctttggtgagatcaccaccaaggctaacgttgactatgagaagattgtcagggagacatgccgtaacatcggttttgtgtcagctgatgttggtctcgatgc

SEQ ID NO: 24323 - DNA, 199 bp, Oryza sativa
  unsure (1)..(199): unsure at all n locations
  Clone ID: uC-osflM202125h02b1
tttgtttagctnntncatcgatcgatctatcctgtcggtgccgccggggctcttcggcgcacggtgccctctcgtgccttggagaccccgattcggccgctgcgacggcgacgacgagccttagtaggacagacttgttctccaagagaagttactggagcgaagagaaatggacacccggattaaggtggcgctggac

SEQ ID NO: 24324 - DNA, 259 bp, Oryza sativa
  Clone ID: uC-osflM202125h05b1
tgttaattcgccgattcttctttgatttgttcatgttgggtttttttatttttttccctgtgtttgcctttttattcgttcgattgtggggggagggaagagtttggtcgaccggatttcttggtggtttgcctggatctggcgtcctagaggccctcgtgcccgaatcccgattcgattcgcctcggcgcggcgccgctcgcctcgacgggtttggatctcggggtgggattagaggggaaaggggggggggcccttt

SEQ ID NO: 24325 - DNA, 418 bp, Oryza sativa
  unsure (1)..(418): unsure at all n locations
  Clone ID: uC-osflM202125h07b1
tcggttagcttctccatcgatcgatctctcctgtctgggccgcgggggctctccggcgcacggtgccctctcgtgcctcggagaccccgatccgccgccgncgacgncgccgacgtgcctgagtagtacagtcttgttgtcgaggtgaggtgagtggtgggaggagaaatggacaccgggatgagggtggcgctgcaccggcaggtgtcgtcggggtcgctgaaggagagcggggagctccggcggcagtcgtcgctggagtctccccggacggggagggcggcgacnaggttcctgttcgggaggcagtcgtcgatggacccgaaccggcggcgcgggcggagccagagccccgtcggcctcgccgaggacctgaccgtgccggacaacctcgacgccaccatgcagctgctctttc

SEQ ID NO: 24326 - DNA, 393 bp, Oryza sativa
  Clone ID: uC-osflM202125h08b1
gatgctccccaaccactggaggcggggcggggtcctcctgctgctcctcctcctcgcagaatgcaacgggcaattcaagctatcgggtcacatggcagtctcctcaagtctgctgttctgcgacacatcagtgctccaaaaccatctattttacctgctgtatattcacgctccatgtcagtttcatctgctcaaatagaggagagtggatttgagactgccactgtggcagatattttgaagtctaaggggaagagtgctgatggatcttggctctggtgcactactgatgactctggctatgatgctggcaaatctatgacgcaacacaatgttggagctctggtggttggtaaacctggacaggataaatcaattgctggtattggtact

SEQ ID NO: 24327 - DNA, 346 bp, Oryza sativa
  Clone ID: uC-osflM202125h10b1
tcgttttcgcgtgggcgcaaggagaggagggggggggggcatctaggcggagagcgcggcatgtcgctgcacccaagctagcggttggaggtgcagaggaacacgctacaaggtgtgagaggacgcctagggagggaagcagcgagtcgaggacaaccatggggagatccagaagagccaggagacaggagagcacttctcaagaagcgactcaaggggcttcaggcccaggcgcgcgttatcttctccgccgcaaccggtgtctattataagctcgaaagccttcctgctatgattggaggagtttattcggacgataacaacctttaaattgagggcacaacac

SEQ ID NO: 24328 - DNA, 438 bp, Oryza sativa
  unsure (1)..(438): unsure at all n locations
  Clone ID: uC-osflM202125h11b1
tcgattttaatttctctcttcatcatctcgctgtatgcgtgcaatggcggtggcgcaggtgagcaggacggccgtggtggcgctggtcctcgtcgccgtggtggtggcggcggcgtacgtgccggcggcgaccgcgtacggctgcttcgacgactgctacgagcgctgcgccaacgggaagacggacgacgcctgcaactccatgtgcaagcaggcttgcagcggcgccggcggcggccccgccgaggcgcccgacgaggcttgatcgccgacgacgagcgccgccgcgccgccgtccatcgatctccatatccgcccgtagccgccggctatatatacactcgattatttgtttgtttgttggtaattcaagtttgattgatttaaccgtcgagtatctaaattagnttggtttggttggttaatttatgcaagctg

SEQ ID NO: 24329 - DNA, 515 bp, Oryza sativa
  Clone ID: uC-osflM202127a02b1
gtttttcaagagcggtgcagggttcacaaggcaggagaaaatgggggagatcaccaaggtcatggagtaccaggccatcgcgaagcagaagcttccgaagatgatctacgactactacgcctctggagctgaggatgagtggactctcaaggagaacagggaggcattctccaggatcttgtttcgtccccgcatcctgatcgatgtctcaaagatcgacatgtccgcaactgttcttgggttcaagatatcaatgcccataatgattgctcccagtgccatgcagaagatggctcaccctgacggagagtatgcaacagccagggcagcttcagcagcaggaactataatgacactgtcatcttgggctacttcaagtgttgaggaggtcgcctcaactggaccaggaatccgtttcttccagctatacgtgtacaaggacaggaatgtggttgagcagcttgtcagaagagccgagagagctgggttcaaggcgatcgcactgaccgtggaca

SEQ ID NO: 24330 - DNA, 402 bp, Oryza sativa
  Clone ID: uC-osflM202127a04b1
ggtcacggccacaccacccaccaactgagagctgggcaggcgagcgagcggacatggcagcatcgctccaagccgcggccaccctgatgcagccggccaagctcggcggccgggcctcctacgccgcgctgccatcgcgcccgtcttcgcacgtcgccagggcgttcggcgtcgacaccggtgccgccggcaggatcacgtgctccctgcagtccgacatccgggaggtcgccaacaagtgcgccgatgccgccaagctcgacggcttcgccctcgccacctcagctctgctcgtctcgggcgccagcgcggagggcgtgccgaggaggcttaccttcgacgagattcagagtaagacgtacatggaggtgaagggaaccggcacggcgaaccagtgcccga

SEQ ID NO: 24331 - DNA, 403 bp, Oryza sativa
  Clone ID: uC-osflM202127a05b1
cttactctttcctcctctcctctctctctcaccgactggaggttgggagcgggcgggagtggcggccccggcagcggcgggcacggcaaccactgtggcgggtggcgggcacggcgacagtctgcggcggcggatccggctgggccgtcctcggaagggcagcctcgatctacgctggtccttcgtcgggaaggctgtgcgacacccaagcggctgaaggatcaaggattcaaggccctgaggtggtatggcgagccaggagaagcccacgccggctcggcatgcgtctgcgcacccaccggcgccggaggtcgcgcctcttgtgtgcggtccgagggggatatttcacattgtgcaaggttatcacatattttttctacaagaatttgacattcacgctaac

SEQ ID NO: 24332 - DNA, 377 bp, Oryza sativa
  Clone ID: uC-osflM202127a06b1
ttttattctgtgcctttgcctggagcccaactcgggggccttatggactcactcagcaggtgctccacgcaattccccaccggggagcccgaccggcatgccggagagcaacggcgccaggtgcggcgcggcggacaaggtgaagccggcggccaagcccacgttggaggagccgggcgccatcgccgggaacatatccttccacgcgcagtacagacccgacttctagacggtcgacattggtcacaagcgggccttgtactaacaccgacgagagcgttcgagaccacttcgtacagagatggaacgagacgtacttgcatttccacaagagccgccacgaagcaaacgtactacctctccatggagtacctgca

SEQ ID NO: 24333 - DNA, 424 bp, Oryza sativa
  Clone ID: uC-osflM202127a08b1
ttttattcgcgtgcgtatcgtatcgaggcgtggcgagttcgtgaaagaaaacgccggttcgttttgccggctgcatgcaggatggcgttagaggccgtggtgtttccgcatggccatttcggctactggtgcatgaaggtactcctcggcatacgggatgccgtggtgcgacgttctggctgctgacggcagtgcaggaggattcggtgagttttactgactggacgagcgggatgaccagctgcatgtcgcctccgttgatgagtgggaagaggcatccaaggataactctgatgcttacacggagggcatggcagctgtggcagaccgggcagagcctgaggacgtcgttgggaggaaacggaagcggacgaacgtcgtgaagaacaatgaggagatcgagtgccaacggatgacccacatt

SEQ ID NO: 24334 - DNA, 375 bp, Oryza sativa
  Clone ID: uC-osflM202127a09b1
ttttcttacccaaacagtccttaggagttggaaggattcaatcaaggccctccatccctgtgatgacatcctggatcttgctgaaaaattgcaaatcgtaaagaggtgcatcgactcagctgcaactagatcatgtactgatcctgatttatttgggtggccagttgtccagtatggaggccccatgcagagtccaggaggaagcgtcttgtggaatggcattagcaccggagcaaggccaagacatagcagccctgattggtggtatgatgatgtttcatgcttaagccttccattatacaaaaaagtcatctcagctatggaataccgaggaatcaatcaggatattattgttggatccttgaaccactatgc

SEQ ID NO: 24335 - DNA, 358 bp, Oryza sativa
  Clone ID: uC-osflM202127a10b1
ttcttcccctcctccgccgccgccatgtgccgtggagagtcccggttgcccacccccgcggcgacgatggcgggccaggagtcgctcaccctggcgggcgttctgcgcggtcacaacgacatggtgacggcgatcgcggcgccgattgacaactcgcccttcatcgtctcctcctcccgcgacaagtcgctgctggtgtgggacatcaccaacccgtccaccgtcgtggccacggatcccgaggcggccccgccggagtacggcgtatcgtaccgccgtctcaccgtccactcccacttcgtccaggacgtcgtcctcagctccgcgggccagttcgcgctctcgggatcctgggacg

SEQ ID NO: 24336 - DNA, 456 bp, Oryza sativa
  unsure (1)..(456): unsure at all n locations
  Clone ID: uC-osflM202127a11b1
tattggcgctcattattgatggtagatgcttgaggtgtgctctagacccaactctgcgtgtagatcttcttggtttgagtttaatttgccactcagttgtatgttgccgggtttctccattgcagaaagcacaggttgctagcttagttaagaaaggtgcccataagataactctcagtattggtgatggtgctaatgatgtgagtatgattcaagctgctcatgtggggattggcatcagtggacaagaaggaatgcaagctgttatggctagcgattttgccattgctcagtttcgatatcttaccgacttgctccttgtacatggaagatggtcatatttgagattgtgcaaggttatcacatattttttctacaagaatctgacatttacgctaactcagttcttgttcactttccaaactgngttttccggtcagcgatttatgatgactg

SEQ ID NO: 24337 - DNA, 539 bp, Oryza sativa
  unsure (1)..(539): unsure at all n locations
  Clone ID: uC-osflM202127b01b1
ctttaagatgccattgctactcctcatcgccatggtcgtcgtctccctctcccgtggcaacggggagcagaccgacctcacgcgggagacgttccccgcgggcttcgtcttcggcaccgcgtcgtcggcgtaccaggtggaggggaacgccctccagtatggccgagggccctgcatctgggacaccttcctgatgcaacctggtgtaactcctgataattcgaccgcgaatgtgaccgtcgacgagtaccaccgctacatggatgatgtggacaacatggtgagagtgggcttcgacgcgtatcgcttctcgatctcctggtctcgcattttccccagtggacttgggaagattaacaaagacggcgtggattattaccacaggctcattgattacatgcttgctaacaacattattccatatgttgtgctctaccactacgaccttncacaggtgctccatgatcaatacaagggatggctacaccccagaattgtgagagatttgtgagattgcagacttctgctcaagacatatg

SEQ ID NO: 24338 - DNA, 518 bp, Oryza sativa
  unsure (1)..(518): unsure at all n locations
  Clone ID: uC-osflM202127b02b1
cttttccccgcgcgcgctctcccctctcccctcccaccaaccccaccccatcctcccgacctccacgccgccggcaatggcggcgaccatggcgtccaacgccgcggctgcggcggcggtgtccctggaccaggccgtggcggcgtcggcggcgttctcgtcgcggaagcagctgcggctgcccgccgcggcgcgcggggggatgcgggtgcgggtgcgggcgcgggggcggcgggaggcggtggtggtggcgtccgcgtcgtcgtcgtcggtggcagcgccggcggcgaaggcggaggagatcgtgctccagcccatcagggagatctccggggcggttcagctgccagggtccaagtcgctctcaacaggatcctncttctctccgccctctacgagggcacaacagtggtggacaacttgctgaacagtgaggatgttcactacatgcttgaggccctgaaagccctcgggctctctgtggaagcagataagttgcaaaaagagctgtagtcggt

SEQ ID NO: 24339 - DNA, 87 bp, Oryza sativa
  Clone ID: uC-osflM202127b03b1
caatagatctatctctcctctctttctctatgcgggggaggtaaggcaggcgcggcggctctaaccccaccgaaaaatcctgcttag

SEQ ID NO: 24340 - DNA, 461 bp, Oryza sativa
  unsure (1)..(461): unsure at all n locations
  Clone ID: uC-osflM202127b04b1
attgatccatgggcggcctctccatggaccaggcgttcgtgcaggcccccgagcaccgccccaaggcgtccgtcgccgaggccgacggcatcccggtcatcgacctctcccctctcctcgccgccggcgatggcgacgccgacggggtggacgcgctcgcggcggaggtcgggagggcgagccgggactggggcttcttcgtggtggtgcgccacggtgtgcccgcggaggcggtggcgcgcgcggcggaggcgcagaggacgttcttcgcgctgccgccggagcggagggcggccgtggcgcggagcgaggcggcgccgatggggtactacgcgtccgagcacaccaagaacgtcagggactggaaggaggtgttcgacctcgtnccgcgccagacgccgncgccgtcgacgaccgtcgtggccgacggcgacctggtgttcgacaacaagtggcccgac

SEQ ID NO: 24341 - DNA, 420 bp, Oryza sativa
  Clone ID: uC-osflM202127b05b1
cttataccatataagcttctaagggtcagggactgtggtttttcctgcttggtcattttgcatagcataccacagaatggagctacttgcttattgcttctcggaattcaggctaactgcatggagaatgtgttttgccttttgaaggaacacgatccgagcacaataacatacttaatttttgcagacggtgtctaacaatcgggattgcattgcatatactgtcattctgggccaaccataggatttgcaagtatttaggtgcctgtttacagaagattagacgatggcttgtgttctagtagtcgtttattcagtgaactagagatgatgtactgctgaatattgatgatgttcgttgattcaaatagtgtcgctgttacttgtgttgctttaccgttcgttcaagtcttgggagat

SEQ ID NO: 24342 - DNA, 523 bp, Oryza sativa
  unsure (1)..(523): unsure at all n locations
  Clone ID: uC-osflM202127b06b1
ggtatccctagccctgcccccagccggcgcagggggtcgctagggttagggtctccccccgcccgcgccttccttccttccggccttttcccgtcccctcacctgcggcgtgtgcgcttttctcggcctcgcggcggcgcggcgcggcgcgagccaatgccgtgtgtctgagtctgacccgttgattcttggcggattgatctggaggtgggcttgttggggttgctgtggtagccgggagggaggggaagcggcggcgtttgtttctgaggatatttttggtgcgagatccggcggggcggcgagatgcagcaggatcagcgcaagaagagttctacagaggcggattttttcacggagtatggcgatgcaagtcgatacaagattcangaagttattggtaagggaagctatgngttggtgtgctcagcgatagatgtccacactggagagaaagtggcactcaagaagatacacgatatctttgacacatatctgatgctgcacggattctccgtgagat

SEQ ID NO: 24343 - DNA, 499 bp, Oryza sativa
  unsure (1)..(499): unsure at all n locations
  Clone ID: uC-osflM202127b07b1
gttggcggcgggtcgtgcggcccgcccaaggggccacccggcccgaacatcacgaccaactacaacgccccgtggctccccgccagggccacctggtacggccagccctacggctccggctccaccgacaatggtggcgcgtgcgggatcaagaacgtcaacctgcctccctacaacggcatgatctcctgcggcaacgtcccaatcttcaaggacggcaggggatgcggctcatgctacgaggtgaagtgtgagcagccggcggcgtgctcgaagcagccggtgacggtgttcatcacggacatgaactacgagcccatctcggcgtaccacttcgacttctccggcaaggcgttcggcgccatggcttgcccggggaaggagaccgagctccgcaaggccggcatcatcgacatgcagttcaggagggtgcgctgcaagtaccccggcggccagaaggtcaccttccacgtcgagaagggctccaaccncaactacc

SEQ ID NO: 24344 - DNA, 539 bp, Oryza sativa
  Clone ID: uC-osflM202127b08b1
tttgagacgactgatgatgagctcgatatgggcctgcatggcatgggtcctattggaggccgtggtctatcaacaatgaccagaccaaccacatgatttctgcaacttccgatgactgaacttttgtaaagggatcgagctagctcctcaagctaggagttgtatgatcctgttcgagacaaatgttgacagttgtgcgttggcacatactgttttagactcctcgtgcgttgagatcggatcaaatcgctatttcttgtgcattgcaaccgaaggcttggctgccacaattctttttgtgatattgcgttgattgatggcgaggtcctgaaaggtcaggcagcttcacatgtatagtaaagaactaaaaaggttcatcgttgttgtaactaggatacatcaggtcattgaaaaggtaggggccagtagaatctcagataaattgctgtgcgacggctatagcgtaagggtcttataacgcaataatgcaagcccacaagttgtaacattctagtatttattttctcgaaaatgtatat

SEQ ID NO: 24345 - DNA, 338 bp, Oryza sativa
  Clone ID: uC-osflM202127b09b1
cgcgttatgacgcgtccctcctgccatcctctgctgcgcgatcaccacgatgaggtcacgttcattctgacacggaaaaagcgcgctcgagatgctccactgttcgtcgtgcactgactcctgtctattcagcttgttcttctgggcggctcgatgatatccagacgatccgattgcttgagaaccagatcacgaagactgacagaaaagtacgagaggctctttatctggggatgacagactccggtgtgaaagagcacggcaccatgtgatattggacactcctcctgtgaacctttgcgttgtgcatgctgctcttgtctactacctcaaccact

SEQ ID NO: 24346 - DNA, 265 bp, Oryza sativa
  unsure (1)..(265): unsure at all n locations
  Clone ID: uC-osflM202127b10b1
tcatcagcctgagcancancatctcnctgcgggggtatttttaaaatgctcaccgtttatacccaataccctaaaaaagagacacctcgcttattgcttctcggaacttaaattaacacatttcccaaacgtgttttgccttttgaagaaacaccatcctaccacaataacatacttaaattttccaaccgctttttaaccaaacggaatgcatcgcatatactgtcattcctggccaaccatacgatttgcaaattttcaacat

SEQ ID NO: 24347 - DNA, 366 bp, Oryza sativa
  Clone ID: uC-osflM202127b12b1
tgctgacggctagccgagggtgtggcagacgggggcgtttggctggcgtgacggcgtttgcaggaggggtcagagactggcttggcacagctaggcgcagcggaggctagctcagcgcgagaggcgcgggcggcggagatggaagccggcttagcacgagaggcgcggccgatggagggaggcctgattggcgcgagaggcgcgtccggtggaggaggctggcttggcacaacaggcgcggccggccgtcgaggatgccacctctgtgcgaggtggagctgtcggtgggtgtggcgcggacttcggcgcacgaaggttggccggcggtgggctctggtgcagggtcccacatgtcggcataggttg

SEQ ID NO: 24348 - DNA, 486 bp, Oryza sativa
  Clone ID: uC-osflM202127c01b1
caaagctcgagctcccgctagggtttcgccgccgccatgccgcagggagatcacatagagcttcaccagaagcgccatggccggcgcctggactacgaggagcgcaagcgcaagcgggcggcgcgcgaggtgcacaagcgatccagggatgcccggcagttgcttggtgctaagggtaagaggttcgccaagaagcggtatgccgagaaggcacagatgaagaagaccctgaaaatgcacgacgagtcaacttctcggcagaaggttgatgatgttcaagagggtgctcttcctccatatctgctggaccgtgatcagacacaacgtgccaaggttctcagcaacacaattaagcaaaagaggatggaaaaggctggcaaatgggaggttcctttgccaaaggtcagacctgtggctgaagaagaaatgttcaaagttttacgaactggcaagagaaaaaccaaacagtggaagagaatggtcact

SEQ ID NO: 24349 - DNA, 501 bp, Oryza sativa
  Clone ID: uC-osflM202127c03b1
gtgtgttgttgtaaagttgcgagagagagagagagagagatcagttagtttgttgagtggaagcagatcaggaagatgctggagaagctgtgggacgacgtggtggccggtcctcgaccggagaccggcctcgagaagctccgcaaggccgctacaacccgcccccttgtcatcaacaaagatggcgacggcgaggcgagcggagtggcgtacaagcggacgcagtcgatgccgacgaccccgacgacgccggtgacgccgtcgtcttcgtccccgacgacggcgacgacgacgacgccgcggggcagcaacgtgtggaggagcgtgttccacccggggagcaacctcgccaccaagagcctcggcgccaacctcttcgaccgtccccagcccaactcccccaccgtctacgactgggtgtacagcgacgagacccagagcagccatcgctgaactgaataatccatttgatcgaggctggtcgatctctctgtcacgcca

SEQ ID NO: 24350 - DNA, 507 bp, Oryza sativa
  Clone ID: uC-osflM202127c04b1
gttgtggcgaacccagctcggtgagtcgtcgtcggcggcggcggcgacggcgacggctaggaccacgtgacgcggatcagctcggaggcagcgacgacccatctctgatctctcctcacgttcagaggcgcgaccaagcgtcgagggggagcgctcgacggcgagagtcatgcagggggcgcgtgttaatctgaaggggtggcaacaggctgctgttgcattcggttctgcatttggggccttgcttgaccctagaagagctgatctgatagctgctcttggggagactactgggaagccagcatttcagcgtgtgcttcagcggatgaggaacagtgctgaaggcagggatgttctcctggagcgtcctcgagttatatccacacaagtttctcatgcctgggacatgcctcagaacacatttggtgcagcatatgctcagttcatgggatcaaggaacttctcaccggatgaccgcccacctgtccgtttcatggatacagatga

SEQ ID NO: 24351 - DNA, 485 bp, Oryza sativa
  Clone ID: uC-osflM202127c07b1
tctgactccatcggagtatattagctcgtagctgagtgcggctcagtctgccagctcgatcggaggcgctttcatcgatcggcggcggcagcgatggcacgctccgccgtgttgttgcacgccgtcctcctcgtcctcgccgtcgcggtgtcgtcgtggcgtggcgtggtctccggcgacgcggcggtggtgctcggccggaaggccgccgggatgagtagtgctgcagcgtcgtcgtcggccgacgacgacctgccggcgctgcagatctcggcgaggaaggacggcgccgggaacgataagtacgccgtgatcttcgacgccggcagcaccgggagccgggttcacgtcttcaggttcgacaagcagatggacctcgtcaagatcggcgacgacatggagctcttcgcaaggtgaagcccgggttgagctcatatgctggcaaaccacaggaagctgcaaactccattgctcctctgctagag

SEQ ID NO: 24352 - DNA, 514 bp, Oryza sativa
  Clone ID: uC-osflM202127c08b1
cttgcgttcacccccctaacaactatctcaccccgctaacaactatctcaccggctcgatcaatctctcaccggagatggtgcccgtccggccgtccgcggcggcgctgctgctcgccgccaccgctttcctcgtcgtcgcggtgggcgcccagccgctgagcccggacagccccatcctgagggaccccaacgtgatccccatctacatgacccccggctcgtcgcccaccgtggcgagctgctacaaccagaacaacacggcgtcgggccccgactgcacggtcgagccgcgcgcgtgcccgcgcggctgccgcgacatgtgctacgttcactgccccacctgcaagctcgtctgcctgtgtgagctgaccggcacggagtgctacgacccgcggttcgtcggcggcgacggcaacaagttcctgttccacgggcgcaaggacgccgacttctgcctgttctccgacgccaacctgcacatcaacgcgcacttcatcggcaagcgcaacgcg

SEQ ID NO: 24353 - DNA, 433 bp, Oryza sativa
  Clone ID: uC-osflM202127c10b1
tatatccttttagcttctcagccttttgcctctgggtctactctctttcttggccggctctcttatatccctcaatttaaccatcgagggcggccaaaaaaaagagagaaaggaagagcaaaataacacattacaccatggcgcgattcgtcatcatctccgtcgtcgtcgtcgccgccttcgccgctgccgctgtcgttgaggcccgggttggacctatcgacgtcgctccgaccaacctgatcaccaacccactcggtgccatcatcgacaatggccgcaagatcaccggcgccgtcgtcgacgagtgcgcctggacctgcgatcatgtcgcggcgggtaacaagaagatgtgcaacacgctgaggaagctgccgggggtgagctcgccgaaggagctcctgacggcggcggtgaagctgtcgatgaggaa

SEQ ID NO: 24354 - DNA, 429 bp, Oryza sativa
  Clone ID: uC-osflM202127c11b1
tttttagagcgatccacagagcaaggggacgctgttgtgttcgaatcagaggttgacaaaatatatctagatgcaccagcaaaaattgcaatcattgatcatgagaagaaacggacatttgtcttaaggaaagacgggcttccagatgctgttttgtggaacccatgggacaagaggacaaaaaacatgcaagactttggggatgaagaatacaaacatatgttgtgtgttgaacctgcagccgatgagaagcccattaccttgaagcctggcgaagagtggaaaggaaaaatggatctctccgcagttccttccagttactgtagcgggcagttagatccaaataaggttcttcaaggctgagagttctaatttactacaccatgtacaggaacacttaatgtcacttatattatctggtgctgatgc

SEQ ID NO: 24355 - DNA, 388 bp, Oryza sativa
  Clone ID: uC-osflM202127c12b1
tttcttcccccgctccgctctcgtctccgctggggtctggtctgctctgctgcgagggtgggtgttgcttgtaccgggcggggatggaggcggcgacgatggcgtggacggcggcgggggtggggatggcgctggtgtactggttcgtgtgggtgatgggagcggcggaggtgaaggggaagcgggcggtggatctcaagatgggatccatcacgaacgacaaggtgaaggacaagtacacgcagtactggtcgttcttccgccgccccaaggagacggcgaccaccgaggcctccgccgagaaggtgccggccttcgtcgacaccttctacaacctggtcaccgacatctacgagtggggttggggtcagttcgttcacttctcccc

SEQ ID NO: 24356 - DNA, 510 bp, Oryza sativa
  unsure (1)..(510): unsure at all n locations
  Clone ID: uC-osflM202127d02b1
cttttaccccccgaaacctcgaaaccctagatcggcatatggcctcctccgccgccgccgccttctaccgcgacagggaggacgcggcgccgccgtcgtccggccccgggggaggcggcgccatggcggcgtacgacccgagctacgtgccggactcggtgaagacgttcgtgtcgcacctctaccgccacatccgcgaccgcaacgtgtacgagacgcaccagatgtacgagggcgggttcacccgcctctccgaccgccacttccgcgacacgccgtggccgccggcggaggccgtggcggcgcactgcgacggcgaccacgtcttcctcctcctctaccgggagctctggttccgccacgcccacgcccgcgtncagggcctcaccccggcgcagcgcgccgagtcgtgggacaactactgctccctcttcagcgtcgtcctccgggcgtcgtcaacatgcagctccccaaccagtggctctgggacatggtcgacgagttcgtcta

SEQ ID NO: 24357 - DNA, 548 bp, Oryza sativa
  unsure (1)..(548): unsure at all n locations
  Clone ID: uC-osflM202127d03b1
gtgttctacccattcctttcacatcgatgctgcgccgggggcccacccgcatcgagctccgctcctccgaccgcgacgagctcgaagaccacctccgcgccgccgccgccgccgccgcagcggccagcacccccaccgcctcatccactccgaccacgaccccgccgccctccaactccaaccccctcctccacctcctccacccgccgcctggcgccgcgccctccaagtcccaccgcatcggcctccctaccaatcccaatcccaaccccaaaccctagcctctcctctccccccttcgcccgccttgatggaggtcgagatcaagctccgcctccccgacgccggcgcgcaccgccgcctctcctccttcctcgcgccccgcctccgccgcaccgacgcccagcgcaacctcttcttcgacgccgncgcgcgccccctcgccggcgncaccgncgngctccgngtccgcctntacgggctcgacgaccgcgccccctcccgcgccgtcctcgcgctcaaggcgccgccgcgcatcgacgcgggcg

SEQ ID NO: 24358 - DNA, 440 bp, Oryza sativa
  Clone ID: uC-osflM202127d04b1
ctttcctcccgcgactatcctcgccacaaacggggacttgcccgtcgagctctccggtatcctgaccatctgccgtagctgcctacctccctaaaattgcatcctcacgccatcgagccgacaccacttcctcttctgatgacatgacaatgatggcatggtgatcaatctggtgacccacacccttctcttcataacatggggagtggaccatgcacagctagctttgggggcactgtgatagaaatcgatagtgtagctctatggggatcgaactggagggccactgacagattatgggcaggggcactcaagctcaacatgaagttgtcaatccaaggcaatgcgctcgagggcggtataatcaacgccgacgtctgtgtagcttctagctctactttacaagaaggtgacggactgtgaggggaccagagacagcg

SEQ ID NO: 24359 - DNA, 556 bp, Oryza sativa
  Clone ID: uC-osflM202127d05b1
attatggggaagattttttttgcatctcatcctgtggctctcgccgtctctcgccggtcccccccctttccaggctccaatcccgccgccgcgtaggatggccaagacgcggcagccgcagaagcgggtgctggagtcgttcaccatcaaggggcccgacggggtcatcaagcctggggatactgtgctaatgatggcacctgactcatcaaagaaaccatatgtggcaagggttgaggaaattgaggcaacaggacctcaagcctctcaagtgaagatcaaggtgcggtggtactaccgcccagaagagtccattggtggccggcggccattccatggttcgaaggaagtatttctttctgaccactatgattcgcagagtgctgacaccatagagggcaagtgttatgtccacacctttcgagattacaccaagcttcgatctgtcagcgctgaggacttcttttgccgctttgagtacaaatctgccacagggcagcttgtgcctgaccgtatagctgtgttttgcaaatgtgagatgccatacaatcctgat

SEQ ID NO: 24360 - DNA, 551 bp, Oryza sativa
  Clone ID: uC-osflM202127d06b1
tttctacctcgacccactcacctcgactgcgacgcgtggcggcgggaggagaggagaggagagggatatggagggcggcggcggcgagagggcggcggcggtggtgcggcggctgatggccgtgaacgcggagtctcgtaagagcttctcggagatcggggaggaggcggggctgaccaacgtgtacgtggcgcagctgctgcggcggcaggcgcagctgaagccggagaccgcgccggcgctgcgggcggccgtgccggggctcaccgaccacctcgtcgcgctcatgatggagccggcgttccgctcctaccacccggacatcgtccacgagcccgccatctacagattgaatgaagctgatatgcattttggagagagcatcaaggaaattatcaatgaggagtttggtgatggaatcatgtcagctatagacttctactgtttcgttgacaaggtacaaggtgctgatggaaaagatcgcgtggtggtcacattcgatgggaaatatctttcctacagtgagcagagatctgatcatatgatgtcta

SEQ ID NO: 24361 - DNA, 451 bp, Oryza sativa
  Clone ID: uC-osflM202127d07b1
ctccgacgaatttctcgctagggtttcgcgggtgaaggcggcggcggcggctagggtttcgaggcgggccacatggcctcgccggcggcggagggggacgcggtgagcgcggggttcgcggagctggagcggcagcagcagctgctggcgagctgcacgaggctgtacaagcagctggaggagcacttcgcgtcgctggagcgcgggctggcggcgaggtcggactcgctccgccacaagcgccgcgcggcggaggcgcgggcctcggccgccatggactcgctccgccgccgcgaggcctccatcgatggctccgtctcccgcgcgctcgaccacctcgacgacctcgcctccgcctcgtcggtgccgtccgacgccgccgcggcggcggagggggtggccgagagcctgagggcgatgtgcgccaggatggactccgcggggttcttcg

SEQ ID NO: 24362 - DNA, 65 bp, Oryza sativa
  Clone ID: uC-osflM202127d09b1
tttcagtatgtacacgatctgtgcgtacgtgtgatcctatacgttttatgaattgcatgttgtcc

SEQ ID NO: 24363 - DNA, 440 bp, Oryza sativa
  unsure (1)..(440): unsure at all n locations
  Clone ID: uC-osflM202127e01b1
ttcactttgaattgttttcattgtcccctcctcgggtctcccatcgcgtcgtccggcccgggcgactcgagagacgacgctgccgccgcccccttcctcttcaacgcctcctccctcacctcgccgccgcctgagcgggcgctggcaaagccgtgcgctcgcaaggacggtggcggcggggccttgtctcacctcccctttgcgcccaacggctggggacgccgcttagagtggtggtggcggtgcccagatccgcgccgtggccggccggatctgggggagcgatagccggtggcagggaatgaaggtggcggcggtggttgacacggcggcgtgggagttggcggctggggacaccgctcggagcgacggaggcggtgcccagatccacgccatggccggccggatctgggggagcggcagccggcagcggngaatga

SEQ ID NO: 24364 - DNA, 496 bp, Oryza sativa
  Clone ID: uC-osflM202127e02b1
ttttatccccccctcccctccctccctccgccggggcgccgtctcaaaatggccggcacctcctccaccgcctccgccatggcggtggccgccacctcccctaccattgccactgcgccattctcgtctcttcctctccgccttcgcctccgccccaaacccctcctcttcacttctcgcctcctcctccccgtccccaagtcctcctcctgggttgaatccgtctcggaggaaggggaggaagaaggcgtggaggaggattccgaggaatccggtgccgcgggggaagacgatgacggggaggacaacgacgaaaagccgcggcctgagccggtggccgcctctgggttcgagttcgcgtcgccgccggagggctacgtggagccggccccgttcgacgagctgcccccggagtcgcccgaggacgtggcagcggcgtacgaagcgctctacgggcccgcctttagcggcgagacggtcatggggcacaacgtct

SEQ ID NO: 24365 - DNA, 538 bp, Oryza sativa
  unsure (1)..(538): unsure at all n locations
  Clone ID: uC-osflM202127e04b1
cttgatgaagagaagagacacccaacaacccaaagcctagcgcctctgcgctcgaggcccccccgaatccgcgaatccgccgactcccatggcgagccagggagagccctcctcctcctccgatccgaaggggaagaaggatttctcgacggcgatcctcgagaggaagaagtcgccgaaccggctggtggtcgacgaggccaccaacgatgataactccgtcatcgggatgcaccccgacaccatggagaagctccagcttttccgcggcgacactgtgctgctcaagggtaagaagagaaaagacaccatctgcattgttcttgctgatgacacctgcgaggagccgaagatcagaatgaacaaggttgtcaggaagaacctgagagtacgacttggtgatgtcgtgtctgttcatcaatgcccagatgtcaaatacggcaagcgtgtgcacatacttncaattgatgatactgttgagggcatcaccggaaacttgtttgatgccttcctgaaaccgtactttctttgagcatac

SEQ ID NO: 24366 - DNA, 421 bp, Oryza sativa
  Clone ID: uC-osflM202127e05b1
gtttataaggccgttacgatcccgacctgaagatgatgaccgactagataatcctgtgtttttaagctctgttagctgctgacccagtagagtgtagggatcagggattcagtgtttcctgcaccgacaccaccggcagcgttggccaataatccggtgcgctagtagtaatcagtatcacaatgcctgaacaaaagagatcaggaacaaataagtagccccagcgcatggcttggcctgtcaggtagctaatttttatttttctcaatcggtagcttatttagcatgctttgtcagttgtcagcctagttgtacggttttcttatgaatgtttgtacacctttttcttttctcgctagtattcggcgtgtacgaatcttaattaagattggaatgacatgttattggatattgtcgttgt

SEQ ID NO: 24367 - DNA, 524 bp, Oryza sativa
  Clone ID: uC-osflM202127e06b1
tttaccacaccttggctgtgtgcgcgggtgcgggacgaccaccaacaacaacaacaacaacaacctgcgccacctacgcctgggatgttgacacggttgctccgacggcgtccgtgaaggcggaggcggggttcacgagcggatccaacgtgtcggtgctcgtctccttctccgagccctgccccggcggaggcggattcacctgcaacgccacctactgccatctgagcgtgtacggtcccgggcgcgtggatccgtcgagtcttcaggtcctccgccctgccctgcaatactccgtccacgtcaccatcccgccggagttgctctatggccgcctcattctcgtcatggccaagggcttctgcaccgatgctgccggccaccacttcatcagaaccgccaactctaccttcaccctgcgcttcgacagacggagcgactcgatgaacatcggcagcagcatccctgagaagctgcttcagatcgagggcgccaccaaggtggtgggagccaccaacgacgac

SEQ ID NO: 24368 - DNA, 471 bp, Oryza sativa
  Clone ID: uC-osflM202127e07b1
ttacggtcgtattggcccacgtgatgatcccaaggtgcgctccaagatcctgtgtgaggagttcggctgggacaaggatcttgcaaagaagatttggtgttttggacctgagacaactggccccaacatggtggttgatatgtgtaagggagttcagtatctgaatgaaatcaaggattccgttgtggctggtttccagtgggcatcaaaggagggtgctctggctgaggagaacatgcgtggtatctgctttgaggtgtgcgatgttgttctccatgctgatgctattcacagaggtggtggccaggtcattcccacggccaggagggtcatctatgcttctcagctcacagcaaagcccaggcttcttgagcccgtctacctggtggagatccaggcccctgagaatgcccttggtggtatctatggtgttctgaaccagaagagaggacatgtgtttcatagagatgc

SEQ ID NO: 24369 - DNA, 391 bp, Oryza sativa
  Clone ID: uC-osflM202127e08b1
gtgagatgggaggagagctagctagccgccggggctgagctcgcctccccgcctcccgatccccgcgacccctcgcagccacacccccaccggataacgcaacgccttccccctcccccatcaaaacccctctgcccggtcgcgcgccaactgatgtgctcctccgacgccgacgccgcaaccaaccagccagctcagccatgcagcccgactccgccttccaccgcatcgcccgcgttgccgcccacctcagcccgacgccgtgcccccagatggaggaggggatgaggccggcgccctgcagggccaacggcggcaccccggggatcaaggcggccgtcatgcgcgcggaggaagggaacgggcaggcgttggaggtggtcatgaagat

SEQ ID NO: 24370 - DNA, 535 bp, Oryza sativa
  Clone ID: uC-osflM202127e10b1
ttgagggggcgcgagatccagatctggcgccgatgcgccccccctccctgctctccctcaccctcgactccgcgctcctccgcatcgcccacctccacgacctctcccgcctccccgaccacctcctcatcgacctcttccgtgtagagaactatagctgccggtaagctgacagaaaaagtcctgaagttgtttctggcaacggattgcgaggaaatcgccttgcttgttcagttgctcaacattaagcagccgcttgtaccggtccttcccacgaggtgctctgagaagttctagaagtgacactgattaggtcagtcttggttacctgagaaaagatgtctttggaaattcaggacagtgaggtcgacattgtgattgcagcactccagcccaacctgactactttctttgaggcatggaggccatttttctctcggttccacatcattgttgtcaaagatccagatatggctgaggagcttaaatccctccaggttttgatctcaaggtttatacgaagtcagatatggga

SEQ ID NO: 24371 - DNA, 506 bp, Oryza sativa
  Clone ID: uC-osflM202127e11b1
tttttcccttcacgatacaacccacacggacacgggcacaccacccaccaactgagagctgagcaggcgagcgagcggacatggcagcatcgctccaagccgcggccaccctgatgcagccggccaagctcggcggccgggcctcctccgccgcgctgccatcgcgcccgtcttcgcacgtcgccagggcgttcggcgtcgacaccggtgccgccggcaggatcacgtgctccctgcagtccgacatccgggaggtcgccaacaagtgcgccgatgccgccaagctcgccggcttcgccctcgccacctcagctctgctcgtctcgggcgccagcgcggagggcgtgccgaggaggcttaccttcgacgagattcagagtaagacgtacatggaggtgaagggaaccggcacggcgaaccagtgcccgacggtggagggcggcgtcgactccttcgccttcaaggccggcaagtacaacatgaagaagttctgcctggagccgacg

SEQ ID NO: 24372 - DNA, 89 bp, Oryza sativa
  Clone ID: uC-osflM202127f01b1
gttttagagaaggccatcgcgtggagggagacgggggtcatgaagacgctgggcggccgatcgcccgcggcacaggtcacaaacatcat

SEQ ID NO: 24373 - DNA, 531 bp, Oryza sativa
  Clone ID: uC-osflM202127f03b1
agatagcccaagatgtgccagattgtctgcaagggggccattagcgataaacatgcgaaggagctaaaggaaaagatagaggatgagtaccgggtgaacatgattcttgacaacctcccgctagttgtgcctattgcaaggacagatagggatgctcttgtttttcagggtggatatcatgttggtgttaagggccaatatgctggaagcaaggatgagaagtactttattcataaccacctggcatttttagtgaagtatcacaaggatgaaaattcagatctctctagaattgttgggttcgaggtcaaaccatttagtgttaaacaccaattcgaagagaaatggaatgatgcaaacactcgtttgagcacatgtgatccccatgccaacaaaatagtaataaactcagatactcctcaagaggttgaagctgggaaggatatcatattcacatatgatgttggctttgaggaaagtgatatcaagtgggcttctcgctgggacacctatctgcttatgacagatgat

SEQ ID NO: 24374 - DNA, 539 bp, Oryza sativa
  unsure (1)..(539): unsure at all n locations
  Clone ID: uC-osflM202127f04b1
attatcagtgcaaagctggcaattattcttgtgtgtggcggttggtctttgggctggtctaatcattggatttgttaccgagtattacaccagcaacgcatatagccctgtacaagatgttgctgattcttgcagaactggagctgccactaatgtcatttttgggcttgctttgggttacaaatcagtcatcatccctatttttgctattgctttcagcattttcctcagcttcagccttgctgccatgtatggtgttgctgtggctgctcttggaatgctgagcacaattgccacaggtcttgctatcgacgcctatggtcccatcagtgacaatgctggaggaattgctgaaatggccggcatgagccacagaattcgggagagaactgatgctctggatgctgccggaaacacaactgccgcaattggaaagggttttgccatcggctctgcagccttggtgtcacttgcactttttggtgcctttgtgagccgtgcggctatctctacngttgatgttctgacaccaaaagtgt

SEQ ID NO: 24375 - DNA, 503 bp, Oryza sativa
  Clone ID: uC-osflM202127f05b1
gttctgtgtataatctatgttatatgttgcatctccttgttgtagttgatcatgtctgcaagtgctttaattatttgacctcatggttgttaaggcgttgctttggcgctagggcgtgccgaggggtcaaggcatccctgagccttaacggcttagcgccataacccagataaagagaaagagaggggtgaaggtggcagcaactacacccttttccctgttctctgatccatgtcattgccatcttactcctcagctctggtttccactctcttcttctctcccctgtgccagattcattttgactctagggagcagcgccagatctacccaagaggagtacatacagatagatgcactgctggattcattctgaatctggggagaaaggagcacagatagaggagcagagctagcatgggaagaagagttggcgcgaggaagaagcgatgtgcaggcttgaggaagaagcgacatcggaggtggcgctgtgacaggagaga

SEQ ID NO: 24376 - DNA, 509 bp, Oryza sativa
  unsure (1)..(509): unsure at all n locations
  Clone ID: uC-osflM202127f06b1
tttatgcctcttttggatctatccattcgggtcaccgtggcagttcggtaattttggcggagaggaggaggaggacgacgacgacgacgacgtgatgggtctcctcgacaagctgtgggacgacaccgtcgcggggccccgccccgacaccggcctcggccgcctccgcaagcacgccgtcgcccgccccgccgccgtcaagatcaacgacccgacaggggacgcggcgatggtggccgtcccgccgacgacgccggccggggcggaggaggcgccggtgaaggtgacgcgcagcatcatgatcaagcgccccgcggggtacccggcgtcgccgaggagcgcggccagcacgccgccggcctgccccgacggatccacccctcccatctcgccgttcgccggcgccggtggtcgcttcagaaggaaatcatcgtccgacgcatatgagagggcaacacctgggacaaccagtcacccttctncctttgaagtgtgagcccccagcgtgc

SEQ ID NO: 24377 - DNA, 465 bp, Oryza sativa
  unsure (1)..(465): unsure at all n locations
  Clone ID: uC-osflM202127f07b1
tttagaaattattattttaatgggtgcggtgtgcaccagcaaatatccaacttttgaaagtgtcttcacccaaaagtcactttgcgtggtgtcctacagctaaaactgcaaagtcacgatgccctgtagaaagatttgccaaaataaaaaatatgtgataggaggagcaaacatttgcaccattccagcctgataagattaatcaaacacaacgcccaaagaaagcagcagtaactctgaatcaaattgatgtcgctgaattggagctagtcattctgaatacagcatgaggtattgaagacatgataaacctgtacaaaattaacaatctcacaggtttctttgtacattatccaaatcttctctacactgggcaacagctaccaatccttgcatcccatgcctaagtaggagacaggtatgcgaaccgaagttggaccggatctcatgtnctcaagaatgaag

SEQ ID NO: 24378 - DNA, 437 bp, Oryza sativa
  Clone ID: uC-osflM202127f08b1
ttcaggggtcttagttttccttgtgggtttggggtctcatcgaggcggcggcggcgggattccggccgatggcgtggaggcgcgtcctttcgcagcttgcgaggagtcgaccagcatccacaatctacaatgaactgataacctccagaccttcgtggctgcttagaggtgacgtcaacggtggtggcacacttaaaaacttaaatgagaggtatcagtcaagctttgttggtagcttagcacgcagggtgcaaaacctcgacgttccaagtgaagcctctctgctgaaagaaatatataaaagtgacccagaacgtgtcatacaaatatttgaaagccagccatggttgcactccaatcgtttagcactttcagagtatgttaaagctcttgtcaaggttgataggctggatgatagcaccttgcttaaaacacta

SEQ ID NO: 24379 - DNA, 394 bp, Oryza sativa
  Clone ID: uC-osflM202127f09b1
tttaggcctgtgtcaaggagagggtagtagcgccttgctctcctttgccttcagagaaaccggaagcaatggcgtctgctactctcctcaagtcatctttccttcccaagaagtctgaatggggtgccacccgccaggctgccgcccccaagccggtgactgtctccatggttgtacgcgctggtgcctacgacgatgagcttgtcaagaccgcgaaaaccattgcatcaccaggaaggggtatccttgccatggatgaagtcaacgcgacctgcggtaagaggcttgcgtcaattggccttgagaacaccgaggccaaccgccaggcttaccggacccttcttgtcaccgcaccgggcttgggacagtacatgttccgtgctatcctcttcga

SEQ ID NO: 24380 - DNA, 510 bp, Oryza sativa
  Clone ID: uC-osflM202127f10b1
tgtcggcgtcggggtcatcctgctcagggacaagctgagctacattttcacccagggcgaggccgtctcgcgcgccgtctccgacctctgcccactgcttgttggcaccatcgtgctctgcgggatccagcccgtgttgtcagagttgcagttgactcttgggggcaatttggcttttgggaacgaattatatgcaacatctcagtaacattgctgtcatttcactgttgctgaatttgtttactgatcatgaaggtgtggctgttggctgtggatggcaagcattggtagcatacattaacattggatgctactacttgatcggcctacccctcggcgtgcttctgggattcaaatttgactatggaattaaggtgctattaattctcgacataccgcagtttgacacacattcagttgacttttcagttgtagagtcaactggaaaaggttaaacgtttgcaagtttgaaaatggatattctgcatgcacggattggtgggaggcatg

SEQ ID NO: 24381 - DNA, 525 bp, Oryza sativa
  unsure (1)..(525): unsure at all n locations
  Clone ID: uC-osflM202127f11b1
ttcacttgtagctctcgacccccgcatctcatgcctcctctcgcttagttcagatcgaaatcgcaaatggcgaagattaagatcgggatcaatgggttcgggaggatcgggaggctcgtggccagggtggccctgcagagcgacgacgtcgagctcgtcgccgtcaacgaccccttcatcaccaccgactacatgacatacatgttcaagtatgacactgtgcacggccagtggaagcatcatgaggttaaggtgaaggactccaagacccttctcttcggtgagaaggaggtcaccgtgttcggctgcaggaaccctgaggagatcccatggggtgagactggcgctgagtttgttgtggagtccactggtgttttcactgacaaggacaaggccgctgctcacctgaagggtggtgctaagaaggtcgtcatctctgctcccagcaaggatgcccncatgtttgttgttggtgtcaatgagaaggagtacangcctgacatcgacattgtgttcaatgctagc

SEQ ID NO: 24382 - DNA, 550 bp, Oryza sativa
  unsure (1)..(550): unsure at all n locations
  Clone ID: uC-osflM202127f12b1
ttcttgtgtcggacgcggtgctcgacgcgtgcgtggcccatgaccccgacagcagggtggcgtgcgagacgtgcaccaagaccaacatggtgatggtgttcggcgagatcaccaccaaggccaccgtcgactacgagaagatcgtccgcgacacctgccgcggcatcggcttcgtgtccgacgacgtcggcctcgacgccgaccgctgcaaggtgctcgtcaacatcgagcagcagtcgcccgacatcgcgcagggggtgcacggccacttcaccaagcgccccgaggagatcggcgccggcgaccagggccacatgttcggctacgccaccgacgagacccccgagctgatgcccctcagccacgtcctcgccaccaagctcggcgcccgcctcaccgaggtccgcaagaacggcacctgcgcctggctcaggcccgacggcaagacccaggttaccgttgagtacctaaacgacgccggcgccatggtccccgtncgcgttcacaccgttctcatctccacccagcacgacgagaccgtcaccaacga

SEQ ID NO: 24383 - DNA, 459 bp, Oryza sativa
  Clone ID: uC-osflM202127g02b1
cttttcccaaaataacgttgaggagccaagcttggccaggatgatcaccttcctcgtccttatcagctttgctggcatgttcatcatcatgcccttcaggaaggtcatgatcattaggcaccggttgacattccccagcggcacagcaacggcgcacctcatcaatagcttccatacacctcaaggtgtcaagcaagcaaggaagcaagtgacattattgtttaaatcgtttggaggaaccatcgcatggtcgctcttccagtggttcttcgcctctgggccgggctgtggcttcaaattcttccccacatttggcctcgaggcatataaacacggattcttcttcgatttcaccatggccaatgtcggcattggcatgatgtgcccgtacatgatcgtgttctccgttttcattggcaccatcatctcgtgcggtgtaatttggccgtacatcgagtc

SEQ ID NO: 24384 - DNA, 536 bp, Oryza sativa
  Clone ID: uC-osflM202127g09b1
tttatcattcagaacgaactccagtaaccatgcgatacaacctgaacctcgcaagctgcccacactgggtgccatcctgaaggccgagccgctgaggccgccaccaccaccgcaggagacgcagccaacgccgccgtcgccggcgacgacaatgcgactcgccgacctcctccgggagaggcaagaatcgttcacctgctacgacggccctgcctgcgccatctcccggacgggctcctcctgcggcgccggcaacggcgagcagtggagccattgctgcattccgagcttcgtcccgcgtaccagtgtgagctacgcgaaagggaggaggaagcgcaagtgaagaagcgatcgatcgagagagtgtgcaaagaaatcaagtggtttttgggatgataattgttcagaatgtgcagtgtctcagagagagtccacctgcttgtgtattgtaacaacaactacagtacaacgacgttaattaagccgccaaatcaaatgtatatatgtgatgtgacagtgagatacctaccaaatac

SEQ ID NO: 24385 - DNA, 473 bp, Oryza sativa
  Clone ID: uC-osflM202127g11b1
tgtacgcgtgggcggacgcgtgggttggcttgggctccccctctttaccttttgctcctcggttcggttccgtggttcgtctagggtttagtgggttgagatggcggcgccggatgtcgagtaccgctgcttcgtcggcggcctcgcctgggccaccgacgaccgctccctcgaggccgccttctccacctacggcgagatcctcgactccaagatcatcaacgacagggagacggggaggtcacgtgggtttggcttcgtcaccttctcctccgagcagtcgatgcgcgacgccatcgagggcatgaacggcaaggagctcgacggccgcaacatcaccgtcaatgaggcccagtcccgccgctccggcggcggaggcgggggctacggccgcggcggtggcggctaccgcggcggtcgtggaggcggcggctactgaggaggtggcggcggcggctacgggcgccgtgagg

SEQ ID NO: 24386 - DNA, 508 bp, Oryza sativa
  Clone ID: uC-osflM202127h01b1
ctttctaagaagagacgagacgagggagagaaggagaagagggggccggccgcgggcgtcgtcgtgttcctccccccctctctctcctctcctctcctctcgatctccatccttccttccatccattcctccccgcacccttcgcattgctctcgtcgtctcgattcggtcgaggatctccaggaaaagaggaggaagcgatatgggttgcttttcatgctgcggagcggatgatgtcggcaagaagaagaagcgcgacgatccttacgtcccgatccctgatccaggtggtaactatggacgtagcaagcccgggcccccagccccttcgcgttctccccccaccagcagaaatctgccaattgcagtaccggcaattccccttgatgaaataaagggaataaccaagaacttcagcagtgatgctctcatcggagaaggctcgtacgccagagttttctttggtgtgctgagagatggcaggagatctgcggtgaagaagctcgac

SEQ ID NO: 24387 - DNA, 486 bp, Oryza sativa
  Clone ID: uC-osflM202127h02b1
gttttgaaggagagagcttggtgagctgcagagggggccccctccgtgatggcgtcgtcggccaccaccgtcgctcccttccaggggctcaagtccaccgccggcatgcccgtcgcccgccgctccggcaactccagcttcggcaacgtcagcaatggcggcaggatcaggtgcatgcaggtgtggccgattgagggcatcaagaagttcgagaccctctcctacctgccaccgctcaccgtggaggacctcctgaagcagatcgagtacctgctccgttccaagtgggtgccctgcctcgagttcagcaaggtcggatttgtctaccgtgagaaccacaggtcccctggatactacgacggcaggtactggaccatgtggaagctgcccatgttcgggtgcaccgacgccacccaggtgctcaaggagctcgaggaggccaagaaggcgtaccctgatgcattcgtccgtatcatcggcttcgac

SEQ ID NO: 24388 - DNA, 520 bp, Oryza sativa
  Clone ID: uC-osflM202127h06b1
cttcttcaccttcccgccgtcttcgccgccctcgggcctctcttctaccaccacctcctcctccgccgtcaacgccgctgagatgggtcgcagtatgcttcccgagcagcaggaggacgtatcgaggaagagcaagaaggcgaagaagagcaagaaagacaagaagcggaagctggaggcggaggccgaggtggtggtggtggaggcggctgcggccacgtccacggatgaagcgacgaagagcagcaagaagaagagggccaagggcgatctgggccaaggagaggaggcggagaacggcggtgggaaggtcgtggccgtgaccgggaagggctccgcggacgccaagtacgccccgctgtcatctttcgccgccaccgcgcttcctccccaggtgctcgactgctgcaaggggttcgagcgtccgtcgcccatcaagcgtacgcctggccttacctcctcgacggccgtgacttcatcggcatcgccgccaccggatctgggaagacgattgcgtttg

SEQ ID NO: 24389 - DNA, 490 bp, Oryza sativa
  Clone ID: uC-osflM202127h07b1
tttggctctcgcatcgatgaagaacgtagcggaatgcgatacctggtgtgaattgcagaatcccgtgaaccatcgagtctttgaacgcaagttgcgcccgaggccatccggccgagggcacgcctgcctgggcgtcacgcctcctccccaaaccctagccgccgccgccggcgtactcgagagaaacatcagcatccatggcgggcaagggcgagggtccggccatcggcatcgaccttggcacgacctactcgtgcgtgggcgtttggcagcacgaccgcgtggagatcatcgccaacgaccagggcaaccgcaccaccccctcctacgtcggcttcaccgactccgagaggctcatcggagatgctgccaagaaccaggtcgccatgaaccccatcaacaccgtcttcgatgccaagcgtctcattggcaggaggtttagcgatgcttctgttcagagtgacattaagctctggcccttaaggtgatt

SEQ ID NO: 24390 - DNA, 521 bp, Oryza sativa
  Clone ID: uC-osflM202127h10b1
tttgccaccaccaccactccgccgctgccgcctgcttttgcttctttccacttctgacttctccaagtccaaactccaaagttctcatcgttgcgcgtggcactgtggactctccactctccacgcccctactccgaggatacaccgtgagtaggcgtggtggtgcttgatctcaaatatcaaatatgtgtcctcccgttttcgtgcagtcgatctaacaccgttgtttcttgctaattcgttttcgttcccccggatcaaagaaactttattttacaacaacaacaacaacaacaaaaggatctttacatttccttttttaaatgatcttattaccttctctctcttatttttacagattttagaattaacctgtagcctctgtttgtttgtctgctccaatttctgcaggttcttgagtttgagttgggcaaggaggttgtgaacgtagcctgaacctgacctgagattgtgaacgtaattttggggggaaagggtgttctgtactggctcttcaatct

SEQ ID NO: 24391 - DNA, 461 bp, Oryza sativa
  Clone ID: uC-osflM202127h11b1
ttcgaatccagcagcagaagcagcagcagcagcgcagccgccgccgatggcgtccacgatcatggccccaacctcccgcgtcctcgccgccaagacccccttcctcggccatccccgcccctccaatgcccccgtccgcgacatcgccgccgccaccggccgcatcaccatgagcaaggagctgtggtacgggccggatagggtgaagtacctggggccattctcggcgcagacgccgtcgtacctgaggggcgagttcccgggcgactacgggtgggacacggcggggctctccgcggacccggaggcgttcgcgaggaacagggcgctggaggtgatccacggccggtgggcgatgctcggcgcgctgggctgcatcacgccggaagtgctcgagaagtgggtgcgcgtcgacttaaggagcccgtgtggttcaaggccggcgcccagatcttctccga

SEQ ID NO: 24392 - DNA, 517 bp, Oryza sativa
  Clone ID: uC-osflM202127h12b1
tgtcaccggagccaaaccctagaggctagaggaggagggaagccatgttcgggaaggggcatgatctcgaggccggcggctcgtcggagccgctgtacccggggatggtggagagccccgacctgaggtgggcgctcatccacaagatctacgtcatcctctccgtgcagctcgcgatgacggcggccgtggcggccttcgtcgtcaaggtccgcggcgtctcggagttcttcgtctcctccaacgccggattcgccctctacatcttcctcctcttcctgcccctcatcgtgttgtgccctctgcgctactaccaccagaagcatccggtgaacttgctgttgctcggcctcttcacggttgccatcagcttcgccgtcggcatgacatgtgcctacaccagcggaaaagtcatttttgaggcggcagctctcacagcagtggtggtgatcagcttgacagcatacactttctgggctgcaaagagaggccatgacttcaatttcctcggcccctt

SEQ ID NO: 24393 - DNA, 349 bp, Oryza sativa
  Clone ID: uC-osflM202139a03b1
ctcatcgttgccaccacaggctacgcaaaattctctcccttcctcctccaccacctccactccgacgatcctcctcctgatcctgtgccggccggcgatggcgtaccggttgctggagctcacgctggtctccgcgagcgacctcaagaaggtcactctcttctcgcgcatgcatgtctacgccgtcgcctccatcttcgggagcaacgtccccatgcccatgcacggcacccacgccgaccgcaacggcggcagcaaccccgcgtggaacaccgtgctccactttcccgttcccgtccgcttcgacacccgggggctcgcccttcacgttcagattcgtgcccggggc

SEQ ID NO: 24394 - DNA, 318 bp, Oryza sativa
  unsure (1)..(318): unsure at all n locations
  Clone ID: uC-osflM202139a05b1
gtgctcacctctcgccgtctccgcctctccggagacggcggccaccgcgcgcccgcctctcgtcggcgccgtgcctccctcaccggccaccacctttgcgggcgctcccatcgtactgcgtggctgctgccagatccaggccgtcaggatctaccccccgcccttctcgtcggagggttagggtttgtgcgacccggcgacggcgagcgaggtctctcacccgcgaaaggggggggnngggggggttcnttcctactgaggcctgggagtttcttgagcactgtttcttccaaggtgtgcgcgagccccaggctgttt

SEQ ID NO: 24395 - DNA, 371 bp, Oryza sativa
  Clone ID: uC-osflM202139b08b1
gtgaatccagcagcagaagcagcagcagcagctcagccgccgccgatggcgtccacgatcatggccccaacctcccgcgtcctcgccgccaagacccccttcctcggacatccccgcccctccaatgcccccgtccgcgacatcgccgccgccgccaccggccgcatcaccatgagcaaggagctgtggtacgggccggatagggtgaagtacctggggccattctcggcgcagacgccgtcgtacctgtggggcgagttcccgggcgactacgggtgggacacggtggggctctccgcggacccgtaggcgttcgcgaggaacaggtcgctggaggcgatccacggccggcgggcgatgctcggcgcgct

SEQ ID NO: 24396 - DNA, 338 bp, Oryza sativa
  Clone ID: uC-osflM202139b12b1
tttcatactctactactactagccagtaagctagctaactaactacgtggctatggcccccaccgtgatggcctcctcggccacctccgtggctccattccaagggctcaagtccaccgccggcctccccgtcagccgccgctccaccaactcgggcttcggcaacgtcagcaatggcggaaggatcaagtgcatgcaggtgtggccaattgagggcatcaagaagttcgagaccctatcgtacctgccaccactcaccgtggaggatcttttgaagcagatcgagttcctgcttcgatccaagtgggtgccttgtctcgaggttagcaaggttgggt

SEQ ID NO: 24397 - DNA, 76 bp, Oryza sativa
  Clone ID: uC-osflM202139c07b1
atgaagcaatggaagtcctgttggattccctatcatcctaagaaaactgcaccgatcagtcattagcagcatatct

SEQ ID NO: 24398 - DNA, 58 bp, Oryza sativa
  Clone ID: uC-osflM202139c08b1
gtcaagagtatattcacagacaagagatatctagagcgtgtgtgtgtgagagagagat

SEQ ID NO: 24399 - DNA, 106 bp, Oryza sativa
  Clone ID: uC-osflM202139c09b1
gtcgcccaaagcccttgggttgtacaatattgctcaaaggagctaatggcgatgagctgtaaaaagtgaagcatgttgtgcaatatggagtctttgcagcctttca

SEQ ID NO: 24400 - DNA, 150 bp, Oryza sativa
  Clone ID: uC-osflM202139d01b1
attgaggccgccttcgcgacgatgccaggatttgctagttttcccattgtacaagggaccatggaagcaaaagaaaatcaagaaccctaactaccaaggcaaatggaaggcaccgatgatcgtcaacctagactttaaggttgatccata

SEQ ID NO: 24401 - DNA, 348 bp, Oryza sativa
  Clone ID: uC-osflM202139d07b1
cgtttcttctcttcttccatcttcgtcatcttcaacctcctcctcctcgttatattagctctcgcatatcagatcggagaagaaggcgatggcgtccaactacgtcgacaccaccggcgacgagggcaggttccacggccaccacagcaccaacaccacgccgacgggcgccgcggcgtcgtcgccgaggacgatgcgccggagcttcttcaacgcctcctccggcagccacggctggcggtggcggagccaagtgcgtgtgcgctcccgtgacacacgccggttcgttcaagagccgtttccaccgaccaacttccagggccacggtctcgggcacccattcccctt

SEQ ID NO: 24402 - DNA, 337 bp, Oryza sativa
  Clone ID: uC-osflM202139d08b1
tgtatgatttggcagtcatctgtaatttgcagacagaaatggagctttccatcgatcaaaatttaatctgacggtgcgtttggtttccttgcacacggcacccatttgcctataaattgcgtgctcccctcctcgtgttgctcataacgcagatcagccaagaacgagttcatcttcttcttcgtgttgttgtagcatttgattcgagatatggcggcgactgacatgtctcccaaggccggcaagccgctcgtcgagaatgacgctggctcatacctggcgtggtccggcaaggaccagccggccgtcgccggcgagaagctcgggtgcggtctac

SEQ ID NO: 24403 - DNA, 381 bp, Oryza sativa
  Clone ID: uC-osflM202139d09b1
ttccggaggacggcggaacaccagcaccttgaggccgagccggcgcgacgcgccctccggtggtgtgccactaacgcgcgctggtgggcaccggccaccaaggctgagaatgcgcaggcggaaatcgagcctacgagctacacgcggttgcctacacccccggacaggacaatttttttaattgtcaagaacatggtccacaacatcaatgacttaacttaaggatgaggacgcaaatatagccttcacccgtcgtgctgtacttgctggcatgttacaggtgtagtgaagaacaaaaaagctagtgcgccctacaaggatacggtaaagtatggcggaagctgcattaattcaggccctcattaagattggatctgattt

SEQ ID NO: 24404 - DNA, 456 bp, Oryza sativa
  Clone ID: uC-osflM202139d11b1
ctatcgacgacatcggatcgggtcggtttctctcttgctgtcttctcgatcgatcgatggctcccacggcggcggcggcggcggcggcggggctggcagcgcgcgacgcgtccggccacctctccccgctcaccatctcccgcaggagcactggagaagatgatgtggtgataaagattctttactgtgggatctgccactccgacctgcacagcatcaagaacgagtggaagaacgccacctacccacttgttcctgggcacgagatcgccggcgtggtgacggaggccggcaagaacgtgaccaagttcaagggcggcgacaaggtgggcgtccggtgcatggtgaactcgtgccactcctgcgacagctgcaaccaggggttggagaaccactggccaagcgtgatcttcacctacaactccgtcgacaaggacggcaccgtcacctacggcg

SEQ ID NO: 24405 - DNA, 216 bp, Oryza sativa
  Clone ID: uC-osflM202139d12b1
tggtacccagtttctccaaaatcctatgattggcaactcatctcgaccatccatgttactttcatggatgacaaaggcccttgcatctggaatggacacactattcccaagcagaatcgaagctcagcgtgcagagttctggcacacactatatttatcagcagggctgggtcctgtttttatgctttgctctgaagatgatgatcttgctccatg

SEQ ID NO: 24406 - DNA, 464 bp, Oryza sativa
  Clone ID: uC-osflM202139e02b1
ttctccacgcgcgagaggcgagatccaaccccaaccccaacccgagccaccagaggccgaccagatccacccccgcagccagcgaagacggcggccacggcggcggtcaggatgctgccggatggcggcgccgacgacgaggagcggtggctcgccgagggcatcgtcggcgtccagcagaacgccttctacatgcaccgcgccctcgattcgaacaacctcaaggatgcgctcaagtactcggcgcagatgctctccgagctgcggacctcgcggctttcgccgcacaagtattatgatctatatatgagggcgtttgatgagatgcggaagctgtagatgttcttcagggaggagacccgtcgtggcagctgctccgttgttgatttgtatgagcttgtgcagcatgctggcaacgtactgcccagactctatttctctgcacagtaggatctgtgtacatt

SEQ ID NO: 24407 - DNA, 74 bp, Oryza sativa
  Clone ID: uC-osflM202139e03b1
catcctcctgcccaaaccctagccgacgtcgacggcgtacttgagagaaacatcagcattcatggcggtcaagg

SEQ ID NO: 24408 - DNA, 195 bp, Oryza sativa
  Clone ID: uC-osflM202139e05b1
tttataaaccaccacgctcttcgcctcctccctccctcccccacccccgtcaaagcgagagctccgtatcaccggcctctttcccttcccttcccctccgatccaatccccccttctcctcctcgcggcgctcgctgagcatggcggcggagggggaggccaagaaggacagcgccagcaacccttccgggggtg

SEQ ID NO: 24409 - DNA, 84 bp, Oryza sativa
  Clone ID: uC-osflM202139e08b1
gtcggaaggaggcatggtggagatcaccgtggctgaggttatagggagtcatggcttgtttgccagcgttgtaagctaattaac

SEQ ID NO: 24410 - DNA, 407 bp, Oryza sativa
  Clone ID: uC-osflM202139e10b1
tgttatactggatagagccacctagaagagaaaggaggagaaactactctgagtctgaatactttaagcaagcacttcgccaaggtgcacctgcaaaacctagggaaccacgaattccaagaatgccgcacctacatgatttccagttcttcaacaaccaaaggctcaatgaattgtatgaaaaggaagtccggtaccttatgcaagcaaaccagaagaaagatactattgatggtgaagatgaagatcagctggagcctttgactgcggaggagcaggaagagaaagagcagttgttagaagagggttttgcaacatggacgaggagagacttcaacacatttattcgtgcatgtgagaagtatggtcgaaatgatattaggagtattgcccctgaaatggagggg

SEQ ID NO: 24411 - DNA, 270 bp, Oryza sativa
  Clone ID: uC-osflM202139f01b1
gtttgctgaatgttacaacatagcattgaatataaagcatacacgggcgcatcagggtctggcacgggtccattacctgaaaaataggaaaaaggctgcgtatggagagatgtctgaactaataaaggtagctaaagacagtgcatcggcatatgaaaaacggtcggaatatggtgaaagagatgaagcaagatgtgatctcaatatggcatcacttttggatcctacaaggtcttacccttacagattacagagcagctgttctgatgg

SEQ ID NO: 24412 - DNA, 170 bp, Oryza sativa
  Clone ID: uC-osflM202139f04b1
tgtacgacggcgtctacgtgaaggtgttggatctacaaatctttatcacggatcgcagggttcggctcaggatactcaggatgaagactgtcaaggtgcggaagcgggacgtcgttcttacgttcgttggggccaggtgcatttttgcctttttttttctcctatttctt

SEQ ID NO: 24413 - DNA, 440 bp, Oryza sativa
  Clone ID: uC-osflM202139f08b1
ttctactcctcgtaccaaccatccaaatggacacaagaatatagagtgccatggctcgttagcgagcgttgcgagctaattaaccgtacgtgcgattgccgggagagaagccagccgctggccttcgctgcggcgcgcgcggtgtggcaacgacgagcatgcaagggggcaggtcatggctttgtccttgaactgagaagaaggtgcatgataacgcgccacacgtgaaactatattcatgagggatgactgaaatggaggattccttaagatcctgcacagagcagctactccgtgttagagaagagaaagaacgccttatcatcgaagcagctgataagatctctttggagcagaagaaagggtggagtctgcagcagaagttagaagatgcacataagcggtttgcaaagggcaccactgtaaactacaatctttgc

SEQ ID NO: 24414 - DNA, 63 bp, Oryza sativa
  Clone ID: uC-osflM202139f09b1
tgtctcctccgccgacggctgattaccaccggggcccgatctatgaggcaaagccgtgttatt

SEQ ID NO: 24415 - DNA, 396 bp, Oryza sativa
  Clone ID: uC-osflM202139g01b1
gtttatctttgtcaagaccttgactggcaagactatcacccttgaggttgagtcttctgatactattgacaacgttaaggcaaagatccaggacaaggaagggattcccccggaccagcagcgtctgatctttgctggcaagcagctcgaggatggtaggacccttgctgactacaacatccagaaggagtccacccttcaccttgttctccgcctaaggggaggaatgcagatcttcgcgaagacccttactggcaagaccattacgcttgaggttgagtcatcagacacgatcgacaacgtgatggcgatgatccaagacaaggagggcatttctcccaatcagctgcgactttatttttgcccgctaagcatcttgtaggatggcaggacccc

SEQ ID NO: 24416 - DNA, 352 bp, Oryza sativa
  Clone ID: uC-osflM202139g02b1
ttcttgaccatcacgcttgaggtcgagtcctcggacacgatcgacaacgtgaaggccaagatccaggacaaggagggtatccccccggaccagcagcgcctcatcttcgccggcaagcagctggaggatggccgcaccttggctgactacaacatccagaaggagtccacccttcacctggttctcaggctcaggggtgggatgcagatcttcgtgaagaccctgactggcaagaccattacccttgaggttgagtcgtccgacactattgacaacgtgaaggcgaagatccaggacaaggagggcattcccccggaccagcagcgtctgatctttgctggtaagcagcttg

SEQ ID NO: 24417 - DNA, 460 bp, Oryza sativa
  Clone ID: uC-osflM202139g03b1
ctttctcctccccaaaccctagccgccgccgccggcgtactcgagagaaacatcagcatccatggcgggcaagggcgagggtccggccatcggcatcgaccttggcacgacctactcgtgcgtgggcgtttggcagcacgaccgcgtggagatcatcgccaacgaccagggcaaccgcaccaccccctcctacgtcggcttcaccgactccgagaggctcatcggagatgctgccaagaaccaggtcgccatgaaccccatcaacaccgtcttcgatgccaagcgtctcattggcaggaggtttagcgatgcttctgttcagagtgacattaagctctggcccttcaaggtgattgctggacctggtgacaagcctatgattgttgtccagtacaagggtgaggagaagcagtttgctgccgaagagatctcctccatggtcctcatcaagatgcgtgag

SEQ ID NO: 24418 - DNA, 463 bp, Oryza sativa
  Clone ID: uC-osflM202139g05b1
gttatgttcacctcgaggaaatcatttataacatgattttaattggtgtggaagcaaacaaagcatactgctagattatagtataaacttgtgaaagatatatttcctttgccttgtttatatcctaatagattaattgtgtttagagaaatacctgagctgaaaatgctatcgagattatggctaaaagaatttgattttggtagaatatataagagggaacaaaaaaatattcatttcacaaaagtcgtgtgtgtgcatgtatctgcgcataggcattttttttagcaaaaatactatatggtgattcttttacaaattgtcaatccattgttccatctgtgtaatgggactatctttttccctatggataatcatggcaaattcatagttgaagcgatgaaaaccgatctacatgttactagccattggaaggtataacatatcaattttgctgaacgag

SEQ ID NO: 24419 - DNA, 220 bp, Oryza sativa
  Clone ID: uC-osflM202139g07b1
tgttgcggacctcaccctaaaccctagccatggcggcggccaaccttctctctcgcgcgctcctccctgctctaaaccctaacccaagcagccacagcaaccgcgtcagcccttcggccgtatctctccgctgccgccacggcctgacggcctccgttcgcgcctctctctccacggcagcgccgtccccgccgccgcggtcggcggcggcggcggccga

SEQ ID NO: 24420 - DNA, 283 bp, Oryza sativa
  Clone ID: uC-osflM202139g08b1
gttggctgagaaggcaaacctggaagatggacattggcggcgaaatatcaccgatccaagactgactatctgctacgagaagttctgctactgggagagcatgctgctgcattggggtgagaagaacccaacgaacaacaaccctgtgccagcgacaatatcaagctcatgatctgtagatagctcaagatattattagtacacaaaaatccatcctatatagcactatacatgcatagaaacagcttgtgtaggttgccatgcttaggcctttccaacacac

SEQ ID NO: 24421 - DNA, 437 bp, Oryza sativa
  Clone ID: uC-osflM202139g09b1
tgttaaccataacgtgcattccttaaacaagacaaattttgtggaggatcatggcgacactgatgctagcaaagctgacttgaccaccccatccagagaaattctgcctgcaaatgtacttgattcatctaatgttgccagagggcgaagtcaagaggattatggagccacatgtactcctgatgcagcagctggtcagtcaaccattaatgacaatgtcaccaataataatattggtttgaagtcaggaaacaatgcttcgctcaacatcaacaacaaaagttctttgaaacccttagagaagtcggtactgcctgaacaatattcagctaaccgtataggaccacttcagggggctgatgggagcatgatgagatctgattctagtatcttgacagcacgtaagggagataaaataattgctgatctagctggcg

SEQ ID NO: 24422 - DNA, 315 bp, Oryza sativa
  Clone ID: uC-osflM202139h01b1
gttttatgttataggatggatattctacaccaagaagattgttgctatgaaaagaaatgaacatgggaaataacgttttcgttcacatgtttattcctgtggttgtttagttaaaccgtgaaatatatataagcggagaaaaggaaatcatgtacatacgagtttggcagtcttgaaatctttttgggcacagctggcacgctctgctggtttatgagctacatccagcattttttcagcatgagcattcagcattgcctgtaaataatcagatgaagttttgtgaatataatccgtaaatatttgtggatggtt

SEQ ID NO: 24423 - DNA, 368 bp, Oryza sativa
  Clone ID: uC-osflM202139h03b1
aaaagtgttctcaccatggatcttcgccattcacaaactccatccagtgatgacgagacaagggcacttaatgcattgcttgatgctttcagttctgccttttcgcttgatgatatagctacggcatattgcagagcaaatggtgatgtcaacagagctggtgatctattgactgaacttgaacatcctatggccaagagcaatgaagttgactcaagtgttgggactattcatcccccaagtggtaaggcaattgaagaaaacagtacagagagttcaggccaagcaaaatctcgggaaaaaatgcagaagtctagtgcttcatttggcactgtatccagtatgttaggaaagggattgaccagggc

SEQ ID NO: 24424 - DNA, 61 bp, Oryza sativa
  Clone ID: uC-osflM202139h07b1
gtacactctaggcggctgaagcgaacgacaccggcgttaagtgtatcaagcacgcccattt

SEQ ID NO: 24425 - DNA, 381 bp, Oryza sativa
  Clone ID: uC-osflM202139h11b1
ttctaaccgtctctctcgccgccgtctcgcacctcgcgtcgccgccgccgccgcgagtgtcggagcggaggagaaggggaggggggccatggcgaagggcgacgacgcgctggcgcggaagcgcaacaaggtgcggcggaagcggatgcgcagcagcgagaacgccgtgtcggcccgcgtcgccggcatcatcgcctccaagcgccgccgcaagtccggcaagcggcgggcctgcgagggcatgtgcttctccctccccaccccggaggaccccttcaacgaccgccacggcaagaagcggaagggcgacgacgagccgaccggagacgcccctcgcgtcgtcgtcgaagcagggacgtatccaagaagaagaagaagaag

SEQ ID NO: 24426 - DNA, 487 bp, Oryza sativa
  Clone ID: uC-osflM202141a01b1
gtttgagacccataccaatgccaagaacaagaaatcagagagcccaagcaaaaaatccaatccgaatcccctccaaaaacccaccaaacaatctcctccatctccaagaacaagaacaagagagcatcctagaacattaggggataaaggaggaggagaagaagaccaagaaaagtttcgagaggagagggaggagagttcaagaacttggagagaaggggatggatccggtgttgctggacgacatcatccggaggcttatcgaggtgaagaatctgaagccggggaagaacgcgcagctttcggagtcggagattaagcagctctgcgcaacctccaaggagatcttcctgaatcagcccaacctgctcgagctcgaggcccccatcaaaatctgcggtgatgttcatggacagtattctgatctcctgaggctgtttgattatggtgggtatccacctcagtccaactatctcttcttgggcga

SEQ ID NO: 24427 - DNA, 540 bp, Oryza sativa
  Clone ID: uC-osflM202141a02b1
gttcgcgacaacgcacactctaatctactagataccatcctcatcttcttcctgggcagacattgcccgagttgctagcttcacgaatcctattcatgtgatccgaggcgctggctatcgcatacttgattttctcggtgggtcgcgtactgggagcgggcaagagcacaacaggcaatagcatcgttggaagagaagcatttgtatcagagtactcccatgctagtgtgaccagtacttgtcaattggccagcaccgcgctaaaggatggccgtaccctcaatgttattgatacgccaggattatttgaaatgaccattacatctgaggatgccggtaaagaaattgttaagtgtatgagtatggccaaggatgggatacatgcagtgctgatggctttttctgccacatctcgttttactcgagaagattccagtaccattgagacaattaaagagtttttcggagagatgatttgtgatcacatgatactaagtattacttatggagatttagttggtgaaataaattgaagagcat

SEQ ID NO: 24428 - DNA, 450 bp, Oryza sativa
  Clone ID: uC-osflM202141a04b1
gttttcctggtgctgtgtgtggtcagaccggctagctcatgatagctggttcgttcggcgatcctacacgcaagcccagttctggtcgcagtgtagcggaggacatgctcactcatcactagttcgcttatacttcacatgagcctataatgagacagcacgtacgatgcgaagttgagaatagctagatctaacgcgagacggtcaggtctgagctgtcctcacagttgcaagaggcagccggtggaatggcgccagctgcggtgacatacgcgcggcggcggcgcgctcatcccgccgacgaggaggcgaggcgatcgcgcccaagacggcgccgtcggaggcgccgccggcgacgaggctgaggaagacggtgtcggagacggcggtggcgatgctggccgtgcccaaggacgtggaggagttccggaccatgccggcgtacgggac

SEQ ID NO: 24429 - DNA, 496 bp, Oryza sativa
  Clone ID: uC-osflM202141a06b1
cttcgccttccaatgcaacgacaggtacatgcgtagcagcctgaaggcggcggcggaggcgaggggcaagccggagtggggccacggcgggccgacggacgccggcggctacaacaactggccggaagacacggtgttcttccgcggcgactgcggcgggtggagcaccgagtacggcgagttcttcctgtcgtggtattcgcagatgctgctggagcacggcgagcgcgtgctgtcgggcgcgacgtccgtgttcggcgacggcgccggcgccaagatctcggtcaaggtggccggcatccactggcactacggcacgcggtcgcacgcgccggagctcacggcggggtactacaacacgcggcaccgcgacggctacctcccgatcgcgcgcatgctggcgcgccacggcgccgtgctcaacttcacctgcgtggagatgcgcgaccacgagcagccgcaggaggcgcagtgcatgcccgaggcgctcgtcagc

SEQ ID NO: 24430 - DNA, 283 bp, Oryza sativa
  Clone ID: uC-osflM202141a07b1
ctcgatcaccgtaccacagccaggggcgtgggggcgccatgcatgccgacttccattattcatgctccacgtcactacaactgcggacttcttcatccatctccgaacgcttgcacctgacggcagtcacgccgcatatcgcatcagagaggggggagggagggcagcagaccatctatggaggagaacgactggagcaacagacacctggaggagagccttgactcctgcgtggacgtgagggagatctccgacgcggaggtgggcgggggatatggagcgg

SEQ ID NO: 24431 - DNA, 483 bp, Oryza sativa
  Clone ID: uC-osflM202141a08b1
ttcacacgcattgcagaggagaggcgacaatggaggggaaggaggaggacgtgcggctgggggcgaacaggtactcggagaggcagccgatagggacggcggcgcagggcgccggggacgacaaggactacaaggagccgccgccggcgccgctgttcgagccaggggagctcaagtcgtggtctttctaccgggccgggatcgccgagttcgtcgccaccttcctcttcctctacatcaccatcctcaccgtcatgggggtctccaagtcctcctccaagtgcgccaccgtcggcatccagggcatcgcctggtccttcggaggcatgatcttcgcgctcgtctactgcaccgccggcatctccggaggacacatcaacccagcagttacttttgggctgttcttggccaggaagctgtccctgacccgggccatcttctacatagtgatgcaatgcctaggggccatctgcggagctggag

SEQ ID NO: 24432 - DNA, 533 bp, Oryza sativa
  Clone ID: uC-osflM202141a09b1
ttgagcttggtttagttgtgctcatggatgttgttcacagccatgcgtcaaataatacactagatgggttgaacggttttgatggtacagatacgcattactttcatagtggttcacgcggccatcattggatgtgggattctcgcctgttcaactatgggaattgggaagttctaagatttctactatccaatgcaagatggtggctcgaggagtataagtttgatggtttcagatttgacggtgtaacctcaatgatgtacactcatcatggattacaagtagcatttacggggaactacagagaatactttggatttgccactgatgctgatgcagtagtttacttgatgctggtaaatgatttaattcatggactttatcctgaggccataaccatcggtgaagatgtcagtggaatgcctacatttgccctttctgttcaagatggtggggttggttttgattatcgccttcatatggctgatcctgacaaatggagtgaactccttaagcaagtgatgaatcttgga

SEQ ID NO: 24433 - DNA, 399 bp, Oryza sativa
  Clone ID: uC-osflM202141a10b1
gtctcctcttcttcttcttcaacctctcctttgatgctcttcttcgcatctcagcagccatttttcccttccccgggatctcctcttctattccttttcttccatcgccataagagcagccgcagatcgaattgcattgcagtctttgcagatttcagctgaattgccggacagtgaagtgaaagcatcttcaagggcgtggaagctctctgagattccaaagggtcacaaggcaggggatgagtacaaccaaagtgaagagacgtgtgggaaagtatgagctaggaagaacaatcggagagggcacattcgcgaaggtcaagttcgcgagggataccgagaccggtgatccagtagccatcaagatcctagacagggagaaagttctcaagcataaga

SEQ ID NO: 24434 - DNA, 387 bp, Oryza sativa
  Clone ID: uC-osflM202141a11b1
gttacgtcaaagctcaggcaggtgaccaatgggctcaagatgaagagctccagcaggaatgcgccatccccgcaggcgcagcactctgcgaagagggtgaggaagaggctggacaggaccaacagcagcgaccgcgtggcgctcaaaggattgcagattgagactgccaaggttggcaatgacggctgggccgcggtggagaagcggctcaatcagctaaaggtggatggtgtgctgctacgatcacgatttgggaaatgcatcggaatggatgggtccaacgagtaagcggtgcaaatgttcgatcatctggcgaggaagagagggatagtgaaacaggggctcactatggacgagctcaaagattctatgcgcaattgactgatc

SEQ ID NO: 24435 - DNA, 449 bp, Oryza sativa
  Clone ID: uC-osflM202141b02b1
gctccctccttcctcccgtcgcctcatgcccccgcatccgcacggctgaagtcgcctacgcaggggaggagcgaaaccctagctccggattcttctcctctcctcctttcttctctccgatgcacccgagtgaccgagtgtgcggcggcgatggtgacgacgacggtccggcggagtggtgcgcacgagctgtcggctgggggcgcagcgaggtgtgaacggcgcgcgtgcggtggcaccggcgcacccaagagggggcttggagtgcaatccagagcacgcaaggacggagcgtgtgccggcgcgcgaggacggtgttgcatgcttcctggcggtggctgcacagcgagcttatgccttgatgttcttcggtggtttagggctccaattcgggttattgggcttgacgaattttgtgattttgggactgtgcgtgatctgccggcacc

SEQ ID NO: 24436 - DNA, 552 bp, Oryza sativa
  Clone ID: uC-osflM202141b03b1
attaaaaggaaaaaaaataccaataaatcgcggatttcccaacgccgccgctcctctcgcggattccccaaccctaaaccgccggcggtttctgcggcggcggcggcggcggcgcgtcgagtcggcggagtctccggatcggatcgggttcgtcgctgatcgaggagagatcgcgtcgccgtcgtctcgggggagaggagcaggatggacggggagatgttcgggagtggccactggggtggttccttcccctacgcctccattcccaaggagagccagttcgtgtttgatgccaaggcctcgccgctgcagctgcagctcttcgggagcgccgcagttcctgcggtaggaagtactggttattataactacattgcaaacaaccacctctctgctatgaatcaagaaagaaatacaaacaacgatgttggtcatgaaaagcaactcaatcttcagatgtccctgaactactttcctgttgaaaatcttgatcggttagcacgtattggtaatccaagtgctgtatcaactgggctaagactgtcctatgag

SEQ ID NO: 24437 - DNA, 528 bp, Oryza sativa
  Clone ID: uC-osflM202141b04b1
tcgtgttatttgaaacgaagagagcagacaaataatgaactagtaaagcctgtgacttgggttctagtcattgatcgtgtacatgtaggtcttgtttagatcccaaaaaattttagccaaaacctcacatcaaatatttggacacatgcacccctaccagtgtgtggaggcattgcatacacgaaacatggaaaaggaatcaacttgagaggttagacctgctagctctactaggtctggatggtcatgcatttttttttgaaaaaaaccacgctgcaagctcgacagcctcaacctcaatggcaaccatgacaataatatgcatgacaatggtgtaggagaaaagacacgtcgataaccaaagggcgcggctgcgcatacaaaggcggagagaaggaacgatggtggctcaaaaagaaagagcgtctgtggcagtgtattgctgatccgtgggccaccagccaatcataaaagaaaatgttgagataaaagtattgctgatgcgtgggccaccaatcaatcgttaag

SEQ ID NO: 24438 - DNA, 447 bp, Oryza sativa
  Clone ID: uC-osflM202141b06b1
ttctgcctcaaaaccctagctgccctcgcgaccgggtcagggccttcgattggatcggccattcggttcgttcctccaggatattgttggtacttgcattcctccgtctgttattcaagaaagccagtttacactgagagaaccttgctttatttgcaggttcattggccttttgttttgcctgagtgaatgcaattggaaccttctgggtagaagctgaagcttagtttggaacttcatcatactgatttcatactcagaaagtggcgagaaatggatcgtgatgatatagctggtttcgtaagtggaggttgcaaggccttctgagttttctgacgaagcagatgataatagagttatgatatacagaagtcaggcaactggttcttttcatttactatttggttgacgtttgaagtttgttaactggaatggacaaagcatcat

SEQ ID NO: 24439 - DNA, 346 bp, Oryza sativa
  Clone ID: uC-osflM202141b07b1
ctcaggagcttgcagggtggtgagagaggaaggggagagtgagagaagaagaagggagggtgattgctctgatctggagctggttggggggaaaggagttgggagaatctcatgggagctgcgatgaaatggcggaggagaagctccttgatccgttcttgagccgcgaaatttgatctttttaagctgcggggatggggggacatttggatcttgacgctaccccagcgcgaagcctggtttcttccatagctccgttgctgcattgccttgttgcccccagatccgagctgccttcctacgcaatctgccatctttgcttgctctctacccaaatccgtccaaa

SEQ ID NO: 24440 - DNA, 149 bp, Oryza sativa
  Clone ID: uC-osflM202141b10b1
gtcatagctatcgagtggtccacgtagagtttgatcgtctcacacgtgtctgcagagccctaattcactaacgaggatcctgcggacacagttgtatttaataaacgaatcgccgcgactgcagacatgaactgtctaactgccgaagg

SEQ ID NO: 24441 - DNA, 311 bp, Oryza sativa
  Clone ID: uC-osflM202141b11b1
gttgaacccactggctcatctgattcgggtgattttgtctcagaagttttgccagatcctgaagatagtagcattgatccagccaacacagcagtgtcgtgtgaacaaactgtggataacgaagacgtggagttaccaactaaggaagttccgtctgtggatgttgaaactgaaaccgatgaaatcaaagcaaatgagtgaaagggcaggaaatctcatgggctaaaatggcatagttgaccagaacaagttgtagtcagatcggttataaaagacaagcaaggcgtacctgcttattatgcatggacatg

SEQ ID NO: 24442 - DNA, 386 bp, Oryza sativa
  Clone ID: uC-osflM202141b12b1
ttcacatccacatccgtgctctctctttgattgtttctatatactctctctcagagaggcatagtacaagtgtatatataaggttgctggagttggatgggtagtgctattggccgctatatcatcatctatctcttcttccagttccagctctctatctctcgtgttattgatggacgccgacaagttttcgttgggcatgaggatgagggagagcaacgcggaggagaagaagagcgtgtgcatgatggacgcatacggaccgctcggacacgccctcgtcgtccgtctcctacgccgaggctacaccgttcacgccgtcacctacccctaccaccaccaccattcagaagaagagtacccagcagcacactcgcctgaagctg

SEQ ID NO: 24443 - DNA, 520 bp, Oryza sativa
  Clone ID: uC-osflM202141c02b1
tttctaatctcaagtctctgtctcgtcgtcctcgcatctccactcgccatgggcaagattaagatcggaatcaacggtttcggaaggatcgggaggctcgtggccagggtggccctccagagcgaggatgtcgagctcgtcgccgtcaacgaccccttcatcaccaccgactacatgacctacatgttcaagtacgataccgtgcacggccaatggaagcacagcgacatcaagatcaaggactccaagactctgctcttgtgcgagaagccggtcaccgttttcggcatcaggaaccctgacgagattccgtgggctgaggctggtgctgagtatgtccgggagtccaccggtgtcttcactgacaaggagaaggctgctgctcacttgaagggtggtgccaagaaggttgtcatcttagccccgagcaaagatgctacgatgtttgtctgcggtgtcaacgaggacacgtacacttcagatattgatatggtctcacatgctagctgcaccacaaact

SEQ ID NO: 24444 - DNA, 214 bp, Oryza sativa
  Clone ID: uC-osflM202141c04b1
gtggtgaagatcctgcggctcgggatgagggggatcgagaggcagatgaacgctgtcaagcacggcttacaggtacaggtttggaacgaggctgtcttcaagagccaggagctcgtcgcgcttggcaccaacgtgggggatgacgccggagagcgggaccaaaacgtgcatatacacacaatgccatgctcatacgaccacatgaatcgtgcta

SEQ ID NO: 24445 - DNA, 455 bp, Oryza sativa
  Clone ID: uC-osflM202141c05b1
atttctcatcttttcgctctcgatctcctacagaagcaatagtagccagcaaatcaatcgatcgatccgtacaatggcggccctgaagatgaacaggatggccgtggcggcgctgttcctcgccgccgtggtggtggcgggcggcgctggcgctagcgcccacgtcggggttggggctggggctggggccgacgccggcgtcggcgccgccgtcggggctggcgctgacgccgccctcggggttggcgccgtcgccgccggcgccgccggggctggagttggagctggaattggagtcgtcgccaacgtcgccgggtctatcaccggcgccgatgagggcgccgccggcgtggcacccaaggtgcatgtgtgagatcgatcgatcgatcgagcgcgcctcggcttccatctgcacgacttcatttcggcgcagagagtcctgcgatccatatttt

SEQ ID NO: 24446 - DNA, 470 bp, Oryza sativa
  Clone ID: uC-osflM202141c06b1
gtttcgcgaggtcgatgttgttgaaggctgtgactatggggcaccatcaccaactacaaaggaacaattgtttgacgagcttgttgatggtctgcgtggcattgatccatctataggctctgattcacaggtagctagacttgaaacatatggaacattggttgccattgtgaagagtggaactgataataagcacgtgggctttctgacaaacaggcatgttgcgcttgacctggattaccgtaaccagaagatgtatcatcccttgtccccgaatcttgggcctggtgtatacctaggtgctgttgagcgagcaacatcatttatcacagatgatgtttggtatggtatctatgcgggaacaaactcagatacatttgtcagagctgatggagcatttataccgtttgctgatgattatgacatagctagtgttaacacctcagtcaaaggagatggagtcataggtg

SEQ ID NO: 24447 - DNA, 525 bp, Oryza sativa
  Clone ID: uC-osflM202141c07b1
tttttactggatcagttgtgtaccaagatagtggaaactgaattcggcgtgtccaaaacgtacaagggaaactattcggaatacgttttggcgaaggcgatttgggtggagactcaatatgccgcatgggagaagcagcagaaggagattgagcagacaaaggaactgataaacagacttggggctggagttaacgcagggcgtgcatcgagtgagcagaagaaattggaaaagcttgaaaaggaaggattgattgagaagcctttccaaaggaagcagttgaagatcagatttccagagcgtgggcaaagcggtagaactgtattgacaataaggaatctcgaatttggatttggggaagagaaattgttcaataatgcaaatctaatagttgagagaggtgaaaagatagccataattggccccaatggatgtgggaaaagcactttacttaagcttattttggggatggagaagacacaaggaggcgaagtacttattgtggagcataatgtattggctaat

SEQ ID NO: 24448 - DNA, 463 bp, Oryza sativa
  Clone ID: uC-osflM202141c09b1
gtcgtcgaccccgcccccgccgcggcggccccgttcgggccctccaccggggctgaagaatctcggcaacacctgctacctcaacagcgtgctacagtgcctcgcgtcgacccctcccctcgctaccttctgcctctccttccggcactccaatctgtgcaagaaggtgttgccgaacaaggacaaggagcgcgtgttctgtgtggtggaacggcagatctcgcggctgcttcggaccgaagcaggggcgctagactcgccagcgaagatcatacgctgcctgccgctctttgccgagcatttccggtggggccgccaagaggatgcgcacgagttcctgcgctatattatagacgcttgtcacaccgctggtctgcgcatacgcaagcggctacctgcgtgaaacgccaatggggacgctggcaaggaggaggtcccggtgcaagggccatatatggtgatg

SEQ ID NO: 24449 - DNA, 475 bp, Oryza sativa
  Clone ID: uC-osflM202141c12b1
gtacgccgccgtcgctggcatcgccggcgacggggacgccgacgccggccaccggcgtcctctgctcgcctccgccgacgacgacgacgagatccggccctaccccgcatcatccccttcgccgcagcacccggcgggggctgagcggaagccgcggcgggtcgcctcgctggacgtgttccgaggcctcaccgtggccatgatgatactggtggacgacgccggcggggcgtggccggggatgaaccactcgccgtggctcggggtgacggtggccgacttcgtcatgcccgccttccgctgcatcatcggcgtctccgccggcctcgtcttcaagaaaacaccaaacaaatcagtggcaactaagaaggctgcaatcagggccatcaaacttttcattttgggtgaaatgttgcaaggaggatatatgcatggcagacacaatttaacttatggcattgattggaatcatatt

SEQ ID NO: 24450 - DNA, 161 bp, Oryza sativa
  Clone ID: uC-osflM202141d01b1
gttatagataagcaacaacgcaaacatagcgggggcttttacgaccgggttgctggaagcgtccccgatggagatacgaccgcttaacgggccggaaagcaccaccacgttcaaacaagcggagcgcagtactcgacgaagaactccacaagggctacatc

SEQ ID NO: 24451 - DNA, 351 bp, Oryza sativa
  Clone ID: uC-osflM202141d02b1
gttccaacccgtcggttcattacctatatcaactgcaccaatctacggctccttttaagcgtaagggccgttcctatcccccccgcaccagagacgggtggagacatcaagcttacctaaaaccttcgacttgcagggcgatcgacctcacggtctccgcctcccgcgtctgcggcggtgtaccggcgtatggagaaacgatggacctcgcccaccgacggctactcccggtcgagccgtaacagatgctgagagctacccgggtctcggcctcctcctccatgatactccaccttacattggtatgtgggttaatcggcccgacgacgacccccgtggcacccccggccc

SEQ ID NO: 24452 - DNA, 94 bp, Oryza sativa
  Clone ID: uC-osflM202141d03b1
aaaacccaacccaatgtatgggggacttctaagtcgacggcgcgatggtgttcgtccgcgcaccagacgggaggacccaacacagtttaccttt

SEQ ID NO: 24453 - DNA, 491 bp, Oryza sativa
  Clone ID: uC-osflM202141d04b1
ctttaggcgacggagaggcagcggcacgcggcggcagtgcggccggacaacggtgcctatgcggaggagctcggccgagcgacggctcggcgcgagcgtggccgcgtggcggcgccggccccggcacgggtcgcggcctcggcggtgcggacgggcagcggtgccgatgcggaggagctcggccgagggacggcggcaccatttctggcttccctgcctcctccctccccgcccacctcgccggccgccgcgcgccgcccgtctcccgtctccgccgcgcgctgctttgctgctggtgaggtgagagaaaaagaaacagtgagagagatgaccagttcgctcgcgctgcccgcaactttttcctacctgcggccgtccaacttctcttccctctcacaggctcacacacttggcgcgccccttgatcaattcgttccccttctttttcttaccccttgcttgcagatggaggcaactagaggaagcggctg

SEQ ID NO: 24454 - DNA, 443 bp, Oryza sativa
  Clone ID: uC-osflM202141d05b1
tcggttggatgccgctgcggctgctgccgccggcgaggcgcctccgccgcacgccgccagcggtaggtagaggaggcgaaggaggctttggaggcaccgaagccggaggaggcgccgaaggctgaggagggggaggagaagaaggcggaggacgagaaggacatcgagaccgccacggatggcacgagcggcggggcgcggacgtcccccacggagggtcagatgaaggcgtctaataacggagttagagcacagccttcaccactgcattgtactgatctgacaggcgcggctacagctcgcccctcgacgtcatctgaatcaacgacaccggaggcgtgaagcaagcgtcgcaccttctcaagtacgactccacgctcggcatattcgacgccgacattaatcccgtgggcgacaacgccatcttcgttcacggcaaggtg

SEQ ID NO: 24455 - DNA, 471 bp, Oryza sativa
  Clone ID: uC-osflM202141d06b1
cttccgcacacacatcgctcggtcgaaggaggaggttctagaaacttctggaagcggcggaggtgtggggagagagagagagagagagagagagagagaggcagagagccatggcgcggaagaagatccggtagtacgactccaagcgcctcctaagggtgcacctcaagcgcctcgccgccatcgacctccacatcctctccgcccaggtcacggaatcaactgatttcacagagctcgtcaaccaagagccatggctctcgtctatgaagttggttgtgaaacccgacatgctgtttggcaaacgtgggaagagtggccttgtggccctcaacctagatcttgctcaagctcgtcaattcgtcaaagagcggttgggagttgacgttgagatgggtgcctgcaaggctcctattacaacattcataggtgagccattcgttccacatgatcaagagtactatttttcta

SEQ ID NO: 24456 - DNA, 446 bp, Oryza sativa
  unsure (1)..(446): unsure at all n locations
  Clone ID: uC-osflM202141d09b1
ctcctctcatatttttcccatatttcacctgccttaattcgccctactcccataaccgtagtagtaatcgtactcctacattctcgccggaatccagagcgaagctgtaggaaattgttgggaggaggagcaatgccttactgcgaggtggacaggtaccagaacggcgaccagtgggacggcgtgcgcctcttctaccgccgcttcggacgcggcgccaccaaggtgctcctggtcatcggattggcggggacgcacgactcgtggggcccgcagatcaaggggctgaccgggtcgctggagccgggcggccactacgaggagtccggcgacgctcctgcggctgatgtggacgactgtgatagcatcgaggtctgctgattcgacaacctgggtgtgtgccggagctacgtgctcgcggacaaattctactactcgacngtgat

SEQ ID NO: 24457 - DNA, 454 bp, Oryza sativa
  Clone ID: uC-osflM202141d10b1
ttttagcctcgccggcaagcccgcgggcgtcttcttcagcaccggcacccagggcggctgccaggagacgacgccgctcacggcggtgacgcagctggcgcaccacggcatggtgttcgtcccggtcggctacacgttcggtgccaagatgttcgacatggcggcggtgcacggcggcagcccgtacggcgccggcacgttcgccggcgacgggtcgaggtggccgtcggaggcggagctggagcacgccttgcaccagggcaagtacttcgctggcatcgccaagaagctcaagggcgcctcctccgcctgaatcatatacagaattgttacagagatcattcgcattggctgcctgtgctgatttgatccgtgttcatatgccggaattaatctttaccgattcgttacacacagtattggttggatttgggtgtgggtttgattctacgta

SEQ ID NO: 24458 - DNA, 446 bp, Oryza sativa
  Clone ID: uC-osflM202141d11b1
tttgatctgatcgtcggacatggcgtcgcccatgctctccgccgccaccgtgccactccagggaggcggcttgtcggagttctccggcctgaggagctcgtcgtcgctgccgctgcggcggaatgccacctccgacgacttcatgaacgcggtctccttcaggacccacgcggttggcacgagcggcggggcgcggcgggcgccgacggaggcgaagctgaaggtggcgatcaacgggttcggccgcatcgggcgcaacttcctgcggtgctggcacgggcgcggcgacagctcgcccctcgacgtcatcgccatcaacgacaccggaggcgtgaagcaggcgtcgcacctcctcaagtacgactccacgctcggcatcttcgacgccgacgtcaagcccgtgggcgacaacgccatctccgtcgacggcaaggtgatcaaggtcg

SEQ ID NO: 24459 - DNA, 491 bp, Oryza sativa
  Clone ID: uC-osflM202141d12b1
tttcattttctaccttttctggaaatcaaccctgagcgtttaaaagtctgagtaaaatgtttggttttgtagctgatgtttgtttccaaactttcgcatgagttcacaattttcaatataacccactgaaatctgagaagacaatgtttcggatcagtccaataacacttggtcagtcatacatcatagttgatgggaaatgcttggaccagtctaatgacgtttctctgctggatagagctaataataacttgcgatgcgctggacttctgataaagtaatttccttagggccacctgatgtaggttatgaggacagatcagttgaaatgtcatcaggctggggtgaacctggactatgaaatgaaacattgacatttaatcaggctaagtcccactaccagtggcttgttggctaacctattaccaaagccttagcaacaatggttatgttgacagcactagccacaagtgctcagatctactgtagat

SEQ ID NO: 24460 - DNA, 532 bp, Oryza sativa
  Clone ID: uC-osflM202141e02b1
cttatgatgaagagcgacagcaatctcattctatggcctccacaacagctcatcagggccatcaccccactagcatcctaagtagctcttttgtaaaggataccaatatattccaatcaccgatttacaccaggaatgaacctggggaaagtggtttatgcttttcttctgctccatattcctatatggatggtttaagcatgccattaccgtctgttcagagagattacactccaagggctattgatatcagttacactgaaggttctggtgataaacagtggagtagtacacactttgcatggactaaggaactcgaggccaacaacaaaagagtatttggaaaccgttcttttcgcccaaatcaacgagaaataatcaacgccacaatgagtgggaatgatgttttctgtttgatgccaactggtggtggaaaaagtttgacatatcagctttcagcactcatttgtaatggcgttacattggtagtatctgctctcgtatcgctcatccaagaccagatcatgcattt

SEQ ID NO: 24461 - DNA, 367 bp, Oryza sativa
  Clone ID: uC-osflM202141e03b1
tttataaaaaaaaactcacgagaggcgcatcggcggcggcgccgccacagggccaccggccgccgtcgccggcgatctgcagggtcaagcactcaagcccccgcagcctgcttcccgccggaggtcctataaaagttggatgccaatgccaatggagcatctatgagctaagagtgttcagaagggaagccctggtttggatcaatctcctgaacagattctcagctccgctctctaggccaacgatgcccaactctaatgcctgcaattgcacctcctcgcatgaaactttggccttctggaacgatttggagataagagaccacttgcttggattgcaagtggagatttgcttcgacaggagctc

SEQ ID NO: 24462 - DNA, 493 bp, Oryza sativa
  Clone ID: uC-osflM202141e06b1
attgaataattatttttaataattttagtttttttttttggctttagatatattcccaatccccaacctcccaataatccgatctctcccagttctgttcggatcaaggctgtgtcgatcgcaaaaaagaaaaaaaaaaaacaatttccttttggggtggttcatctgttgatcacttctttgtttcccgcgttttgttggggattcgattttcgggttaagattttctacacgatggccttgaacttggctcagagcgccgcggcggcagcgtgcttcgcgaccgccggtgatgcgcggcgagctgcttcggtggtcgccatgccgtcgtcgtcgtcgtcggccacgacgagcctgaggatgaagaggcaggcggcgtgcgagcccgtggcgtgccgggcggtggccaggcacgtggcggcggcggcggcgagcagcatgaggaacggcgttgccgtgttcgtgatgatgccgcttgacacggtgagcaagt

SEQ ID NO: 24463 - DNA, 511 bp, Oryza sativa
  Clone ID: uC-osflM202141e07b1
attaaattctctaggggggagggaggtatcggtcatggctgccgctgctgcaaggaggggctcatcgctgctctctcgctgcctgctgtccaggcccgccgccgccgcctcgcctgctgtcccctctgcgctccgcagggcagatgggacacaaggattgttgccgggaatccttcagaggttcagcactgcagcagtagcagaggagcccatatcacccccagtccaagtgaactacactcagctcctcattgatggaaaattcgttgattcagcatctggcaaaactttcccaactctggaccctcgtaccggggagctgattgcccatgtggctgaaggcgatgcggaggatattaaccgtgcggttcatgcggcccgcaaggctttcgatgaagggccatggccaaagatgactgcctatgagagatcccggattctgttggcggttgctgacttgattgagaagcacaacgatgaaattgctgcatgggagacatgggacaacggc

SEQ ID NO: 24464 - DNA, 533 bp, Oryza sativa
  unsure (1)..(533): unsure at all n locations
  Clone ID: uC-osflM202141e08b1
atctaatctcctctctctcaactaagcctgcggcacggggcaacctcgccggagaagacgacggaccgaggctacgagctacgtagccgagggccggctacccgagggcctgacgcccttgacaacctggtatcacgttccagacgatcctcgccgcgccgcgccgtctccccaccacccgccacatcctcgccaccaccagccgccgcgccaccatcctcggactcgtcctccggcgcgtcctgcccacccggcatgggtgaccccaatgacctcaagacctccgtggaggctctcaccaccgccatgaaggagatgcaggcctcgatcgccgccaacgccaaggccattgccgccctctcctccggccgcacctcatcctcgggcgccacgacagactccggcgaaccccgcaccgtccggccgccgcgatttcagaaaatggatttcccgcgctatgatgggaagtccgatccgctcaccttcctcaattggtgtgagtcgtacttncaccaacaactgatcatggacga

SEQ ID NO: 24465 - DNA, 469 bp, Oryza sativa
  Clone ID: uC-osflM202141e11b1
ttggctagcaagcaaagctaggtagaggccaggccatagatcgagatcgatctgcaggtgcagtgcggtgggtgggcatggcgacgaaagctggggtgatcgccacgctcctggccctgaacctcctcttcttcaccttctccgacgcgtgcggctgccagtgcggctcatgccctagtcccggcggaggaggcggtggcggtggcggtggcggtggcggtggtggagggcgtggaggtggtggcgggagcggcggaggttcaggtggaggcggcggttcaggtggaggaggaagcggcggcggaggttcaggcggtggaggaagcggaggcggcggaggaggaggaagcggcggcggcgggggaggaggaagatgcccgatcgacacgctgaagctgggggtgtgcgcgaacgtgctgaatgggctgataaacgtgcagctggggacgccggcgcgcagccgtgttgc

SEQ ID NO: 24466 - DNA, 371 bp, Oryza sativa
  Clone ID: uC-osflM202141f04b1
tcgttttatttgattgatctcgtcgtcgtcgttgacgtcatcattggcgggtggtttcgccgtaccggccaaggtcgccggcggcggcgagcgtcggcagttcaaggggaagatcacgtggcacgtgtggctgtgcggcatcatcgcggtgacgagcggcctcatgttcggctacgacgtcggcatcttcggcggagcgaccgccatggacggcttcctgatcaagttcttcccgccggtgtacgcgcggattcaccgcgcgagggagaacaactactgcaagttcgacgaccagcggctgcagctgttcacctggtgggtgtacctcggcgccttcgccgtcagcttcgtggcgtccaggctgtgcacgc

SEQ ID NO: 24467 - DNA, 493 bp, Oryza sativa
  unsure (1)..(493): unsure at all n locations
  Clone ID: uC-osflM202141f07b1
gtctacggtctctctttaccactcaacctctcctaacaacgtcgccggcggtttgacgtctaacggcgtacggcagaggcgacggtaaacccccacaccgccgccctccgccgccgtcgtcgttcatccgtgggagggggatacatatgcatgcaagcacgcatatcgactttcattgctcgtagttgcagagattaatctttgtggttacttcaatactgtatcaagtcttagtgaaggataattatcttgaagtatatcatacttcccagaagctagatacaaacacgagttgtcactaccatgggttcctgtgcttccaagtctgtcattgagcagagaccaccagcaaggcactataccaggaaaggaagaagagctcgtactaattcccgatccatcatgccagaagcgcccaagtcacggttgaacgattcaagaggacacatgactgacttctcaatgagtgaggtgtccattntgagacatcatc

SEQ ID NO: 24468 - DNA, 488 bp, Oryza sativa
  Clone ID: uC-osflM202141f08b1
ttcttttctagattcagtctgtcagcggcgacggcgagggagctgcgagatccggccgtgagatggtggtgatccgaaggagtcatcgtcatcgtcgtcgggttggagcctcttcgtccaagaacctgccttgatcttgcagccttgttcaagcttccgagtcttttgctgatccagggtgcagtttcttagcatgtgagtaatggcagctgctgaaacaagggctgcttggcagcgtgctgctaaccgctgccgggttcaagaggacgcaaagagagctccgaaactcggttgctgcccgccatctgggcaacagcatgagaccaacaatggaaatcaaacaaatccgcaagactgccatatccccaactttatgcctttaaactggaatgcaatgaactccaatctgccaaaagatacccaatggtggcttcagttgcagcccaattttgggtgccagaatgtgcttgctagcgaggacctgatta

SEQ ID NO: 24469 - DNA, 546 bp, Oryza sativa
  Clone ID: uC-osflM202141f10b1
atactgccgatggcggacgccgtcgccgcctacgatgcgctgcccgcgcctccctctccaccctcatccggcgccccccagtccggatctgtcctctccggcgtgggaggccggatcccctccgtcgaggcggcgaccggccagcataccgacgacagtgtgcagccgggtgtggaggcggggaagaaagagaccggcggctgtgtgggcgcagcgttggcagcgggacccgcgtgagagacgcggcttgaggccggcacggcgcgaagacagcggcattggtccctgtgcggcgacggcgcggtgctcggcggcgatgacggcggtgcctccccagatccgcgcctctcgaccggatctagagggtggtcggctgtggtggtcggcgacggcggtcgacttgcgacagctggtgacggcagttggcaacggcggcgacgggtggttgcggcagttggcggcggcgacgtcggccgacgacgccggcggaggacttggcggcggcgtggcggagggcaacagtgaagtggccgctagcagtggcgg

SEQ ID NO: 24470 - DNA, 568 bp, Oryza sativa
  Clone ID: uC-osflM202141f12b1
tgttgctagcagaagtccaggtggacaagaacgcgaggaggggaagaatcatccccgagatctcgctgccgctgctcatggcgttcgcggcgtcccacaccgcatcgccgtcctcctgcggcggcgtggcgcagaggaggagcaatgggatgtcgccggtggtggccatggcctccaccatcaacagggtcaagactgctaagaagccctacactcctccacgtgaagttcatctccaagtcaagcattcactgccaccccaaaagcgggagattttcgattcgcttcaaccttgggccaaagagaaccttttgaacctcctgaagccagttgagaagtcatggcagccacaggacttcctgccagacccttcttccgatgggttttatgatgaagtaaaagagctgcgggagagggctaaggagatccctgatgactactttgtttgcttagttggagacatggttactgaggaagctctttctacctatcaaacaatgcttaacacccttgatggtgtccgagatgaaactggcgcaagcccaaccacctgtgctgtttggacaag

SEQ ID NO: 24471 - DNA, 542 bp, Oryza sativa
  unsure (1)..(542): unsure at all n locations
  Clone ID: uC-osflM202141g01b1
tcgatctaatccctcctccgcccaagatcctttgcatcaaaagatgacattttctgcctgtttgagggagtcctggacaatctgggcaggctgagccagcagtatggcctgtccaagggcgccaatgaggtgctcctggttatcgaggcgtacaagacgctgagagacagagcaccttaccctgctagcttcatgctctcgcagctcaccggcagctacgcctttgtgctgttcgacaagtccacctcttctctccttgtggcctctgatccagagggcaaggtgcctctgttctgggggataactgctgatggatctgttgccttctctaacgacattgacctgcttaaaggatcatgtggcaagtcacttgcacctttcccacaaggttgcttctattccaatgctcttggaggctngaagtgctatgagaacccaagaacaaggtgactgctgttcctgcaaatgaagaagagatctgtggtgcaactcttaaggttgagagcgccactgcaatcctcacagctctgcactaggatgat

SEQ ID NO: 24472 - DNA, 329 bp, Oryza sativa
  Clone ID: uC-osflM202141g02b1
gtgcggcgcctccccaaccaaaccgtgagtttcgtcgcgcgcggcgcggccacagggttggtgctgaaggcggccaggtccagacctccacgcggggctgcccccggagggaagcggcggcggcggcggctcgagcgcaatctgtgtccatagaggcgcgttacgatggcggcggcgctggcgaggcgtggcggtcgggggctggcgcgcgccctggcgcgggggagggggatgttccttacccctgccgcggagcgcgccgtcggggcggcgctgacgttcgaggaggtcatgcggaaggaacgcgagcgcagcgcgcacaactacca

SEQ ID NO: 24473 - DNA, 299 bp, Oryza sativa
  Clone ID: uC-osflM202141g06b1
gtatggcctagccactgcccgctcgcgcgccgacgattcttagcaagattgtgaggctttgttggtcgttcgtgcgtccaagggaaggagagccatgggggcaaccttctcctggtcggcgtcctcgtcgtggtcgctcgggtccctcgacgactacatcatcgtcgggtgcgttgtcacggcagcggacgccgtcgtcgagggggctagcgtcaagttactattcagctgcggggggaggatcctaccacgccacgccgacggtgcgctgcgctacgtgggtggtgacaaccgcgtca

SEQ ID NO: 24474 - DNA, 490 bp, Oryza sativa
  Clone ID: uC-osflM202141g07b1
cgttgcgaaatttttgcgagctcgcgacgcgaaccccctacgccgcagccgcaggcttcctcttcatctcctcctcctccagacctccacgcgagcgtgccccggggtggaagcggaggcggcggcggctcgagcgcaatctggtggcgtgggggcgcgtcacgatggcggcggcgctggcgaggcgtggcggtggggggctggcgcgcgccctggcgcgggggagggggatgtgctcggccacggcggcggagcgcgccgccggggcggcgctgacgtccgaggagctcatgcggatggagcgcgagcgcagcgcgcacaactaccatccaattccggtggtgttctccaagggagaaggttcacatatattggatcctgaaggcaacaaatacattgatttcctgtctgcttattctgcagtcaatcaaggcccatggcaatccaaagtcctgagagcgttgaaagagcaggcagaaaggctcacact

SEQ ID NO: 24475 - DNA, 521 bp, Oryza sativa
  unsure (1)..(521): unsure at all n locations
  Clone ID: uC-osflM202141g08b1
tttgaattgcaggccaattccagttgagtttctccacagaccacagatatggcttccggcaggatagctctgctctgccttcttggcttgctgctggtagcagcctcaccggctgccattgctgccaaagatgacaaaatcttctaccagattactttcatgtggccgggagcgtactgcgcgcagacgaaggccggatgctgcatgccgaagaccgacgtcgcgccggcgtccgacttctacgtcgccggcttcacggtctacaacgccaccaccaactcttccctgtccagctgcagcaacactccattcgacatgaaccaaattggggatgtcacgaggctgatgcagtactggaacaacatcaggtgccccagcaagagcggccagaagggctggaagaacgcgtgggagacgtccggcgtctgctccgacctcaccgagagcgcctacttngacaccgncctcgccctccgcgacaagatcaaccccctttctcgcctcgtcagcaacggtattaa

SEQ ID NO: 24476 - DNA, 540 bp, Oryza sativa
  unsure (1)..(540): unsure at all n locations
  Clone ID: uC-osflM202141g10b1
tgttcaccgcacttcacccacctacctcccccaacctccccatcaaaaactagtagtagcagtattcacccatccacgcacgcgaccgagcgcgatcgattcgaggcggcggcggcggaggaggaggagggggagtagatccggcgggcggcagcgatgatgaagtcgctgctgccgcagagccagctgcggcggtcggcggcggcggcttcggcggcgcggtcttcgggaggaggcgcggggtcgggcggcgccgatggggccggctccgacggcggcgcgggcgggcgtgcccccgccacgtccacgttctggttcctccttcacgcgctctgctgcctcgtctcgctcttcctcgggttccgcttctccaggctcctcttcttcctgctcttctccaccaccgngctctactnctcacctcgtngtncttctncttcggcgtgcttcgngccacgacgacgacgacgaccaccaccacaaccaccacgaccaccaccaacacctttaccctttctttcaagccaacccaacccttcc

SEQ ID NO: 24477 - DNA, 476 bp, Oryza sativa
  unsure (1)..(476): unsure at all n locations
  Clone ID: uC-osflM202141g11b1
ttcccccccggttgctgctgctgcagctgagcctccgttcttggaagcgagagagagggagggaggagggaggcaattggtgaggcttttggaggaggaaagggaagcttcgggccccagcatcctcctcctcctcttgctcactcaccacgctctcctctcaccaaactctctcttatctccttccaagatcccaaccccttttcttctttttttttgtttgttcttgttaggatcattttcttgatctttcaagctcagctccagcactccccccgttcgtttccagctgcagcagagatcttggttagttggatttttagcttccgtgttttttgagcgagttcttggttaattgctccaatccgagaaaaatcaccaagtgtcctttgcttccctccctccccccttgttttctgggcttcgattcgatcgaattcgaatccccgtcccaaatttatntattttcccacccc

SEQ ID NO: 24478 - DNA, 443 bp, Oryza sativa
  Clone ID: uC-osflM202141g12b1
ttttcttgcctgatcagctcctcccaaagctccaggatttggttccattcttgcacaaatcatgaatgaaatcagaaaattgaagcgcgggatcagcaccaaacgaggtgatcaccccgtccaaaatggccaaaatccagtcgatgaatgggaggagcaacaacgatactggccttcgccacgggcaccgccggtgagtccgatgggatcgccgcggaccccaaatgggagccagaagaagccggttctcggcaaggtgaagagcaaggctaagaaatggatgcacctgctgcatcacaagaagaagccgcaagaagacatgatgtggaccccccgagcaggacccagtgcagacgacagcaaggagcacaacgatgcagattacggatccccaagcacagctcgacatccccattcctcgtgtgaatcaacatgtgcacctg

SEQ ID NO: 24479 - DNA, 496 bp, Oryza sativa
  Clone ID: uC-osflM202141h02b1
gtttgtttcttccaagtagacttgttacgcctgttggtgttcgagtggtaggagcccttgatcttttccaggttcagatcgacgcctgcttactctggacattggtgctagttggtgatggctgagcaggctaatcaaccgactgtccttcagaagttcggagtccagttccaccttggctccagcttttctgaaggtgtacgggctcgcaacatctgcccatctgtctcatcctatgacaggcgctataccacaaggagctacatgaccgatggccttgtcaatggtggcatcaacgtcccaatgatgtcgtcctctgcaatttttgctaatgctccagctgagaaaggtggcaaaaacttcatgattgatttcctcatgggtggagtgtcagccgcagtttcaaagactgctgctgctccgattgagcgtgtgaagctgcttatccagaaccaggatgaaatgatcaaggctggtaggctctcagagccataca

SEQ ID NO: 24480 - DNA, 137 bp, Oryza sativa
  Clone ID: uC-osflM202141h03b1
ggtcctacaattgtgtgattgcagattcatgtgtgggtgctgtctgctgtccaaatgggagaaagatatcctcacatgttattcaaccctggtactttttcatggagcccatgccgatttgaaagatcgcagacaga

SEQ ID NO: 24481 - DNA, 543 bp, Oryza sativa
  unsure (1)..(543): unsure at all n locations
  Clone ID: uC-osflM202141h04b1
gtttgggaaaaacacatttgcagccacatcatgcgatggcctctctccgcaccattccggtgatcttcggcatcctcttctatgtccttgccagcactgccactgccaccgacgcaccggactacgtcgtccaaggccgtgtctactgtgacacgtgccgcgccgggttcgagaccaatgtcaccgagtatatcaagggtgccaaggccaggctggagtgcaagcactttggcaccgacaaggtcgagcgtgcgattgacggtgtgactgatgagaccgggacatacaagattgagctcaaggacagccatgaggaggacatctgcgaggttgtcctcgtccacagcccccttgcaaactgctctgaaatcgaggccgaaagggatcgtgcccgtgttttgctcaccaggaatgtcggcatctgtgacaacctgcgcttagccaacccactcggctacctcaaggacatnccactgcccgtctgcagtgcgctgttcaagcagttcgaactggctgatgatgataacgagtaatgcgatgatc

SEQ ID NO: 24482 - DNA, 402 bp, Oryza sativa
  Clone ID: uC-osflM202141h05b1
gtttgctgtcgtcgttgtgttcttcggataaaaggatttgggttgcaatgctgttgtatggggagatcgtgatgcggggcaacgccgtgatgaagggctacctgaagaaccccaaggcgaacgcggaggcgttcgccggcgggtggtaccactccggcgaccttggggtgaagcaccccgacgggtacatcgaggtgaaggaccggatgaaggacatcatcatctccggcggggagaacatcagcagcctggaggtggagaaggtgctgtacgcgcacccggcggtgctggaggcgtcggtggtggcgagggcggacgagcagtgtggggagtcgccgtgcgcgttcgtgacgctcaaggaaggcgccgacagctccgacgaggcggcggtggccggcgaca

SEQ ID NO: 24483 - DNA, 429 bp, Oryza sativa
  Clone ID: uC-osflM202141h07b1
gttttgcgagcaccatagcctagcccaccatgtgcggcggcgccatcctctccgacctcatcccgccgccgcggcgggtcaccgccggcgacctctggctggagaagaccaagaagcagcagcagcagaagaagaagaacaagggcgcgaggaggctgccactgcgccaagaggaggaggatgatttcgaggccgacttcgaggagttcgaggtggattccggcgagtgggaggtggagtccgacgccgacgaggccaagccgctcgccgcgccccggagcggcttcgctaaaggtggattgaaaaacactactgttgctggtgctgatgggcctgcagcaaggtctgctaaaaggaagagaaagaaccaattcaggggtatccgccagcggccatggggcaaatgggctgcggaaatcagagatcctc

SEQ ID NO: 24484 - DNA, 395 bp, Oryza sativa
  Clone ID: uC-osflM202141h08b1
atctcaccccgccgccgccgccgccgcagcctgctcaaggctgctcccatcctctccttcgagttagcttcctccttattcaaccatgggtaaggagaagacgcacatcaacattgtggtcattggccacgtcgactccggcaagtcgaccaccacgggccatctgatctacaagcttggaggtatcgacaagcgtgtgattgagaggttcgagaaggaagccgctgagatgaacaagaggtccttcaagtacgcgtgggtgcttgacaagctcaaggccgagcgtgagagaggtatcaccatcgatatcgccctgtggaagttcgagaccaccaagtactactgcacggtcatcgatgcccctggtcaccgtgacttcatcaagacatgatcac

SEQ ID NO: 24485 - DNA, 211 bp, Oryza sativa
  Clone ID: uC-osflM202141h09b1
gtgttggtcttgcggaggcaacaagtttgattccattggccaatataatcttttagtgatgttgtgtaaaatgttatgtcaaatccatgagtattacccacactagaaccaaatttgtgccacaatgtgttgtgattattgctgaggcatagaatttatttgtaaaaaaaaatgtgttattagcttgacagaagaaaaaaactaccagatt

SEQ ID NO: 24486 - DNA, 476 bp, Oryza sativa
  Clone ID: uC-osflM202141h12b1
atccctttgatctctctctctccctctctctcagtggctgctgcttgcctggctagctagcttccagctgcttgcttctctctctctcttctcttgagcatccttgatgtgttctacacttggtgatgctgctgcttctgctctgagtgtgtgtagactgtagagagagagaggagaaggaggaggaggaagggaaagaaagaagaatctgaaaattgctttagagtcattgaccaccctagtttcctccttgaatgtccccccctccccttctccttgttgtttgttccttccttgagattctctgaactcccttcatcctacatgccctcctgtctcctgcctccattcttcaattttaatgcatcctcttcatgactttacttgagcctcccaaaatttattgcttccatggtgaggcagatgctgcatgctatgtagcaagaaaagatcgaagctcctatgttttatcacca

SEQ ID NO: 24487 - DNA, 392 bp, Oryza sativa
  Clone ID: uC-osflm202002a02b1
ctgttatcggagatgacgtcgccggcgacgacggacgcctcgccgttcgtgctggcggggctcctcctcgtctccatcccggtcatcttcctcctcgcgccgcgcctcctcccgcccaagacgcttccggccatcccggacgccgacgagtccgacgacctcgcgctcttccgccgcgccatactctcctgctcctccccctcctccggcacgcccacgccctcctccgccgcgtcctacttcttccgccgccgccccgcccccaaggtcgccttcctcttcctcaccaactccgacctcgtcttctccccgctctgggagaagttcttccgcggccaccaccacctctttaacctctacgttcacgccgaccctttcttcgccctcacgat

SEQ ID NO: 24488 - DNA, 348 bp, Oryza sativa
  Clone ID: uC-osflm202002a03b1
caattaccaagtccattcctcctctgtttcttccgtgccaccacgcgatcagcgcgcgcgcgagagagagagagagagagggagaaggcgcgatcgcaatggggaggatccagtacgcggcggtggcgaggggggcggtggtgatggcggagcacggcgacgcggcgttccccaacgccggggccgtcgcgcggcagatcctcgaccgcctctccgccggcgatggcggcggcggcggcgattgcaacatctcctacacgcaggatctccacgtgttccacgtcaagcgcaccgacggcgtcaccgcgctctgcatggccgacgacgccggcggacgacggattccct

SEQ ID NO: 24489 - DNA, 458 bp, Oryza sativa
  Clone ID: uC-osflm202002a05b1
cgatcgattcccatcgccccccaaatccccatccggttccaagccctaaacctccggagtcggtcgaggcggtgctcgatccggccgatgcatctccggattcgagcggggggcgttgccgcggtgcccggatccggaggaatcgcgccgcggcgggttttctagggttccacaccgtcgcgcgtcccggcgggtgttcatgaaggccatggggtacaataacccctacgattccagcgggactgacgacgatctccctccaacacaaaatagaggattaagagtgcgatcttttagtgcgaatggcagggcatctgttatgccattttcttacattaggccgcacggtgatttggagagtgaaatacatcacgttgagcaagaagcgtacactggtgttcttagagcatttaaagtgcaatctgatgctatatcctgggaaaaagaaagtttgatca

SEQ ID NO: 24490 - DNA, 406 bp, Oryza sativa
  Clone ID: uC-osflm202002a06b1
aagtatatctgcttcaggccagaaacgtcgttcaaggaccagtgaagcggagcagggtggttcaagcactagcacacacaatcagcatgcaccagttggtgaggtttcaggccgggcccacactttaaaatctgagaaggactcccggcattctggaccaggtagcaaggaacagttcacggatagcgcagggctgttcaggcaccctacagatatgttcatagttaagatgaagagagatcgaagcccgagcctggggtctccatccagttcaggccgaactggaccgctctccccgaccaacgccgggcggatgggaccggcgccatcacctagaggtgccaggacgcccttccaaagagatccacactcttctcagcattctatgcattcaggtggatggggt

SEQ ID NO: 24491 - DNA, 400 bp, Oryza sativa
  Clone ID: uC-osflm202002a07b1
gggttataatgtcagtatgatggctgattctactggtcggagggctgaagctttgcgggagatttcaggacgtctggctgaaatgcctgcggatagtggttaccctgcatatttggctgcacgtttggcatccttttacgaacgtgctggtaaggtgaaatgtctcggcagtccagatcggacaggcagtgtcacaattgttggtgctgactctccacctggaggagatttttcagatcctgttacctctgcaactcttagtattgcgcacgtcttttggggattggataacaagctggctcaaagaaagcatttcccatctgtcaattggctcatctcttactcaaaatactcaaaggctctggaatccttctatgagaagtttgatcaagatttcatt

SEQ ID NO: 24492 - DNA, 377 bp, Oryza sativa
  Clone ID: uC-osflm202002a09b1
gcattctcagtccttgcaccaggaagccctgacggggttctcgctaatccctctccagcgatccagactatgtcccaagcatggtttgcatggcaggaattctaaccattcttggagggaaatcattgtcgatcgcaagaacgttcctccgtaatgccctccgtttggaacccacaagccatcaagcctggctgcgccttggactcgtcttgaaatctgaaggatcactgcttgaagcggccgactgcttccaggcagcctacgagctccaggagttatcgccgatacaggacttctcaaagcacctccccatcatgctgcaataggaacgcaatagcccaagattccttgtagaaattacctctcactttttaaac

SEQ ID NO: 24493 - DNA, 420 bp, Oryza sativa
  Clone ID: uC-osflm202002a10b1
ttttatttgtgtggagtacgtacgttgcaacgagggtgaatttggacggtggagctgcgtaccctaggtggtatcttgatgacaatgtaatttctttttgcaacttcgatcgatcttttgcgagcgagcatggtgttatcttgttgacgacgtccacctgcaaaagatcgacgtacgtagcagccgtgcactcatctcatcttaattaatgggtccgttaagttggtacgtgttaagttagttggttcataaattctaagcaattcgtggggtttgaaatttggatggcgatgacaaaggcaaaaggcaatatgtatatcaatagagaaaggtcgacagatgggtggtggatattaataaacctatagctaggtatcttatactctgtccggacataattaattgacattttcaaacaac

SEQ ID NO: 24494 - DNA, 489 bp, Oryza sativa
  Clone ID: uC-osflm202002a11b1
atcatcacaaaggcttaaaaatctccagtctccagggagagaaagagagagaagagggggcagcttgatttggggcgaggagacgcgatagccgcgataggctaagcagctggcagcggcggctgctgcgatggccggcgccgacgtggacgtcgggacggagctccggctggggctgcccggaggtggcggcggcgccgccgaggcggcggccaaggccgcgaagaggggcttcgaggagaccattgacctgaagctgaagctgcccaccgccggcatggaggaggccgccgccggcaaggcggaggcgccggccgccgagaaggccaagaggccggcggaggccgccgccgccgacgccgagaagccacctgctcccaaggcgcaggcagtgggttggccaccagttcggtcgttccgcaggaacatcatgaccgtccagtcagtgaagagcaagaaggaagaggaagctgacaagcagcagcagca

SEQ ID NO: 24495 - DNA, 422 bp, Oryza sativa
  Clone ID: uC-osflm202002a12b1
agctaagattgcaattcaaagggcttatgagaaagggttccaggacctccattacgtggagcgatatgaggaccacacaattgctcatgcaattcaggccaaatatgagaagacaaagatatacctctggcctggaccaatgagaagtggaatgtctgctgctggtaggacggttgaaacagtactgtatttagctggtttcagcaacgtcaagtcaaagattattggttcaaggaaccccctgaatgttatcaaagctctcttcatagcattaaacgccattgaaacgccaaaggatgttgagcagaagtttgggcggaccgtggttgagtcatacttattgtagtcatcaatttgtttgtcctgtggagctcgccatctggctgtggcgatggacgtccaaagaaagagctaattgcaca

SEQ ID NO: 24496 - DNA, 359 bp, Oryza sativa
  Clone ID: uC-osflm202002b01b1
gccgagaaggtcaccgccgccggtcgccgtcgtgggggtcgccgccgccgccgccgccgttgtgctcgcgggagctcgaaaccccacgctggtcgcgcggcggaggagggaggtaggagggatgggtcgatctgtttacgtggcggcggccgtcgccctggtgctcacgagctgctccgtgctctgccttggcgcggagcggttcggggcgagggagtgcgaggagctggggttcaccggtctcgccctctgctccgactgcaacgccctcgcggagttcgtcaaggaacaagaattggtggaggactgccgtaaatgttgtacagaggattcagatgattctatcagcaagctcacat

SEQ ID NO: 24497 - DNA, 396 bp, Oryza sativa
  Clone ID: uC-osflm202002b03b1
cgctttttagttaattagtagttgttaattatctggactaaccttaattaccctcacgcaaagcactctctaatcctcctcggcgctcgcataatcttgtatccctcatctcagattatcatcacctcgccgtgttagaaaaaagggagtaagttcgttttatcgtcggatttggtgagagttcgccggagtagaagaagatgacggtgacgccgcagatcacggtgagcgacgggaggctggcggtgcgggggcggacggtgctgaccggcgtgccggagaacgtgacggcggcgcacgcgttcggcgccgggctcgtcgacggcgccttcgtcggcgccgacgccggcgaggccaagagccaccacgtcttcaccttcggcacgctccgggaat

SEQ ID NO: 24498 - DNA, 431 bp, Oryza sativa
  Clone ID: uC-osflm202002b04b1
ggattagcaccctggtggcgatgaagtgttgctaggagtaactggcaaagacgcaaccaatgattttgaagacattggccacagtgaatcagcaagggagatgatggagaagtatctcattggggagattgatgcttcaaccatcccagtaaagcgtactcatgtcactccccagcaagcgcccggcaacccagacaagggcgatgacatgctcattaagatcttgcagtttcttgtccccatcttgatcttggggcttgcatttgctatccggcagtacaccaaatctgagtagatctgttattacaatggtgataatcaatatggtccatgaagctatattaggtgaaatgatttggatcaaaagaactaaataatgatatttggtgaggggaacggtatgttgtattggtatattatggagtattatg

SEQ ID NO: 24499 - DNA, 452 bp, Oryza sativa
  Clone ID: uC-osflm202002b05b1
gcgttgcgaacccttctccgccgcctccgctcttcgctgcacggtgctagctcgccgccgtccgtctcgcgcgcctcaagggttatcacaagatgtatacagcaaggaggaagatccagaaggacaagggtctggagccaactgagtttgaggacactgttgctcaggcattttttgaccttgagaatgggaatcaggagctgaagagtgacttgaaggacctttacatcaatggagcagttcagatggatttacctggcaacaggaaggctgttattattcatgttccatacaggctgcggaaggcatataagaagatccatgtgaggcttgttagggaacttgagaagaaattcagtgggaaggatgtggttctggttgcaactagaagaatagtgaggcccccaaagaaaggctcagctgttgttcgccctcgtacccgcacacttact

SEQ ID NO: 24500 - DNA, 336 bp, Oryza sativa
  Clone ID: uC-osflm202002b07b1
catttgcaagcgccccgaatagccggcgccggaggcggaggcggaggaggcggagctcaacttgatcttactccgcaagatggggatggggtgcacaaatatgctgtcgcagtcgcagctctcgaagataaagatgttggcgtcgcggcccgatatctgcaagaggaacagccacctgaagctctgttacaacctccgcaatcgcaatgtcttcgtccccaacaccaacaagccacagctaggccccctccacaccaacaagccacagctaggctccctccagtacaagaaagggaaggaacatgtgtatgatgtgtcagggcagaccccaacatg

SEQ ID NO: 24501 - DNA, 321 bp, Oryza sativa
  Clone ID: uC-osflm202002b09b1
cctgttcgtaactaatcatgcgatcacactggaggggcctaactttactcacggcggcgcttggcctctagagcttccatccggacgacaactaccacgccaccgtcagctgccacgacatggaggacgtcggggtcaacaccagcgcggtcgactttctgaacccgtcgtgcaagaggctcgaccacgttctcctgagcagcatcaagaaaagcgtatgccacaacaacgacaacaaccatgacgtcgtgatggtgcatgtgaggaccaggatcgcgagggcgttcccggcaacgatatctgtgatgggcaagggcaggc

SEQ ID NO: 24502 - DNA, 430 bp, Oryza sativa
  Clone ID: uC-osflm202002b10b1
cgattcgatccgatccgatccaaggggaggggaagcaatggctacaaaaaggagcgtggggacgctgggggaggcggatctgagggggaagaaggtgttcgtgcgggccgacctcaacgtgccgctcgacgacgcccagaagatcaccgacgacacccgcattcgcgcgtccgtgcccactgtcaagttcctactcgagaagggcgccaaggtcatcctcgccagccatctgggccgtccgaaaggtgtcacccccaagtacacgctgaagcctcttgtttcacgctttgctgagctacttggagtcgatgttgagatggccaatgattgcattggtgaggaagttgagaaattggctgctgctttgccggaaggtggtgttctacttctagagaatgttagattctacaaggaggatgaaaagaatgat

SEQ ID NO: 24503 - DNA, 288 bp, Oryza sativa
  Clone ID: uC-osflm202002c02b1
ggctttttcaagctcacagaggaagaaacaaatatggtttgcaagttaacagaaggttactcaggatctgacatgaaaaatcttgtgaaagatgcctcaatgggaccactaagggaagctcttcaacagggtgttggcataacaaagctaaacaaggaggacatgcggccggtgatgctcaaggattttgagactgctttgcaggaggttagaccttttgtttcctcaagtgaactgggaacttatgaagaatggaacaagcaatttgggagcttaacaaattaattt

SEQ ID NO: 24504 - DNA, 399 bp, Oryza sativa
  Clone ID: uC-osflm202002c03b1
gacttggaggagggggttagggtttccatcggccgcgacccgactctggatcgagaggaagaagaggacaagtatgacagagaggcatttggtagagaggatgcttttgaccgtgtatacatgaatgaaatcatggatgatggcattaacatgagcatcaacactgtggtgcctgacatccttgatgattccgttgaggagatccaccgcttctcaagggatcccagagcagatatgggtgcggcatccgcaagactcaaggagtacgatagttcagctaaaggtggcacgtgttctctagctcagccaaatgaattcccaagtggcaggatacaagcaatgaaaaccgatgatgctaacgtgaaacctatactgaagcggaaggaggagcaaggcgat

SEQ ID NO: 24505 - DNA, 490 bp, Oryza sativa
  Clone ID: uC-osflm202002c05b1
gtgttagtgggggattgcgtgctgatgcgggcgtgggacactgagaaggcgccgtacgtggggagggtggagaggctggagacggacgggagggggagcgtgcgggtgcgggtgcggtggtactaccggccggaggagtccaagggcgggaggaggcagttccatggtgccaaggagctgttcctcttcgaccacttcgacacccagagcgcccacaccatcgagggcaagtgcgtcgtccacttcttcaagaactacaccaagctcgacaacttaggccccgaggacttcttctgtcgcttcgagtacaaggtcgtcaccggggcctttaacccctaccgggttgccgtgtactggaagtgccagatgccgtattacccggatgatctaatggtgcattgcgagggatgcaaggacctggttcattcattttggttgggaatgaccatttgacacgcccaaaaaatagatcatttccttgtgcgcaatt

SEQ ID NO: 24506 - DNA, 426 bp, Oryza sativa
  Clone ID: uC-osflm202002c06b1
gcttggcgtaaaagaaaatctccccgtctcgtcgggtcctccgctccttgcgccatctcgcggctgaacaggggaggggcggcgatctccatccggcgagcggagcaggggaggggaggggatcttgacaatggttggacctgggcataggaacagtcacgggaagcgtcactctgattatgctgaaaatggaggtggcaagagaaggaatcctggtgatgatacatatgctcctggtccagatgatactgtctaccgctatctttgcccttctagaaaaatagggagcatcattgggaggggtggagaaattgctaagcagatgagggccgacactcaagctaagataaggattggtgagagtgtatctggttgtgatgagagagttatcacaatatttagcttcaggcagggaaactaaatacc

SEQ ID NO: 24507 - DNA, 432 bp, Oryza sativa
  Clone ID: uC-osflm202002c08b1
ggctttttcaagctcacagaggaagaaacaaatagtgtttgcaagttaacagaagggtactcaggatctgacatgaaaaatcttgtgaaagatgcctcaatgggaccactaagggaagctcttcaacagggtgttggcataacaaagctaaacaaggaggacatgcggccggtgatgctcaaggattttgagactgctttgcaggaggttagaccttctgtttcctcaagtgaactgggaacttatgaagaatggaacaggcaatttgggagcttagcaaattaatttgcagggagatgttgaaaccttgaaggcgctagtatgctttcccatgcaaagcatgcgaaacatatgcttgcgagagtcgacagaggacaatgaagcataccttgtgcagccatatacctctagactacttgtgatcactgatgc

SEQ ID NO: 24508 - DNA, 310 bp, Oryza sativa
  Clone ID: uC-osflm202002c09b1
aacacacccgaacgagcgaacgaggcggcgccgcggcgcttcttcttcctcttcctcgataacaaacgcagccaacctccgctggagcccgcccgacctccgcctgtcctaccttctccggcacaggaaccgaccgccagccgtcgaccggtcggagggctccgcctcgtccagatctggccgctgcttccctcggcggctcgtcggatcctgctgaatctcgcgtcggcgtcggcgtcagcggagggaactcaggaggggatcggtgcttcgcgtattgggggggcctcgatggtcttccttcccaacg

SEQ ID NO: 24509 - DNA, 402 bp, Oryza sativa
  unsure (1)..(402): unsure at all n locations
  Clone ID: uC-osflm202002c11b1
gcttatagagcgtgcccgtcctgctccacgccggggggccggtgaacgagtcgcaggtcatcgtgcagtacatcgacgaggtctggccgggcggcgccgggggacgcccgtccgtgatgccctctgacccctacgagcgcgcggtggcgcgcttctgggccgcctacgtcgacgacaaggtccggccggcgtggctggccatcctgttcgggagcaagacngaggaggagagggcggcggcggtggcgcaggccgtggcggcgctggagacgctagagggcgcgttcggggagtgctccaaggggaagccgttcttcggcggcgacggcgtcgggttcgtcgacgtcgtgctcggcggctacctcgggtggttcacggcgatcgacaagctgatcggtcgca

SEQ ID NO: 24510 - DNA, 314 bp, Oryza sativa
  Clone ID: uC-osflm202002c12b1
gttttgtcctcggacacgatcgacaacgtgaaggggaagatccatgacagggagggtctccccccggaccagcagcgcctcatcttcgccagcaagcaagtggaggatggccgcaccttggctgactacaacatccagaacgagtccacccttcacctggttctcaggctcatgggtgggatgcagatcttcatgaagaccctgactggcaagaccattacccttgaggttgagtcggccgacactattgacaacgcgaaggctaagatccaggacaaggagggcatcccccccgaccagcagcgactgatctt

SEQ ID NO: 24511 - DNA, 108 bp, Oryza sativa
  Clone ID: uC-osflm202002d01b1
ccctctcatccgccctttttttttatgctggacgggactagattacaccacccgggggtaggtaaacctaaacaaaaaaaacacaaaaaactacaaaaaataaagccc

SEQ ID NO: 24512 - DNA, 325 bp, Oryza sativa
  Clone ID: uC-osflm202002d03b1
cattatacatgattaccggcgccgcgcagatggacggggccatcctcgtcgtctgcggcgccgacgggcccatgccgcagaccaaggagcacatcctgctcgccaagcaggtcggtgtccccaagattgttgtcttcctcaacaagaaggaccaggtcgacgacgaggagctgcttcagctcgtcgagctcgaagaccgcgaattggtctcctcctacgagtacgatggcgacgaagtgcccatcgtcgctggcttcgcgctcaaggcgctcgagaaccttatggccaaccctgccattaaacgcggcgatgatgagtgggtgga

SEQ ID NO: 24513 - DNA, 302 bp, Oryza sativa
  Clone ID: uC-osflm202002d05b1
ctttttgccatctctctcagctctcacagctcagggatcattggccgtggccaccatggcgctctcctccccggtgatggcccgcgcggcgccgtcgacctcctccgcgctcttcggcgaggcgcggatcaccatgcgcaagaccgccgcgaagcccaagccggcggcgtcttcggggagcccgtggtacggcgccgaccgggttctttaccttgggccgctctccggggagccgccgagctaccttaccggcgagttcccgggcgactactggggggacaccggggggcttttcgccgacc

SEQ ID NO: 24514 - DNA, 432 bp, Oryza sativa
  Clone ID: uC-osflm202002d06b1
caagttgtggcgtcgccagagattgtggcgagagaaataatcgccacagctgtggcggaaataagcatgcaaatgaactagcaaaaagtgtggctgccacaactcacgtattaaccaaacatcagtcaaactgtcgtggcagccgcatgtttggcgaggcaatgtgtggcagggatccaaacaccccctcagtaacaaccatgtacattgcaagctgcacagtgtgttgaaatcttagttgcatctgtgtgagctcgtttgtaaatctggacggctagttatccaggacggtagagttcaagaactcgacttcctcagaaggattttgtttctgccatttgtatatttattatctgatcttgcatggaccatggcaaggggcgggttgatttgatgcatcaactgatatctcttcgtgcccctgatgtgatt

SEQ ID NO: 24515 - DNA, 246 bp, Oryza sativa
  Clone ID: uC-osflm202002d07b1
cacttttcaactagcagatcacctagctcgatagctgcctctatcacagtatatacgctccctgcaacttgctgctgctgcaatagctagcagctgcagctagtaagcaaaactatcaaccttaagggttttttgcaagatcgatggccagacgtggcaacgacaggcaccatcttgcggctgagaggattgtggccgacgtgctggacacattcctacggagcaccaaactaacggtcacctatg

SEQ ID NO: 24516 - DNA, 344 bp, Oryza sativa
  Clone ID: uC-osflm202002d08b1
atcttgagaacctcctcgtggcggcgagctctcgcgactcgactctcgcgtcgcgcgcgcgcacggcgccatcaatcgattctcacatccatccatctgcctatctatctctcgcaattctggcggcgcgctgcgcgcatagggggggatcgaatttgatctagtggtgatggaggcggcggcggcgatggaggcggggcggaagctggcggcgcggcacccgcacgggcggagcaggacggcgcacaacatgtcgtcgtcgtcgctgcggaagaagtcggacgccgcgctggtgcggaaggtcccccgggcgccgctccgcccgctgctcgccaaccttcaag

SEQ ID NO: 24517 - DNA, 293 bp, Oryza sativa
  Clone ID: uC-osflm202002d09b1
gcgttatcagtagtgctggatatcctgctggaggggttcagtcaagcagtggagctgccaatgcaggacaagcaccagctacttatcctgtcgcatacgacccaaccagagcaggccagaggtgaaatcgtagtttcagtctcagacccaaatcactatttgctaaacccattttgtggtgtagctgtagtaagatccttggagaggccaacaacagcatggctctagttcgtttttcttgtagattccttccctatacattttagcggtcaatgaaaattagttgtatatcg

SEQ ID NO: 24518 - DNA, 426 bp, Oryza sativa
  Clone ID: uC-osflm202002d10b1
ggttctcatcgtcctaccttcatacagctgaaagggttccctcatatacaagataaagcaatggaggtgctgatccggtggagcaaactgccggcggccggctccttggtgctgtacgccgtcttcttgctgtcggcggcggccacatcggaggccaacatcggcgagtacgacgagtactggcagaagcgcaagctcatggctgatgccgccgccgaggctacctacaagcgtgaccccttcgaggtcaccaacagcttcaaccgcgccgtccacagatcggaggaggagagcgggaggagggagctggcgatgaccaaaaggaagaagttcgcggggacgtgcaaggcgacgaacccgatcgaccggtgctggaggtgccgcgccgactgggtgacggacaagaaacggctggcgcggtgcgcg

SEQ ID NO: 24519 - DNA, 406 bp, Oryza sativa
  Clone ID: uC-osflm202002d11b1
acttctctcgctgttcttctctcctcctcctgtggctggctgcttgctctactgcaattatttattgccacctccaattcttagtactgcgagattaattactcattcctccccgcagtgccatgttcttgagtttctttcggtttttttaatccattttgcaacactctctgtcctgcagccagagctgcatttgctggggatttatactagtaggcggcttcagctttactctctcccctttctgcttctgctgcttctccctttccctctcaacttctcaagtggcagtggtgggagggtagcatctggcccaagcaaagcgccgggttcttggctctgctcgctttttttcgtggtaaatctgtgtgcaagatctggggtacaaaaggaggggacagcagca

SEQ ID NO: 24520 - DNA, 373 bp, Oryza sativa
  Clone ID: uC-osflm202002d12b1
cattttgtggcgcatgcagaaattgccctaggcgagggatttagcacaattgtggtggtaggctatcagcgaatcaggggacacataggctgggtactgcgaaacaccattccacatggcataataaaacattgcaaatttaacagaaaagcagcgaggatgtgaataggctggatctgaacaccgattagatagacatgtacagtgttgagcggacgggacctcaaagaccacttcaaaatagactggctcgtttgaactgctggagtgtaaacgacacacaacggacacagtaaggacatgctaaaaagctactggaacaggataagaaaccaattatattgaatacttgatattgtagcgaatatactac

SEQ ID NO: 24521 - DNA, 191 bp, Oryza sativa
  Clone ID: uC-osflm202002e02b1
aatcgaacgaaacttatttgttcctcagcttattctctgatgaaatttcaaaaggagagcgaaacagtggacactgacgcttgcgaaataaaaaggtggcgccagaaactccggcgagactacggcgacgagacgcccgacgacaacgaccatgacacgatacaaccacacactgggtggagattaccgtc

SEQ ID NO: 24522 - DNA, 254 bp, Oryza sativa
  Clone ID: uC-osflm202002e03b1
ctttgttgttggatagtaaaacctagctttgctgtagcaacaacaacaacaacaaagaatttctctcacatggtggggatgcgtggagcttatggctacaatgacaacggcaacgagggtggcgtagtagttggagggggggaggcggaagccgagatcgctgcgatggcggtgctacacaaggtggcggcgtcgtcggcgcatagcacggcgagcaagctgaatgcgagggtgaaggagaccttcttccccga

SEQ ID NO: 24523 - DNA, 450 bp, Oryza sativa
  Clone ID: uC-osflm202002e04b1
cacatgtgcttgcttagcttagcttagctttgctggtgctccttctcattcataagccagcagctagctagcaagcagcacacacatatatcacaggccatctctctatccctaattaagctatatactccatatagctagctaaacacaggaggagtggaggaaggagaggctagctgatctagctatctgcagtgattagttaaaatgatggcttctgataggttggatgcagaaaggatcatagagtacttcaagggcaagagcatcctcatcactggagcaactggctttcttggcaagattcttgtggagaagatactgagggtgcagcctgatgtcaagaagatctacctgctcgttcgcgccatcgaccaagcatctgcaaaccaacgcgtccaatctgaggtgacggagacggagctgttcagcgtggtgaaggagaagcac

SEQ ID NO: 24524 - DNA, 308 bp, Oryza sativa
  unsure (1)..(308): unsure at all n locations
  Clone ID: uC-osflm202002e05b1
gctttctatagctaagccccccaagagacatcgagagcgagatcgccatggccgccgccgccgccaagaacggccgcattgccgtcgccgcgctcctcctggcggcgctggccctgtccgcgcagctcgcgccggccgcggcgtgctcctactggccgacgccgaagcccgcttcgccgccgncggcgggggcgtncggggttccgtggccggcggcggcgtacaaccccaccccggggaccccgaccgggaaggggcccggggacacgctgaagctgctggcgtgcgtggacgcgctgaacgggctg

SEQ ID NO: 24525 - DNA, 385 bp, Oryza sativa
  Clone ID: uC-osflm202002e06b1
cgcttccgccgccgagcaccactcgtcgccggccatggagacctccgccgccgcgggtggcgcacacttgatctacgtatcctccgacgacgaggaggacgaaacacgcgtcctccttgccgaatcctacagcgccgaggagatccagatccagcaggccatcctcctctcgctcgacccctccagcgacgcggacgccgcccattcctccgcctcctcctcccgcccctccggcgccgcctccacctccgacgaaccctcctcccttcccgaccgcaagggcaagcgcaagctatcatcggaagaagatggccctatcgaatccacgaggaaaaagcggcggaagcgcggccgattcaagtgcagcgtctgcatggagaagcta

SEQ ID NO: 24526 - DNA, 241 bp, Oryza sativa
  Clone ID: uC-osflm202002e07b1
atcttgccctagtgctatggcgttcacaggctcttgcttcttccggaatgatacgcggttgcgtgctcttcgtttccttgaccatttgcttgagagagacaatatgcagaagacggagtttctgaaggcattatcggatatgtggaaggacttcgattcccgagttcttcggtataaagttcttccacctctctgtgctgagttacgcaacatggtcatgcagccaatgattttggccatg

SEQ ID NO: 24527 - DNA, 288 bp, Oryza sativa
  Clone ID: uC-osflm202002e09b1
ggtggacaagggcaccatcgaggttgccggcacggggaaggttaccaccacccaggggcatgatgaccttggcaagagatgcgccaagtactacgaggctggtgcccgcttcgccaagtggcgcgccgtcctcaagatcggccccaacgagccgtcgcagctcgccattgatctgaatgcgcagggcctcgctcgctacgccatcatctgccaggagaacgggctggtgccgatcgtcgagcccgagatccttgttgatggccctcacgacatcgaccgctgcgccta

SEQ ID NO: 24528 - DNA, 369 bp, Oryza sativa
  Clone ID: uC-osflm202002e10b1
ctgttggtgatggctcatctgtactttgggtattgggtggattatagtggtacttgcatggctaatgatgccaaggctgaaaataaggatgaggggaggcaagtcaatggactttgtgatgtcactcgaagaccctagagtctgatgatatggttggagggcaccgaggatgcaacattttctgtgttggtgtcatagactatcgagcgctcggctttggaacgtatgattgctctaagccacttagtattgtggggaacctataggataactttcttggcaggatctcactttgttggcgcattaccattggtgctgggctggggtgataacccaatcgacactgatcgtcgaccgatgatgatgaca

SEQ ID NO: 24529 - DNA, 163 bp, Oryza sativa
  Clone ID: uC-osflm202002e11b1
cttttcccgctgttggaaagagacgaaagccagcggggagctctatacggtgatccgaggctcgcctaccggcgagagcttgcctgtctcgggaggttctcaggtcgatctgacatcacagggatccactggggaggggagccaacggggtggcactctcata

SEQ ID NO: 24530 - DNA, 330 bp, Oryza sativa
  Clone ID: uC-osflm202002f02b1
gctttatcttctccttccagctcctcccatggcgtgcctcgtcgccatcgccatcgccatggctctcatggtggttcaacctggccggcagatgactgcctttgctgctcggacgtcgccggcggcggcggcggaggcgttctggcgtgccgccatgcccggcgctgccatgccggacgccatcgtcgagctcctccaccatgagcacggcgttgctagcgccggcggcaaggccaacggggggggcgacggtccaccggcggcgatgaacttcaactacgacgactacagggccctgccttggagcgacgcccctttcccggatgcatt

SEQ ID NO: 24531 - DNA, 464 bp, Oryza sativa
  Clone ID: uC-osflm202002f05b1
catttcaccccgacacgaatcgctcaggcctcccccctgttgttcatccctcactcaacttttgggcagcttggctttattcaattccccttcctttttattgcgaatttgcgactgcgagcgagcttttcttcctcaaaggaagacgacgacggaggagcagccctgcagagcataaagagaggagaggagaggagagggggccggtcaaggaagaggagggaagatgagcagcacagctccactcctcacaccctacaagatgggaagatttgatctttcccacagggtagttctcgcaccactgacaaggcagcgatcctatggtaatgttcctcagcctcatgccattctgtactatcagcagagaacaaccaaaggaggccttttgattgctgaggccactggaatctcggacactgctctagggtacaaagatactcctggtatttggaccaaggagc

SEQ ID NO: 24532 - DNA, 434 bp, Oryza sativa
  Clone ID: uC-osflm202002f08b1
ctctttctctctctctctctctcggcaccacggacactcgtacagctgccgcctgccggagggttggtggtgtgtttcaggttccagaaaaatcctccagcgttttgtggtcgcttgaggagctgagctgtgtgagccttgcaaggtttgcatcaacaagcttgggggtttttcctatcttgttgttctgagggaattcaagaaatgctccatatggtctgaattcgtaggtctttttgtgttggaatctctcagagggtttaagaggaaaaaggaaagaggagaaattgtaaggacaagtagagaagaacatggctgacctggaagcaagcatggttgctgctgccacagaccagggcaattcaacaaggtcacaagatgacgcagccacactgatcccgaacagtggcaatctgggctcgagcaacaggagc

SEQ ID NO: 24533 - DNA, 331 bp, Oryza sativa
  Clone ID: uC-osflm202002f09b1
gccttcgtcttccacctccaccatttcattgccgggctcctcctgaccatcttctgggcctcaccttcatcctcttctccaacctcgccgcgatctccatttccatcctcttccccagcctcaacttcgtcgccttctccgacctcagcggcggcggcgctctttttaccaatctcagcaccaccagcaccggcggtggcatcggcgagaagcgcctcctcgacgagggtgagagcctccatggcgccgtagacctcggcgtccaagtcggcggggaggccgggcttcctcctggcggcggcgctcattcgtcagtacctcgccggacccc

SEQ ID NO: 24534 - DNA, 461 bp, Oryza sativa
  Clone ID: uC-osflm202002f10b1
aatttaaggcctgtgtcaaggagagggtagtagcaccttgctctcctttgccttcagagaaaccggaagcaatggcgtctgctactctcctcaagtcatctttccttcccaagaagtctgaatggggtgccacccgccaggctgccgcccccaagccggtgactgtctccatggttgtccgcgctggtgcctacgacgatgagcttgtcaagaccgcgaaaaccattgcatcaccaggaaggggtatccttgccatggatgagtcgaacgcgacctgcggtaagaggcttgcgtcaattggccttgagaacaccgaggccaaccgccaggcttaccggaccctccttgtcaccgcaccgggcttgggacagtacatctccggtgctatcctcttcgaggagactctgtaccagtcaactgtagatggcaagaagattgtcgacatcctcactgagcagaaa

SEQ ID NO: 24535 - DNA, 291 bp, Oryza sativa
  unsure (1)..(291): unsure at all n locations
  Clone ID: uC-osflm202002f12b1
catttttgcatgctcagcatacaccantttcgttgggggttcttaacattcataagccagcagccaactagcgagcatcacacacatatatcacaggacatttctatatacctaattaagctatatactccatatagctcgctaaacacaggaggagcggaggaaggacatgctagctgacctagctatctgcagtgagcagtcataacgatggcataagataggctgtatgcataacggatcataaaatactctaagggcaagagcatgcacattactggagcaactggc

SEQ ID NO: 24536 - DNA, 303 bp, Oryza sativa
  Clone ID: uC-osflm202002g03b1
aaattatctcgatcgatcgacaaagctatagctaggccagtcatggccgcctctcccgcaatggcgacactcctcctcctcctcctccatgctgtcctcgtcgcggcagccgatgccggcgccgccgataaggaggcctatgcggcaacaggatcaaccgctggcaaggagaccgctgcggcggccgacaaggagacctctgcagcggccggatcaaccgcgggcgccgtccctgaccccaacattttcaacaaggaggccgtgtgccccaagacgacggacgagaaggcgtgccagcaactg

SEQ ID NO: 24537 - DNA, 425 bp, Oryza sativa
  Clone ID: uC-osflm202002g05b1
gcattacttatcatgagcatgcagctcagtgatggtgactttccacaagaggaaatgatcggaagtttcttgaaaaatggccccttgtgttatatggcttatcgcaatatattcccaatatgggctcttggagagtatcagaaattagtatttcagaactatcagacctctagcatcaagcaaacaaatatagctccatctgctggcaatgctgctctgaagaattcagcaagtacaacagcgccaacttgatttcttggcagaatcaagcaaacagtccagtgtattgtaggtcatgtgaaagagtacaaaactctaaatctagaatctgctgtattgttttggtcgattttatgagatccttatgaattttttgtacattctttagatctgtgcaagaacatgtacatcacattttacattta

SEQ ID NO: 24538 - DNA, 386 bp, Oryza sativa
  unsure (1)..(386): unsure at all n locations
  Clone ID: uC-osflm202002g06b1
cctttctctcctcccccttgtgggtgtgtgctgtggtggagaggagaaagggaggaagaagaggagagcaagaaccaaaaaccaagagctgctgccaaccctgcacagcctgggcttgtgatcattgattgcccaactattactaccttcctgtttttttcttctcatatagaagaatcccatctatctatcccttatacatatctcttcttctctttggttcttggaaatctcccatctcttctagatttcctttgtggcttcaagggcctccacaccatatcttgattagtagttggntgctcttcttcttggtcttggntttcttgattgcttagggggttggaattttgcgggtcttggtttcttggtctttccccccaatc

SEQ ID NO: 24539 - DNA, 309 bp, Oryza sativa
  Clone ID: uC-osflm202002g08b1
tccttttcctcgatcctttgtcttcttgcttagctggctctgccatggtggggagctacgcggcgggagggggacggggagcggcagtggcggcggtggcggaggggaagctggacgagctgcggcggaggatggggaaggcggacggcgacctgctgaggatcgtctgggtggggggcggggcgtgggggagcgccttctgcgcgctgctgcaggacgcgtacgggcggcaccgcgacaaggcgcatgtgcgggtgtggcggaagccctggcgcgccgtcgaccgcgccaccggcgagcacctttttg

SEQ ID NO: 24540 - DNA, 264 bp, Oryza sativa
  Clone ID: uC-osflm202002g09b1
aaattatattataggaaataaaaaataatttcctggttagaataaacacatttttagaggaaaccaagaaaagattttcctcttctgttacattccttcttccttctccggccaccggagccgtagccgaattgtgcctcttctcccgccaggggagaaggagagagggggtgtgagttttgctcctttcggcgagggggcgtctccccgcgcgggtgaggagaacctttgggacattcgggttggggcggcgtgcatgatggg

SEQ ID NO: 24541 - DNA, 404 bp, Oryza sativa
  Clone ID: uC-osflm202002g10b1
ctcttcttcttaccaccctctcccggataagaggcgcaaccaaagcccccaccctcgcccaaaacccccacgagccgcggccatggcgaccaccaccaccaccccctcctcctctctcaccgcccctctcctccgcccgagctcgaacgcgaaccccgccccgagatctctgccgctcctcaggagccggaggtgcgctcgggccgtggcgaccgccgccgccgccgctggccacggggccgctcatcagaggagcgggatttggtcgatcagggatgatttggtggtgccgaggtcgccctacttccctgtggagtatgcgtcggggcaggaacgcgggccatcgcccatggtgatggagcggttccagagcgtcgtcagccagctcttccagcacaggatta

SEQ ID NO: 24542 - DNA, 513 bp, Oryza sativa
  Clone ID: uC-osflm202002g11b1
gctttacgcagggcaagcaggacttgtgacggtgcaggggaagattaccgctgttcttggaactgtgttgataagcgcctaccttttcatcacattgttccctgaccaggctgaaaagctttttgacttggctggaatcaaattgtgatcagaattgtatctcttttcatgcattttggttctcctcttggggattcatgttcccattgcatggctaacttaagcggacttggggagatcttttcatgatgaaaagaaagttaggctcaacgtgcaatatgtagggaattgttggcatatccaaatgtatttcctcttgaatacattattttgctcgcatgcatgctatccttttccaattgtatgtatggtttatcgaatttttgttgttccgacaaaaaaattacgcccttgcagagtaatggttcatgatttcaagctgagcacacaatagaaagtttaacaaaaaaaaaaaagtgtagtctgtagattgtataccaataacatctgaaa

SEQ ID NO: 24543 - DNA, 489 bp, Oryza sativa
  Clone ID: uC-osflm202002h01b1
gatttagcagctcttctgcatttgagcatgtgctggttggtgagatcaagggacgacgaggacagcgagagaatgaggtctaaggattccataattggattcaggcaagttcttgtaatgttacaacagttcttgtattccttgcataaaaattactctgattggtatttcgtgaaacaattgcagttttacctggaagaagccaatgggaatgtggattaccaaggttacatattcccaaggaggcgtggggaatcgcctgattcagagacacagctattgactattcagtttgagtggcacggagttctgaaatcggtatccagcactctgattggtgtcagccctgagtttgaggttgcactctacacgctctgcttctttatgggaggggaagataaccgcgttgagattggcccgtacggagtaaacatcaagtgctaccgaatgggaaacagcaaaattgggtcagcatttccaattgcagat

SEQ ID NO: 24544 - DNA, 473 bp, Oryza sativa
  Clone ID: uC-osflm202002h04b1
agatttcgtatttttggaaatgtgggcgaaataatggatttcaataatctggtgaggaggctgaaaagaaaagagcctaattgaatgaaaaattttagaagtactaaaaaatttctgacgaaaaaaactgaacaaaatttggccgaatttaaacatgttgtgctgtttccaaaacaaattgtgtaaatcaaaaacatttcagaggcctgtataatggatcttcccccgcaaaagttttagcaaaatttggctgaattcatacttatttcgtaattaagaaatgtgtgttttttttaggaagcatatcctacctggtggccaaaagaccaaaaatttcggaaatgtcagtttaaattatagaacccgaacttataacttggcatgggggtagaacgccatttccaaaattttgtcatcagttaagccagaaatcttgaaataatgccatcagtggtttagcaaagacacatttt

SEQ ID NO: 24545 - DNA, 381 bp, Oryza sativa
  Clone ID: uC-osflm202002h05b1
attgttctgttgaagtctggagagcggaagatattgaagtaaggatgttatgccaggtagcattcggtacaagagtgagacggaggtagctccgtagaagaaagtagttttgcaaagaagcttgttcttcggagtagattggcactacggcactactagcttttgaacagaagaaagagtttgttttctcgtcataagtgccaccaatctcgttcaggcactaaactagtttcggggaggatggatggttgtcccttcttctcaatagaatccgatagacaagaatcgaaagctgcagatttttttattccttaagtaagtcaagtgatgattcaattccatcaaagatggcaagagccgggcatctagatcgatcggttt

SEQ ID NO: 24546 - DNA, 383 bp, Oryza sativa
  Clone ID: uC-osflm202002h07b1
cacatactcgttaacctccatcttctcttctcctcgcacgagctcgcagctcaagcgcacccagccatggcgactcctcagatctcgcgcaaagccctcgcctccctcctcctcctcgtcgccgccgccgccgcggtctccaccgcgtccgccgacgacgtgctcgccctcaccgagtccaccttcgagaaggaggtcggccaggaccgcgccgccctcgtcgagttctacgcgccatggtgtggtcactgcaagaagcttgcccctgaatacgaaaaactcggtgcaagtttcaagaaagccaaatcagtcctaattgcgaaggttgactgtgatgagcacaagagtgtgtgcagcaagtatggagtttctgggtaccccac

SEQ ID NO: 24547 - DNA, 379 bp, Oryza sativa
  unsure (1)..(379): unsure at all n locations
  Clone ID: uC-osflm202002h09b1
ggcatcgcacgcgcacccgctctccctcgccgtccgcccgtcgtccccggctcaggcgacgccgctgccgctcttcctgaggtacgctgctctccgtcgcggtgggagatgcggcggagcgacgaggccgctgcggctcacgaggctgcgccgcggccgagcggcggtggcggcggcgggggaagttgacgcgcccatggagcagaccgaggccatgatgagggtggcggcggatgacnacagcgtcaccgccaccgtggtgtccgtgctcctgaccgtcgcgttcgtcgggctctccatcctcaccatcggggtgatctacctgtcgggtaccgacttcctggagaagagggagagggagaagtttgagagggaggag

SEQ ID NO: 24548 - DNA, 442 bp, Oryza sativa
  Clone ID: uC-osflm202002h10b1
atattgactaggtctggtagttttgagtttgcaacagtcgaaaatgttgttatctgtggaagcatgaactctgcattggaactactatcatcaactccatactgtttatccattgagaaagtttttgttatagggggtggacaagtactaagggaatctcttaatggaccttcatgtgaggcagtccatttaactgacattcagtcaagcattgagtgtgacacctttattcctccgattgacttatcggtgttccaaccatggtattcatctttgcctgtggtagagagcaacattaggcattcgtttgtgacctatgttcgggttagaaaaacaatggcagaaacacatgactcaaatggcaaggaatcagctaatgatggtatcaagagtgacaaatttgaaaccgagaatttctcttttctccctaagttgatatttg

SEQ ID NO: 24549 - DNA, 148 bp, Oryza sativa
  Clone ID: uC-osflm202002h12b1
cgctcgcacgcacgcgcaccacgaaccagcacgcgcgccacccaatggcggacgacgcgtacgacgacctcccaatggccggcgcggaggaggaggtggacgacgtgatgaaggacgagctcgacgaggagggggaggaggattattc

SEQ ID NO: 24550 - DNA, 527 bp, Oryza sativa
  Clone ID: uC-osflm202099a01b1
ggattctgtagttctgtccctgtttgcgacgatcgtgaacaaatacaaaggtgaagtgcttgaagacgtgcctcgcatatttgaggctgttttccagtgcactcttgagatgatcactaaaaactttgaagattacccggagcatcgcctcaaatttttctctttgcttcgtgcgattggcacccattgcttccaagcattaattcagctttcaagtcagcaattgaaacttgtgattgactctatcaactgggcatttagacatacagagagaaacatcgcagagactggtctcagtctattgctggaaattttaaagaactttcaggcctcaggattccaaaatcaattctacaaaacttattttttgaatattgaacaagagatctttgcagttctgacagacacattccacaagcctggtttcaagcttcatgttttggtgctgcagcacttattttgtgtggttgatggtctgacggagcctctcttggatgcatcctcagtaccatacccatatactgaca

SEQ ID NO: 24551 - DNA, 441 bp, Oryza sativa
  Clone ID: uC-osflm202099a02b1
cttttgattgctgaggccactggaatctcggacgctgctcaagggtacaaagatactcctggtatttggacaaaggagcaagtggaagcgtggaagccaatcgtagacggcgttcatgccaaaggaggaatatttttctgtcagatttggcacgtaggaagagtctctaataacacttttcagcctaatgggcaggctccaatttcgagcaccaataagtcactaaaacctgcagtaagagccaacggcatagatgtggctactttctcaactcctaggcgattagagactgatgagatcccttttgtcgtgaatgattacagggttgctgctagaaatgcaattgaagcaggatttgatggtgttgaaatccatggagctcatggttatttgatcgatcagtttctaaaagaccaagtcaatgatcgttctgacaaatat

SEQ ID NO: 24552 - DNA, 361 bp, Oryza sativa
  Clone ID: uC-osflm202099a03b1
gtattccttttgagcgagagatcgaagcaagctgcggcgcgtatcttacgacatgggggaggtggcgtcagcggtggcggcggtgactacggagcaagggaatgggagcagcgggtgtgagcagaagactcggcactcggaggtcgggcacaagagcctcctcaagagcgacgatctctaccattacattctgtagacgagcgtgtacccctgcgagcacaagtgcatgaacgagctccgtgaggtcaccgccaaccacccatggtacctgatgactacatctgcggacgaggggcaattcctgaacctgctgatgaagctcatcagtgccaataataccatggagatcggcgtttacacc

SEQ ID NO: 24553 - DNA, 451 bp, Oryza sativa
  Clone ID: uC-osflm202099a06b1
gttttatactgttgttgtcctctcgtggccattaggagagggcctcctgatgctgaaatgtgagtgagagctttgctttgcttgcttgctggctggctggctggctagctgggggttggcttcccctcatcctcgtgcatcatccactgtgctcggctcagctgtctgccctgttcttgctttggtggttggacggttagcatcttcctcctcaagctgagatccttcttgacgccattggaggggtcgctgtcgcctgcgtccttgagcctccctgcttttctttttctctctctctctcctcggcgagggagacgacgacgacggtggcggcggcgatgctgagcttcaagcagagccacgaggggttcggccatgtcgccgccgctggagctggaccgcagcagcagcagcagccgtggtgggcggggtcgcagctgctgtacgggga

SEQ ID NO: 24554 - DNA, 576 bp, Oryza sativa
  Clone ID: uC-osflm202099a07b1
tcgctttacgtcttttcttaactgttcgtggttgtttgaccacattatgttctttgataacaaaagaagtgtccaatgttgaatcacaggagagaagccttagcattgacatttcacaaggattcattcttcacaagcttgttgagcttctcaacaaatttcttgaaattcccaatattagagcaagatttatgagtgataatttattatctgatgtgctggaggcttttctggttatccgtgggctagttgtgcaaaagacaaagttaattaatgactgcaataggcttttgaaggaccttcttgatagcttgcttgtagagagtactgcaaacaaacgtcaatttattcgtgcttgcatctctggattgcaaaagcatgtgaaggaaaagaagagacggacatctctgttcattttggagcaactctgcaatttaatttgcccagtaaagccagaacctgtttatctcttaattctaaacaaagcacatactcaagaagagttcattaggggctctatgacaaggaatccatactccagtgctgagatttgcccactgatgagagatgtgaaaa

SEQ ID NO: 24555 - DNA, 530 bp, Oryza sativa
  Clone ID: uC-osflm202099a08b1
ttcgctaatccccctcctcaatctctcctcctgttttgtcctatcgccgccggtgcgcgctggcaaatctgcatgccaagccgcgatgccatgccatggcaaggccaggatgggtctgaatttgtcgtgtcatatccactcgagtcgcgagttggccggacgccgaggagagtagccgcggatctgactgcatgacgcggtcagcgggcctggattcctacgaaaggagccgcctttgatctataatcggaggaatatgaaggattaaataccttaacaactgccaaggcaccattgttctctacggtgcagaagcgagcctaaagtgccgctcattttggtttataatcggattagtctttgttcagctgatctgcgcaatccaataccgagtcgtgaaggaacatgctgatgatgcattctatgaattgcagaatccccaacagcaaattcaggcctatgcctttgatgtggtcctggccctagttccaagaatgaatcttgatgacctttttgagtaaaagatgatg

SEQ ID NO: 24556 - DNA, 385 bp, Oryza sativa
  Clone ID: uC-osflm202099a11b1
tttggttaccgtgatggaaatccaagagtcacggcaggggttacaagggacgtatgcgtgttagctagaatgatggctgctaacttatactatgcacagatagaggatctgatgtttgagctatctatgtggcgctgtagtgatgaactacgtgtaaaagctgatcagttacaccgttgcgcaaagaaaaacacaacaaagcactatatagagttctggaaacaagttcctccgagtgaaccctatcgtgtaatactgagcaatgtcagagataagttgtacaatacacgcgagcgagcacgccatttattagccagtggattttctgaaattcctgacgaagcaacattcactgatgttgagcagttcttggagcctcttgagc

SEQ ID NO: 24557 - DNA, 362 bp, Oryza sativa
  Clone ID: uC-osflm202099b03b1
cattctatttcaagaagctcagctcctcctcctcgggcatggtagaaatggccacgggcgcgtccagcctcctcaagacctccttcgccggcgtgcgcctccccgacgacgtccggaaccccaccgtgtccgtcgcgccgggcaccgggggcgccatctgcaacttcatctggtgcgcggcgtgcactcccccctacgaccgtaacgccatcaggttcagccccatcaaggagtccatcgtgttccgcgagatgacccggcggtacatgaccgacatgatcacctacgccgacaccgacgtcgtcgtcgtcggcgccagcttcgcggggctctactgcgcgtacgagctctccaaggacccc

SEQ ID NO: 24558 - DNA, 519 bp, Oryza sativa
  unsure (1)..(519): unsure at all n locations
  Clone ID: uC-osflm202099b04b1
atgtcttatataggagtcgagttcacattaatcaagattgttgctctgtccagacaacaagaaagtggaacattgtactccataagttgcgcattgtcatggtctgaatttctcagccatagtaacttgtgttgaatggggttaatcacaagggcagaaaacccaattttctggtgtcgaataaaccacagattttatggaaataagcgatgccaaaactggaacaagctagaacgtgggataggagttgcaatatggccactcaacaaatgataattggataaatcatcaatagcacacagattacagtgcaagattcatgatgtacagatacaataccctttgctcatcttaaaggtaaatatatgttctttctagcaacatgcgttgtcttctgactgtaaatgcagaatcactttgtttgccctgcactaacaatatgcaaggtcttctgactgtatatgcaaaaacattntattttttttcagttggcactgctgataccttgcagccactgac

SEQ ID NO: 24559 - DNA, 514 bp, Oryza sativa
  Clone ID: uC-osflm202099b05b1
gccctatcggttccgcttctcctctcccctcgccatgtcgcttgccgtggccactcccgcctccgcccgcctctccccgctcaccacctcctcccccgaaccctgccgccgccgccgcctcctcctctccgcagccgcccctctccggcgcacccgtctccggcgccgcatcgccgtcgtcgcgtccgtccccgaccccgcggcgcggccggcggagtacacgccctggctcatcgctggcctcggcaaccccggcagcaagtaccacggcacgcgtcacaacgtggggtttgagatggtcgatcgcatcgcgcgagacgaggggatcaccatgaacacgatccagtccaagtcgctgctcggaataggttcgattggggaagtgcctgtcttgttggtaaagccacaatcatatatcaactacagtggggaggcaattggacctcttgctgcctattatcaagtaccattgcggcatatccttgtgatgtatgatgagatgagtctacccaat

SEQ ID NO: 24560 - DNA, 493 bp, Oryza sativa
  unsure (1)..(493): unsure at all n locations
  Clone ID: uC-osflm202099b06b1
gtggtcgttgtcctcctcctcggtctcctcgccccggtcgaccccccactgacaagtgggcccaccccaccatcccccccggctgcgtccgcggcgagcagcggaggcctccacctcgccggcggcggcatgagcgggttcttggcggtggtggggaaggtcgggaccttcctgctgtggctgctcttcctcgtgctgcagacggccaccaagatcgtcggcagcctcctcgccgcggggccaccaccggctgacgcccaggaagccgcggcggcggcggctgcgcggcgcaggtcgccgccggcgtcgccgcacagcggtggcggtgccacggacccgtaccagcctccgcagctgtgggacccgccgccgccgtcgtctccgtactcggctggccacgcggcggacgaatactcctcgtcctccagctaccggcggcgcggngcgagcgcgccgccggccgaggacgtggtggtttncttcagctactcgc

SEQ ID NO: 24561 - DNA, 259 bp, Oryza sativa
  Clone ID: uC-osflm202099b07b1
gatcacagcaatcgacctccaggggatcggttctattaatcatcgacgcgggttaaaaaacggggagatatgccaccgccaacagcatgatgatccttgctagcaggcggatcatttatggggatgacacaaccacgtcatggactactactaggacgggtaccgtcgccggagctgcctccaggactactacgaatcctacgatgacgcactacatccccacttcgacggcgattgccacttatacgccggtaccggg

SEQ ID NO: 24562 - DNA, 502 bp, Oryza sativa
  unsure (1)..(502): unsure at all n locations
  Clone ID: uC-osflm202099b09b1
ttggtttaccttacacacctgaccaccctgcgttccatctaccacatgaggcccggtttcgccgaatttgcgtccaggccctacgtttccaggtggtacatgaggatgatgtggcctctgtcatggctctccatggtgctgacatggacgtacggttcttcattcactgttgagaggaatgtcatgaagaagatcaggatgcagtcatgggccataccaagatacagtttccattatggattggattgggagaaggaagctatcaatgatcttatcgaaaaggcggtatgtgaagctgacaagaatggggctaaagttgtaagccttggactcctgaatcaggtagctcatttcctaatgaattcagagcaagttgaaacattatcatccatacttcagaattcagatgttagctatatgtccacatgtactgccaaattttagtcaagataaaacagntagtgcttaataattgactatcttcagggaaaggtttagtcat

SEQ ID NO: 24563 - DNA, 416 bp, Oryza sativa
  Clone ID: uC-osflm202099b11b1
tcgggctggaccagctgccgcgccgacgaccaccgtggctacctccgcgcctgctggtggcgacgaggtgtccatcccccctacgccgttcgccaccgtggtgtctcccgtcgccgatggacctgccgatgcggctgacgccgatttctccggtgccggtgctctcaagaggtgcgctgccgttgccggtgtcgcggctgccattgccaccgtcaccttctactaagatgccggatgcagagatgtggagtgtcatggtgagctgttagggtggacagcaggaggaaggcgttactgtcgttgggaggggccacatatttcctggttttgctcatctcacttgcttgtgcaacattatggggtcgacactatatcaattgaatgcatttgaacgactgataaaacttttcttgaac

SEQ ID NO: 24564 - DNA, 310 bp, Oryza sativa
  Clone ID: uC-osflm202099c02b1
gtctttatactcccggtcgctctgcctcaggagcgatgcgggtgtgaaacaagccgcgttgtccccgaccctctgctgcgactcccacgcgtcgccacacgccgaggaagctgatcggatgcacagacaggacgggcaggcctctgtctgtccaccgttcacaagggaactggacagggctgccattaaggcccctacgaccaggaagaacccatacgggaccagatccggcgccaggatgcacggacccagtacccccatggccggatctgctgctccggacagatggagcctagtcgcatacataaga

SEQ ID NO: 24565 - DNA, 448 bp, Oryza sativa
  Clone ID: uC-osflm202099c03b1
gtttttgttgaaagcgaatctgccccaaatactcgatgggactctattgggtctatgtatgggttacaccattcaatgtctgctccttctagtcctactgccagggctgaaagcgtaccattccgtcagagtgctactggtacggacagccaagcaactacagatttgagaaatgctggagtttttaatgaatctgagcgagtaaaccatgagagagaacagctggatttaggtagcgatgaaatgcttggaacactcaatcattacaccggcccatttaacatacgaatgcctacatatgatggaggcaaccaacagacattgcgaccacatatgcatgataattccttattccacaggccggccgctggcagagcaagcaatattgcacatttgaggacactaactgctgcgtatgaaactatatgccatggtcatgagaagacaa

SEQ ID NO: 24566 - DNA, 514 bp, Oryza sativa
  Clone ID: uC-osflm202099c06b1
gcattcgcatccacgagaccactcgaacccgacccgcctggccgccgccgccaccgaagtaatcccttaattggtcaaaatgtctcgggaggagaatgtctacatggccaagctggccgagcaggctgaaaggtatgaggagatggttgagtacatggagaaggttgcaaagactgtagatgtggaagagctcactgttgaggagcgcaacctcttgtctgttgcttacaagaatgtgattggtgcccgccgtgcctcctggcgtattgtctcatccattgaacagaaggaggagggtcgtggcaatgaggaacatgttactctgatcaaggagtaccgtggcaagattgaagctgagctgagcaagatttgcgatggtatcctgaagttgcttgactcacaccttgtgccctcatctactgctgcagaatctaaggtgttttacctcaagatgaagggtgattaccacaggtaccttgcggaatttaagactggtgccgagagaaaggaagct

SEQ ID NO: 24567 - DNA, 390 bp, Oryza sativa
  Clone ID: uC-osflm202099c08b1
tttgcgttccttcttgcgctccggtgccgccgggtggggctcgcgcggctgcctgagccgagaacaggatcggaggccaggccccatgcatgcatgttaattagtctgtcactgatcacttcatcccattagccattagctgtttctcatacagacggacgcgccatccaacacacatcgatcgatcggaggttgattggccggacatgacgacgacggccgccggccgagccaccctgtgcgcggccagggaggagcaggagctactggccacccgcctgaatgtgaacggcatccggccgccgcattgcgccgcggaatccatgctcatctacctcaccgcgccggggctctccatgatgcccatgcgggtgatggcctccgactcca

SEQ ID NO: 24568 - DNA, 401 bp, Oryza sativa
  Clone ID: uC-osflm202099c10b1
tcgttttcggcgggggtgcccactcacctactggccgggcggaccgcaccaggaggaatatttccacccccacactactagcgccggagcccctcccttcccctacatgctccatccgtttgaacttgccctctgaatactactgcaactaccagacagactcgccaactgaaacagctgacgatgccgaggaccagagcactcacactattacggatccttccgatcgccatacgcgatcaggccaatccgtaataacggctttgctacaaagcaaatcaaacgagcgcactgtagacgcaagggttatccgacttacactaaaaatgtaagatctatttgtcagcagcattgataagataccctatgacactagtgggcatcagcaccaaacagatgag

SEQ ID NO: 24569 - DNA, 474 bp, Oryza sativa
  unsure (1)..(474): unsure at all n locations
  Clone ID: uC-osflm202099c12b1
tgctatccgccgccgccggcgtactcnagagagacaggatcatccatggcgggcaagggcgagggtccggccatcggcatcgaccttggcacgacctactcgtgcgtgggcgtttggcagcacgaccgcgtggagatcatcgccaacgaccagggcaaccgcaccaccccctcctacgtcggcttcaccgactccgagaggctcatcggagatgctgccaagaaccaggtcgccatgaaccccatcaacaccgtcttcgatgccaagcgtctcattggcaggaggtttagcgatgcttctgttcagagtgacattaagctctggcccttcaaggtgattgctggacctggtgacaagcctatgattgttgtccagtacaagggtgaggagaagcagtttgctgccgaagagatctcctccatggtcctcatcaagatgcgtgagattgctgaggcctaccttggcaccaccatc

SEQ ID NO: 24570 - DNA, 431 bp, Oryza sativa
  Clone ID: uC-osflm202099d01b1
ggtttccttacacacaccactccatttctgagctgttctagtttgagtgagagagcagcagaagggagtagtgcaagatgccgatccgcaacatcgccgtggggagccaccaggaggtgtaccacccgggtgcactcaaggcggcgttggccgagttcatctccaccctcatcttggtcttcgccggccagggctccggcatggccttcagcaagctgaccggcggcggagcgacgacccccgccgggctgatcgcggcggcggtggcccacgccttcgccctgttcgtggcggtgtccgtcggcgccaacatctccggcggacacgtgaacccggccgtgaccttcggcgccttcgtcggcggcaacatcaccctgttccgcggcctcctctactggatcgcccagctcctgggctccaccgtggcgtgc

SEQ ID NO: 24571 - DNA, 427 bp, Oryza sativa
  Clone ID: uC-osflm202099d02b1
gattccatttgagcatagctcatccagagatggcacgcaggagtggggaacatctgatgctaacatcgcagagacagtgcaagtgatcgactacctctcattcaggtacgcaaagagcccaagcctgctggcagtggagctgatgaatgaacacgttgcacctcgtgccaccttggagagtctgatgaagtactaccatgatggatacaacgccgtgaggaaatactcatctacgggttacatcatcatgtgaaaccgtctgtgaccggatgatccaacttagttacttcaattggccaacggatttccccgtgccagaatagatgtgcactactacacggtgttcaatgacctgctcaataacctgactgtgcagtagaacattgattttatcaaattatacttcttaagtgagctagaaaatgtc

SEQ ID NO: 24572 - DNA, 538 bp, Oryza sativa
  Clone ID: uC-osflm202099d03b1
ctttccggctcgggttcccggcggatccccttgggccgacgggccgcggccgtctgctctccatcgacgctgagacaggccgcgccgccgttcctttccacgcgccggtccggtccggcccgtcgccgttcggtgctccgagctcgctcaaccagcggcaatggcggccggcaacagggaaagggatgtcgaggaggagacgaggaaccagatgatgcaaattcttttcggcaaccattcgaaggaggaggaggaggacaacaacaaggccgtcgatttcgtcgacgaggacgaccacccgcatccgcatcagcagcagcagcagcttcgccaccaggtggtggatgacgacgacgacgacgacgcccacgcccgctccggctaccactcggaagaagtggaaggtgaggctgataatggaggggaaggtgaagcggaaggagaaggtgaaagtgaggggcaagttgggatggaagaagaaagtgaagctgaagctcatcgtgctgatctttgatcaagagaaagtgatggggaaaag

SEQ ID NO: 24573 - DNA, 432 bp, Oryza sativa
  Clone ID: uC-osflm202099d04b1
gtttgctgttcgtctgaggccatattacattatcgcgatggttgagattgacaatggccatggtaacacattcagtgctttccttcaaatattggacaatggaagggttactgactcgcaaggcacgaaagtgagcttcaccaacagtatcattatcatgacatccaatgtttgatcacagctcatactaaacatggatgaataaggtgggtcaactgattcagcctatgagaatataaacaagagggtgatggatgctgcaagatctgtcttccggccagagttcatgaatcggattgatgagtacattgtcttcaagccacttgagagggaacagatcaacagcattgtcgaattacagcttgcaagagtacaactaagaattgccgatcgcaagatcaaactacaagtcgtcactggagcaatcaaatt

SEQ ID NO: 24574 - DNA, 511 bp, Oryza sativa
  Clone ID: uC-osflm202099d10b1
tcgtcttcttcgattcgcttcgtttcgttctcggtgttgatttgttcgagagagggggattctagcaatggctcctctcggtgacggaacggcggcggctgcggcggcagaccccaacctggtggtgtcgttcggggagatgctgatcgacttcgtccccgacgtcgccggtgtctcgctggccgagtccggcggtttcgtcaaggctcccggcggcgcccccgccaacgtcgcctgcgccatctccaaactcggtggctcctccgccttcgtcggcaagtttggtgatgatgagttcgggcacatgctggtggacatcctgaagaagaacagggtgaacgcggaggggtgcctgttcgacgagcactcgcgcacggcgctggcgttcgtgaccttgaaaagcaacggcgagcgcgagttcatgttctaccggaactagagcgccgacatgctcctgaccgatgcagagctcaacctggacctgatccggcgcgccaagatctttcactac

SEQ ID NO: 24575 - DNA, 484 bp, Oryza sativa
  Clone ID: uC-osflm202099e02b1
ggttaggtcatttcaggctacttaagaggcttgggtgtggtgacattgccagtgtttatttgtcggagcttagtggaacaaagtgctacttcgctatgaagattatggacacggcgtctctagcgagccgcaaaaagctactgagagcccagactgaaagggagatattgcagtgcctggaccatacttttttgccaacattgtacactcattttgagactgataagttctcatgcctagtaatggagttttgccctggaggagacctgcacaccctaaggcaaaagcaaccggggaagttttttccggaacaagctgccaagttttatgtggctgaggagcttcttgctctagaatacctgcatatgcttggcatcatatatcgggaccttaagccagaaaatgttcttgtgagaaaagatggccacatcatgctgtctgattttgatttgtccctaagatgtgctgtgagccctacccttct

SEQ ID NO: 24576 - DNA, 485 bp, Oryza sativa
  unsure (1)..(485): unsure at all n locations
  Clone ID: uC-osflm202099e04b1
gctttccttctgcgcggcgccgcctgccgccgccttctacgcgcccaccgctcgcctactgcgcgcccgccggcgccactccgctcgcgcgcggctgcactcgccgccgcctcctcccgcctgagccgctgcgcccaccgccgccgcctcctgcccaaaccgcctgcttccctgctcgcgccgcgacggagaggaaggagagtttgtgctgctggttctccattcaaggtggcttgggtgtgcgttctgatcgatttggcgttctgatcgatttggtgtgacgtgtttgtttcagcagggaaggactgcaaggagcaccccaacgtcaagcagttcaagtccatgcctgatgctgtgtcactttgctcactgaaaaaaaaagagaacatttataggttttttttgctgcttgtgagaggatgctgccgaatngaattaagacagccttcagaatctggtatatctaatggtctgaaaattttaca

SEQ ID NO: 24577 - DNA, 439 bp, Oryza sativa
  Clone ID: uC-osflm202099e05b1
ggctccttttccccttcgattctggcggtttgccgccggggagggttggaggaggggtccggccacctcccctccactagtattgtatagttagatttgtttttaggtcgtcaggtgtttcctgtagttagggtttgtccttagttggtgtttttgccgacgagtctccatgggtgccgttgtggtcggcggcgacggcagttggtggcggtggaggtgcgagatccaaagacctgtggatgaatcgacggaaggagctggctccttgcggcggcggcggcggctgcatcgtcgtttgcggccgggaggttgccaccccgttcctagcgttgcgtgcggtgacttctcgtggctcgcatcgactggatctgctgtcgcccggagcttgctgctcgtggtgcatgatgatagcccgtcgacgaggtggcggttcgagagc

SEQ ID NO: 24578 - DNA, 540 bp, Oryza sativa
  Clone ID: uC-osflm202099e06b1
gattatacattagaagctcaaaataaggagtttgagaggagggctgttgctacagaaactgcattaaagagggttcgatggaattattctgctgctgtggagcgtctacagaaagatcttgagttactgtcctttcaggttctctctatgtatgaatcaaatgaaactcttgcgaagcaatccattgtagaagattttgagagttcccctgaagaacagtctgcagtagcagatttaggtgctaacaaggaacgtagcctgtacatgtctgatcatgaatcccaagcattttcagcagaaaatggcagaccagataatctcacttacaaaatggatggccagaaaagtcttcttcgggcccttaaaatggaagagatccgtaatagatctgaatttcaagttcgaagtaatactaatctacaggttgactactccaaacttgacaagctagaacaaaccccttcaacaacggaatctgaggttttagaaacatatatggccaacatagagtggcaagtattctctgatgtgctacgtgag

SEQ ID NO: 24579 - DNA, 457 bp, Oryza sativa
  unsure (1)..(457): unsure at all n locations
  Clone ID: uC-osflm202099e07b1
tcgtttatattgcagctagtgtactgcactgggcgatttgctctagctagctcgtcgttagccacccatggctgcttctcctgcttccactgccgccgccgtcgtgaatgcgccggcggccaccggcgggctgctgctgccgcgggggaggagtagttggagttggagttgctgcaacaataacaattcttcgatggggaggaggtggcgggcggcggcggtgggggaggtggcggcggaggggaacacgtacctgatcgcgggggcggtggcggtggcgctggtggggacggcgttcccgatactgttctcgcggaaggacacgtgcccggagtgcgacggcgccgggttcgtgcgcaagggcggcgccacgctgcgcgccaacgccgcccggaaggacctnccccagatcgtcttgcccaactgcaacggcctcngcaagctcggccagatcgac

SEQ ID NO: 24580 - DNA, 520 bp, Oryza sativa
  unsure (1)..(520): unsure at all n locations
  Clone ID: uC-osflm202099e08b1
tcgcattgatcgaaaagagaagaggagcggcggcgagatccaattccaatcgatccttgtgctgctgctgctgctgcgctcgacgatcccatccggatctcgatggcggccatggctcgccatctccctgctattcttcttctctcgtcggcgctgctcctcgcccttgcctccgcctccgcttccgctgctgctccggcgctggccgccttcgtcgatgccgcgtcgcgccgctacctgcgggatcagcaacaccacgaccaggccgcttcaatgtcactagaccaagtttctgcggctgtttctgtcttgcttggttttgcaccaccaccctcgctacctgcacaatcttcttcaaagttagacaagctgttactccctaacccatttgacagaccacgggctgntttcttgctgcaaatcgatggattccatgcctccgttgaaagcatcacatctgaagctggtagcatcttcaaaccactattgatggtctaaagcgatctgctacagggcttac

SEQ ID NO: 24581 - DNA, 109 bp, Oryza sativa
  unsure (1)..(109): unsure at all n locations
  Clone ID: uC-osflm202099e09b1
gtccccgaattcgagctcccgcttcctccgccactttttatccccacccccggatcgaaaccctaggccgcgagccattcctgccccatcnccctcacnaaaccaccat

SEQ ID NO: 24582 - DNA, 408 bp, Oryza sativa
  Clone ID: uC-osflm202099e10b1
tcggatgtgagggcaaaggtcgtcgccgccgccgccgcggccttgggcggcgtttggtctcgtcgccttccggaccacccgcactagcccttctcgctcctggcgcgcgcacgcgccacacggccgacgacgactagcaggattggagggccgacgccgacgcggccggtcttcttacgggtgccgtcgtgtctgcggcggctgtgccgatatccatctcacgagcagagcaggagtagggagcaggagcaggggaggggggcgccgtcgtctggcgtgagtcccgaactctagcacatgatgtgctagagaagagatacatatgctagcgctgaactctgatctgagatggaggaagattctggtagatcaatatcaacgactgtgactattagaagaggctctagc

SEQ ID NO: 24583 - DNA, 362 bp, Oryza sativa
  Clone ID: uC-osflm202099e11b1
ttgtttttgagggtgatggcctactactcgccagcaggcacggtatctaatatcgcggggttcgcccccaccaggggtggctgctggagcacctggctgggttcaatcaacgtggaagagatcactccgcggcatctacgccgacatgcctacaccagctctgcccttcgtcagcggagacatgccgatgtcatcaatcccagcgccggatgtccacttcacgccatcgacagcggaggaagtctataaggacataactcattcaggcgtgaccatcttctccagcagattgaggccccctgctgatgcatgtggttgtgtcccctccagcttagctagggctggctctggtaccggcacaa

SEQ ID NO: 24584 - DNA, 185 bp, Oryza sativa
  unsure (1)..(185): unsure at all n locations
  Clone ID: uC-osflm202099e12b1
tcctgaattccctttcgacccacgcctccgcattttttttaccagaccccatttaccctcctgggggggttttaaattaaaattgcctttgtaaacattttnatttttttccttattctgctgctgtggagcgtctattctttctctcaattcatttttcttatcttatccaaccttctcattta

SEQ ID NO: 24585 - DNA, 343 bp, Oryza sativa
  Clone ID: uC-osflm202099f02b1
cggaccggaactgaatgttcggctcagacccacccgttttattttacgttcattaacactgttaaggatggctatgatgagacacatgcacagcgttgagaccaggcattatttcttgagcttttatgctaaatgctaaagatcaggagctcattagaacattgtgctgtttctatatcacgggagctagatgttgatgatcacacgactagatctgcactgctgtatatcatattaggaagtgaagaagcatacatctcaggcagcataatataaagcgagtcgcatatccagactgacaacctatatgttgtggattatagatgcaacattgactttcaat

SEQ ID NO: 24586 - DNA, 384 bp, Oryza sativa
  unsure (1)..(384): unsure at all n locations
  Clone ID: uC-osflm202099f03b1
gcttctactgtgttcgaggggaagctccccgggtggaacaagtccgtgccggacttcaaggcctgcctcgacaactgcagcgtgacggtgtcgagcgccatgaaggagatccacggcgccgccgccgcgctcaaggccggcgacgacgaggacgacaagacgctcgtgcttctcgccatcaacgacgtcaccatgtgaacgtacagctgcagggagctcaaccgcgacatggcggtcatcctggagcacagcctcgtccagttccagaagatgatgaggatcgccgtcaacttcatcagcaagatgaagaagtcaccgcttcctcctcctacttgntctactacttctgctccttctactcctcatcggctgcactgaatatgc

SEQ ID NO: 24587 - DNA, 606 bp, Oryza sativa
  unsure (1)..(606): unsure at all n locations
  Clone ID: uC-osflm202099f04b1
gttttagcttgacgggaaaggcgacgacgggaccggagaagagagaggctggtgcggcgagaggagaggagcgacgaagagggagaggaagacatgagggaggagagggaggcgacggagagcgagaggagcttgaggtcgaggccgcgccaccgaggtcgatccggagccggcgggggaggcgacggagagggagaggacctcccgagattagcagctcggtgccaccaccgttccgccgccacgccaccgtcgtccacggcttccgcccctcgcggacctcgcacgtcgcccgctgccgtgccaccgactccgctgaactcgccgacctcacccgtccctcgctcccactccgctgaccccgccgctgcttcgggggaggagagaggggtggatctggcgagcaccgacgccttccttcgcctgctgactcagtctgctagtggggaatggattagaggagagagagagagggggggagttagaagtaaaaaagatagtactagtgcacccatctattatctatctatctatgctctatcttctatctatctatctaatatatactaaaagtccattaaacatnctacaaacgttctcaagccg

SEQ ID NO: 24588 - DNA, 530 bp, Oryza sativa
  unsure (1)..(530): unsure at all n locations
  Clone ID: uC-osflm202099f05b1
agatattcatggatataaagtgtagatatagtggattaatgcctcagtgtgctattattgtggccacaattagagctcttaaaatgcatggtgggggccctgatgttgtggctgggaagcctttggatcatgcatatgtgagtgaaaatgtggctcttgttgaagctggatgcgtcaatcttgctaaacatatcgcaaacacaaagagttatggagttaatgttgtagttgcaatcaacaagtttgcatcagatactgaagcagaaatggacgtggtgcgaaatgcgtctttggctgctggtgcttttgatgctgttgtctgcactcaccatgcgcatggtggtaaaggagcggttgatcttggactcgcggttcaacgggcatgtgagagccaggcagaccctctgaaatttttgtatcctttagaatctggcataaaggagaagattgagtcaatagctaagttctatggtgctagcggcgttgaatactctgaacaggcngagaagcagattgaatgtataccaagc

SEQ ID NO: 24589 - DNA, 535 bp, Oryza sativa
  unsure (1)..(535): unsure at all n locations
  Clone ID: uC-osflm202099f06b1
catttcttttagcttctcagccttttgcctctctttctagtctctttcttggccgtctctgttatatccctcaatttaaccatcgagggcggccaaaaaaaagagagaaaggaagagcaaaataacacattacaccatggcgcgattcgtcatcatctccgtcgtcgtcgtcgccgccttcgccgctgccgctgtcgttgaggcccgggttggacctatcgacgtcgctccgaccaacctgatcaccaacccactcggtgccatcatcgacaatggccgcaagatcaccggcgccgtcgtcgacgagtgcgcctggacctgcgatcatgtcgcggcgggtaacaagaagatgtgcaacacgctgaggaagctgccgggggtgagctcgccgaaggagctcctgacggcggcggtgaagctgtcgatgaggaaggcgaangcggcgagggcgaggttcgaggcggcggcgagggcggcggaaaaggggacgccgatggagtccatcctggacaccttgcaggagggtacgacagca

SEQ ID NO: 24590 - DNA, 408 bp, Oryza sativa
  Clone ID: uC-osflm202099f08b1
ttggccggactctccccttctctctgtctcgctgcttcgttcgctcgctttatcccccccgaataaaggcgagaagccggagcggcggacgaagaagagggcagatagaaatggcggcggagacgttcctcttcacctccgagtccgtgaacgagggtcacccggacaagctgtgcgaccaggtgtcggacgcggtgctcgacgcgtgcctcgcccaggaccccgacagcaaggtggcgtgcgagacgtgcaccaagaccaacatggtgatggtgttcggcgagatcaccaccaaggccaccgtcgactacgagaagatcgtccgcgacacctgccgaggcatcggcttcgtgtccgacgacgtcggcctcgacgccgaccgctgcaaggtgctcgtcaacatcgagc

SEQ ID NO: 24591 - DNA, 401 bp, Oryza sativa
  Clone ID: uC-osflm202099f09b1
tttgggtggtggtgcttctggtcttgggggaggggaggggcgcgagcgagcgagcgaacgagcgagagagagagagagagagagaggaaggggagggagagggaggtgtgtgtgtgagagagagagagagatggcggtggagaagacggtgccgggcggggtgaggacggtgctggtgacgggcggtgcggggtacattggcagacacgccgtgctgcagctgctgctagtcggattccgcgccgtcgttttcgacaatctcaacaactcctccgagctcgtcgtccgttgcgttgcctgcctagccggtgaccacttcctgaacctcgtctttcacaaggttgaccttcgtgacaagggagcactggaaaaggtttttgctttaacaagattcgatgctg

SEQ ID NO: 24592 - DNA, 453 bp, Oryza sativa
  unsure (1)..(453): unsure at all n locations
  Clone ID: uC-osflm202099f10b1
ttgaaaaccaaaaccatttcccccatttcctcccctcgcctaccctaccatggacttctccggcggcagcggcggcggcggcgtcgcgtcggggagggtgcaggcggagcggtggctggagatcgccgggaagctcctcgcggcgcgggacctcgtcgggtgcaagcggttcgcggagcgcgcggtggaggcggacccgctcctccccggcgccgacgagctcctcgccgtcaccgacgtcctcctcgcctcccagtcggtcctcccctcgggccaggccgacccgctcgccgtcctccagctccccccgtccaccaacccggccgaccacgccgccgtctcccgcgcctaccgccgcctcgccctcctcctcaggcaggacaccaacccgcacccgggcgccgacgtcgccctcagcctcgtccacgacgcctatgccatcctctncgatcc

SEQ ID NO: 24593 - DNA, 346 bp, Oryza sativa
  unsure (1)..(346): unsure at all n locations
  Clone ID: uC-osflm202099g01b1
gtcttcgactccggtggccgcatcaccatgcgccggaccgtcaagagcgcgccccagagcatctggtatggacctgaccgtcccaagtacctgggcccgttctcggagcagacgccatcgtacctgaccggagagttcccgggagactacnggtgggacacggcggngctatcggccgacccggagacgttcgcgaggaacagggagctggaggtgatccacttcccgggggccaatgctgggggcgctgggctgcgttttcccggagatcctgtccaagaacggggtgaagttcgggagggcggtgtggttcaaggccgaggcgcacatcttttctcaggggggg

SEQ ID NO: 24594 - DNA, 149 bp, Oryza sativa
  Clone ID: uC-osflm202099g02b1
ctttttgtttgaccggggcctactcgccgtcgcccgcggggagccaaatctgtgctcgctcggcgctgtggagatgtaccgctcttcaccgacgccggtctccccgagatcgccgccgggtgcacctcgctggagcgcctgcacatcac

SEQ ID NO: 24595 - DNA, 477 bp, Oryza sativa
  Clone ID: uC-osflm202099g05b1
gctttccgtcgccggccacaaccattcctcacgaggggaggatgacgaaaaaaaaaaaaaaatcccactccgtgttggtaaaatccgactaccacttcggcctgtctcaatccaagaattcaagaatcgaactcctttggggtcgcctcgctgaatcttccttatatatacgcgctctcccattcgcgtgtgctccaaatcgtagtggggggaagtggagttgacgagctgtggaaaaaaagcctatcgcaatggagtccatcgccgccgccacgttcacgccctcgcgcctcgccgcccgccccgccactccggcggcggcggcggccccggttagagcgagggcggcggtagcggcaggagggaggaggaggacgagtaggcgcggcggcgtgaggtgctccgcggggaagccagaggcatgcgcggtgatcaacgggagcgcggcggcgcgggcggcggaggaggacaggaggc

SEQ ID NO: 24596 - DNA, 531 bp, Oryza sativa
  unsure (1)..(531): unsure at all n locations
  Clone ID: uC-osflm202099g06b1
atctcatgtagcaaaagcagtttcagtttcggctccattggttattaatttacctctacagaagaatgggcacagagatggccaccgtggaggtggagggcatcccatttcctcaggagatcaccgtcagtaagccgttatcactgctagcccatggcattacagacattgagattcatttccttcagatcaaatacaacgccatcggggtgtatcttgaaaaggacaatgtactatggcatttggagagttggaagggcaagaaggcagaggagcttgtgcaggatgatggcttctttcaggccctagtttctgctcctgtggagaaactattcaggatcgtggtgatcaaggagatcaaaggatcacagtacggcgtgcagctggagagctcagtgcgcgaccgtctcgtgtcagtggacaagtacgaggatgaggaggaagagtctctggagaaggtgactgaattctttcagtccaagtatttcaagcccaactccgtcctcaccttccactttnctaacacccctg

SEQ ID NO: 24597 - DNA, 398 bp, Oryza sativa
  Clone ID: uC-osflm202099g08b1
gtgcggcgtcggcgtcggcgaccaccatttcctcgccaggaagctcgtcgggggcggcggcccctccgcggcgaagctcgcgctcgtgtccttcctcgctgtcatcctcgtcctcgccgtcgacctgtccctcaccggcgccggggcgaaccggcggctgcggctccaatacctgcattacatcggcgacggcggcgggggtggcggtggtggcggggttggtggcggtggcgaagaggccaagaacaacgagcttccttggctctcagtgccggacccgtccaacttcacggaggagctcatcgaccggtggctgacgcccggggggactccgtgccgcgactcccgtacggcgaacatctccatccctgttcttgacgaccccgcggcggcgggcg

SEQ ID NO: 24598 - DNA, 464 bp, Oryza sativa
  Clone ID: uC-osflm202099g10b1
tttatttctccccacgggcggcgactagggcggggagggttcgtctggcgccgccgtgccggagatcgcctctcgccgccgacacccggatctccgccgccgccgggcgccccaggttatcccgctcccgcagtcaccatcccgtcttctgcgccaggcggctaacgcccgggctggacgccccggaatccattgtcggtctcgccccgccgactgccgttgacgccactggctgaaggtgtgaatatgtcggacagtgcgttgaaagatctgaatctagctcaggcagcagagctggagaaaacacaaggacagttctgacaagtcttgcataccaagcctgtcttgaatggcaacatatgcaacaatacggaagacaatgctgcacctgtactccctgatgctgtgactaatgggtgtgaagctggaaatgcacatggtgagtttattgattttgagagtct

SEQ ID NO: 24599 - DNA, 377 bp, Oryza sativa
  unsure (1)..(377): unsure at all n locations
  Clone ID: uC-osflm202099g12b1
tgtgttatgagggaggtgaggacaaangacgagcaggggctgtttgaggagagggtggtggatagcccgctggggagcgcacgggggagcccggaggcggagatcgggatgagggtggaggacatctgggacagcctggaccagccgcagctgagcgaccgggaccggctcaacagctgcttcgacgccatccaggaggcgtcgataccacacactttcgacggcgcgcatgtggtcgagatcccctccgacgccacgcttgtcgaggccggcgacattctgtcgcgccaccggatcatcaccgcccccgtgctgaactgtcacgcctccgacgacgctcgctggatcgaccggtacatcggggttgtttagttcac

SEQ ID NO: 24600 - DNA, 324 bp, Oryza sativa
  Clone ID: uC-osflm202099h01b1
gcgtgaactgccgcgtttctgccaatggcatgaggggtctgtgcgtctcggcgccccgcgccgacccgctgaactgggggaaggccacggaggagatgacggggagccacctcgacgaggtgaagaggatggtggcggagtaccgccagcctctggtcaagatcgagggcgctagcctgaggatcgcgcaggtcgccgcggtggccgcggccggcgaggccagggtggagctcgacgagtcggcccgcgagcgcgtcaaggccagcagcgactgggtgatgaacagcatgatgaacggcacggacagctacggtgtcaccaccg

SEQ ID NO: 24601 - DNA, 441 bp, Oryza sativa
  Clone ID: uC-osflm202099h02b1
cgttgcctttatatcacatgcttatgatacatgcggaatgggttagatgacaaaacatttggggtttcacaaggcactctgtgttatgatgggatggaattggcatgttgctcctgacactaccaaaacctatcattccatgccagatgaggaagtaaatgccatgaaggatgatctcatgttgtggccaccagttgtcataatacataacagctccattgcaaccaaggcaaaggctaccgatgcaaagattgtgtcgaaagaagaaattgaaggtgtgctgacagaaattggggttgcatgtgacaaggcaaagattatccatggcagaccagccaatcagagcgtgttcctagtgaagtttcttccaatgatatctggatttcaggaggcgatgagaatccacgagcatttcaccgtcaaaagccacgggaaggaaga

SEQ ID NO: 24602 - DNA, 452 bp, Oryza sativa
  Clone ID: uC-osflm202099h04b1
cccttccaaaaaaaccaaccccctccgcgatccccgtttggaaataactcccgccgcggtgcggcgacgccgccgacgaggaggggtcaccgatgttgtccgaccaggagctggcccggtacgtggagtcgttcgtgcgccaggcggcggccgtcccgggcgccgtggcggcggcggggggcatatcggcggagtccgtggcgcgccagctcggcccccagctcggcctcgacctcacccccaaggcccccctcatccgcgacatcctcctcgccctcttctcccccccgccgcagggggcccccttcacctgcttcgctccctccccctccgactccgactccgcctccgcctccgccgccggtgctggccacttcttctcccagcagcagcagcagcagcagctgcagacgttcctgacggcgtcgcagcagtaccagcaccgcggcggc

SEQ ID NO: 24603 - DNA, 439 bp, Oryza sativa
  Clone ID: uC-osflm202099h05b1
gtcttgtttctcctcgagaagggcgccaaggtcaggctcggcagacatctgggccgggggaagggtgtcacccccaagtacagcttgaagcctcttgttccacgcttgtctgagctacttggagtcgatgttgtgatggccaatgattgcattggtgaggaagttgagaaattggctgctgctttgccggaaggtggtgttctactcctagagaatgttagattctacaaggaggaagaaaagaatgatcctgagtttgccaagaagcttgcagctgtcgctgacctctatgtaaatgatgcttttggcactgcacacagagctcatgcttcaactgagggagtgaccaaatttttgaagcctgctgttgctggcttcctgatgcagaaggaacttgactatcttgttggagctgttgcaaacccaaagaagccatttg

SEQ ID NO: 24604 - DNA, 470 bp, Oryza sativa
  Clone ID: uC-osflm202099h06b1
cggtcgcgtggggctggcccagatggcaactgttggcctggatcaccaaagagattgtgcgccgaatctaggaactcattggtagagcgcaattcgcagacaccacccccaaagcaaagccaaacagggttaagtattttgaaagcaaaataccatcctctccaggcaacattcgcaagccccactgtcagtaatcctgttagtgggaatgaaaaatgtgctgtagtaggggtccagatcttcttttccaaaatcttgaagttggctgctattagaataagaaacctatgtgaaaggctacgacatgaagagctgactgtgagcgtctataatatctttaagcagattcttgaccaacagacagctttatttttcaacagacacgttgaccaaatcattctgtgctgcctctatggtgttgccaaggtttctcaattatcattgacgttcaaggagatcgtcaacaatta

SEQ ID NO: 24605 - DNA, 455 bp, Oryza sativa
  Clone ID: uC-osflm202099h07b1
tgcgttcagcgaggaggagctcccacgtgaggggtggtttgagtttaaagacgtctacctcctcaacaacttagccgcgcatggcggcgagtatccaacgcgagccgtgtgtggagaaggacgacaccgcgtcgtggaccgcggagaaagacgacgtaccgctcgtcaacaacatcgtcgagcacggcgatcccgagggcagttcgaactcgctcgcccgatcaggaggacatttggccaatgttcacgagggagccggcatgttttatcagcccaacttcaagtacattttctgtgatatggatggcacactgctggatagtagcggtctagttccagaaaccaacgctcaggccattagggtggccaggtcaagaggggtacaaacaatcattgcgacaggaaagtcccgccctgctgttattgaagttcttggcaaggttaatttaactggc

SEQ ID NO: 24606 - DNA, 506 bp, Oryza sativa
  Clone ID: uC-osflm202099h08b1
tttagctatctccaaaacgtgccccatatctaatgtggcgttgcacgcggccggcggcggaagagcagagcatcaggcgcgtgtggatagccggaggacatggccacccacttcacgctcaacaccggagcacgcatcccctcggtgggcctcggcacctacaaggccggcaccggcgtcgtcgccgacgtggtctccgccgccgtcaaggcagggtaccggcacatagactgcgcgccgctgtacaagaacgagcaggagattggtggtgctctgaagaagctcttcgatgatggggttgtcaagcgggaagacctcttcatcacctccaagatatggtgcagcgacctcgcacctgaagatgtcccactcgcaatggatagtacactgaaagatctgcagctggattacgttgatctgtatctgattcattggccgtttcagatcaagaaaggcacggagctcagtccagagaacttcgtcaagcctgacatacccagcacctg

SEQ ID NO: 24607 - DNA, 348 bp, Oryza sativa
  unsure (1)..(348): unsure at all n locations
  Clone ID: uC-osflm202099h09b1
tttgcttactcagcagcaagatgggtgccggcggcaggatgacggagaaggagcgggaggagcagcataagctgctcggccgcgccggcaatggcgcggccgtgcagcggtcgccgacggacaagccgccgttcacgctggggcagatcaagaaggccatcccgcctcactgcttccagcgctcggtgatcaagtccttctcctacgtggtccatgacctcgtgatcgtcgccgcgctgctctacttcgcgctggtcatgatccccgtgctgccgagcgggatggagttcgcggcatggccgctctactggatcgcgcanggctgcgtgctcaccggcgtgtgggtca

SEQ ID NO: 24608 - DNA, 429 bp, Oryza sativa
  Clone ID: uC-osflm202099h11b1
tttcgcttatctccatctggcgaggagagcagggcaggggaggggatcctgatgggtggtggccccaaagtttgggggttcaactgaaaccccatgcccccccatgtcccaagttggatccgccggtgagggatccaattccatggcggctgctcctcctcctcgcctactcctcctcgtcgtcctcctcctcgtgccagtctccaacgccatctactgcgaggaggatgattgctatgatcttctaggagtcaagcaggacgcgaacgtatcggagatcaagaaagcctactacaagctctctctcaaacaccatccggataagaatcctgatccggagtcacggaagctgtttgtcaagattgccaatgcttacgagattctaaaagacgaatcaactagggggcaatatgactatgctattgcaca

SEQ ID NO: 24609 - DNA, 429 bp, Oryza sativa
  Clone ID: uC-osflm202099h12b1
cccacccaccctctcgccgtcgcagatccgatccgggaagagctcgccgccgccggtgccatggcgctctccgtggagaagacctcgtcggggagggagtacaaggtgaaggacctctcccaggcggacttcggccgcctcgagatcgagctcgccgaggtcgagatgccggggctcatggcgtgccgcgccgagttcggcccctcccagccgttcaagggcgcccggatctccgggtccctccacatgaccatccagaccgccgtcctcatcgagaccctcaccgcccttggcgccgaggtccgctggtgctcctgcaacatcttctccacgcaggaccacgccgccgccgccatcgccagggactccgccgccgtgttcgcctggaagggggagaccctcgaggagtactggtggtgcaccgagcgc

SEQ ID NO: 24610 - DNA, 516 bp, Oryza sativa
  unsure (1)..(516): unsure at all n locations
  Clone ID: uC-osflm202100a01b1
attttcatctccgccgccgccgccgccgcctccggcgaggccccaccgacacagatccccccgcgatggcgttccgccgcctcctctccgccgcagtgcgccgtcgctccgccgccgcggcggcggcggcggggcccgggaatgcgcgcgaggcatccaccgcggtcgccgccgcggggcccggcgtcatcgcccccgacgcggccccggtccgccccccgatgatggtgtacgaccgcatcgccgaggccgtcaacgccaggctccgtcggctcgagcacccggacccccgcttcctccgctacgcgagcccagtccccgcccacgccgaccacaccgtcatcctcgccgcgccggagacccgcgtcacgacgctccccaacgggctccgcgtcgccacggagtcctcgctcgcctcgcgcaccgccaccgtcggcgtgtggatcgacgccgggagcaggtacgagacggaggactcggtcggngtcgcgcatttcgtcgagcacatgctgttca

SEQ ID NO: 24611 - DNA, 508 bp, Oryza sativa
  Clone ID: uC-osflm202100a03b1
atttctttttgtcatctgcatcaattgttctcttgtgtcgtttgctagtatcctaagtcattggctagtatatcaatgtcatctacaaatcaatttcctatgtttcctatcaagtccatcaaagtccatcggttcgtcgaagtcatgcttgtcaatcattatcactatctcgctcgctccatgtcgaagttagccttctatcatcaccagaagctccacgtcggagctgatctttgtcatatcaccagctccccatcggagttgacatcatcatcaatcattgaagggccgaagaacagtttgtgaaggtccttcatctcgtcatcatcaccgtctctgaatcagtgaagagccaaagaacagtttgtgaaggcttttggtactaagggctgaagaacagtttgtgaaggctcgaggtctacttcattgaggataggatgggttttctcttttttaattcattcaagagcaatgcttcgacacatcttaaacatggactttgatttat

SEQ ID NO: 24612 - DNA, 309 bp, Oryza sativa
  Clone ID: uC-osflm202100a04b1
gctctatttctcgaggatcacatggtgccaacagggacagtttcactaaacagggctgaggcgttcataaacgccgattttatgaacagtgtggacagtatggcataagtaccaacccgtgtgaattttgagcctcgaactgagcggaaagaaaatttccgtaccactgccggaaatgttgctagaacaaatggtattcatgaccacaataattaccagcaacctcagcaccttatgcgaaatggtctagcaccatctgtatcagaggcattaagtggctcgactgggagagagggaggctgttttccc

SEQ ID NO: 24613 - DNA, 347 bp, Oryza sativa
  unsure (1)..(347): unsure at all n locations
  Clone ID: uC-osflm202100a05b1
atttcttctcctcccatctcccaatcccccaccggggcgcgcaatgcagcacaaaccctaggcctccctccccttgatctcgcgcgagcatggggaactgctgccgctcgccggccgccgcggcgcgggaggacgtcaagtcgtctcacttccccgcatcggccgggaagaagaagccccaccaagcgcggaacggcggcgtggggggaggcggcggcgggggcggcggcggcggaggaggaggaggagcggngcanaagcggctccccgtgctcggggaggaagggtgcgagctgattcgaaggatcgacgacaagtacgcgctggaccgggagctcgggcggggg

SEQ ID NO: 24614 - DNA, 324 bp, Oryza sativa
  Clone ID: uC-osflm202100a06b1
gatttagattactttgattaaggctatgcaggagggtgtggttaataacaagtgggggagtggctaatggggcacgaagctaattgtccagaagaggagagcgtcactcaatgactttgacaggttcaaggttatgttggccaagatcaacaggggaggtgctatcaggcaagagcttgcgaagctcaagaagactgccgcggcttaatagtgccatgttgagtttttggttccaagttggatcagcaatatgtttcaatggtcttagagccagaattagtactactgtttaatggaacctatttcatatttaaattgagcatg

SEQ ID NO: 24615 - DNA, 460 bp, Oryza sativa
  Clone ID: uC-osflm202100a08b1
tcgggtgtctcttcagcaattggatcccttgacgtttgcagataattcattagttaaggaattctcaagaaaagtgagaacttattcaagaaaatctgagaacgattcaagctgtgaatcttcctgatggtatggatgagcaattgtattcttttcattctcttttcaggcgtgttgatatggtcatgctgatcttttggcaggttggctggaacctgcttaattttgcatctcttgatgaatgatactaaatcacaatgcgacatctctttcttttctgcaggatatgctatgataatctcactgagagggtagattctagacatggaggaacacttagataaagagatgcgtggttcatagttcatacttgaccacagaatcggagcacccgggtgaatgttgtacataaaatctgccccggttgccgtgcaacttttgtatctaaactaaagaaaat

SEQ ID NO: 24616 - DNA, 372 bp, Oryza sativa
  Clone ID: uC-osflm202100a09b1
tcggtttcgcgccaccgtgaagtggatcctcgagacgcgagggtgcttcggattctgccaccgcacggcgtacctggccatcgcctacttcgaccgtttctgcctccggcgatgcatcgacaggtcggtgatgccgtgggcggcgcggctgctggcggtggcgtgcgtgtcgctggcggcgaagatggaggagtaccgggcgccggcgctgtcggagttccgcgccggcgtcggcgacgacggctacgagttcagctgcgtctgcatccgccgcatggagctgctcgtgctctccacgctcgactggcgcatggccgccgtcacgccgttcgactacctcccctgcctctcctccaggctccggcgacacgt

SEQ ID NO: 24617 - DNA, 366 bp, Oryza sativa
  Clone ID: uC-osflm202100a10b1
ttggagacacgcaaaagcaaagcaaaccactgggcgagcgaccaactgctcgccggcgggggcgaggaggaggaggagggagcgagcttgacgccggcgccatggcgggcgggggaggtagggagcggcgcggcggggggaggctgctcgtcggggtgctgctcctgacgctggtggtgtccgggcactgcctggagagcacgcaccaccgcgggctgaagcggcggcggcggaagcacgagatccactcgccgatcaagactgtggtggtggtggtgatggagaatcggagcttccaccacatcctcgggtggctcagccgcaccctgcccgacatcgacgggcgtaacggcacgcaatccaacc

SEQ ID NO: 24618 - DNA, 392 bp, Oryza sativa
  Clone ID: uC-osflm202100a11b1
gtccggaatccccgtttccgggtcggcctacgcattttgattatggaggttgggctctgataattgggtgcgtgtggtattctaatgggtgtggggcatctgaagtatggaagcaaactgaagtatgacagtgaagttaaaaagaagctttcaaaggatttgatgagaaaattggggcccaaccttggtactattagagctcctggattaggcttggtctacagtgagatagtgaaaggagttccggcaatttttgggcattttctgattgcccttcctgcaatccactcgataatcggttttgtatgcatcatgaatgtaccagtgcccgtggttccccagactgaaaggtttcttttccaacgtgtgttgacaagggggtatcacatgtt

SEQ ID NO: 24619 - DNA, 512 bp, Oryza sativa
  unsure (1)..(512): unsure at all n locations
  Clone ID: uC-osflm202100b02b1
cggttgttctccgccgcagtctccattgaagcggcgggtgtatattccgcgcctcagagtgaaaatacatcaggaatcagaagtaagtgaactcaaatgccaaggcagtgaagaaccaatggatgcttcaagggcaactacggaacaattaatggagagtggagaggatgcaaaaactaccgaaggtgcaaaatggatggcaaagaagaggaaaagggctgttgaaagcatagcagcattttgctatgaagctgggattccttttaatattctttgcatagagagtttccagttaatgttagaagaaattgggaaatttggacctggctttcaggggccctctatggatgagcttcgagagaatttattgcaggagcatgtttcagctataactgataaagttcgatggctgaaggattcattggagtttgggggatgttctattattcttgacacttggctngatgaaaatggaaggcgccttatgatgctgggagcccactctattattg

SEQ ID NO: 24620 - DNA, 282 bp, Oryza sativa
  Clone ID: uC-osflm202100b04b1
cgttgtaatgggcagagggagggagagagcggcgggggcgactccgaaaacattcttcaggcagggcgagaaggtcgtcggccatgtcaacgaccttctcggacttcgatccgatcactgagcgccgccatgtcgagaggcagaggcaagagcgcaggcgcgtcatggttgcagccggcgccgcgtcggtcattcttatcatcatcgtcatgggcggcgcgggcgtcgcctacaacgcgagcttcggtgatgggggctcttcttcctcctccgtttcagcgt

SEQ ID NO: 24621 - DNA, 239 bp, Oryza sativa
  Clone ID: uC-osflm202100b05b1
gcttctcttgttaccagaccgcccgcagcaagcagcgcatcttcgaccgcggcatcgagttcgaccaggtcgaccgcgagcgaggctgggatgaccagatcctgtttaatgggttggtgttctacgcggggtacctggcgatgccgagcgtgaggcggatgccggtgtggaggacggacggcgccttggtgacggcgctggtgcacacgggccccgtcgagttctctactactggttca

SEQ ID NO: 24622 - DNA, 485 bp, Oryza sativa
  Clone ID: uC-osflm202100b06b1
agttatttttcatacaaccagctcactggaagctttccctcctgggctacccagaacaacttgcaattgaatttggtggcaaacaactttgatcttggcagcaccaacaacggtcaattatgtccacagtattctacctccagggctaaactgcctccagaaagacactccatgtttacgaggttctccagaatattattcctttgcggtagactgtggtagtaacagatctatcagaggctcagataatactatgtatgaattggatttcacagaccttggcagctcatcatattacgttaccagtgaaacaagatggggtgttagcaatgtaggaaaatatttccagtctccaaatgacagtaagatcatatatagcaatgagaagattcagaatgcagtggtttcagaactactccaaacttgcaggatgtcaccatcgtctctgagatactttggccttggacttgagaatggaattacac

SEQ ID NO: 24623 - DNA, 443 bp, Oryza sativa
  Clone ID: uC-osflm202100b07b1
cgttacgtacttgcatttccacaagacggatccggagcagacgtactacctctccatggagtacctgcagggccgcgcgctcaccaacgccgtcggcaacctcggcatcaccggcgcctacgcggaggccgtgaagaagttcgggtacgagctcgaggccctcgtcgggcaggaaaaagatgcagctctgggaaatggtggcttgggtaggctcgcatcttgctttttggattcgatggcaacactaaatttgcctgcttggggatatggtctgcggtaccgatatggtctattcaaacaatgcatcaccaaggaaggccaggaagaaattgctgaagattggcttgagaagttcagcccatgggaaattgtcaggcatgacattgtatacccaatcagattttttggccacgttgagattttgccagatggatctcgtaaat

SEQ ID NO: 24624 - DNA, 470 bp, Oryza sativa
  Clone ID: uC-osflm202100b08b1
tcggctacgacaacgttggcgttgggaaccgagtggagactagctagtgaagaccagaggcagacatggcgagatcactggcgcacgcgacgctgctcctcgtcgttgccgtcgtggcggcggcggcctgctggaccacggcggccggcgagaacgaggaggtggcggagatatgcaagaagacgtcgtacccggaggtgtgcattgccacagcggggaagcaggcgtccaagtacggcgccgccgtggacccgctggcggtgctcaacatgcaggtggacgcgttcgcgctgcgcacggaggcggcgcggaagcacctgacggaggcggtgaagacggcgacgccgaaggcggcgaaggcgctggacctgtgcgacagcctgtacctggacgtcgaggacaaccttcgcgcggcgcgggcgcgccatcggttcaaggacgccgtcaccatccgcgccatgatgggcatg

SEQ ID NO: 24625 - DNA, 438 bp, Oryza sativa
  Clone ID: uC-osflm202100b09b1
atttctctctctctcctcctcctcgccgccgaccggcgccgtcgacgcgagtcgccttcgccgtccgggtagcagcaggaagagggaggaagggggggcatggcgctacggaggctgctccaggggagcgtcctgccgcggatggcgggcagagccgccgcggcgccgttctcgacggcgtccggggagaccgtccgcgccacgctcttcccaggcgacggcatcgggccggagatcgccgagtcggtcaagcaggtattcaatgttgcaggggtaccaatagaatgggaagaacactatgttggtacagaagttgatcccagaacagagagttttctgacttgggaaagcttggagtcggtgcggagaaacaaagttggcttgaaagggcctatggctacgcctattggaaaaggccaccgttcattgaatcttaca

SEQ ID NO: 24626 - DNA, 456 bp, Oryza sativa
  Clone ID: uC-osflm202100b10b1
tcggaaaaggcctgtgtcaaggagagggtagtggcaccttgctctcctttgccttcagagaaaccggaagcaatggcgtctgctactctcctcaagtcatctttccttcccaagaagtctgaatggggtgccacccgccaggctgccgcccccaagccggtgactgtctccatggttgtccgcgctggtgcctacgacgatgagcttgtcaagaccgcgaaaaccattgcatcaccaggaaggggtatccttgccatggatgagtcgaacgcgacctgcggtaagaggcttgcgtcaattggccttgagaacaccgaggccaaccgccaggcttaccggaccctccttgtcaccgcaccgggcttgggacagtacatctccggtgctatcctcttcgaggagactctgtaccagtcaactgtagatggcaagaagattgtcgacatcctcactgag

SEQ ID NO: 24627 - DNA, 298 bp, Oryza sativa
  Clone ID: uC-osflm202100b11b1
tcgatctcctcctcttcacaagcaagcgcgagaggagacacctccatcgatccatggccgccaccgcgaccgccgttgcggcgtctctgtccgtggccggggggctcgggaggccgctggctcgcgtctcgtcgccggcggcgccgatgaaagccgcctccccggcggcggcacggcgggccgtcgtcgtccgggcgtcgtcgtcgggggagccggtgaggagggagaaggcctcagctgctgccgcggcggcggggatagccgcggtggcggcctgtgcggcagcgctggcggtgcc

SEQ ID NO: 24628 - DNA, 421 bp, Oryza sativa
  Clone ID: uC-osflm202100b12b1
tttatatcaagtaagccaagttatcttatactagcagggacccatattttcatgggttggttccaaaatgtcttctcctggcatatgcgtgggtcatgatcattattttgcattggttagtcaagggtgatggcctgttctgtgttagtgatgtttttgcaattgtcaggacttctcagggtgtcatcaaggaagcaatttgcatgtgtttgatgaatagtatgacactaatagacaacatgttgatgtgaaggcagcacatggtctgaagaacctgaacagggaaggtgtcatggccatcatcttcagtaaacttaccaaattattgctgagaggcagcttatttcttattttcagtatactcctactaactttgaatcaagtttatttctgtattgccagatccaaagaaagctgtatc

SEQ ID NO: 24629 - DNA, 410 bp, Oryza sativa
  Clone ID: uC-osflm202100c01b1
atttaactgatgagacccctgagttgatgccccggagcgatgtccttgctaccaagcttggcgctcgtcttacggaggttcgcaagaatgggacctgcgcatggctcaggcctgacgggaagacccaagtgactgttgagtaccgcaatgagagcggtgccagggtccctgtccgtgtccacaccgtcctcatctctacccagcatgatgagacagtcaccaacgatgagattgctgctgacctgaaggagcatgtcatcaagcctgtcattcccgagcagtaccttgatgagaagacaatcttccatcttaacccatctggtcgcttcgtcattggcggacctcatggtgatgctggtctcactggccggaagatcatcattgacacttatggtggctggggagctcac

SEQ ID NO: 24630 - DNA, 466 bp, Oryza sativa
  Clone ID: uC-osflm202100c04b1
aattggtttaaatatcatgtgtcagcaagcactgggcaagcatatttcaaggagaatgtgtgtggcaaactgctattgcaaggaactggccatcagctgtattacggaaacgctgtcctgggccaattcctacaggttctgctagaaggagattccaagcattatacgtcagccagaaccttgtctcatctggtggggatattgatgaacttgctgaccacacttatctgtattcgaaagaacagcttgagcgcccagttgttgctccttccagcatactccatggcaccatcatcgatcagttcattgcttggggtaggacaggagaaaaggcacatgaacttgcttcaacgatatggcttgcagttattgacaacttggaagaaaaccagctaactttctagctgataaaacacctttctcaagaaggagactggttccttacattcccatactgcagatcata

SEQ ID NO: 24631 - DNA, 469 bp, Oryza sativa
  Clone ID: uC-osflm202100c05b1
aattaaattcctattcaaatcgaaacccctctctgtgaggtcgtcttcgaggaattaggaggagagagagcaatggccgccgaggagggagtcgtgatcgcctgccacaacaaggacgagttcgacgcccagatgaccaaggccaaggaggccggcaaagtggtcataattgacttcactgcttcctggtgtggcccttgccgcttcatcgccccagtgttcgctgaatacgccaaaaagttccctggtgctgtcttcctgaaggttgatgttgatgagctgaaggaagttgctgaaaagtacaatgtcgaggcaatgccgaccttcctattcatcaaggattgtgctgaggcttacaaggtcgttggcgccaggaaggatgacctccagaacaccatcgtgaagcacgtcggtgccactgctgcatctgcttctgcctaagaattctcgcaggcgcaagttatcaaat

SEQ ID NO: 24632 - DNA, 268 bp, Oryza sativa
  Clone ID: uC-osflm202100c06b1
gtttttgtgtttgttctacgataccagcaatgatcgtgagggtggatactatgcaagaggtgcctgcgcgtcagtttgggagaatttcaagaacaacccgttgattgacatcttaaccgatcacccacccacgtactacgaagatatgcagagatctgtgttctgcttgtgcccattgggctgggctccatggagccccagactggtggaagctgtggatttcggttgtattccggtgatcattgcagatgacattgacctccccttt

SEQ ID NO: 24633 - DNA, 433 bp, Oryza sativa
  Clone ID: uC-osflm202100c08b1
tcggtttaccacccacctctctccctcccctcccctcggcaaactcaacccgagccgaggccggaatttcctttttggtgcgacgacgacgaggtgagggtgagccaaccgccggatcgcgccgccatgtcgctcgacgagcttccgcacaagaagctggcatcctcggagggaattcggttcgcgcggtcggattccaggttccggagccttagcccagcgcccatcccaatcccaactgccccaagcttcagatcattggtcgacccggtttctgatgagagagtaaaccatgatactgtgacctcacatgaaagtgaaattgggtctgggtccatctccacagttagctcaacagttagttcagtagaatcagagaaagcagcttatgaattccttgctcaaactcctatcaagtcaaccgatgcacacc

SEQ ID NO: 24634 - DNA, 391 bp, Oryza sativa
  Clone ID: uC-osflm202100c09b1
gttttggtatcgtccaactagttcggcacaagtgggtggggacattatatgccttgaagggcatacaaatgaacattcaagaggcagttcgcaaacaaatagtacaagagctcaaaataaatcaagcaacacagaacgcacatatagtcctttgccaccaatctttctaccataatggtgtaatatatcttgttctagaatacatggaccgtggatctcttgcagatatcattaaacaagtcaaaacaattctggagccatacctggcagtactttgcaaacaggttttggagggtctactgtatcttcatcatgaaaggcatgtgattcacagggatataaagccatctaacttgttagttaaccgtaaaggtgaagtaaagattaccga

SEQ ID NO: 24635 - DNA, 320 bp, Oryza sativa
  Clone ID: uC-osflm202100c10b1
ttgcttttggggactttgcttttaactgcacggcctgcggaagatgaaacaatcgatggcctaactaaccaccagcattattgtgaaggacggcttcatgagacatatgattcactgctggacgataaggacatacaagcaatcataaatgtattggctacaggatgggataggtcattatctgcaaaggcggatggacacgaacaaagcgggaagagattatgttaagaacacctgaatggtagacaatagaaatttataccatgaacagcctgctggtatcacggataaaagtcaatccaataatgcagaggactggc

SEQ ID NO: 24636 - DNA, 346 bp, Oryza sativa
  Clone ID: uC-osflm202100c11b1
tcgcttgtttcgtttcctctcgcgctcgccccggaaagcctcgagatctctgccctcactcgcgcaaacctcctcctcctccgaagcttcgatcccgacacgcctccgccggcgccgcccgccggaggcgagcccgagatgcggcccaacgtcatcacggaggctgggatttcaactaggttgaatcagtggtggggcagcataccattcattacatccggtgttatcttgatatgtggagcgatttatctggtgtgcttgttgactggctatgactcctttgccgagatatgcttcttgccttctgtagtagcatcacgctttcaagtgtacaggttctatacat

SEQ ID NO: 24637 - DNA, 370 bp, Oryza sativa
  Clone ID: uC-osflm202100d01b1
cctactctaccccccctttccccccctcccctgcgcggggttcgatttatccccccggagggctcgccgccctcggacgtcgccgccgcctccgccgcctcgcctcccggagattcgccgccttcgccgccgccgccatgaatcccgagtatgactacctcttcaagcttctgctcatcggagactcgggcgtcgggaagtcttgcctgcttctgaggtttgcggacgattcatatctggagagctatatcagtaccatcggtgttgattttaaaatccgcactgttgagcaagatgggaagacaataaagctgcaaatttgggatactgctggccaagagcgatttaggaccattacaagcagctacta

SEQ ID NO: 24638 - DNA, 422 bp, Oryza sativa
  Clone ID: uC-osflm202100d02b1
attccattaaatttgctcaaataattaaatatgacgggcgtgggttcttccatcggccgtgccaccattttctactgcgttgctctatccataattgccggcgccgcagcgacacaggtgccccccaccgaagcagagtccgtagaagcggcagagcttgcgtcctctgccttcaaggccgacacgttgccctcagcctcccgcaagctgatggccgttagtgacgtgccgctagcgccggtgtgcccggtgcggttcgacaagatgaaggggcccgccatcgagctgggaaagaagtgcaagacgacaggggtgaaggtgtgctgtgaggcgttcaagacattcgcatgcccgcacaacatgctgatcaatgacgtcaacaacggatgcgcggacgaaatgttctacaccatccacaccta

SEQ ID NO: 24639 - DNA, 464 bp, Oryza sativa
  Clone ID: uC-osflm202100d03b1
gtttcatgtgcggcatcggcgccgacgacgagtggggggaggaacttgataacacacgtgagggggttccaagggaggctgccgttccacctggagacggggtatgtggaggtggacaacaccgataccgttgagctcttctactacttcatccagtcggagcgcagccccgccgatgaccccctcatcctctggatcaccggcggccccggctgctccgccctctccggcctcctcttcgagattggccctctcaagtttgacgtagctgggtacacggaagggttccctcaattgttctacttccaagattcctggaccaaggtgagcaacgtgatatttctggacgcgccggtggggacggggttctcctacgcccgtgaggaacaagggtacaacgttaccctcacacagacgggacagcaggtggtggtgtttcttaccaaatggctgggcgatcaccc

SEQ ID NO: 24640 - DNA, 136 bp, Oryza sativa
  Clone ID: uC-osflm202100d04b1
ccatatgttctttattatcttgcatatattctgaataaaagggctctaggtggtctgctttgtctgccacagtgagcaaaatgtatccgaatatcaaactttaatgttgggaatataatacaagtcattttataat

SEQ ID NO: 24641 - DNA, 485 bp, Oryza sativa
  Clone ID: uC-osflm202100d05b1
gtttctagttcaaatcaatcagctctaaatcatagaggggttcttaacaatacaagatatcagcctggggcacaatccgtggatctgaactacgatgccgtgggatctggtcaagcctcagctgagcactatagccagcgtattaaccaaggctactctgttcggggacaagcatttaacaggctggaatcaagacctagttcttccagccatttctcaccgaataatcttgatcagagtggaactgttgatgcacaacctctctcgaaacaatatatggtatgcttacttcacttcgatggtgcatcgaaaggaaatccaggaaaagcgggtgctggggctgtgcttatgactgaagatgggagagtgatatctcgacttcgcgagggtcttggtattgttaccaataatgttgctgaatactcgggcctgatcttaggatagagatatgctattaggcatgggttcaagaaaatcatagtata

SEQ ID NO: 24642 - DNA, 428 bp, Oryza sativa
  Clone ID: uC-osflm202100d06b1
aaaaaaaaaaaaactcacgagaggcgcatcggcgggggggctgccacagggccaccggtcgccgtcgccggcgatctgcagggtcaagcactcaagcccccgcagcctgcttcccgccggaggtcctataaaagttggatgccaatgccaatggagcatctatgagctaagagtgttcagaagggaggccctggtttggatcaatctcctgaacagattctcagctccgctctctaggccaacgatgcccaactctaatgcctgcaattgcacctcctcgcatgaaactttggccttctggaacgatttggagataagagaccacttgcttggattgcaggtggagatttgcttcgacaggagctctagggcagatttcaggaccgaggcagtgatccctctcgctgttgtcaacagactgacaagcc

SEQ ID NO: 24643 - DNA, 325 bp, Oryza sativa
  Clone ID: uC-osflm202100d07b1
tcgatttggcggccaactccatctctatctccgcagggtctccttcaaatcgccgaccaaatcactcccccatcgccgcaaaaaagccacgcgatctccctgcgccggcggcggcaacgacctgcggcatggcgcagacgccgaaccctagccggaggtcgttggtgggggccgtcaccacaccctttcctgactccgcgggcggagcggttccagctggagctgtgctggtaggacgggggctcgcagagctcctcgcgccgcaacgggggcgggttaaccagaggaggcagcagcattggctgccttagccagatgaaagact

SEQ ID NO: 24644 - DNA, 469 bp, Oryza sativa
  Clone ID: uC-osflm202100d11b1
ttgccctcctctcacattttccccaaataatagtggaggatggggaaaaacacatttgcagccacatcatccatggcctctctccgcaccattccggtgatcttcggcatcctcttctatgtccttgccagcactgccactgccaccgacgcaccggactacgtcgtccaaggccgtgtctactgtgacacgtgccgcgccgggttcgagaccaatgtcaccgagtatatcaagggtgccaaggtcaggctggagtgcaagcactttggcaccgacaaggtcgagcgtgcgattgacggtgtgactgatgagaccgggacatacaagattgagctcaaggacagccatgaggaggacatctgcgaggttgtcctcgtccacagcccccttgcaaactgctctgaaatcgaggccgaaagggatcgtgcccgtgttttgctaccaggaatgtcggcatctgtgacaacct

SEQ ID NO: 24645 - DNA, 358 bp, Oryza sativa
  Clone ID: uC-osflm202100d12b1
tcgcgtgtctcgactccactactgtggttgcagatacgactacacttgcagttgcatccagagcccgccccgcgtctctactcgctccgccgcgccgtcgtctctcccgacttcggcgacaagcgagcgacgcaggccaccgcgcgcggttcgttttcgcgagggaggccgccgccgaccagccgccatggtctcgccggacaccatccgcacggccatcggcgtcgtaggcaatggaaccgccctcgtgctcttcctctccccagtgccgacgttcatacggatctggaagaaggggtcggtggagcagtactcggcggtgccgtacgtggcgacgctgctcaactgcatgatgtgg

SEQ ID NO: 24646 - DNA, 427 bp, Oryza sativa
  Clone ID: uC-osflm202100e01b1
ggtcacttcccctgccaagcaaggtgctgacagggaggggtggttcgcatccaagcagtccctgagctacctggatggcacgcttccgggagacttcgggttcgacccgctggggctatcggacccggaggggaccggtgggttcatcgagccacggtggctggcctacggcgaggtgttcaacggccggacggcgatgatgggcgtcgtcggcatggtcgccccggagctcctcggcaagctgggcctcgtccccgccgagacggcgatcccgtggttccagaccggcgtgatcccccccgcgggcacctacacctactgggccgacccttacacttcttcgtcttcgagctcgccctcgtcggcttcgccgagcaccgccgcttccaggactggtacacgccgggctccatggggaagcagtact

SEQ ID NO: 24647 - DNA, 493 bp, Oryza sativa
  Clone ID: uC-osflm202100e02b1
cataaaattcccaaaaacaaaaaataataaaaaagagagggagagagacatttcgcatctgctgccctgcctcctctcccatcacctgcccattttttcacattgaggcccctctgaaaatattatatttacaactaggtccctggccgggccggccggccaccggaaggagcacctcgccggagaaggctttgtctcttctttttcttctcctcctcctcctccatcggcggcggcatggggttctcgctgtaccccatgaagacgtcgacgcgcatgctgtggagcaccagcttcttccgccataaggtcgcctcctccttctaagcccacgccctctcgggcggcggcggccagccggcggcggagcgcgcggttggtaggtgcgcgtgcgtgcgtgaacgggaaagcagcttcgagatcgggttttcttgggttcttggagaaaggaggaaaaaaaggggaggagagcatggatcccggccgcgtcgtg

SEQ ID NO: 24648 - DNA, 372 bp, Oryza sativa
  Clone ID: uC-osflm202100e03b1
tttagaaaccctaggtgctcattccaccgccatcgcctgcggcgaactctccaccgccccctttcctacatcccaccactattttataagccagcccttcatctcatctggagatctggttctactcatccaggaaagccccaatctttatcatagcaaggaggtcatgtcggaatcggccctcgacaaacatatagtggtgaaaattcccgatcatgttctgccagatgctttcataggagaaagtgttggtaaaggtaaagaagatggagcaaccgtagataacatggacccgtcccgcccttttctagttatcaagaagtctgatttggataaggctgatgagtgggttaaaataaaatatgcttggat

SEQ ID NO: 24649 - DNA, 453 bp, Oryza sativa
  unsure (1)..(453): unsure at all n locations
  Clone ID: uC-osflm202100e04b1
cgttgagtaaggcgtcttcgtactcgcctctctgcgcgcctccgcgcttttcctcctcctctcccctctctcccttctccgccgccgtcgcagcatcaacccaatccgccgccatgagggagtgcatctcgatccacatcggccaggccggtatccaggtcgggaacgcgtgctgggagctctactgcctcgagcatggcatccaggctgatggtcagatgcccagtgacaggactgttggtggaggtgatgatgctttcaacaccttcttcagtgagactggtgctgggaagcatgttccccgtgctgtatttgttgatcttgagcctactgtgattgatgaggtgaggactggttgctaccgccagctcttccaccctgagcagctcatcaatggcaaggaggatgcagctaacaactntgcccgtggtcactacaccattggncaggaga

SEQ ID NO: 24650 - DNA, 486 bp, Oryza sativa
  Clone ID: uC-osflm202100e05b1
actgaagttggtcgctgatcggaggaaaacccaaaaaagaaagaaaaaaacgacgaaatggcttcctccccgtatcacgccgccgtcggtgtcgccgtccttgccatcctcctcgccgcgccggctgcggaggccggggcacctaccgccgcgccgttggccaactactccctcgaggacgcgtgcaagaagaccggcccacactacggcctctgcatcgtgacgctctccgccgaccggtccgccaagtcgtcggacacggtggggctcgcagggtggccgtcctggcggcgcagaagaacgcgtcggagacggccacctacctctccagcatctacgacgacgacagcatcgagaagaagacggtgcagctgcagcagtgcctcgaggactgcttcgagaggtacgaggcggcggtggagcagctgacggacgcgacggtggcgctcgacactggggggtacgaggaggcgatggcccttgtgg

SEQ ID NO: 24651 - DNA, 159 bp, Oryza sativa
  Clone ID: uC-osflm202100e07b1
tcgctttcgagaataaattttaaattctgtatggttttatgtccgtcgaaacctaaaactatacttggttgtatcatggtggttggttgggcctggtcatggctcatattttgtgtctaattttcttgcgcttaatctaaatcgaagtgttgcttcgca

SEQ ID NO: 24652 - DNA, 337 bp, Oryza sativa
  unsure (1)..(337): unsure at all n locations
  Clone ID: uC-osflm202100e08b1
ttggtttgttcaaacatgaacccagacnatggactcggaaagcttaaggaccgattcgcgacatggaagaaagactacaagtctcggttgaaggagaccaaggtaaatcttcagaaggttggtgaggagaaatcccggaaaagatggtgggggaagaagagctcaaagtgaatgcattcaatctgaatccaagtgcatttccctacattccctgctactgcatccaagaagagacaatggaagagactgggaggtgaaaaacaaggcttcgaggttctctcctcttcatcgcaagcctgacgagatgatggtgatgatgttgatgaccatgatgagc

SEQ ID NO: 24653 - DNA, 345 bp, Oryza sativa
  Clone ID: uC-osflm202100e09b1
tcgggtgggactacccgctgagtttaagcatagaaagatgtggttgagagtttggaggctatggcgctgaattactcgtcgtgctcgctcaccagctcgttcctgatgaacgaggactgcgctggcatgatgtgtgggtgcgggtgctggtcggaggaggcctcgccgctgtcatccggtggggtgaactccctgtggtgggatgagctggagtttgagctggagctggaagaggaagaggagttcgaccctgtggacctcttgcctaccgaccccttcggcatgaacctggagaccacgttcaccggggcgatcgccagttgcattgaggacctcacagtcatg

SEQ ID NO: 24654 - DNA, 489 bp, Oryza sativa
  unsure (1)..(489): unsure at all n locations
  Clone ID: uC-osflm202100e11b1
ttgctctaactcacacattgccaattcccttggtgggggtgattttggctgctgcaatggtttcgtcgctggccctggtagctctgctcctcgtgagctgcgccgtggtggcggcggaggcgaccaagtacaccgtcggcgacacgttcggctgggcgatgggggcggattacaccacctgggccagcgacaagaaattcaaaatgggcgataccctcgtgttcaactacgccggtggggcgcactccgtggatgaggcgagcgcagcggactacgctgcgtgcaccgatagcaacgcgctccagagcgacagcagcggtacgaccaccgtcaccctcaagaccgtcggcaagcactacttcatctgcggtattgccggccactgcagcaacggcatgaagctcgacgaggacgttgtcgtggcctctccagccccagtcccaaaagccctgtacaccacaccgacgacttcatntacgacaccagcga

SEQ ID NO: 24655 - DNA, 433 bp, Oryza sativa
  Clone ID: uC-osflm202100e12b1
tcgttgtaatcatcatcatgatctcttcagtggctcgggtagctgggagcttcccttggggcagggctggttcatggcccaaaatcatacaggtgcttctccatctattccgattgatgtcggcagttctagaggatcaaatcgacatcatgcttctcgtcgtcatgttgtgggctcattacgtggggttgggagttcacttctaggcccccaaattgatgaagctgaggttcatgctgcatcattaggtgttggatctgaacttactacctcactgcttgctgctggagctgctgaattaccttgcacagtgaagcttagaatatggcggcatgatatcaaggatccatgtgttacattggaacccgaggcatgccggttgacaatttctcatgccgttctctgcagtgaaatgggtgcccatttttcccct

SEQ ID NO: 24656 - DNA, 446 bp, Oryza sativa
  Clone ID: uC-osflm202100f01b1
gttgtctttggtgcgcaacgcggagctgaagagcgtcgaccccgacaccggcaccttcctcggccggaaccagtccggcgagatctgcatccgcggagaacagatcatgaaaggctatctgaatgatcctgaggcgaccaagaacaccatcgacgaggacgggtggctgcacaccggagacatcggcttcgtcgacgacgacgacgagatcttcatcgtggacaggctcaaggagatcatcaagtacaaggggttccaggtgccaccggccgagctggaggcgctgctcatcactcacccggagatcaaggacgccgccgtcgtctcgatgaaggatgatcttgccggtgaagtgccagtcgccttcattgtccggacagaaggctcagaaatcaccgaggatgagatcaagaaattcgttgcaaaagaggtgggtgtctacaaga

SEQ ID NO: 24657 - DNA, 402 bp, Oryza sativa
  Clone ID: uC-osflm202100f03b1
catatgcttcgaagtttagcccatccccgatcgcggcagcatcatgttacaagaattcttgctcatatcgccgtgcaacgtctgaagaggtgttcaatccggacgaacaagatgcagcagagccggcaggacgtggacgagcatgtcgccgagctccgcggcgagctgcgcaaggcgcgcgaggagcgagaccgcgcgtaccgcgtcctggaggtgagcgagtggaaggcgctggcgtcggccaacgaccgcaccaccatagagacgctcgaggcggagctcgacgcgtccagggagtccgagaagcggatgctcgagtccctggcgatgcagacgaagcagctcgagatgaccaagatcgagctcgaggaggccaggctggagaacgcgtcgctgcgtgag

SEQ ID NO: 24658 - DNA, 457 bp, Oryza sativa
  Clone ID: uC-osflm202100f04b1
ccttgattctctacctggctcacagacaagacctgttgaactttcaggcactcctgatcagataagcagagctgagcaattgatcaatgaggtcctggcagaggctgatgctgcttcatctggtaatctctctagccgaaagtacaatgctcctcaaccaggcgctgatcaattccaaatgaaaatagctaacaataaggttggtctggttattggaaagggtggtgagactataaaatccatgcaagccaaatctggtgctcgtatacaggttgtccctttgcatttaccccctggtgatcctgcaaccgaaagaacagtgtatattgatggtacacaagagcaaattgaaactgcaaagcaattggtgattgaggttaccagtgaggtccgcttttatcccttgtcatatttgttgcctgatttcatgattgctatgccaatttgcgacttatct

SEQ ID NO: 24659 - DNA, 522 bp, Oryza sativa
  Clone ID: uC-osflm202100f06b1
gcttcacatttatgttgagactgaaaatgttcgctatgtgtatcagtcaatagaaggcctgtacttgctacttatcactaacaagcagagcaatattcttgaagatctggacaccttgaggctgctctctaagcttgtgcctgaatattctccctctcttgatgaggagggtgtttgtaaaacagcatttgagcttatatttgccttcgatgaggccatctgtcttggaaataaggaaaacgtaacagtccaacaagtcaaacaatattgtgagatggagagccatgaagagaaggcgcacaagctgatgatgcaaagcaaaatcaatgaaacaagggatgtgatgaagaagaaagccagtgagcttgataagatgaagatggaaagaggaaaacttgacaaaggaggatactcggcaatatcaggtcccagggtagttgaaaaagcatttggtgacatgagcattactggtagtggatttggagtggttctggataggtggactgagcatggatatggact

SEQ ID NO: 24660 - DNA, 430 bp, Oryza sativa
  Clone ID: uC-osflm202100f07b1
tcgctgtgcacgcacgcacgcagcttcctcggccttggaggggtgaaggggggagggaggaggagcacaacgaaggatcttggggctcgggttggtcggggtatggatcggctcggcgcgggtgtcctaatgccaagctttcttggcaagatccatggccgccgcgcgagaaccctcgtctcgtagacagccctaaagccctcgcggcaggatggtcggagcgcgtaggcaaatcgacggggaggaatcaagaatcggggcggggccttcgatcgctgcagaaaccgccatggacagctccagcaagctcgcgcgaatgcgcctgtgaaagaagacttgtagttgcagagcttgcaaaaccagattgtggaggagaagcagcgatgccaccgatcccatctctgtggatccgcgtcttcttcttctggct

SEQ ID NO: 24661 - DNA, 416 bp, Oryza sativa
  Clone ID: uC-osflm202100f08b1
tcgctttaaccgcccctgcaaggttgttgaggtttcggcctctataaactgggaagcacggtcacgccaagtgccactttgttgcaattgacatctttactgccaagaagctcgaagatattgtgccatcttctcacaactgtgatgtcccgcatgtgaaccgtacggagtaccagctcattgatatatctgaggatggatttgtgagtctgttaactgaaaatggcaacaccaaggatgacctcaggctccctactgatgataacctgcttagtcagatcaaggatggatttggagaagggaaggacctggtggtgactgttatgtctgccatgggagaggagcagatctgcgcgctgaaggacatcggccccgaataaacctcacctgttccatgtgattactactgaactttt

SEQ ID NO: 24662 - DNA, 407 bp, Oryza sativa
  Clone ID: uC-osflm202100f09b1
tcgaatacaaagtgggagagagagagagagagaggggatggaaatggcggatgagctggggcacttgctggtgttcgggttcctcttcaacctgggcgtttacatggtggcgccggcgatgaccgacgtgaccatggacgccctctgccccggccaggacgagtgctccctcgccatctacctcaccggcctccagcaagccattacagggttgggtgctcttgtggcgactccgatcgtgggcaacctgtcggacaaatatggtcgcaaggcgttgttgctgctccctgcaactgcatccatccttccgttggttattttagcgtgcaaccggacgaaggccttcttctacgcctactacatcaccaggatggtgacagccatggtcgccgagggcagcatgcact

SEQ ID NO: 24663 - DNA, 453 bp, Oryza sativa
  Clone ID: uC-osflm202100f10b1
tggattattgaacggtggaacgcgtacttacccacgagttaggtgcatgccatggcaccattcatggcgtgcgcctcgccaccggtactcacgctggccctgctcgcgtcgtgcggtgcccttctcgccacctccatgctcccggcgcgtgcgacggcgggcagttgcttggacgtcggcgacatggtgatgatggacaggttccgcgcttggcagggagctcacaaccggtcgtacccgagcgcagaagaggcgctgcagcggttcgatgtgtaccgccgcaacgcggagttcatcgacgccgtcaacctgcgcggcgacctcacttaccagctcgccgagaacgagttcgcagacctcaccgaggaggagttcctggccacgtacaccgggtactacgccggcgatggccccgtggacgactccgttatcacgacgggtgccggagacgtt

SEQ ID NO: 24664 - DNA, 499 bp, Oryza sativa
  Clone ID: uC-osflm202100f11b1
tttgttttctatagcaacatcttccaacattgaaaggtccctgttcagttcattagcagtggccaaagccgtcgccctactccttgcagccatcgcggcatcggccgtgttagtgcaagtggaatgcgacgcccccgtcgagaagagcttcaacaaggccctcctcgcccctgtcgataagcgcttggatgaggcagctcaggccatcaacgaggccgccgactccgttgaggctgctgccccaccagcaaaaaaggatgaagttgaagctgccacgtggaagcggagaatcttcgccataactgctctcgggatggcccaaggagatgagaagaaagttgctgcaacttcactagcctacaagaaagcagctaaagctgtcctcgatgccgccccagctgacaagtttaagttgatggatgaatccttcaaagtggctgttatgcaggttatcgcattatgagccacacgccaccattaataaaggtctactactaca

SEQ ID NO: 24665 - DNA, 439 bp, Oryza sativa
  unsure (1)..(439): unsure at all n locations
  Clone ID: uC-osflm202100f12b1
tcggtttaggtggctggggctcgtgacggcggggtgggtgcagtgcatctccggcaacaactacaccttctccaactactcccactccatcaagacgctcatgggcctcacccagctgcagctcaacggcctctccgtcgccaaggacgtcggcaaggcgttcggcctcctcgccggcctcgcctccgaccgcgtccccacctggcttctcctcgccgtcggctccctcgagggcctcctcggctacggcgcgcagtggctcgtcgtgtcccgggccgtcgcgccgctgccctactggcagatgtgcgtcttcctctgcctcggcgggaacagcacgacgtggatgaacaccgncgtgctcgtcacctgcatccgcaacttccgccggagcagggggccggtgtccgggttgctcaagggctatgtggggctcagcacg

SEQ ID NO: 24666 - DNA, 465 bp, Oryza sativa
  Clone ID: uC-osflm202100g01b1
cttttccttgccgccgccgccgcagcctcctcctgtcgccatctcccgtcctctccttcaagtcagctacctgcttaatcaaccatgggtaaggagaagacgcacatcaacattgtggtcattggccacgtcgactctggcaagtcgaccaccacgggccatctgatctacaagcttggaggtatcgacaagcgtgtgattgagaggttcgagaaggaagccgctgagatgaacaagaggtccttcaagtacgcgtgggtgctcgacaagctcaaggccgagcgtgagagaggtatcaccatcgatattgccctgtggaagttcgagaccaccaagtactactgcacggtcatcgatgcccctggtcaccgtgacttcatcaagaacatgatcacgggtacctcccaggctgactgtgccgtgctcatcattgactccaccactggtggttttgaggctggtatc

SEQ ID NO: 24667 - DNA, 493 bp, Oryza sativa
  unsure (1)..(493): unsure at all n locations
  Clone ID: uC-osflm202100g02b1
ggttttgttatcatcgtttacataattcaagacaataataaagttgcttaagtaatctctcccttcttccagaacgccaccatccccaaggagtgcgacaccgtccagaagtgctacctctccctcgccgagcaggtcagggagaagctcggcaagatcgacccctacttcgtcaagcttgccgatgccatggtcacctggatcgaggcctgggatgagctgaacccctcgactgctgctgtcgagaacggcaaggccaagtagattgatcctgggagcttgtgtgtcgcaggatggaaagtaccctttaagtgaaagtgttgctgtggcctaggccccctagatatagctctttttgagatgaagggagagattacttaagcaactttataattctttggtggtatgctggntcttttgtagctggaaaaggatttgttatcatcgtttacataattcaagacaataataattttatcatgtaattttgatt

SEQ ID NO: 24668 - DNA, 492 bp, Oryza sativa
  Clone ID: uC-osflm202100g04b1
gattatttttccctgctctaaaggaacgcacatgtagtcgtgttgtaaacacaagagctacagttgccattgctataaaatattcaattgttgaacggcctggaaaaatagatgaaattatgtactccgagatttctaccttcctgatgttgattaaagacagtgacaggcacgtgaggcgtgcagctgtgctggccttgagtacagctgcccacaacaagccaaatttgattaagggtcttcttcctgaattattgcctcttttgtatgaccaaactgttgttaagcaagaattgatcagaacagttgaccttgggcctttcaagcatgttgtggacgatggtcttgaactcaggaaagctgcctttgaatgtgtggatacattgctggatagctgtcttgatcaagtgaacccatcatcatttatcgttcctttcctcttatctggtttaggtgatcattatgatgtaaaaatgccttgccatctgattc

SEQ ID NO: 24669 - DNA, 489 bp, Oryza sativa
  Clone ID: uC-osflm202100g05b1
ccttgagttttgcactagctagctagggtgtaacgcacctattaactaggaagcgccttgtctctgctaaccaccaagctcgagcaaattaagcaagtgacacagttcagaacaccagcattcgccatggcctcctccccctgcggcggcttcctagagaaggccaagccctacttcgccatgatctgcctgcagttcggctacgccggcatgaacgtgatcaccaaggtctccctcaaccacggcatgagccactacgtgctcgtcgtctaccgacacgccttcgccaccatctccatcgcacccttcgccctcctcctcgagaggaaggtgaggcccaagatgacgtggtcggtgttccttcagatctttcgcctggcactgctcgggcctgtgatcgatcagaacttctactacgccggccttaagttcaccgggccaaccttcgcatgcgccatgagcaacattctccccgccatgaccttcgtg

SEQ ID NO: 24670 - DNA, 387 bp, Oryza sativa
  Clone ID: uC-osflm202100g07b1
ttgggtgatcacgagaaccaaaccccaaccggggggactcgaatggcaagcaaaacccccacacttcccggcggaggaggcggcggtgacggaggcagcgatggagacggtggagacggctggtggcgcacatgcagggcctatccgggagcggggaggagctggcctacctccacaacgctcctccacaagcgacgacgggggagaaccttgcgcgacaactccgtcgcccatacttcccttgctcgacaaggtccacccgagcgcccactagctcggcttcctctacctcatggaggcgatcgcgtcttttgctttcaacctgagggcgcacggcggtggcgactgcctggtcaccaaggccaattatctcgggatctgctaggc

SEQ ID NO: 24671 - DNA, 406 bp, Oryza sativa
  Clone ID: uC-osflm202100g08b1
tcgggttatgccaagacttgtagaggttgtgaaaggttcaacaaaagagaaggttgtcagggtcgttatcatgtctatccgtaacttgcttgcaaagggtgcgtttgctgcccaaatgattgatcttggactgccacacatagtacagaatttgaaagctcaagcatggactgatgaggatttattagatgcgctgaatcagctagaaataggactcaaagacaaccttaagaagttgagttcatttgagaagtacaagcaacaagttcttcttggccatcttgactggtctccaatgcacaaagacccaagtttctggcgcgagaacattaataattttgaagaaaatgatttccagattctacgtgtgcttatgacaatcatcgacacatcggccgacacgact

SEQ ID NO: 24672 - DNA, 465 bp, Oryza sativa
  Clone ID: uC-osflm202100g09b1
tcgcttataaccctagctgctcgcctcgcccacgccctggctcgcctcgcctgatcccgccgcgtcgtaccagcagggcggagccatgtcgtccgggaagggaggtggaggcggcggcaagggaggcggagggaagaagaaggaggtgaagaaggagacgaagctcgggatggcgtacaagaaggatgacaacttcggggagtggtactccgaggttgtcgttaacagtgaaatgatcgagtactatgacatatccggttgttatatcttgaggccatgggcgatggagatctgggaattgcttaaagaattctttgatgcagaaataaaaaagctgaagctgaaaccttattatttcccattgtttgtcactgagaatgtcctacagaaggagaaagaccacattgagggctttgcaccagaggtagcatgggtcactaaatcagggaaatctgatctggaagc

SEQ ID NO: 24673 - DNA, 467 bp, Oryza sativa
  Clone ID: uC-osflm202100g10b1
tttatttaccgaaggggagggggagcgaagctgtgcgttctctaatcgcctcgtcaagatgcagatattcgttaagaccctcactggcaagaccatcaccttggaggttgagtcctccgatacgattgacaatgtgaaggctaagattcaggacaaggagggcatccctccggaccagcaacgccttatcttcgctggcaagcagcttgaggatgggcgtactctcgcggattataacatccagaaggagtccaccttgcaccttgtcctccgccttcgtggaggcatgcaaatattcgtgaagaccctcaccggcaagaccattaccctggaggtcgagtcctccgacacgatcgataatgtgaaggccaagatccaggacaaggagggaatcccaccagaccagcagcgtctcatctttgctgggaagcagctcgaggatggccgcacccttgcagactacaaca

SEQ ID NO: 24674 - DNA, 451 bp, Oryza sativa
  Clone ID: uC-osflm202100g11b1
tttgtttcttcttctccttcccctcgtctcgctcgtaatttgcacaggcgacctcgacacaccacttcaccctcgctcggtcggagcaatcttgcctgcgacgccgccgccgccctcgatctcggatcgtccgctacgcccctgcctccaaaccttgccgcggcgatcggagaggggaatacccaaaccctaacgttttcggcccctccccgccgtcagagctgcgccgtgcggttctgcttcttttctgggcctcgtcacctagggttccgagatgggcgatcataaggccgtcttcatctcccttcaggagctattccctcaggttgatcctcgcatactgaaggctgttgccattgagcaccacaatgatgttgattctgctgtagtcgcaatccttgatgaagtcatgccgtctgttacatctacaagtccacctacagtttcgtct

SEQ ID NO: 24675 - DNA, 374 bp, Oryza sativa
  Clone ID: uC-osflm202100g12b1
ttgcgatcggtgatcggtctatgccgttgctgccgatgacgaagctggagctcggccaccgcggcgaggcgtgggagcccggctgcctccgcgccgtcgccggcgagctcctcttcaccttcctcttcgtcttcatcggcgtcgcctccaccatcaccgccgggaaggcggcgggtggggccggcgaggcggcggcggtgacggcggcggcgatggcgcaggcgctggtggtggcggtgctggcgacggcggggttccacgtctccggcggccacctcaacccggccgtgacgctctccctcgccgtcggcggccacatcacgctcttccgctcggcgctctacgtcgccgcccagctcgccggctcctccctc

SEQ ID NO: 24676 - DNA, 490 bp, Oryza sativa
  Clone ID: uC-osflm202100h01b1
gcttctgcaattctctctcctcccaaagcgcgagctcgtcggaagctagggcctcccgctccgatcagatcgccgcgccgccgctgctccagggtacctcaaaaatagaagatgcaaggggggagaggcaggagggatggtttcttcggttttggggacccctttccaggtttgggtagctttggacaaccagggagcctaatgtcaagtttctttggtggggcaaatccctttgatgatcctttcttcacaaaccctttcggtgctatgatgggacctagcttgttacagccaagcatgtttgggagctttgggtcaagcatgtttgggcctcatggaaatgtcaatggactgagcaatactggaggcttccttcagcaagctcctgaaccaagcaggccgagagggccaataatccaggagctatcttcagatgatgaggatggcgcagatgtgaataaagaagatgagaagaggaatgataacccta

SEQ ID NO: 24677 - DNA, 391 bp, Oryza sativa
  Clone ID: uC-osflm202100h02b1
ctttcaattatgttcaaatcatatcagctccagggcccgggtacaattaacaagcgagatgcgtctgagccagcatccaaccagggtacatcatgaggactcaacgaatcctcctcgccgtacgagagtacatggtagtttcctcaacgatgctggccgttgtctcctgcgcgcgggagaggaagaactacgtggttcatctcgacccgagggaggacggcggcgtcgccgactcggacgagctgtggcaccgctcgttcttgccggaggccacaccggacgcggcgggggatgatggcccgaggatcatttactcctacagccacgtgctgtacgggttcgccgcgcagctcaccgacaacgaggctgatgcgatgaggaaaaaggagga

SEQ ID NO: 24678 - DNA, 461 bp, Oryza sativa
  Clone ID: uC-osflm202100h03b1
ctttcggttattgccgctccccgccgccgccgcgcgcgagtttcgtttaagtgtggtgaggattgatgaacccctaaacattgggtatggatggatgtgactgcatcgagccactatggccaactgatgagctcctcatcaagtatcagtacatctcggactttttcatagccctcgcatatttctcgatcccgttggaactaatttatttcgtgaagaagtcatccttcttcccatacagatgggttttgatccagtttggtgcatatatagtcctatgtggagcgactcattttataaacctgtggacttataccacacacacaaagactgttgctatggtcatgacagtcgcaaaggtttcaacggctgttgtgtcctgtgcgacagctttgatgcttgtcatattatccctgacttgttgagcctgaaaacaagggaattgttttcgaagaataaag

SEQ ID NO: 24679 - DNA, 412 bp, Oryza sativa
  Clone ID: uC-osflm202100h04b1
ctctattgtatcctcttcaattgcccccaaattggcgcctggtttcgtgccttcaatcctcgggaacggacgcgccaagtccggtcgctttccatggccgtcggccgccattcccgccgccgttccgacctcccccgtggccggctccctcttctctcatataaaatgggatcctcatcccccgttctctcgttttagccccctcccgagcctccccgtggtccctagccatctccccgccgccctcctctctctcccacgccgccggccgcctccagccgcctgtgccgcctcgaccgtgcgccggccggccgcgccgtcgcctcctccagcgtcgccgacaccttcttcaccccggcctgccctccgtttcgcgcggtgaccgccggaggcgcgttcccgccgtcgccct

SEQ ID NO: 24680 - DNA, 465 bp, Oryza sativa
  Clone ID: uC-osflm202100h05b1
gatttacttcatgagaatcttagacaactcaaatgctcagaagccagtagtgcgcatggcaaatttgtgcgtagtgtctccccatacggtgaatggagtggctgagttacacagcaacattttgaaggaagagctttttgcagactatctctctatatggcccaacaaatttcagaacaaaacaaatggaattacacctcgtagatggctccgtttctgcaacccagagttgagtgaaatagtaacaaaatggctaaaaacagatcagtggacaagcaaccttgatcttcttaccggacttcggaaatttgcagatgatgaaaagcttcatgctgagtgggcatcagctaagttggctagcaaaaaacgcctagccaagcatgtgttggatgtgacaggtgttacaatcgacccaaatagcctttttgatatacaaattaaacgcattcatgagtacaagagaca

SEQ ID NO: 24681 - DNA, 367 bp, Oryza sativa
  Clone ID: uC-osflm202100h06b1
cgcttcgttaaagggccttcgagacttgggaggtgggagcgtgcaatctcggccatggcgaagctctcctgccttctcatcgtctccttcgccgtcgtcgcggcgttggcggccacggacgacgacgcggcggcggcggctgaggggatcacggtggcggaggcgtcgtcggacccggagaacaagtgcgtgtacacgatatacgtgcggacggggacgatctggaagggcgggacggactcggtgatcggcgtgacgctgctgggcgccgacggctccggggtgcggatccgcgacctggagcggtggggcggcctcatgggcgacggccacgactactacgagcgcggcaacctcgacatcttca

SEQ ID NO: 24682 - DNA, 351 bp, Oryza sativa
  Clone ID: uC-osflm202100h07b1
atctgttatggaggaaagtacatgaggacaaggggcgcgtttgattaaatatagagggcctctgtccacagcagacagcagtgcatccgatgttacacgggcccaaacatactgaacatccagggcacgcccaggctctaccgcatgataatctctgctttggggaccgaggagcaagcaaacatgcacatgtacaaagagcaggacgcatgaccattcactggcctgatgataccagagccaggacccgttgcttacaccccctccggaggctcaggtgggtcatgctcggtgggagccgagaatattgggagcctgggaaagaatgatatcaagcgcatatggaacact

SEQ ID NO: 24683 - DNA, 378 bp, Oryza sativa
  Clone ID: uC-osflm202100h08b1
ttggatgagagagaggtctaaaaccctaacccccgagttgaatttagtcggaagccgccgtcgccgccgccgccgacgacgacgcccgcgacgccatggacatgggagcgatgagcgatcctgagaggatgttcttcttcgacctggcatgccagaacgccaaggtcacctacgaacagaacccgcacgacgccgacaatctcacgcggtggggaggcgcgctgctcgagctctcgcagatgcggaacggccccgagagcctcaagtgcctagaagatgcggaatccaagctggaggaagcactgaaaattgatcccatgaaggcggatgcgctttggtgcttgggaaatgcacagacctctcatggattcttcactt

SEQ ID NO: 24684 - DNA, 287 bp, Oryza sativa
  unsure (1)..(287): unsure at all n locations
  Clone ID: uC-osflm202100h09b1
tcgcgtactcgcgtcgccctcccccgggcgaggggggatgcagattccgtcgccggtctcctcctcctcacgtnaactacccccggctaacgggcgcctgagcgggcaccttgaaagccttgcgcccacaggctaggacaggggcggtggggcctcatatcgcctccacgcgctcggaggttggggggatgccttgagtggcgggggtggtgacgagatccgtgccaggcacaggcggatctagaagaggggctggtggctccacaggctcaaggacacggctgcga

SEQ ID NO: 24685 - DNA, 458 bp, Oryza sativa
  Clone ID: uC-osflm202100h10b1
tttgtttcttcatattcttctgccaagtcatgtggcgtgccaacaatggttctggaccctactgatattacgtggctttttcacttgattaattggggcaaatcatcactccttgtaatcattagacattggaagcagtgcatgctatctctaattaaaatattaaaaggttcacttggtggtactgttcaacactacattgaagatcttggtagtatcatttcacatgatgcagtcaatatcgatgaactcagcgagaaaatttcagatctcaaacttgcattgtccaaggaggcttctgcaaaatcggaaaggagagtggtagctggtgtatcaatgttcacagaaccaattgctggtattccttctccagctactcagacggctcaggagagaaatactggcagggacaatgttgaaaccatgaagtcttctcgatcgacatgtactgaacatat

SEQ ID NO: 24686 - DNA, 379 bp, Oryza sativa
  Clone ID: uC-osflm202100h11b1
ttggttcagtgagagtgaggtgcagaaaaatgtgagcttaagctgaggatggcaacatccatgatcacctcgccgctggtggcgccggcccgggccaagggccttccgtccatctcccgccggggatcctccttcgccatcgtctgcagcggtgggaagaagatcaagaccgacaagccctacgggattggaggtggcatgtcagtcgatattgatgcatctggcaggaagagcacggggaagggtgtgtaccaattcgttgacaagtacggcgcaaacgtcgacggctacagcccaatctactcgccggaggaatggtctcccaccggtgacacctacgttggtggaaccaccgggcttctgatctgggccgtgaccc

SEQ ID NO: 24687 - DNA, 469 bp, Oryza sativa
  Clone ID: uC-osflm202100h12b1
tcggctttctcctcccgctacgccaccgcggggccgggcaccggtgcgcagaagatcgtctccctcttcagcaagaagcccgccccgaagcccaagcccgccgccgtcacctcctcgagccccgacatcggcgatgagctcgccaagtggtacggccctgacaggaggatcttcttgccggagggtctcctggaccgctcagaggtgccggactacctcaacggagaggtccccggagactacggctacgacccttttggcctcagcaagaagccagaggacttctccaagtaccaggcctatgagctgatccatgccaggtgggcgatgctcggcgccgctgggttcatcatccccgaggcctgcaacaagtttggcgcaaactgcggccccgaggccgtctggttcaagaccggcgccctccttctggacgggaacaccctcaactactttggcaacagcattccca

SEQ ID NO: 24688 - DNA, 510 bp, Oryza sativa
  Clone ID: uC-osflm202101a02b1
atcagtttatccccaaaatatggggttggtgccgataataacatgttagaggaagataatttttcgacctctacaaagcaacaggatgtatttgattcaagggagcaagtcatcaaggaagaatcacctaaacaaagtgcaaatgcaccaggcaaagaacgagcggaacttaagtcacgtgaatcattatctcaaaaggaacagcctgagatatgttctactcatactgcaataggagacgcatgtgagaataaattagaatgcatagatggcacacataatcaaagtcttgtttccagttgtgtgcatgctgacaggacaactaatcaggcagaagattctagtgcctctgtttctgtgggagtaaattctcatcagcagccgaataattctaccaggcctagccaatctaagagtagatttagtcctatgcttacatttcataggcgagttaaaaacaaaataggtttggaagagcctgcagcaggaagttgttcaagagataatgac

SEQ ID NO: 24689 - DNA, 466 bp, Oryza sativa
  Clone ID: uC-osflm202101a03b1
ccttcttatcctactcttgtcttctcccgacttcgggtgcgtgttagataccttggtgagtcaaccatgggcacggagaagacgcacatcaacatcgggggcattgtccacgcccactccggcaagtacaccaccacggaccatgtgatttacaagctaggaggtatcgacaagcgagtgatctaaaggttgacgaaggacgccgatcagatgaacaagacgtcgttcacgtacgcgtgggagcaagacaagctcaaggcctagcgagacataggaatgaccatcgatattgccctgtggaagttagcgaccaccaagtactactgcacggccatcgatgcccctgggaaccgagacttcgttatgatcatgatcacgggtacctgacaggctgactgagacgtgctaaatattgactacaccactggtggtaatgaggctggtatgtccaatgaaggccagaccc

SEQ ID NO: 24690 - DNA, 505 bp, Oryza sativa
  Clone ID: uC-osflm202101a04b1
gacccacgcgtccggtttacctcaacggcgtggacgcgccaaacatcttctggctcaggacactcgctgtcaagataatcggtaacatcgcggccgtgtcatcctcgctgcacgtcggcaaagctggcccaatggtacacacgggcgcgtgcatcgccgccatcttcggccagggcgggtcgcgcaagtacggcctcacctgccgctggctgcgctacttcaagaacgaccgcgaccgccgtgatctcgtcaccataggcgccggcgcaggtgtcaccgcggctttccgcgcccccgtcggcggcgtcctgttcgctctcgaatcactctcgtcatggtggcggagcgcgctgatctggcggtcgttcttcacgacggcggtggtggcggtggtgctgcggatgttcatcgagctgtgcgcgtcggggaagtgcgggctgttcagcaagggtgggctgatcatgtacgacgtcagcaccaagtttgatgacctcatgacctacca

SEQ ID NO: 24691 - DNA, 477 bp, Oryza sativa
  Clone ID: uC-osflm202101a06b1
gccgccgtagcctcctcaaggctgctcccatccggtccttcgagttagcttcctccttattcaaccatgggtaaggagaagacgcacatcaacattgtggtcattggccacgtcgactccggcaagtcgaccaccacgggccatctgatctacaagcttggaggtatcgacaagcgtgtgattgagaggttcgagaaggaagccgctgagatgaacaagaggtccttcaagtacgcgtgggtgcttgacaagctcaaggccgagcgtgagagaggtatcaccatcgatatcgccctgtggaagttcgagaccaccaagtactactgcacggtcatcgatgcccctggtcaccgtgacttcatcaagaacatgatcacgggtacctcccaggctgactgggccgtgctcatcattgactccacactggtggttttgaggctggtatctccaagatggccagacccgtgagcacgctct

SEQ ID NO: 24692 - DNA, 353 bp, Oryza sativa
  Clone ID: uC-osflm202101a07b1
tccttcacaagcttgcaatagaggaccggtggggggccttgttcctccggagccccgtatcacatctcacacgcgtgggagcgaacagtcgaaggtgtagagcagtgcatggctcttcctttcgttgccgatcggaagcagtgcgctgcggcggtagcggaagcaggactagacgtaggagcggatcctgatgggagcggagtgcaagtacgaggaggcgcacgtggcgtacgtcatgctcgagctggacgcgatgaagcaccccggcgtcgacgtgaacgggatcctcgaagggcgtctcctggacggggtcggctccgacgacgacgtcgagtttcatcgacgacgccgag

SEQ ID NO: 24693 - DNA, 509 bp, Oryza sativa
  Clone ID: uC-osflm202101a09b1
tctttcgcctgggcggacgcgtgggcgacgcctgggcttgacggaaggaaacagaggggaagagagaggatcgtcgtcgaccatgatgcggcggcggctgggctgaaagagaaacagcatctcttgaggatcgtcgtttcgttgcatgggcaactactactcgtgcggcgcctcgtccacgtccagcccgacctcaccgtccttggtcgactactactactgctatcatcggtatccaagcagttgcagtagtacaagcacagcaacaagtagcggggggaggatgccgatccgcacccaccagcagaggctgtcgtccccgacggcggtgctggggcacgagacgccggcgctgcgggaggtgtacactgtggggcggaagctggggcatgggcagttcgggacgacgtacctgtgcacgcaggtgtcgactgcggcggagtacgcgtgcaagtctatcgccaagaggaagctgctgagcccggacgacgtggaggacgtgcggcggg

SEQ ID NO: 24694 - DNA, 468 bp, Oryza sativa
  Clone ID: uC-osflm202101a10b1
ctttagccgcgttggcggtggcggcggctggtgggggcggttggtgacagcagcggcgacagcggccggcttgcagcggctgtgaatgttgaggcacggtggcgaacgtggctgcggtggaaggaggcatggtggtgatcaccgtggctgaggtgggaggatgtatggcggccttggacggctagccgagggtgtaggagacgattgcatctagccggcgcggcaacgtttggaggaggggttggagaccggcttggcgcagagaggcgcaaccgatggcagcggaggccggctcggcgcgagaggcgctggcggaggagatggaggccgtcttggcacgagaggcgcggccgatggagggaggccggattggcgcgagaggcgcatccggtggaggaggcccgtttgacgcgagaggcgcggcctgcattggaggcgacctcggttcgaggagctgctgatggatgt

SEQ ID NO: 24695 - DNA, 492 bp, Oryza sativa
  Clone ID: uC-osflm202101a11b1
tcgatttgtctgggtccggctctgcgccgccggtggggggctattcatatacggtgagccagacccgagcgcgcggctgatcggcgtctacatcgggctgaagcggacgcgagactacgccgccgccgccgccgacgaagacggcggcggcgaggatcaggccgagcacggcggcgcggacgtgaagccggaggcggcggatccgcatcccgccggcggcggcggcggaagcagcacggaggcgtcgccggagtcgcacccgtggcccatataccggccaacccccatgtaccacgcggacaggcccacttgcaacgggccggacagggccgggtccgaccaagacgggtccagctccaggtgagttggcccccccaaccctgtagaagcttttagacccctatattacttaattgcccctaccctacactattatacgcaactaattatgattagtacgtaattagcggcgaaataatattactaccacta

SEQ ID NO: 24696 - DNA, 337 bp, Oryza sativa
  Clone ID: uC-osflm202101b01b1
cttaatttctcctccacctctccacccctcctggccggccgtacacccccccccccctcctactcctcctccgccgccgccggatcaggggcctcgccgcgtcgcgctgtcgctgctgaatccgtggttcttggtggtggtgcggtgctcccccccctaccatgctgcggggctgggtgccctcccgaccttgacgcctcccgctccccgacgaccacccgctcgacgccgtcttctccttcctcttcatccccacataagcgttgtgctgtcgtctcccgctccgatcggtgttcctggatcttggatcgatgagcgaggaggtgcaaaggtatgg

SEQ ID NO: 24697 - DNA, 510 bp, Oryza sativa
  Clone ID: uC-osflm202101b02b1
cttcgttgccctcttgtaaatagcattcagacagagaaggagaacaaccgaactctcccagtcaaaattccagatctagcatgtcaaaatcttttcctcaggtgtttcacaaggtttgattctttttaacctagataatgttgaaaatggaagtgtatcaattatcaaatgtcaggatatgatagatcacatgaactgtgtatattcacaagttcatgaagaactagctgttcagcacaatatctttttcgtatgaatactaaatcataagttaaatctggattgaagtgttgttttgcaagcaattggaggagtggattgtgatgtcttttgaataggcctactattcttgctgaatttaagaaatattgtgcatctgttctgtcttttacgactgaagaacaaacaatcactaaaaataaaacgataattttaattatttgtttcaagcatttttcaaaagatgtaaaaaccagaaaactggagcataaaacataactacattctagt

SEQ ID NO: 24698 - DNA, 507 bp, Oryza sativa
  Clone ID: uC-osflm202101b03b1
gtgtttctccggatgttatctctgaaaatgatgagttggatttctctgatgtttttggcaccactccagttcagacgccaacaggcatttcggtagctggtccagacagtcctgcacctttggctgagtccaatgagggggtttacaatgatcctattgtcatcatcaagcgatctcattctcttgttggtccaacatcacttgttagccagtccctgcgacttagcaatctcactctaaataaaacagaggggtcatcagaacctgcagaagaaaaggaaaggaacctagggcagctcagtgatgaagagtttgacaatgccacaacagaaaatgaaggtattgggcttgatgactttgaaatcttgaagcttgtaggccaaggggcatttgggaaagtctttcaggtgagaaagaaaggtacttcagagatatacgcgatgaaagttatgaggaaggataagatcttggaaaagaaccatgcggagtacatgaaagccgaaagag

SEQ ID NO: 24699 - DNA, 411 bp, Oryza sativa
  Clone ID: uC-osflm202101b04b1
gtctgcttaacatagagcaggtcattgtgcttgactggggcagggagggtgacaaatgagtctgtatccgactagtatttggaacaacataagagaggaggctctctgtacggtcgtgtgaggaagagcaatccagacatgttcattgcttaacaagatacatatagtgaaaaattgttcgtagcattttagctctagtatagatcgatcaatcgatcgttcgttcgttcgatcgttcgaggacgagagatttgctaacatggcgttggcagggacctccaaagtagtgctgggatgtgtcgcgtttgggatattctgggtgctggccgtcttccccaccgtcccgttcatgcccgtcggccgtacggccggctccctacttggcgccatgctcatggtcctcttccgtgt

SEQ ID NO: 24700 - DNA, 353 bp, Oryza sativa
  Clone ID: uC-osflm202101b07b1
gctagaagagacgagacgagggagagaaggagaagagggggccggccgcgggcgtcgtcgtgttcctccccccctctctctcctctcctctcctctcgatctccatccttccttccatccattcctccccgcacccttcgcattgctctcgtcgtctcgattcggtcgaggatctccaggaaaagaggaggaagcgatatgggttgcttttcatgctgcggagcggatgatgtcggcaagaagaagaagcgcgacgatccttacgtcccgatccctgatccaggtggtaactatggacgtagcaagcccgggcccccagccccttcgcgttcttcccccaacagcagaaatct

SEQ ID NO: 24701 - DNA, 482 bp, Oryza sativa
  Clone ID: uC-osflm202101b08b1
cttctcgctttcaccggaggaggagaaggagaggaaggtgttgatcgaatcctcctccaatcgcgcgcgattcgatccccgttgctggctcgctcgctccgccgatccctcatccgatctcaatccccgatctgatggcggccaaccccggcaacaagatccgcaacgccaagctggttcttcttggagatgtgggcacgggcaagtcgagcctcgatctccggtttgtgaagggccagtttgatgagttccaggagtccaccatcggcgcggccttcttctcgcagaccttggcggttaacgacgagacggtgaagttcgaaatctgggatactgcagggcaggagaggtatcatagcttggctgcgatgtactatcgtggtgcggctgccgaaatagttgtctacgacatcacatatgcggcctctttcacacgtgcaaaataatgggttcaagaacttcaagcgcaaggaaacccaaac

SEQ ID NO: 24702 - DNA, 506 bp, Oryza sativa
  Clone ID: uC-osflm202101b09b1
gtttcagcaaagaaggccagagacttccttcctttcttacagcggaacagaagacattccgcaattgttgaatatgtcttcagtggccaccgtttcaaactaacaattcctaaggagacttgcagcattgccttctctttctctggtgttagatgccctggtaaagatgagccctactcgaacgaagctattgctttgatgaggaggagaattctacagcgagatgtggagatagaggttgaagcagttgatagaactgggacattcttaggttccttatgggagtccaaaaccaacatggcttctgttcttctggaggctggtctggccaagcttagttcatttggcttggataggattccggatgcaaatgttctaatgagggctgaacagtctgcaaagcagcagaaactcaagatctgggagaattatgtagagggtgaagaagtttccaatggatctgcatctgaatccaaacaaaaggaaattctcagggttgtgtaact

SEQ ID NO: 24703 - DNA, 447 bp, Oryza sativa
  unsure (1)..(447): unsure at all n locations
  Clone ID: uC-osflm202101b10b1
tgctcagctcttcttccaccaccacccagctcctcgtcctcctcctcgtcgttgttcgccaccaccgctcggagagatggcgagccagaccgccgacgccacggggttcgtcgcgagcgacccgctgtcgtggggcaaggcggcgctggagatgacggggagccacctggacgaggtgaagcgcatggtggcgcagtcacgggaggccgtggtgaagatcgaggggtccagcctccgcgtcggccaggtggccgccgtctccgcggccaaggacgcctccggcgtggtggtcgagctggacgaggaggcccgcccccgcgtcaaggccagcagcgagtggatcctcaactgcatcgcccacggcggcgacatctacggcgtcaccaccggcttcggcggnaccttccaccgncgcaccaaggacggccaggccctccaagttgagct

SEQ ID NO: 24704 - DNA, 520 bp, Oryza sativa
  Clone ID: uC-osflm202101b11b1
tcggttaaggcaaacagcgcaacgcagcacacaacacaagcactagctgctcgatctcgtgaggctcgtagtaagcacactagctgcagatcgagcgaacagccatgaggaagtcaagcatcaacggcgtccatgtcatcggagtcccggtgaccgccaaggcgtttggcatagaggaggaggtgtcgttggccaggggccagtcgttcaggaaggccgacggcgatcaccttgcggtctcgttgtcgcaccccagcccttatacgtctttcggctataagcacagcagcaagggtcaggttatccactgggtgagcaagctgagcagaagggcacagggcttcagggagcatgtgaccttggggccaaagctgtcggagacggtgaaggggaagctgagcctgggcgcgaaaatcctgcaggccggcgggatcgagcgcgtgttccggaaggcgttctcggcggagaaaggcgagcggctggtgaaagcgctgcagtgctacctgtacaccaccggcgg

SEQ ID NO: 24705 - DNA, 510 bp, Oryza sativa
  Clone ID: uC-osflm202101c01b1
atctttttccaagattgctcgatcccctcgtgtgcctgtctcccaacaacactgcgcgacagacacaaatcacactcagatacgaaagataagtacagagagagagagagggcacggattatacactgcacacaagcatatatatatatatatcgattagccatccgtgctgatctgaaaagtatcatcggtagagagttttacagagttgtttggacaaggagacacacacatggctttcttgctcttctttggctttgtgacagctgcagtgctgtgcttcgtagtcccggcgttcttgctgctctgcacgagcgtgcagaggaggagagatgttggacagggtggagggcgagattggcagaagaagaagaagctcaggcttcctccgggatccatgggctggccgtacgtaggcgagacgctccagctctactcccaggaccccaacgtcttcttcgcctccaagcagaagaggtactgcgagatattaagacaaatttgtggggg

SEQ ID NO: 24706 - DNA, 479 bp, Oryza sativa
  Clone ID: uC-osflm202101c02b1
gttctcttcctcctcctcctcctcgccggcgtcggcggcgccgcggcgccactgctcgccaccgcccagctcttcgccgacttctactccttcacctgccccaacgtcgagaaggtcgtctccaccgtcatcgagcgcaagttcaaggaggaccctaccacctccgccctcctcctccgcctcctcttccacgactgcttcgccaatggatgcgacgcgtcgatcttgatcgacccgctgtcgaaccagagcgcggagaaggaggcggggccgaacatctcggtgaagggctacgacatcatcgacgagatcaagacggagctggagaaggagtgcccgcaggtggtgtcgtgcgcggacatcgtggcgctcagcacgcgcgacagcgtgcgcctcgccgggggccccaactacgacgtgcccaccggccgacgcgactcgctcgtcttcaaccgcgaggaaggcgactcgctccccgg

SEQ ID NO: 24707 - DNA, 386 bp, Oryza sativa
  Clone ID: uC-osflm202101c03b1
tttgtttatagctcaaatgaaattggtgcggtagttgtggatgctgctaaggtgtctgggttgtaaaatacacccaggacatgcttaattgcactgcttgagctgaagcatagcacgtggaatgctgagacagctaccacgacatcatgaactgtaccatttgatatgagttgaatggtaaaacagtaacctaacattgtgaacaaatgtaatcctttagaagctaagctgagccttacacaagtaaaagaggatgaacctgccatcgaggaaaagaacattaactcatgatatggtggagcattgcaaaaaaaggatgcttcaagatcacacatgaaacacgggtgagcaagagcactaataaaatgatgcagagaatgttatac

SEQ ID NO: 24708 - DNA, 508 bp, Oryza sativa
  Clone ID: uC-osflm202101c04b1
tttgttagagcagagctaagctagctcagagtgagtagcgtgttgagcttgctgaagggagcggcaatgtcgaaggaggtgagcgaggagccggagcacgtgcggcccaaggactacaccgacccgccgccggcgccgctgttcgacgtcggcgagctccggctgtggtccttctaccgggcgctcattgcggagttcatcgccacgctcctgttcctatacatcaccgtcgccaccgtcattgggtacaaggtgcagtcgtccgccgaccagtgcggcggcgtcggcaccctcggcatcgcctgggccttcggtggcatgatcttcatcctcgtctactgcaccgccggcatctccggagggcacattaaccccgcggtgacgttcgggctgctgctggcgaggaaggtgtcggtgattcgcgcggtgatgtacatcgtggcgcagtgcctgggcggcatcgtgggcgtgggcatcgtgaagggcatcatgaagcaccagtacaacg

SEQ ID NO: 24709 - DNA, 459 bp, Oryza sativa
  Clone ID: uC-osflm202101c05b1
ctcggttctggtgggcacgccgcaccgggtgaagggcgcggaccacgcgctggagagcatccacaacatcagggaggcgctgccggagctgtgggaggagtccgagaaggcggaggacgtgctcatctactccgaccgcgtcgccatcgagacatcggtgaccgcgtaggccacacctactgtctctcccgactccggcgaatcgctcagaacgagcaaccatccatccatccatgtccatccctggccgggcaggtgatcatcaggtgggaattcagaattggccgggacaacaatacgttccaagaaaaaaagaggagggtgttccgtggaagttcaggattcagaatgtaacagcaatgttggaacgggtcctgtagtatatatatgtatcggtcagatctttgcatgtaaattagtactcctagaagcaataataataataattaataaagagaa

SEQ ID NO: 24710 - DNA, 494 bp, Oryza sativa
  Clone ID: uC-osflm202101c06b1
gttccatcttgacatattccccgatgctgttcagaagcttgatgatgcccttcgtctgtttgctgctcctgaatctttggaaggatacagaacagctgctggaaaggctgggttggtgacggctagaaaatcagtgaagatacactcactttcaaagataatgatactgcacctgaagaggtttagttatggaagtcatggctgcacgaaactcttcaagccaattcacttccctcttgagctggttcttagtcgtgatctgctgagttcgccatcatcagagcacatgcagagtagaagatatgagcttgttgcaaccatcacgcatcttggggcaaacccgtccaggggccattacactgccgatgcaaagtctgccagtgggcagtggcttcgcttcgacgatgataacgtcacacctgtcagtctgaacaaggtcttgcatgaccaagcatatgtcctgttctacaaacaattataagtttgggggtatt

SEQ ID NO: 24711 - DNA, 496 bp, Oryza sativa
  Clone ID: uC-osflm202101c07b1
gtatagaactgtggatgaagttgctagaagcttggaaagagttctacttactatgcggataactacttctgaacctaaggagctagcttttgttgtggatggttgggctcttgaaatcatcctgtcacgctacaatgaagcctttactgaattagcagctctttcaaaaacagcaatatgctgccgggttacaccgtctcagaaagcacagcttgtaaagcttctaaaatcatgtgactatcgaactttggctattggagatgggggaatgatgtcaggatgatacaacaggctgatattggtgtaggaattagtggcagagaaggtcttcaagcagcaagggctgctgactatagcgttggcaagttcagatttttgaaaaggctgattcttgtccatgggcgatactcatacaaccgtacagcttttctttctcagtattctttctacaagtcattgttaatttgctttatccagatacttttttcttttcttc

SEQ ID NO: 24712 - DNA, 502 bp, Oryza sativa
  Clone ID: uC-osflm202101c08b1
gtcgccaccaccgcagctgcgccgcttcaaggggggacattgtgaaagtttcccaagtctgaaaagatggttctgaagactgaactttgccgttttagtgggcagaagatatacccaggcaagggtatcaggttcattcgtgctgattcccaggtttttctgtttgccaactcgaaatgcaagcgctacttccacaaccgcctgaagcctgccaagcttacctggacagctatgtacaggaagcagcacaagaaggacattcatgctgaagctgtcaagaagaggcgtcgcaccaccaagaagccatactcacggtcaattgttggtgctacactggaagttatccaaaagaagaggagtgagaaacctgaagtccgtgatgcagccagagaagcggctctccgtgagatcaaggagcgcatcaagaaaaccaaggatgagaaaaaggcaaagaaggcagaggtggcaaaatctcagaagacacagtcgtagggtggtgcta

SEQ ID NO: 24713 - DNA, 506 bp, Oryza sativa
  Clone ID: uC-osflm202101c09b1
ggttaatatactcagaggaggtccattcagtgttctcaacatttgctcacagcctagtccatgcattccaaacattcgaggaggtttgggaagatctatgcactgatataagagacggtgttctctcaaagaaagttacagcaccatcaattcgtgaggctgtttcaaaaatcctgaagcccaatcctgaacttgctgactcaatatacaagaagtgtattggtttgagcaattggtatggagtgatcccagcactgtggccaaatgcaaagtatgtgtatggtatcatgacaggatccatggagccatatctgaaaaaattaaggcattacgcagggaacttgccacttataagtgctgactatggcgcatcggaaggatgggttggctctaacatagaccctactgtgccaccagagcaggtgacatatgctgttctcccacaagttggttattttgagttcattcctttggagaaaccaataggggaggagacagaaaactcc

SEQ ID NO: 24714 - DNA, 448 bp, Oryza sativa
  Clone ID: uC-osflm202101c10b1
tcggtgcagtcgatgtcatcgactaatggggagagtgatgtgtatacagggatggtggactatacaatctgcggaagtgccgagtatcaaccaccatccgctgtctttcgcacccgagctctcatgtgcgtgcactcagcatgcacggtcttccagacaacttgaacagcgcacaaataaactgcaggaagctcatccaaggggcacaccggaatggcatccagagcccaacctaccacagcttggcagcaagcatcatcaactgtcaagccgatctgaagagatgcatagagtgggaagcccacagcacggcgaccacctggctgacgctcgccttcctcaccgcggcggcgatggagctcggctggccactcacttgctgacaaggccacaccatgtctgtcactgcacgcagctgctgtccgatcatcgagtgggaaaggatgac

SEQ ID NO: 24715 - DNA, 506 bp, Oryza sativa
  Clone ID: uC-osflm202101c11b1
atccgctactcgctatcctccttcctccatgggtcccttctcgaatcttctcactttcttctgaagtgctccgctccgctccgctccgatccaatccactccgcccgagtcccccacccatcggcacccaccagcgcgagggtgggtggccatcgatcgatcggcccatcgccgattcccgcgggatctgcggcggcgcggggggatttgatcggagggtgaatatgtcgacgccagcaaggaagaggttgatgagggatttcaaacgactgatgcaggatcctccagctggcataagtggggccccacaggacaacaatataatgctttggaatgctgtaatttttggccctgatgatactccttgggatggaggtacgttcaagctgacacttcagtttactgaagattatcctaacaagccacctacagtgcgatttggttctcggatgtttcatcctaacatttatgctgatgggagcatatgcttagatatactacaaaac

SEQ ID NO: 24716 - DNA, 444 bp, Oryza sativa
  Clone ID: uC-osflm202101c12b1
ttgattccccatagccatagaggcctagaccctacgggactactacctcgccatgatggccgcggagccctcgccggcggcagcctccgccgttgaagacctcgaaactctccccctagactcttcctactcctccgcccccgccactgatccactcctccgcccgcctgcttccccgtccgccgcctccgccgccgctggtggggaccacgaccccttcgtcatcgacgacgacttcctcgtcgacgaggaggatgacgacgacgtcgggccccctgcgcccaccgccatcccgctggtggccgcggcggcgcgggccccggagttcgcgcggatcgccgtgtccgatccgaagaagcacgcggagcccacgtcgggggccgccggcgtgatcccaggctccgggagctacttttcctacctcatcaccacccgcgtcgggga

SEQ ID NO: 24717 - DNA, 460 bp, Oryza sativa
  Clone ID: uC-osflm202101d01b1
cctcatgaagatcctgacggagcgtggttgctcattcaccacaacggccgagcgggaaattgtgagggacatgaaggagaagctttcctacatcgccctggactatgaccaggaaatggagactgccaagaccagctccttcgtggagaagagctactagcttactgatggacaggttatcaccattggtgctgagcgtttccgctgccctgaggtcctcttccagccttccttcataggaatggaagctgcgggtatccatgagactacatacaactccatcatgaagtgcgacgtggatattatgaaggatctatatggcaacatcgttctcagtggtggtaccactatgttacctggcattgctgacaggatgagcaaggagatcactgacttggctcctagcagcatgaagatcaaggtggtcgtccctcctgaaaggaagtacagtgtttggatt

SEQ ID NO: 24718 - DNA, 509 bp, Oryza sativa
  unsure (1)..(509): unsure at all n locations
  Clone ID: uC-osflm202101d02b1
cttgattctacctcccctccccaaatctcgctcccacgcctcttccttccgacttgtgacagaatggcgctcaatgaggagtacacatacgtggagctggagaaggagccttactggccatttgagaagctgcggatctcgattacgggagctggcgggttcatcgcatcccacatcgcgaggcgcctcaagagcgagggccactacatcattgcttctgactggaagaaaaatgagcacatgactgaggatatgttctgccatgagttccatcttgttgatttgagggtgatggacaactgcctcaaggtgaccaccgnggttgaccatgttttcaaccttgccgctgatatgggagggatgggattcattcaatccaatcactctgttatcatgtacaacaacaccatgatcagctttaacatgcttgaggccgctaggattaatggtgtcaaaaggttcttttatgcttcaagtgcttgtatctaccctgaatttaagcagctgga

SEQ ID NO: 24719 - DNA, 508 bp, Oryza sativa
  Clone ID: uC-osflm202101d04b1
atcactgaacctcctcgtggcggcgagctctcgcgagtcgactctcgcgtcgcgcgcgcgcacggcgccatcaatcgattctcacatccatccatctgcctatctatctctcgcaattctggcggcgcgctgcgcgcatagggggggatcgaatttgatctagtggtgatggaggcggcggcggcgatggaggcgggcggaagctggcggcgcggcacccgcacgggcggagcaggacggcgcacaacatgtcgtcgtcgtcgctgcggaagaagtcggacgccgcgctggtgcggaaggtccccgtggcgccgatccgcccgctgctcgccaacctccaggaggtctttctcgccaccaagctcgccgtcctcttccccgccgtcccgctcgccatcgccgcccagtgctttcgcttcgaccaggtgtgggctgttcgctcttagtttactgggcctcatccctctcgccgagagagtaagtttccttacagagcaaattgtactct

SEQ ID NO: 24720 - DNA, 505 bp, Oryza sativa
  Clone ID: uC-osflm202101d06b1
tttgctccagctgcaggcgctacgagaacgacgccggggccgacctcgtgaacgacatatcgtccaagtcagatgtctgcaacgtgtacgcagccgaggggattctacggatcacccaccagaacatccccagcatggtgctcacgtacaggcagctatgcaacgccaccgactccttcagcccgaacaacctgctcggggaaggcggctttgggagggtgtacagaggccacctcgaagagatcaacgagatcgtcgccgtcaagcagctggacaaggacgggttccaggggaaccgcgagttcctggtggaggtgctgatgctcagtctcctgcaccaccccaacctcgtcaagctgctcggctactgcaccgacatggaccagagaatcctcgtctacgagtgcatgcggaacggctcgctggaggatcatctcctagatctccctccaaaggcaaagcctctcccgtggcaaacgcggatgaagatcgcggtgggcgcggc

SEQ ID NO: 24721 - DNA, 509 bp, Oryza sativa
  unsure (1)..(509): unsure at all n locations
  Clone ID: uC-osflm202101d10b1
ttatttcagccaatctctaggtcggatgaatgggcatatgaactatagttttcagggcatgagtgctcttcatcctcattctctgcctgaagtccacaatggagtgaacaatggtgtcccttacaacttaaacagcatggcacaagttgtcaatggaaccaactcgaggacagctgaagctgtggacaacagacatctccataaagtgggttccggcaacctcaatggacattcatttgatcgtgcggaaggagctcttggattttcaagaagtggaagttcttctgtccgtggtcaccagttaatgtggaataattcaagtaacttccatcatcacccaaattctcctgttctatggccaagccctggatcatttgtaaacaatgttccatctcgctcccctgcacaaatgcatggagttccaagagcaccatcgtcgcacatgattgacaatgtgcttcccatgcaccatctncatgtangatacgcaccagcgatcaacccatcac

SEQ ID NO: 24722 - DNA, 502 bp, Oryza sativa
  unsure (1)..(502): unsure at all n locations
  Clone ID: uC-osflm202101d11b1
tcgtttggttttagcgagcgcgtgggaggccggaggcgacgacgacgaccgcgccgccgtcggagaagaaggccgcggaagcaccagtaccagcacccgtatatgtcttctagccccttctccgatctggtggtagtcgtgctcctcgtctgcgccgtcgtcgccgcagccgtcctcctccccctcgtctgcgcccgccgatctatgcaccagaggctccacggctggaacaagtccacgtcgatgctcagggacgggttcggggtcaagtattccgggttcctccacataaggccgtgtggtttctgtcgaggagattgacggattcgatcgattcgtgttcgtctccgtcaaatttttgcacaagagaaaaaaaaagtttcccccttttagagtttttccccttcagttttgtcagttttggtgaggaattttagagttctttttccgcaagagttagaagaagagangaatgggcccttccagcagcagcagatgcttc

SEQ ID NO: 24723 - DNA, 329 bp, Oryza sativa
  Clone ID: uC-osflm202101e01b1
ttcctttgccgcgcttgctcggcacggcaacccacgcgaaatcggagattccttcgattcacgagatcaccacgagtccaccaccctcctcctctcgctggattcgatgggcgctcggtgagatccgaatcccccacggtggtcgccggagatgaagccgccgcggaggtggatgtacgggcggggcggcgggaaggggaagccggcggggctgctgctgctgggggtgttcctctgcttgtcggtggtgctgctgctgctgctgcacggctcgtccccgtcgctggagggcgaggggaggaagcctgaagcggtggaggcggcggggg

SEQ ID NO: 24724 - DNA, 491 bp, Oryza sativa
  unsure (1)..(491): unsure at all n locations
  Clone ID: uC-osflm202101e02b1
ttttgtttcaggctgcccccagcttagtttgagaagcaaactgccaataaacacagggtgaaaaactgaatcagtaactgtaaaaattggtaagcctcaggcgctcagttttcttttacctcctcccatcttttatatgccaccggaagacaaagccctttttgtctccagacttcctgctccctctgtgtgtaatgcagacatgaggaaattcatagcagcactgcggcttgcactagcagcagcagctcatctgctgctgacgctgccaccggcacaatgctactggctcaacccggagatctacgacgccggcgggctgagccggcgagccttcccgaggggttcgtgttcggcacggccgcgtcggcgtaccatgtggagggcatggcgaagcagggtggccggngccctagcatctgggacgctttcatagagaaaccagggacgatccctaataatgccacagccgatgtgacggttgatgagta

SEQ ID NO: 24725 - DNA, 506 bp, Oryza sativa
  Clone ID: uC-osflm202101e03b1
atgtggatccgatgctccgccatgttgaacctcctctatctacattccttgagttgaacaaggtgaatttggatggttacaatgaagtaaagtacactccatcacgcgatcgccagtggcatatttacacactcatcaagaacaagaaagatcagagatcaaatgaccagaggttgttccttcgtaccatagtaaggcaaccaggtgtgaccaatgggtttttgtcaggaaatgttgacaatgaagtaggccgtgctcaggcttcatcatcatacacatcaagtagtatactcagatcactgatggcagcactagaagaaatagagctacatgcacataatgagacagtgaggtcaagctattcacacatgtatctgtgcatattgagagtacaacagttgtttgatcttataccattttcaagaacgattgataatgttggtcaagatgaagcaactgcatgtacgcttttgaagaatatggctttgaatatatatgaacatgtt

SEQ ID NO: 24726 - DNA, 509 bp, Oryza sativa
  Clone ID: uC-osflm202101e04b1
ggttgaccaagaaggtgtcagaaccttagatgatgataacttcattgatgatactggggttgatccagctgaccgttatggcagcgataatgatggccactcacctcggcattaccctcaggcagaggaaggggaagaggatgatgaaattgagcggctctttaagggtgggaagaagaagaaaaagaacgatcgacctcgtgctgatattggtcttatagtggaacaattcattgctgagtttgaagtggcagctgaagaagatgccaacttaaataggcaatcaaaaccagctattaataaacttatgaagcttccactactcatagatgtactctcaaagaagaatctccagcaggaattccttgatcatggagttctcactcttctaaaaaattggcttgaacctttgcctgatggtagcttgccaaatatgaatattcgaacagctgttctgaaattattaactgattttccaattgatttggagcaatacgatagaagggagc

SEQ ID NO: 24727 - DNA, 510 bp, Oryza sativa
  Clone ID: uC-osflm202101e06b1
ctccaccttatccctttcgcacgaccgcatctcccgcacacgcgcacgcacgctcgcacgcagggatccggccgcttcccccgttgccgctctcttgtactaccagtgcctgttgcctcgcctagctagctgctggcctggccggcgtcgcgttccttcatggcctcgctcctacccagtccggtgttccccgccgccgccgccgcggcgtccacatcctcgtcctcgaggtgccggtgtcgcatcacaacgtcatcttcggcgcgcggttggtcctactgtcagggctggagactccatcaccgggtttgggccgcccaggctgctgatcagcagcagcaacaacaagaagaaaatgaagacggtgtagtcgacagcaacgtgctcccctactgtagcatcaaccggaaggagaagaagactattggggagatggagcaggagtttctccaggcgctgcaggccttttattacgacaagaaggccgtaatgtcgaacgaggagttcgat

SEQ ID NO: 24728 - DNA, 514 bp, Oryza sativa
  Clone ID: uC-osflm202101e08b1
ttttacttcctcctccgcccgcgtcgcccctgctctcctctccctcccggctcccggctaccgccgccgccgccccgaggaaatggctgccctgcaaccctcattctcttcagcaatggctatgaaaagtctgaagttacccaaaactgcagttttacctggatttggtggtattgcacgtcctcaagatgtgcaggacaggagcgctaacttcacttgttcaaggcctagagcagcttcagtgactgaccagtcaacagcagagccagcaaaacccaggcaaaacaagcacactgttgatccttctgctccagaatttctgccactcccatcatttgaagaatgctttccaaggagcacaaaagaatccagagaaattgtgcacgaggaatctggccatgtcctcaagatcccatttaggagaatccatttgaccggagatgagaagcattttgacacatacgacaccagtggtccacaaaacattagtccaaggattggacttccaaagata

SEQ ID NO: 24729 - DNA, 510 bp, Oryza sativa
  Clone ID: uC-osflm202101e09b1
tttatcacatcctctccttcctcttcctctgctcactcagctctcccccgcgcgcgccaccgtcgtcgccatgtcgggcaacatcgccttcggccgcttcgatgactccttcagcgcggcctccctcaaggcctacgtcgccgagttcatctccaccctcgtcttcgtcttcgccggcgtcggctccgccatcgcctacaccaagttgaccggcggcgcgccgcttgacccggccgggctggtcgccgtggcggtgtgccacgggttcgggctgttcgtggcggtggccatcggcgccaacatctccggcggccacgtcaacccggccgtcaccttcggcctcgccctcggcggccagatcaccatcctcaccggcgtcttctactggatcgcccagctcctcggcgccatcgtcggcgccgtcctcgtccagttctgcaccggcgtggcgacaccgacgcacgggctgtccggcgtgggcgcgttcagggcgtggtgatggagatcatc

SEQ ID NO: 24730 - DNA, 507 bp, Oryza sativa
  Clone ID: uC-osflm202101e10b1
tcgattcaccaccaccttccttccttcttctctctttctcagtctcagatcacaattatcagatcccgagggagggaggaagggaggccatggccaccgctctttgactccccgaccgcctcgcccgccgcctctcccttcgacgacgactccttcctccgcttcgacgccgccgcgcccgctcccgcgccagcggacgccttcccgccatcaccggagccctacgccttccgccccgacgcgccctcccccttcggtatgcccgaggccaacggctccctccacgacgaccccttcgccgcccccgacaacgacaacggacccgtgctccctccgcccaaccagatgggcgctgacgagggcttcctgctgcgcgagtggcgccgtcaaaatgcaatccttctggaggaaaaggagaagaaggaaaaggagatgaggaatcaaatcatccttgatgccgaagaattcaagaaggcatttgttgagaagcgaaagctgaacattgag

SEQ ID NO: 24731 - DNA, 419 bp, Oryza sativa
  Clone ID: uC-osflm202101e12b1
tcgctatgaaccaaccacaggaaaaatgccaatccagtgcttattccctcatcaaagcgcgagccttgtggcctctgccgcgggtggcgccagcggcgccggccacagggcggtgacagatggcgggcggaccctggtgcgtggggaataggagctacaacgggacgctcctacccggtgacggcatcaggccagaagtggtcgccctccccaaggacggtctgtccctcgccggtgctatggaaggcggacagttccgcttacaggagaagctgatgggcggtgaggcaggggatgcttacagagggccgatcccggaggagacgctcagggcggcgcatgcatttgactcctgtatccatctggccataagacggtataagtgggattacaaagagaagcacctacagccagacact

SEQ ID NO: 24732 - DNA, 511 bp, Oryza sativa
  unsure (1)..(511): unsure at all n locations
  Clone ID: uC-osflm202101f02b1
cgggtttccctcgccgccgccgccgccgccgccgccgccgccgcagtgaccacctcgctcgccggcggactcgattggctcaccggcggcgacggaggaggaggaggcatctgcggcgttcggcgcgaccccggagatggaggggttcctctgcgaccgcctgctcgacgcggcgcagcccatcgccgagcgcttccgggcgctcttctccctccgcaacctccgcggcgacgcccctcgccgcgccctcctccaagctgcaagggactcttcaaacttgcttgcccatgaggctgcatttgcactaggacaaatgcaagatgctgaggctatccctgcattagaggcagttctcaaagatctttcacttcatccaattgtccgacacgaggctgcggaagcgcttggagctattggcctggaaaagagcatttccctgctggaggagagtttagctgttgatcctgccggggaagttcaagnacatgtgagctgctattagacggataga

SEQ ID NO: 24733 - DNA, 490 bp, Oryza sativa
  Clone ID: uC-osflm202101f04b1
agtaattgccggtgagccggatcgcggtgggcgcccccggcgagctgtcccacccggacacggccaaggccgccgtcgccgagttcatctctatgctcatcttcgtcttcgccggatcgggatccggcatggccttcagcaagctgacggacggcggcggcacgacgccgtcggggctgatcgccgcctccctggcgcacgcgctggccctgttcgtggcggtggcggtgggagccaacatctccggcgggcacgtgaacccggcggtgacattcggcgcgttcgtgggggggaacatcagcctggtgaaggcggtggtgtactgggtggcgcagctgctggggtcggtggtggcgtgcctgctgctcaagacgcggacgggcggcgccgccgtgggtgccttctcgctgtcggcgggcgtgggcgcctggaaccggtggtgttcgagatcgtcatgaccttcggcctcgtctacaccgtgtacgccacc

SEQ ID NO: 24734 - DNA, 436 bp, Oryza sativa
  Clone ID: uC-osflm202101f07b1
ggtatattgaacggaggaacgcgtacttacccacaagttaggtgcatgccatggcaccattcatggcgtgcgcctcgccaccggtactcacgctggccctgctcgcgtcgtgcggtgcccttctcgccacctccatgctcccggcgcgtgcgacggcggacaggtgctcggacgtcggcgacatggcgatgatggacaggttacgcgcttggcagggagctcacaaccggtcgtacccgaacgcagaagaggcgctgcagcggttcgatgtgtaccggcgtaacgcggagttcatcgacgccgtcaacctgcgcggtgacctcacttaccagctggccgagaacgagctcgcagaccttaccgaggaggagttcctggccacgtacaccgggtactacgccggtgatggccacgcggacgactacgctatcacgac

SEQ ID NO: 24735 - DNA, 490 bp, Oryza sativa
  unsure (1)..(490): unsure at all n locations
  Clone ID: uC-osflm202101f08b1
tttccctttcctttctctctcgagccttcctcttcctcttcctcttcctcctctactccacctcccctctcgccgctccagatcgattcccccccccacctcgcccgcgcgaattccccgctccgatctccgccgcctccctcccagcatactattagctctcctgtgaaagagaagaattgagaggtttctttaacatcaaggatgtcggtttctatgaaggatttggatccagcttttcgtggtgctgggcaaaaggaaggcttggaaatatggcgcatcgagaacttcaagccagttcctattcctgcgtcttcatatggaaaatttttcatgggtgattcttacatcatcttgaagacaactgccttgaaaaatggttctcttcgacatgacattcattactggattggcaaagatactagtcaggatgaatctggaactgcagcaattttaacagntgagcttgatgctgcacttggtggacgcg

SEQ ID NO: 24736 - DNA, 460 bp, Oryza sativa
  unsure (1)..(460): unsure at all n locations
  Clone ID: uC-osflm202101f09b1
ttttctcccttctcctcgctcttccccctccgccgccgccgcagcggagcagcaacagcaggcgagcgacatgggagggtttgtcaagacccagaagacccatgcctacttcaagcgtttccaagtcaagttcaagagacggaggcagggcaagactgactacagggccaggattaggctcaccaaccaagataagaacaagtacaacacaccgaagtaccgctttgttgtgagatttacaaacaaagatatcacagctcaaattgtctatgctaccattgcgggtgatatcgtgatggctgctgcctactcccatgagctgcctcgttatggtcttgaagttggtctcaccaactatgcggcagcttactgcactggcttgcttctggctcgccgtgtgctcacgctccgtggtttggaccaggagtacgagggcaatgttgaggccactgnggaggac

SEQ ID NO: 24737 - DNA, 512 bp, Oryza sativa
  unsure (1)..(512): unsure at all n locations
  Clone ID: uC-osflm202101f12b1
tttctagcttcctcgctgcttcgcccgccacgtgaggctcctcctcctccccttttttttctctcgctcgcctcgccatccatggcgtcgatggcgaaccagcagtagtagtagtccaccccaacgacgcgcgcgagccagctccggggtacccgccgctcgtgcccgggggggaagggggtgcaccggggagccgtcgcgccgcgcggctctgattcttcccgttcccggagatttgaaccatggagtctttacgtgacatggtcctcccaccaggatttggattccacccaaaagatactgagctcatttctcactatctgaaaaagaaaatacatggccaaaagattgaatatgagatcattccagaggtggatatatacaagcatgaaccatgggatttacctgcaaagtgcgatgttccaactcaggataataagtggcatttcttcgctgctcgtgacagaaagtatcctaacgngtctcggtcaaatagggcaacagttgctggg

SEQ ID NO: 24738 - DNA, 475 bp, Oryza sativa
  Clone ID: uC-osflm202101g02b1
cctctttctcctccccctcccggtaaggcggacgaccgagctgaggctgagctagggctagggcacccacctcctccccttccgtatcctggatggctgctggtcggggcattaaccagctcctacggagaacactccataatcagtcctcaggctcatctctgctatcctcgttccggataaagcatgaagaatcctccgctggactgagagcattggctcttcttggagttggtgcttctggtcttttaagctttgctacaatagcttctgcagatgaagctgagcatggtttggcagcagctgaatatccctggccacatgctggcattcttagctcttatgaccatgcatctattcggcgtggacatcaagtttatacacaagtgtgtgcctcttgccattccatgtcattaatttcgtaccgagatttggttggtgtggcctacacttgagaagaaacaaaggctatggc

SEQ ID NO: 24739 - DNA, 303 bp, Oryza sativa
  Clone ID: uC-osflm202101g03b1
gaatacgccgccagcaaggacagcgaccaccgacggggcctaataaacaaagagctcctcttaactagcgcacgcccgcggcaaaccagacgccggggggcagaacatatctaccgaccccggcggcaccaaccaatacgcaccaacgagggcaaccgatgttcacgccgactctctactacccagtcctgcagctaggcgagccgcaccagcagatacgagggggggggcacgcggggcgaccagcgggccccgcgcctgaccgggcagggcgatgacgcgcatgagaggcacaacgccgag

SEQ ID NO: 24740 - DNA, 511 bp, Oryza sativa
  Clone ID: uC-osflm202101g04b1
gtttatactttcaatcagagccagtatcctcgtgtggtagccgatgagttcttgccatggccttccaaggggaagacctgcaaggatggctggtaccctcctggccatggtgatatcttcccatccctgatgaacagtggcaagcttgatttgttactttcacagggaaaggagtatgtgttcattgcaaactcagataacttgggtgctatagtggacatgaagatactgaaccatttgatccacaaacagaatgaatattgcatggaggttaccccgaaaactctggctgatgttaaaggtggcacactgatctcatatgaagacaaggttcagctcctggagattgcacaagttcctgatgcacatgtgaatgaattcaaatccatcgagaaattcaagatcttcaacacgaacaatctatgggtgaacttgaaggctatcaagcgccttgttgaggctgatgcactaaagatggagatcattccaaaccctaaggagtggatggagt

SEQ ID NO: 24741 - DNA, 497 bp, Oryza sativa
  Clone ID: uC-osflm202101g05b1
tgttgttgttcaccgtattgcggatagaattgtaagggggacagcccttgaaaagcatgccaggttttggaagggagctgacatcttggtattcaacagctacctttggtggatgactggacaaaagatgaaaattctgcaaggttcttttgaagataagagtaaggatattgtagaaatggaaacagaggaagcctatgggatggtactgaatgcggtcgtgaggtgggtggagaacaacatgaaccccagaaattcaagggtctttttcgtcacaatgtcacccactcataccaggagcaaagattggggtgatgattcggatggaaattgctacaaccaaactactccgatcagagatttgtcatactggggtccaggaactagcaagggcttgatgcgcgtcattggagaagtgttcagcacatctaaggtccctgtggggatcgtcaacatcacccagcttttccagtaccgcaaagatgctcacactcaga

SEQ ID NO: 24742 - DNA, 486 bp, Oryza sativa
  Clone ID: uC-osflm202101g06b1
attcttttcggtgcaggtcttgcctcttaccccgtgggtttcgttcgcagaaggatgttgatgacctctggagaggctgtcaacgtcaagagctccatggatgcctttctcccagatcctgaagaacgagggtgccaagtcactgttcaagggtgctggtgccaacatcctacgtgccattgctggtgctggtgtgctctcaggctatgaccagctgcagatcctcttctttggaaagaagtacggctcgggcggagcctaaactggcagaaaatgatgacgaacaagtgtttattcctggtcctgcactaacgggatctggtgaattttgcctttttaacattgaaaacaataataattctttgaggggagaacactccccgacattcgttttttggtggacgcgtttatctccaaacattgtcataggcggaggcgttaatcgcaaacagtttaccatcatagggttgagtttgagttgagtct

SEQ ID NO: 24743 - DNA, 431 bp, Oryza sativa
  Clone ID: uC-osflm202101g08b1
tcttttagcttctcagccttttgcctctctttctactctctttcttggccgtctctcttatatccctcaatttaaccatcgagggcggccaaaaaaaagagagaaaggaagagcaaaataacacattacaccatggcgcgattcgtcatcatctccgtcgtcgtcgtcgccgccttcgccgctgccgctgtcgttgaggcccgggttggacctatcgacgtcgctccgaccaacctgatcaccaacccactcggtgccatcatcgacaatggccgcaagatcaccggcgccgtcgtcgacgagtgcgcctggacctgcgatcatgtcgcggcgggtaacaagaaagatgtgcaacacgctgaggaagctgccgggggtgagctcgccgaaagagctcctgacgcggcggtgaagctgtcgatgaagaaagc

SEQ ID NO: 24744 - DNA, 390 bp, Oryza sativa
  unsure (1)..(390): unsure at all n locations
  Clone ID: uC-osflm202101g12b1
gcgagtgaatgccggtagagccggaccgcaggagggcgcccaggctgtgactgcaatagtggatggctcgaccggcagctcgccgcggcgcaaggcgcagccgcgcccgcggcctcctgctcctcgccgccgccgacactcgagtgcgtgaggggatggccgtgatgcactgcacccttgaggaggggcagcaccaatcaaatatgactggcaacggcagggactggagagggcagcctcactggtcatggcaccggaaacggctaatggtgcgcgtgctacaaccacgcgagccacatgatctgccgcatgaatctcacctactagtgctaaaaccacacacagcttngatcgtatgatgagatcaaaggcgccagatgggtttgtgct

SEQ ID NO: 24745 - DNA, 412 bp, Oryza sativa
  Clone ID: uC-osflm202101h02b1
attgttacatccccttctcctcccccgtctcgtggctccggtcggtttcccaacccgagagggcctcgccgccattgccgcctcgctcctcgtctcgcgggaacgccgccgccgccgccgacgacattagggcttagggctcaggaggctcgcggcgatgtggtggagggccgcgagggctcgccggcggatcgccggggcgcgggcggcgtccacgtcggcggcggcggcgggggagaagagctgccgcgccgaggtggtgcctcggttcggagggccggaggtgctggaggtgaggcagggggtgccggtgcccgatctgaagccgggggatgtgctcgtgcgcgcgcgggccgtctccatcaaccctctggacctgcgaatgcggtctggttatgggcgttcaatattt

SEQ ID NO: 24746 - DNA, 510 bp, Oryza sativa
  Clone ID: uC-osflm202101h04b1
ttctttttcaccatcgacgacgactgcttcgttgccgaggacccatctggcaaggacatcaatgctcttgagcagcacatcaagaacctcctcagcccgtccaccccgttcttcttcaacaccttgtatgatccctaccgcgaaggcgctgactttgtccgtggttaccccttcagcctcagggagggagccaagactgctgtctctcacggcctgtggcttaacatccctgactatgatgctcctactcagatggtcaagcctcgtgagaggaactccaggtatgttgatgctgtcatgactgtgcccaagggaaccttgttccccatgtgtggcatgaaccttgcttttgaccgtgatctcatcggtcctgcaatgtactttggtctcatgggtgatggccagcctattggtcgctacgacgacatgtgggctggatggtgcatgaaggtcatctgtgaccacctgagcctgggagtgaagactggactgccgtacatctggcacaag

SEQ ID NO: 24747 - DNA, 484 bp, Oryza sativa
  Clone ID: uC-osflm202101h06b1
ctttatttgtggccgtcgaggtgtccggtggacctgccgtccccttccacccaggaagggaggacaaacctgcacccccacctgagggccgtcttcctgatgctaccaagggttctgaccacctaaggcaggtcttcggtgcgcagatgggcttgagtgatcaggacattgttgccctctctggcggtcacaccctgggaaggtgccacaaggaaagatctggttttgagggaccttggacaagaaaccctctgcagtttgacaactcttacttcacggagcttctgagtggtgacaaggagggccttcttcagcttcctagtgacaaagccctgctgagtgaccctgccttccgcccactcgtcgagaaatatgctgcagatgagaaggctttctttgaagactacaaggaggcccacctcaagctctccgaactggggttcgctgatgcttaagaggtttctagtctactactgctagtaca

SEQ ID NO: 24748 - DNA, 158 bp, Oryza sativa
  Clone ID: uC-osflm202101h08b1
tctaatgagggcgtcaacatctccatggtatgaggagggaccttatatacacttgtggagaggttgatcaaccacccgatactcttagccaagggagggattgacaggggacccatgggcctgagaagaaggtggaggagtactttacggggctgggc

SEQ ID NO: 24749 - DNA, 471 bp, Oryza sativa
  unsure (1)..(471): unsure at all n locations
  Clone ID: uC-osflm202102a01b1
ctacgtggccggcgaggccaagctcaagaaggcccccagcctcgcccccaagaagttctcctacgtcgacagcctctccgccggcggcatgaggagcccctcctcgcgccactgatcaccaccaccgccgccattacactctctctcacacgcacaagatgatcggcaccatcgccggagtcggacaagatgaccggcgccgccgctttcttgcacgctgtacataaccgaactcgacggacactagagatcaacgacgacactggagtagagatcagcttgattattaatctaatcagcatctaatctcttcttaccaatgccaattaatgcggggaggtaattacttntgatttcttttttttttcttccttctccatctttattctagagggggaaaagaacaaaggtggtttcatctgcaatacctgcaattcgacgccattgctacctgatcatgtaactagtact

SEQ ID NO: 24750 - DNA, 305 bp, Oryza sativa
  Clone ID: uC-osflm202102a02b1
gtgcgtatgaaaaagaaaagaaaggctttcgggtcggtgggcaaaagcgcgagggcaaagcgaaggtatagcatctagtaggcgatggcgagctccggtttctcatggacgctgcccgaccaccccaagctccccaaggggaagacggtagccctcgtcgtgcttgacggatggggcgaggccaacgccgacaagtacaactgcatccatgtcgcccagacgcccgtcatggattcgctcaagaatggttctcccgagaggtggagattagtgaaggctcatggaacagcttgttggtcttccta

SEQ ID NO: 24751 - DNA, 447 bp, Oryza sativa
  Clone ID: uC-osflm202102a04b1
gttctagtttgagttaactgatggcttaatatgtgtatttacctttcaaaatccccttgccttcttattctgagcaaaagtgggaaatgaccagttaaatttggtccttacctctcactagtctgtctggaacgctggacatagtatagaacctttatgttttattcaaattgaagaccaattctacctccaacaatatatgaaactgttattaatagatgctagtactatatcctgctatgaagggctgtaaaatgaaatcacaattcgggtatgctaagttatgcacatcatcgatttggtctcaggtgggacgtcttaagctagaccaaacccaaatactgtctagctactcagcgaacatgtggaataacatgatgcattgcacattacttatgatcttgatcaatttcacttaccgctgtttatactttatataacagaaga

SEQ ID NO: 24752 - DNA, 402 bp, Oryza sativa
  Clone ID: uC-osflm202102a06b1
ttttcagagttctaccatatggagtacgaccatctctgagcagaagggacactacaaatttacggcgtcttgcccgtgggctgccacctcactttgctcttgggcgaagcagacaactccaaggcttagcagctgctatggtgaagttgtgggagaaaagttctattgcaaaaattgctctgaaaagaggagtgcagcttaccacaagtgagaggatggctgaagatataaagaaattgacaggtggtgtaatgctttcgaggaacaatgactgtatggtcttctacagaggaaaggatttcttgtccccagaactcgcggagaaactgctagagagggaaagatgggcaaagtccttacaagatgaggagcaagcctcattaaatgcagcgtcttcctttt

SEQ ID NO: 24753 - DNA, 495 bp, Oryza sativa
  Clone ID: uC-osflm202102a07b1
tcgatagccgccgaccgaccgagcgcgatggcggcggcgcggctccggctgctgtccgcggggctcctctcgccggcggtgtccagggcgcggcactcttctcccctgcagggtctccgcgcgctgtccacgctctccactacgctcgggtccggcgcgggggaggacgagatcgagcgcatccgccgcgagttcgaggacgccaagcggaactacctcagcatccccgtcgccatcaaggacatggccaagatgaacccgcaaggcatttatgtgaacaagaacgtcaaactggatgacctgcaagtctatgggatttgactatgactacacgctgtgccactactacgagcacctgcagtgcttgatctacgatctcgccaagaagcacttggtcaatgagttgaagtatcccgagagctgcttgaagtttgagcatgaccacggcttttcccataaggggctctattatgaccgataaaaggttgccttttg

SEQ ID NO: 24754 - DNA, 319 bp, Oryza sativa
  Clone ID: uC-osflm202102a10b1
tttcatggtcactgaagggcgcaataggaagaagaagcaagaaaatcaaatgaaacttgaagcaaaactccaaaatttgcaggtcgagtggaatggaggctcggatactatggaggaaatacttgggaggatccaacaaagggaagaagccgcagtaaagcgtgaacgagctatggcatatgcattcaatcatcagtggagagcaaggtctgccacaagtcttggaaacttcaactatgaagttggcaagggtggctgtggttgcagctttatggaccttatgtatcgtgttccggtcatgggagtcctgatcacctgt

SEQ ID NO: 24755 - DNA, 402 bp, Oryza sativa
  Clone ID: uC-osflm202102a11b1
ttttgcttcgccagaatgaccaccttgggctgggttatcagctaagatgggttgtccatcatcatgcccttaatgaaggtcatgatcattatgcacctgtggagagttccgagcgaggcacatgcggcgcacctcagaaatagctttcatacacctgaaggagtgaagcatgcaaggaagcaagtgacattattgtttaaatcgtttggaggaaccatcgcatggtcgctcttccagtggatcttcgcctctgggccgggctgtggcttcaaattcttccccacatttggcctcgaggcatataaacacggattctttttcgatttcaccatggccaatgttggcattggcatgaagtgcccgtacatgaacgcgatcttcgtattcaattggcaccatcat

SEQ ID NO: 24756 - DNA, 497 bp, Oryza sativa
  Clone ID: uC-osflm202102b02b1
ataggtagccgccaaaagaatgggatggcttcatcaactgaaagtcgccacgtcaaatgggcccctgacgtgtatgaccccccagtgacatctgtatgtcattcagtgaataacagctaccagcgtcggtccaaatcccggaagaaggacaagaataagcagaagcagaaacaaaagcaaaagggtaggtccaagaaaaaccaccagaatgctatccagagttcagcagtgctccaagctcctggcgaatttgataggctcaaggatgctgaaaccacaagtagtaattcagcaccagacgatctcaacaaacatgagaccgatatattggattatggcatcagcagtcaagacgccaaatgtggaagcagctttttgcgtgaatcggctgctaaaatgcatttctccactgctgaggcttcctgaaagaaaggaaaatgagtcctgcggattctcccttggtatgtaaatatgatggatgtgtagataaataaaat

SEQ ID NO: 24757 - DNA, 375 bp, Oryza sativa
  Clone ID: uC-osflm202102b03b1
ttattgtttcgatccaaatggcatcccagataccgattttctttgtttggaatgctggaattttctgcagattcctgcaagatttgaattgtttggtgtaaaattctgccatgccatggatgtgctaattaacttggacatggtttgattattatccccagggtctccaattgaggcgggcggtggcaggtcaaggtggcgattgacaaggcgggaggggatccatcggttggccggccggtcgtcgacgccatggcggtgagccagagcgcgcagctcggcatggccaccgcgttcttcggggcgctgtccttcctcttcgcgatcctcggcgagctcaacaagtcgccgcacgggacgccgatcaggggcagg

SEQ ID NO: 24758 - DNA, 226 bp, Oryza sativa
  Clone ID: uC-osflm202102b05b1
gtactctcgtgctccgtagagtcgccgccgcgcgcacttagttcgccgccgccgccggccgtcttcagccacgccgcgccgtcgcttgcgtcgtcgccgccgcttgccgccgccgccgttaggtgcgccgtggtgaggagaacctcggccgcccgtcccccttcgccgccgaccaccggagctccgtcgtcgccgacaagtcgagccgtcgtcgctcgtctttttg

SEQ ID NO: 24759 - DNA, 292 bp, Oryza sativa
  Clone ID: uC-osflm202102b06b1
tttcctctttgcccagatcgagcgaatccaatccaccggcgaatcgaatccgcgatggcgacccacccggcctccccggtcgccggcggcgagaaggccacgccgccctccacgccgccgccggtgcgcctggcggggggtgcggcggcggtgatccagtccaactcgccgcggttttctatctcctatgtgtgggcatgctaccatggaagctttttgtcttttccgacgtattgtcattagctatgccacggtatacttagagattaatggtcatctactcagtggtctt

SEQ ID NO: 24760 - DNA, 342 bp, Oryza sativa
  Clone ID: uC-osflm202102b07b1
tctgtaaaatgctgatttagatgcttgtgtcaaatcatttgctactatagacaaattggcccttgttaatgtggaaggaactggaatggctggtgttccaggtacagcaagtgccatatttagtgctgccaaggatgttggagctaatgttatcatgatatctcaggctagcagcgaacactcggtatgctttgctgttccagaaaaggaagttgcagcagtctcgacagccttgcatgttaggtttcgtgaggcattagcagcttggaaggctatctaaggtcgaagtcattcttgggtgcagtatttttgctgttgttggcttgaggattgccagttttt

SEQ ID NO: 24761 - DNA, 463 bp, Oryza sativa
  Clone ID: uC-osflm202102b08b1
tcgattaaatcatccatcgccgcttgcgactgcgagcggcgcctccgccggcaccaccgccgtctgccaccgccaccgccgccgtctgccaccgcgcctccgccgtcgccctctgttgtcgacgttctactcccttggatctacacacacctttctgtttcgctcctgatccatgcccaaatcttgtatattacttgcgcctcaaacatgtttgggttgacgtcttggtttggttccattctttttgttattttttttttcttcttttttttttttttttttttcttttttttttgccatgtctttttcttttctttttgtattatttttctttttttatttgtttttattgttttttgctttctcatttttttttttcttttatcttctttctttctcttttcttttttctttttttttttgttatttttcttctttttttctccttattttatattttact

SEQ ID NO: 24762 - DNA, 94 bp, Oryza sativa
  Clone ID: uC-osflm202102b09b1
tcgatacaagccagctccagccacacgagcctagtgcaggtagatacaatggcgtccaccgcctctttcatgctcgccgtcttgctggcggagg

SEQ ID NO: 24763 - DNA, 109 bp, Oryza sativa
  Clone ID: uC-osflm202102b11b1
gtccgccgctctcctccgcgccgccacccgccggcgaatattactctcccgggccaccgaccgacgcgtactatgcagatcggcggcgagaaaggcacgcatcctttaa

SEQ ID NO: 24764 - DNA, 313 bp, Oryza sativa
  Clone ID: uC-osflm202102c01b1
gcgcgacccgtccgatcggatctagagcggccaccttctgggcctggttctactccccccgatcggatcggcccggctcctcctcctccgccgccgccaccgccgccgcagataggagaagatggccgcacttgataccttcctctttacctcggagtctgtgaacgagggccaccctgacaagctctgcgaccaagtctcagatgctgtgcttgatgcctgccttgccgaggaccctgacagcaaggtcgcttgtgagacctgcactcaagacaaacatggtcatggtcttcggtgagatcactaccaaggc

SEQ ID NO: 24765 - DNA, 157 bp, Oryza sativa
  Clone ID: uC-osflm202102c02b1
tgtacctgcaatgctgccgctgcggatgccaagatcaggaaggttctgggctgccttgaagaggagtactgcatcgagaaggtggagtacgacgagaagaacaacagggtgatcgtgctcggttagttcgactctcatattcttgttcaatattatt

SEQ ID NO: 24766 - DNA, 497 bp, Oryza sativa
  Clone ID: uC-osflm202102c04b1
tttccatcacctcaacctcatgaccatcgccgacactgatcacagggttcgacaagtgcgcaattacgccgacctgtcgaaattatgtgatgatacatttgccaaaatgattcaaagcgggggtagcccggaagaactctatgacactgtatgcaagcaggaggttgaaattgttctgacagcttatccaacttaaattaatcggtggactttgcagtacaaacaccttagaatagctcaccaattggaattcatctaacgtgctgttctttagctcgtggataatgcaattcttttctgttgatttgttatgagatattttttgttttccgtccaacttttgttgcttgtcatcctttattcttttaatgcttgctatctttataatttgccaccatcttctccagctacctcggtattaccgccaccatgatatacgcgcaacacctcgccgtcggccttccggacccgccggtcgaccttctttaccccggtgt

SEQ ID NO: 24767 - DNA, 156 bp, Oryza sativa
  Clone ID: uC-osflm202102c08b1
tcgtagaaccaccccgacaagggcggagaccccgagaagttcaaggaattggctcaggcttatgaagtcctgagtgaccctgagaagcgtgaaatctatgatcagtacggtgaagatgctctcaaggaggggatgggtcctggtggtgttaattat

SEQ ID NO: 24768 - DNA, 159 bp, Oryza sativa
  Clone ID: uC-osflm202102c10b1
tttcgcctcttctccccctctcctctcctctcctctcctctctgcgtgtgcatctctcgattccgatgccgccgccgctcgaagcgcgagactacatcgggctcgcggcgtccccggcctcgtcctcctcctcctgctgcgcgtcgacccccgtcgccg

SEQ ID NO: 24769 - DNA, 494 bp, Oryza sativa
  Clone ID: uC-osflm202102d01b1
ttaccgttaaggtccacacctcttctcgcaaccacttgagccactcgcaagtctcaagccaaaatcatatcacagtcgccatggaactctcctcaacctcagcttctctcctgctcatcctcctgctcaccctcgtctacttcctctacctgcaccaggatcccaagaagaagcctcgcacccatggactcaagtcctaccccgtggtcggcacgctgccgcatttcatcaataacaaggaccgtttccttgagtggtcgaccggcgtcatgaagcgcagccccacgcacaccatgtcgttcaaggagctcggactcaccggcggcgtcatcaccgccaacccggccaacgtcgagcacattctcaaggctaactttggtaactaccccaagggcgagcttgccgtgtccttgctcgaggattttcttggccacggcatcttcaattccgacggcgaacagtggctatggcagcggaaggccgccagttacgag

SEQ ID NO: 24770 - DNA, 491 bp, Oryza sativa
  Clone ID: uC-osflm202102d02b1
ttgattttctcgtgctgcacccgctctgctcgcggcccttcaccgccggccgaggaagcgtacgatgaagttgacaagagccgaaggacgacggcgacgatcaagcggcagcggcggccggtcacggaggtgagctcgagacagacatggaaccccttctccggcgccgtcagccgctacaaggtgcacgtggctttgacggaagcctttgtgtacgagttcgggaggaggcggtggttcggcttcggccagacgagacggttgttggtcgcggagacgacgacgacgacgacggcggcgaaggggagagtacggcgagcaggcgcaccggcaggtcatcggggaaggatccggagcaaacctagcgacggcggtggcacggctgccgcggtcgtcgacggccgagaggaggagagcaccaatgtacacttacacctcctcgtggaggacgagatcaggatgtcgtcgtcgccgcctgcgctgccggcggt

SEQ ID NO: 24771 - DNA, 501 bp, Oryza sativa
  Clone ID: uC-osflm202102d04b1
ttaatttacctcctccacctcctcctcctcccgccggtcggatcggcccggctcctcctcctccgccgccgccaccgccgccgcagataggagaagatggccgcacttgataccttcctctttacctcggagactgtgaacgagggccaccctgacaagctctgcgaccaagtctcagatgctgtgcttgatgcctgcctcgccgaggaccctgacagcaaggtcgcttgtgagacctgcaccaagacaaacatggtcatggtctttggtgagatcaccaccaaggctaacgttgactatgagaagattgtcagggagacatgccgtaacatcggttttgtgtcagctgatgtcggactcgatgctgaccactgcaaggtgcttgtgaacatcgagcagcagtcccctgacattgcacagggtgtgcacggccacttcaccaagcgccctgaggagattggtgctggtgaccagggacacatgtttggatatgcaactgat

SEQ ID NO: 24772 - DNA, 419 bp, Oryza sativa
  Clone ID: uC-osflm202102d06b1
ttcctgttttgctgcacttggcttgtgctctgttatgatttctttgcgacgatgggcaggcacagcttgcctggggcaacgagggaggtggtctgggtgtgcactaccatcgtcagagaccgatgtggaagcgcacaaatacaatgcggagaacaattacatggacttgatcacggacaccggcatcctgggcaccaaagggaggccgacccagatcaccttcacccagcctacctacaggcagacctacttctgcttggctacctgccgttgcatgctacctgtcggctcatcggagactttctggcgagcaccataggactgccggttctgccttctcagagcactacgagcgcctacattaataagggagcgaacatgcttatcactgcagccgcctgcagggacgccaactaatt

SEQ ID NO: 24773 - DNA, 489 bp, Oryza sativa
  Clone ID: uC-osflm202102d08b1
ttcaggaatgctgaagaggaagcccttgctctggtccaaatggagaaggcaaagtgcagagccgcactggaagcagcagaggctgcacagagaattgcagagctggaggctcagaagagactgagagcagagtggaaggcgaagcgcgaagccgaggagaggaagagagcaacagaagcaatgaacaacactgatttaaggtacaggaggtattccattgatgacattgaagctgccacccataagtttgacaaggcactcaagataggggaaggtggatatgggccggtgtataaagctgtcatggatcatactaatgtcgccattaaaatcttaaggccagatgcatcacaagggaggaaacagtttcagcaagagatagaagtgcttagctgcatgaggcatccaaacatggtgctgctgctgggagcatgcccggagtacgggtgcctggtgtacgagtacatggactacggcagcctggaggac

SEQ ID NO: 24774 - DNA, 465 bp, Oryza sativa
  Clone ID: uC-osflm202102d09b1
agttgatcccagagtggctcagctttgtcaagggcattgttgattctgaagaccttcccctcaacatctcacgtgagatgctccagcagaacaagatcctgaaggtgatccgcaagaaccttgtgaagaagtgcgtggagctcttctttgagatcgctgagaacaaggaagactacaacaagttctacgaggccttctccaagaatctcaagcttggcatccatgaggactccaccaacaggaccaagattgctgagctcctgaggtatcactccaccaagagtggtgatgagttgaccagcctcaaggactacgtaacccggatgaaggagggccagagtgagatctattacatcactggtgagagcaagaaggctgttgagaactcccccttccttgagaagctgaagaagaagggatatgaggtcctgtacatggttgatgccattgatgagtacgctgttg

SEQ ID NO: 24775 - DNA, 497 bp, Oryza sativa
  Clone ID: uC-osflm202102d10b1
attcgatccccaaattccccgatccccgcaggcgctcctgcgactcgtaggtctcgtcaagtcggcggcgacgactttgatctctattcaagatgcagatctttgtgaagactctcactggcaagaccataacccttgaggttgagtcctcggataccattgacaatgtaaaggccaagatccaggacaaggagggaatcccaccggaccagcagcgtctcatcttcgctggcaagcagcttgaagatgggcgcacgcttgctgactacaacatccagaaggaatccaccctccaccttgtcctccgcctccggggaggcatgcaaatctttgtcaagaccttgactggcaagactatcacccttgaggttgagtcttctgatactattgacaacgttaaggcaaagatccaggacaaggaagggattcccccggaccagcagcgtctgatctatgctggcaagcagctcgaggatggtaggacccttgctgactac

SEQ ID NO: 24776 - DNA, 472 bp, Oryza sativa
  Clone ID: uC-osflm202102d11b1
gtgaaaccctaggcttggttggctccaagcttcgcagccatcgccgcctcggcataaacccttctactccgcagccatcgccgcctcgagctgagcttgagattcgcggggggcgcagcaatggccgggaagaagaggccgccgaccgcgctctccgagcccgaagccgccgccgccgccgaggaggaggaggccgcagccaagacggccccggctgcggaggcgccagcgaagaagaagaagctggccatggagcggaagaagcagcggaaggagattgacaaggagaggcaccgccagtccgctgaatcggacgccgctgccgctaagccgaagcagccggcggaggtggcgccggaggctgcggctgcggctgcggcggcgcccgtggctcctccgcctgtgattccggtggtgtcggggcctgggcttcacatgaacgtgttcagggacctggcttcgcctgaggcgt

SEQ ID NO: 24777 - DNA, 437 bp, Oryza sativa
  Clone ID: uC-osflm202102d12b1
gtggccggcgttcctgtacccgccgccggcgcgggcgttcgtggcggcggcgtcggtggcgcagttcgcgttgctggcgaacgccgggctcggggagctccgcggcgagcacatggcctactccaagttctggcaggtcgtcgccgggaagaagaagaacggcggcggcggcggcggcggcgcgctgctgcccagccggcaggggatgctggtggcgtacgtgccggcgttcgtcgccgcggcggcgtcgttcgccgtgcccggcgccgtggtgggcgtgcgcgcccaggtcctcagcgccgcgctcaccgtccactttctcaaacgaattctcgaggtactgttcatccatcagtacagtggaagcatgccactcaacacggcggccaccatctcctccagctacctcgtcatcaccgccaccatgatctacgcgc

SEQ ID NO: 24778 - DNA, 489 bp, Oryza sativa
  Clone ID: uC-osflm202102e02b1
ttctcgtcttctcccgtcttctccttcgagttagctacctccttattcaaccatgggtaaggagaagacgcacatcaacatcgtggtcattggccacgtcgactccggcaagtcgaccaccacgggccatctgatttacaagcttggaggtatcgacaagcgtgtgatcgagaggttcgagaaggaagccgctgagatgaacaagaggtccttcaagtacgcgtgggtgcttgacaagctcaaggccgagcgtgagagaggtatcaccatcgatattgccctgtggaagttcgagaccaccaagtactactgcacggtcatcgatgcccctggtcaccgtgacttcatcaagaacatgatcacgggtacctcccaggctgactgtgccgtgctcatcattgactccacactggtggttttgaggctggtatctccaggatggccagacccgtgagcacgctcttcttgctttcactcttggagtgaagc

SEQ ID NO: 24779 - DNA, 513 bp, Oryza sativa
  Clone ID: uC-osflm202102e03b1
cggccgggtcgggcccaggccacccgtgtcgttaacggcccccaacgcactcgcggcgacgttgttgcccttcttgcacggaaggaagagcggcggcggcggcgtgtccgtgcacgccggggcgccttcgccttcgcgggcggtggcggtggtggcgcggaggttgtgggggagcgctagcagtagcaggaggatggtggtggcggcggcgactgcggcggagatggcgcccgcgcgagcggcgaggaagggaagccgttcgtggaggagatgagggcggtggccatgcggctgcacaccaaggaccaggccaaggaaggggagaaggagccgcaggcgccgccggtggccaggtgggagccctccgtggacggctacctccgcttcctcgtcgacagcaagctcgtcttcgagacgctcgagaccatcgtcgaccgcgccgtcgtcccctggtatgctgagttcaggaatactgggttggagagagcagatcactgaagaggatctggaatg

SEQ ID NO: 24780 - DNA, 492 bp, Oryza sativa
  Clone ID: uC-osflm202102e04b1
ttcacgcgtccggggcggggtacaacctcaggaactactgcatatcagtcaacctctctgggccaaggtactgccctttcacagccattgtcgacatatgcaccaactatgtcagtgacgatgcctcctgctggaaggaatgatcagttttctggtaggcatggattggagtctgggttgggaaagccagaagcacgtgatagctggcaaccatggaatgctaacaggcatgttgacaaacatctctggagggatgactcgacataccaacaaacaaccaacggtcatgcatatccgcaaccttggaaggatgttaattttcttcaagcaaggggcacagaaacagaaatacccagcaggtttggaggaccgcaactacctaggcagttccaagctgagactcatgcggattatctcttgcacaaccacaggggccagtggcagaagaatttccgcaccttgacatcataaacgatttgcttgaggaggaac

SEQ ID NO: 24781 - DNA, 497 bp, Oryza sativa
  Clone ID: uC-osflm202102e05b1
ttccctcctcgctccccgccgccgccgccgttttcttggagaggagaaatccgtaggctcagaggatttttggtagtcttgtttcgtgatattcgtgaagagggggggagctaaggggggattcgtaagatcagaattggatcacgcgggggcgcgctcgggatcgggggttccaaacacagcttcttcgttgaatttaagtggatgtactaatggagtcaaagggtggcaaaaagaagtctagcagtagtcgttccttgatgtatgaagctccccttggctacagcattgaggacgttcgacctgccggaggcgtgaagaagttccagtctgctgcttactccaactgcgcgaagaagccatactgatagccctttcggcttctccatcctagtagtttaggatttcttgcaattccattttggcacttttcttctgacctatttctctggctgctgcttcctgataatcgaccagttctctagtcttgctccctg

SEQ ID NO: 24782 - DNA, 489 bp, Oryza sativa
  Clone ID: uC-osflm202102e06b1
ttgcgagagcctgcccggcgctcccatgccggacgccatcgtcgagctcctccaccatgagcacggcgttgctagcgccggcggcaaggccaacggcggcggcgacggtccaccgccgccgatgaacttcaactacgacgactacagggccctgcctcggagcgacgccccttccccggatgcattgaaccgcgtcgccgccgtacagaacgccgacgagaacggcgtgtcctcgccgacgtcgtcgccgccgacggtgttcttcctcgaggacgccgtgcgcgtcggcgagagcctgcccctaccgcgaccggcggccgacgcaaccgcgcgaggcggtgaacggccacggacttggcgcctctgcggctgtacatcgctctgttacagattgctagtggggcttcctgttagaagggcgtgctagggtgtgctcaggtttgtatggagagtggcgctaaaggctgtgaggttattgggagtgggaag

SEQ ID NO: 24783 - DNA, 488 bp, Oryza sativa
  Clone ID: uC-osflm202102e07b1
ttaacgcgcctaccacgcgaggcgcgggggcggcggcgggcaccatgtccgcggcggtgtgcggcaaacgggcctcctccttcttcgaggacctcccccattcgccgtcctccccgccctccaagcgcgcctgcttccgtggaggttcctcgccctcccgcccgctcgccgacccggccctcgtcgcccagatccgcccgcggttcccctccgtcggcctcgaggttattgagaacgcgttggaggaatgtgaaaacgattttgattcagcaataaagttcttgttcaatttgcatgtaggacccacagaatgtaatgtggatcctatttatcaatctccatcaggaatgtctactgagcttcaagtggctgatgaaggtattttggctggtaatgaagctgctgtacctataggaaatgctccctgcgctgataacttttcatcaagcagcacccagtgggttgagattcttgtgaacgagatgact

SEQ ID NO: 24784 - DNA, 494 bp, Oryza sativa
  Clone ID: uC-osflm202102e08b1
ttaccgatctgccatagttgcaagtgagctagagctcagttaagaggaggacgaagaatgcggagatgacgcccaccatagctgcgatggtcatgcttaagccgtccaagatcgtggcgcggacatcgccggcgccgtccgggagcggcagggtgcctagcatctcgctcaagagcctggccaagaagggcatgtcggtgtcgtcgtcgtcggcggcggcgcccgtggcggcggcggcgatggcgggcgcgttcttctcggcgctggcgtcgacggacgcggcgctcgcggcgcagcagatcgcggacgtcgccgcggcggcggcgggcgccgacgacaaccgcgggctggcgttgctgctgccgatcgcgccggccatcgcgtgggtgctctacaacatcctccagccggcgctgaaccagctgaaccgcatgcggtcggagcaggtgctcgtcgccgggctcggcctgggcgcggcggcgggtgccgggctc

SEQ ID NO: 24785 - DNA, 495 bp, Oryza sativa
  Clone ID: uC-osflm202102e09b1
tttcgtttagacacctcatatggaagctctgcgacggggtgctccacatatccaatatttcgcatgctcccaccatctggtaaggagaagaatttcatatattgccacctacatcctcagataagggtgtacgaggcagagccaaagcctgtggttttaggattaggtggaacgattggaaatgagagaatctttttagatgaggacttctctaaacttacagttcgccatcatgctgttgataagacttaccaacatggctccctcattcccaaccagggttatttacctgttgaggcttcaatacttgatgttgaagcatggggccttggtggagaagcaacgagacggcaacaggatatgtacaagaagagggaggatattatctcagagcagcgaagaacagttgatctcaaaacatttggcaattgggaggactctccagagaaaatgatgatggacatgatttctgatccaaatgcagctcgacgggag

SEQ ID NO: 24786 - DNA, 488 bp, Oryza sativa
  unsure (1)..(488): unsure at all n locations
  Clone ID: uC-osflm202102e10b1
gctagcttagctcagctcaaccacatctcgaactaaccaactaagctaaagctaagctagcttcaccgtcatcctccactgacacatggggagcttggacgccaacccggccgccgcctacgccgcgttcgccgccgacgtcgagcccttccgcccgctcgacgccgacgacgtccgctcctacctccacaaggccgtcgacttcgtctacgactactacaagtcggtggagtcgctcccggtgctccctggcgtcgagccgggctacctcctgcggctgctgcagtcagcgccgccgtcgtcgtcggcaccgttcgatattgctatgaaggagctcagggaggcggttgtccccgggatgacccactgggcgagcccgaatttcttcgcgttctttccggcgacgaatagcgccgccgcgatcgccggtgagctcatcgcgtcggcgatgaacaccgtcnggttcacgtggcangcggcgccggcgg

SEQ ID NO: 24787 - DNA, 489 bp, Oryza sativa
  Clone ID: uC-osflm202102e11b1
tttcgatcaaattccgcgcgggttgggaagagcgagctcgtgaggagagcagagggaaagcgcgagggggaaggaggaggaaaggtgcacaaggtcagactaagtttgcgttgaagaacaaaggagaggaaaaatgtcgcctgctgaggcatcgtgtgaggagaatgtgtacatggcaaagcttgccgagcaggctgagcgttacgaggaaatggtcgaattcatggagaaggtggcaaagaccactgatgttggtgagctcaccgttgaggagcggaacctgctttctgtggcttacaagaacgtgattggtgctcggagggcatcgtggaggatcatctcttctattgagcagaaggaggagagccgagggaatgaggcatatgttgcatcaattaaggagtaccgtagcatgattgaaactgagctctagcagatctgtgatggtatccttaagcttctggattcccaccttgtcccatctgccac

SEQ ID NO: 24788 - DNA, 493 bp, Oryza sativa
  Clone ID: uC-osflm202102f03b1
agagatttctaatccacaccctctcaagccagcgcatggcggagcgcggcggcgagcgtggcggcgagcgcggcgggttcggccgcggcttcgggcgcggcggtcgcggcgaccgcggagggcgccgtggcgggcgccgcggcccgcgccaggaggaggagaagtgggtgcccgtcaccaagctcggccgcctcgtgaaggaaggcaggttctccaagatcgaggagatctacctccactccctccccgtcaaggagcaccagatcgtggagaccctcgtgccggggctcaaggacgaggtgatgaagatcacacccgtgcagaagcagacgcgcgccgggcagcgcacccggtttaaggcgttcgtcgtcgtcggcgacaacaacggccacgtcaggctgggggtcaagtgcgccaggaggtggccaccgccattcgcggcgccattatactggccaagctgtccgtggtgcccgtcaggaggggttactgg

SEQ ID NO: 24789 - DNA, 492 bp, Oryza sativa
  Clone ID: uC-osflm202102f04b1
gtccgttttcgactccctcgctcgcgccgccgcccgggcctcgccgtcgccgccgcctccgcccccgccacgccgcacggtgtcatggctcgacatcaccgacgccgccaccgccgacaacgacaacgacaagagcaaggatgactcctcgctcgacgccctcctcaagccgcccaggccggcgagcggcggcgccaccgtgaagcggagcgcgagcttctgcctcaagagctcgacgtcgctgctgctctgcaccgaggggctcgggtcggagagcaccgtggacgccgacgacatggtcaaggacggcgacggcagcggcgccgtcgtcgacagcgggatggacgtggacgacgacgccagcgacgtcgccgccgccgtggcgggcgacgacgccttcggcgccggagggaaggagaatcggccgccgacgccgccgccgtcgttcccgccgccgatacggacgatcgggcgcggcgggaagccgagtgt

SEQ ID NO: 24790 - DNA, 487 bp, Oryza sativa
  unsure (1)..(487): unsure at all n locations
  Clone ID: uC-osflm202102f05b1
tttagattgtatcggcaggaagccggttattgggtttggaattttcttcacgctggtatttaatactttgattgggctaagcacgcagtactggatggcaataactacacgttttcttgttggatcattgaatggtttacttggcccaataagagcttacactactgaagtttgtcggcctgagcatcaagctattggattgtcacttgatagcacatcatgggcaatgggtcttattattggatcagttattggtggatatcttgcacagccaacggaaaaatatccaaagttatttcctggcaactcactattcggaaggtacccgtacttattaccttgcttatgtatatcggncttctgctttattatttatataagctgcatgtggctcccggagacactgcatgatctcaaagtccacaaaaaggactatggaccaattgaatctccgttgcacattttgccaaatctgaagaacttttga

SEQ ID NO: 24791 - DNA, 339 bp, Oryza sativa
  Clone ID: uC-osflm202102f09b1
tatcgtatcaacaacatctcgccacgaagaggagggcgagagcctgcacgagttcgaaatccccaatccgggttccctgcttctcttcgcgccaagatggcggctgcctgggcggcggtggtggccgtgatgctcctccttgcgcaggtgtcagccgcggctccggtgatggggcctgccttcctctgggcgcccaagaactacggattctcttctgatgaggctaaagaaatagtccattatcagacagtattcccgaagagcttagtgaaatctgttcttgaagaaggtgcttggtcaaacttggtgtgttcaagggaggatcatgcatagagtgtt

SEQ ID NO: 24792 - DNA, 487 bp, Oryza sativa
  unsure (1)..(487): unsure at all n locations
  Clone ID: uC-osflm202102f10b1
ttcacgttgccaccacaggctacgcaaaattctctcccttcctcctccaccacctccactccgacgatcctcctcctgatcctgtgccggccggcgatggcgtaccggttgctggagctcacgctggtctccgcgagcgacctcaagaaggtcactctcttctcgcgcatgcatgtctacgccgtcgcctccatctccgggagcaacgtccccatgcccatgcacggcacccacgccgaccgcaacggcggcagcaaccccgcgtggaacaccgtgctccacttccccgtccccgcccgcttcgacacccgcggcctcgccctccacgtccagctccgcgcccggcgctccttcggcggccaccgcgacgtcggngacgtgttcgtgcccctcgacgaccatctcgccggcgcgcacgacggcggcgagccgaggcctgctagctaccaggtgcgctcgcccatgtncgcccgcgcgcacggcacgc

SEQ ID NO: 24793 - DNA, 490 bp, Oryza sativa
  Clone ID: uC-osflm202102f11b1
atgcattcgaccggcatggagatggaggtggaggtcgccggcgacgacgaggcggtcccggaggcgccggagcggtccgtcgtcctcatctccgccggcgccagccactccgtcgccctgctcagcggcggggtggtgtgctcgtgggggcgcggcgaggacgggcagctggggcacggcgacgcggaggaccggccggtgccgacggtgctgacggcggcgttcgacgacgcgccggggggcgtcgcctccgtcgtcatctgcggcgccgaccacaccaccgcctactccgacgaggagctgcagctctacagctggggatggggcgacttcgggaggctgggtcacggcaactccagcgacgtgttcaacccgcagcccatccaggcgctccagggcgtccggatcacccagatcgcctgcggcgacagccactgcctcgccgtcaccgtcgccggccatgtccacagctggggacgcaatcaaaatg

SEQ ID NO: 24794 - DNA, 488 bp, Oryza sativa
  Clone ID: uC-osflm202102f12b1
ttatcccccacccagcgactcgccggaaccctagccctagatcccgcgcggcttgccgccgtgctagccatggcgtccctcaaggagctcctcccgacgcccaaggcggcggcgtcgacgttctacgaccacagcagcgacccgtggttcaaggagcggtatggcggggagtcggcgcaatccgacgcggcggcggcggcggcgaagccttcgggccccgccaagcccgtgccgccgtacgggaagcgtggcgggttcgtgccgcggcggccggaggacttcggggacggcggcgccttcccggagatccacgtcgcgcagtacccgctcggcatgggccggcgcgacgagaagggcggctcgaagatcctcgcgctcaccgtcgacgccaagggcagcgtcgccttcgacgccgtcgtgaagcagggtgagaacgcctctaggatcgtttactcaaagcacagcgacctcgtgcccaagattgccac

SEQ ID NO: 24795 - DNA, 313 bp, Oryza sativa
  Clone ID: uC-osflm202102g01b1
cttaatgttgctgctgctaatcgcaactactgccgtggaccatggccggtgagactggggtcctaaagggcggtatgacatgccaagggagtgctagagccggacggggaggtctcacaaaaatggaaggtgaggagacctttgacatacacatggaacatgcataaggtgacagtaaagggcactgataagcccgaagacgttattgagacggactccacgacagggaagatgaccttctattgtgaggctgcaaaagccgattctgattctgcagctgcagatgcttctgcttgtgcttccgcaacagaag

SEQ ID NO: 24796 - DNA, 469 bp, Oryza sativa
  Clone ID: uC-osflm202102g02b1
tttttattatgatcgaagtaaacaaagtgacactgaaaatttaaaggtcgcatcgataattcaaacgcatggcaaaaaacactcttgatgccacgctatatatacatatggtgatcataacactcccctatcaatttcttcatgtatacataagtaacataactcaagaaaattaagctaaacaaccccctaaaaagacagaaaaaaaaaatcaaaaggaagcctcgtatcaactcaaaaacttttggcgccatcactcttccttggctgcttgacacactcatcatcagtaaccactactatagctatctagctaattaattactacttagaaaactactcattccatcctaaaatataagatatttagactggatttcaattacctaagatatatccaatccgatcaaaaatccttatattctgtgacgagtaggagtattaataagatcgagatggtgttgcatgt

SEQ ID NO: 24797 - DNA, 487 bp, Oryza sativa
  Clone ID: uC-osflm202102g04b1
cgctcgtcgaggttgccgtctccttgtctcctccgctccttgcgccgccgccgcgacgagtcgcggggaggggcggcgatctccatctccatctgaggcgaggagagcaggggaggtgaggggatcctggtgaggtttgtgattactggacaatagaaatatttacacaatatggctggcggctctgctgatgcagtgaccaaggagatggaggcgctactcgttggacaaaatccaaatgcggttagtggagaaacatgcgagacctcatcaaaagaaggcaaagctgcagatagcaatggatctcattcttcaccaccagaagatgatgatgatgaagcgcaggggatggtccatctcaagatggaggatcagaagctgcaaagaagaaaaagaagaaaagcaaatccaaaaagaagaaaggccctcttcagcagactgatcctccatcaattcccatagacgaacttttcccatcaggagattt

SEQ ID NO: 24798 - DNA, 461 bp, Oryza sativa
  unsure (1)..(461): unsure at all n locations
  Clone ID: uC-osflm202102g07b1
ttttggacctcgtcgccacaaccaccatgttccctgaaaccaacaccggcaaaacacaaagcaggggagccggtgaggggcccccgtgcgtgcgtgcggacgtgccatgcgccaagatggcctcgacggtaccggccctgatcgccgacgacctgccgacgaacgtgacgtcgcagatcaccgatgcggtgcgccccaagaccaccagctcggtggtctgctactccccgatgatgatcaccaccaacggcatctggcagggcgtcaacccgctcgagttctccctccctctcttcatcctccaggtcgccgtcatcgaagacaccacccgcctcctcgtcgtcctcctcaagcccttccgccaaccccgcgtcatcgctgaaatcctcgccggngtggtgctcgggccgtcggtgatggggcaggtggaagtctgggcgaccaatgtgttcccgcagcgc

SEQ ID NO: 24799 - DNA, 490 bp, Oryza sativa
  Clone ID: uC-osflm202102g08b1
ataggaggtcatcacctcgtgtgacaaacgaggaagtccaaaaggctgctgctgctctgaaggggtctgaccaccgccgtgctaccaatgttagcgctagactggacgcacagcagaagaagctcaaccttccagtccttcctacaaccacaattggttcattcccacagactgtggagctcaggagagtccgccgtgagtacaaggcaaaaaagatctctgaggaggagtacatcagtgccatcaaggaggaaatcagcaaggttgttaagatccaggaagagcttgacatcgatgtccttgttcacggcgagcctgagagaaacgatatggttgagtacttcggtgagcagctttctggttttgcattcactgccaacggatgggtgcaatcttatggatcacggtgtgtcaagccaccaattatctatggtgatgtgagccgccccaacccctgactgtgttctggtccagttggcgcagagcatga

SEQ ID NO: 24800 - DNA, 432 bp, Oryza sativa
  Clone ID: uC-osflm202102g09b1
gtgagccagcactgcatcagcatgatgagcagtcgtcttctcaaacgcgcctgcctcctcctcctcgtctcgtcatggctatgctccctctccgacgccaagaggaagacgccaccctcgccgccgccgccgccctcctcctttggcctccccgtccgggcggtgtgcctcggtggctggctcgtcacggagggctggatcctcccctccctcttcgacgccatccctaacaaggacctcctggacggcgcgcagctgcagctcaaggccgtggcggcggacgcgtacctcaccgccgccgaccagggcggcgccgcggcggtcgtcgccaaccggacgcaggcggcaccctccgcctcggagaccttcaagctgtgccggatcaacgagacgacgttcaactttcgggcgtcgagcggtcggttcgtcggc

SEQ ID NO: 24801 - DNA, 465 bp, Oryza sativa
  Clone ID: uC-osflm202102g10b1
gttagaggagacagggagagaagagagagagagagagagagagagagcggaggagagaggcggctcgccggctcgagctcgactgctccccactcgcggccgggagggagggagggggagagaaaggagagaggtgattcgatggaggcgaagggggagaatgacgcgcgggcgccgctcctggcggagcggcggcgcaactcggtcgggtcgatgcgcggggagttcgtgtcgcggctgcccaagaaggtgctcgacgccgtcgaccccgagaggccgtcccacgtcgacttctcccgctccaagggcctccgcgaaggagagaaagaatactatgagaaacaatttgccaccttgagatcctttgaggaagttgattcaatagaagaatccaatgtaatgagtgaagaagatgatattgcgggcaaaagcagagtgagtttgccatgaagatatcaaactatg

SEQ ID NO: 24802 - DNA, 493 bp, Oryza sativa
  Clone ID: uC-osflm202102g11b1
ggaaaatcctcgcttcttctcttccacggggtggttctcctccaatcctttcccctctccctctcctcctcctcctcctccctgcgccttccacttgcagcgattcctcctccccgcccgctcttctcgaaccttctggaaccttcccccatcccccacaagaagcagcagatgggcatcgtcgtcgtcgtcgtcaaccaatcctaggcgacgagcgctgcggcggcgcgcgccatctgctcccctccgccgtgctccggtgctccccgatctgcgcctcccgctccggttggtcggctgtcggaacacgcagctgcaaaaccctagccgagctgcggcgatctcaacgctggcggcgaggccctcctcttcgtcggcgtcgacggaaaaatatggcgcatgttttatttacttccccttgctgtcactgaacacatttcctaaagtcaaggacaagacatggtgttgcagaagaggttggactatggatccc

SEQ ID NO: 24803 - DNA, 491 bp, Oryza sativa
  Clone ID: uC-osflm202102g12b1
gtacagagaaagtactagctagtatattcatgcaaaatcctacctacagtatttattgggttattctctgtccagtgtataagtagaagtgatatggatggatagggtgatgaaggagaggaatcgaagttgggcatgcgtgcgtggagatccatgatgcagtgcacccccgtagtttgttagtaataattaattatgatggcaagtgcatggcatggaaggggccggtccattgataattcgacatgatccagctaataatctgcatgctacacccacacatatgacatgatatgatgcatcaatttcacctactagtgctaaaaccacacacagctcgatcgatagatgagatcaaaggggtaagatgggttgtactaactagtagtaatatacgtaagtgagcgagcgagtatacgttggaaatcaaaagttgtaaaaagtaaaagcaaagctaacactgcaatccaaaacaaagaagaaagaaaaat

SEQ ID NO: 24804 - DNA, 386 bp, Oryza sativa
  unsure (1)..(386): unsure at all n locations
  Clone ID: uC-osflm202102h01b1
ctaaccttttagcttctcagccttttgcctctctttctactctctttcttggccgtctctcttatatccctcaatttaaccatcgagggcggccaaaaaaaagagagaaaggaagagcaaaataacacattacaccatggcgcgattcgtcatcatctccgtcgtcgtcgtcgccgccttcgccgctgccgctgtcgatgaggcccgggttggacctatcgacgtcgctccgaccaacctgatcaccaacccactcggtgccatcatcgacaatggccgcaagatcaccggcgccgtcgtcgacgagtgcgcctggacctgcgatcatgtcngcgcgggtaacaagaagatgtgcaacacgctgaggaagctgcgggggggagctc

SEQ ID NO: 24805 - DNA, 400 bp, Oryza sativa
  Clone ID: uC-osflm202102h02b1
cttctattttgattctgttgaatctctccctggtgaaccattggagccagccgagttgaagccagagaatactagatatgatgcacaaatcagtgtttttggatctaaccttcaaaagaaacttgagcaggctgaaaatatttatggttggtactggggcgcttggatgtgaattcttgaaaaacctagcactaatgggcatttcttgcaatcagaatggaaagctgacagtgacagatgatgatgttattgaaaagagcaatctcagtcgccagtttctcttccgtgactggaacattggtcaggccaagtccacggctgctgatactgctgctatggcaattaatactaagcttcatgtgcaggcccttcgaacagagcaagtcctgagactgaaaat

SEQ ID NO: 24806 - DNA, 500 bp, Oryza sativa
  Clone ID: uC-osflm202102h04b1
ttcctctcttcgtctctctctctctctcgtcgcgttggatttgacgagctcgtcaccaccggctgcggcggcgaggcaggcatccgcactcctcggcgtcgggccgtcgtcgttgtccgctacctggaaaagatggctggtggctttagggtattgcatcttgtcaggccttttctggctttcctgcctgaagtacagagtgctgataggaaaataccatttagagaaaaagtgatctacactgttatttccctattcattttcctggtatgcagccagctaccactgtatggcatccattcaactactggagctgatcctttctactggatgcgtgttatccttgcatcaaaccgtggtactgttatggagctgggtatcactccaattgtgacatctggcatggtaatgcaacttctagtgggatcaaagatcattgaagttgacaacagtgtgagagaggatcgtgctctgctgaatggcgcacagaagttacttgg

SEQ ID NO: 24807 - DNA, 510 bp, Oryza sativa
  Clone ID: uC-osflm202102h05b1
acccaccccaccggttcaaacaggctcaacaggtcagcctattcattgttgatgagcttcatctgattggatctgaaaagggacatgttctggaagtcatcgtctctaggatgaggcgtattgcaagtcatatcggcagtaacatccggattgtggctctttcagcttcacttgcaaatgctaaagatctcggagaatggattggtgctacctctcatggccttttcaactttcctccagctgtccggccggtgccattagaaatacacattcagggtgtggatatagcaaattttgaggcaaggatgcaggcaatgacgaagccgacatacactgctattacccaacatgcaaagaatggtaaacctgcctggtgtttgtgcctacacggaagcatgcaaggttgactgcattggacttgtgtgcatactcgagtgctgagggtggtggaacacctttccttcttggttcagaagatgagatggatgctatcactggtggtatcagtga

SEQ ID NO: 24808 - DNA, 488 bp, Oryza sativa
  Clone ID: uC-osflm202102h06b1
tttcggttaatttcatggacacaacgacgaccagtggcgcctctccctctcctcaccacgacgtctctgctgctcttcttcttcctcgcgtcgacgttcgccgccgacttcgtcgtcgcgggcggcggcggcggcggcggctacgacgacggcggcgacagcgaaggcggcggcggcggcggagccaagatgccgcacgtgaaccacggcaggtacaagtgcgggccgtgggtggacgggcacgcgacgttctacggcgggcgcgacgcgtcgggcacgacggagggcggcgcgtgcgggtacaaggacgccgacgggtacggcgcgatgacggcggcggtgagccccgccctgttcgacaacggcgccgggtgcggcgcgtgctacgagctcaagggggattccgggaagaccgtcgtggtgacggccaccaaccaggcgccgccgccagtgaacgggatgaagggcgagcacttcgacctcaccat

SEQ ID NO: 24809 - DNA, 450 bp, Oryza sativa
  Clone ID: uC-osflm202102h08b1
tttgagggcgtcaacatctccatggttgttcatgaacccagctacactctgtacaggatgttcgacgacctgatacttctagccaagggagggatgacggtgtaccatgggcctgtgaagaaggtggaggagtacttcacggggctgggcatcaccgtgccggagcgagtgaatccgccggactactacatcgacatcctggagggcatcgtcaagcccaccatgagcgccggcgtcagcgtcaaggacctgccgctcaggtggatgctgcacaatggctacgacgtcccccgggacatgctgcagagctcctccgactctgagtcctccttccgagggagcacgagcccggcctccggcgatgcctccgtcgcggccgaggtatggggcaacgtcaaggacatcgtcggccagaagaggacgagtatgactactacagagcactgaaga

SEQ ID NO: 24810 - DNA, 503 bp, Oryza sativa
  unsure (1)..(503): unsure at all n locations
  Clone ID: uC-osflm202102h09b1
tttttgttaccttaatccgcgagagccctgtggtgaattttattttcattcaaattccgctgcttccggtttaaatcttatccaaattccggtgtggagttttaaaccggtcaattgcttctcaatttatcattgtttaacttttttcttcatccgattttcggttcggacgagagctctattgccgtaggagcaggagaagggagcagggagagcgccgccgccgccgccgccgccgcaccggcgctgtgccgacgagatgagcctctcccaccacctccccccgccgccgggagacccctactacgtgtacgcgccgcacccctacccagatccgcagcggcagggggtactcacgctcttcgtcgccggcctccctgacgacgtgaagccccgngagatccacaacctcttctccagccgccccggcttcgaccactgccttctcgagtacaccggccgcgggaaccaggtggtggccttcgtgtcattcgttaatcatc

SEQ ID NO: 24811 - DNA, 497 bp, Oryza sativa
  Clone ID: uC-osflm202102h10b1
tcgtttgactgaagagcaggtgaaagctttaggaattccctaccgtgttggcaaatttccgctgttggcaaacagccgtgcaaaggccattgacgatgctgagggcttggtgaaggtggtggctgagaaggaaactgacaagattctgggcgtgcatatcatggctcccggtgctggagagataatacatgaggctgtccttgctttgcagtatggagcatcaagtgaggacatagctcgtacatgccacgctcatcccaccgtgagcgaagccttgaaggaggcctgcctgcaaaccttcacaaaggcgattcacatttaagttctgttttgcttttaacatccaaactgcttggcttcacaaattccaaaattttgtaataattttggatatatgggatcaaaaagccactgtctatcattttactctcgttcgtgatgctgtgaattgacactagttgccacagccaatagtatatgctattgattccattccc

SEQ ID NO: 24812 - DNA, 498 bp, Oryza sativa
  Clone ID: uC-osflm202102h12b1
tgttcgttatcacggaggacatcctaacggggttcaagattcactgccgcggctggaggtcggtgtactgcatgccgaaaagggcatctttctagggggcaacgccagtcaacctatctgaccgactcaaccaggtgctccggagggcgctcggctccgtcgagatcttcttcagccggcacagcccgctcctctacggctacaagaacggcaacctcaagtggctcgagcgcttctcctacatcaacaccaccatctaccccttcacttctctccccctcctcgcctactgcaccctacccgccgtctgcctcctcaccggcaagttcatcatgcctccgattagcacgtttgcgagtttgttcttcatcgcgctcttcatctccatcttcgcgacgggcatcctggagatgaggtggagcggggtgagcatcgaggagtggtggaggaacgagcagttctgggtcatcggcggcgtgtctgcgcacctgttcgcgg

SEQ ID NO: 24813 - DNA, 66 bp, Oryza sativa
  Clone ID: uC-osflm202103a05b1
tgtttaaacaaaccacctctaactcccagatactctggtgctgccactagcccactaccatggatt

SEQ ID NO: 24814 - DNA, 117 bp, Oryza sativa
  Clone ID: uC-osflm202103b05b1
tcttatttgtcttcctctcgccgctgattcgatccgatccgaaccgaaccaaggggtggggaagcaatgacgacgaataggagcgtggggactctggatgaggcggatttgaggtgg

SEQ ID NO: 24815 - DNA, 128 bp, Oryza sativa
  Clone ID: uC-osflm202103b09b1
acgcttaccaccacgtctagggttccgtcgctcctccggccgtcgacgacgtcgtcgccgactctcctcgatctcctttccgagtcgtcataattggttgtggttgtttaggaattatgcattctttt

SEQ ID NO: 24816 - DNA, 231 bp, Oryza sativa
  Clone ID: uC-osflm202103b10b1
attccccgagcgccgcgcgcctcgacctcccctggctccctccacgagccggtgccccccggatggactcggctcgctcgcttcacgctcgtggatgatatgaacctagactcagcttgacctcctggagcacgctcggaaggatgacctacccagatccggatcgccatgacgaggaatacgggctggagcagtgtaataggtaaatttggatgaaaagggacctgagag

SEQ ID NO: 24817 - DNA, 91 bp, Oryza sativa
  Clone ID: uC-osflm202103c10b1
tttatgctcgatttctccccctctcccacgaaagatggcgtcttacattgttggttacccttgcatggtccccaagagggagttcaagtat

SEQ ID NO: 24818 - DNA, 398 bp, Oryza sativa
  Clone ID: uC-osflm202103d05b1
cgacacgacagatcggcatcggcgggcagggtagagtgagatggccgccgccaccgccgcggtttatgcgctgttgatggcgtcggcgctcgctggggctgcggccggcggcgacatcgttcaccacgacgacgaggcccccaagattccaggatgctccaacgactttatcctggtcaaagtgcaaagttgggtcaacggcaaagaggatgatgaggatgttggtgttggtgctcggtttggcctcgaaaaatgtgtcccaaggagaaacatgcaaatcgaactagacttatgttggcagatcctattgattgtggcactttttccaaaagaaaaggttttttggagatattccttttagtccaaagaggggaaatgcaagttcacgaaaaaaagca

SEQ ID NO: 24819 - DNA, 410 bp, Oryza sativa
  Clone ID: uC-osflm202103d06b1
attagatcaaaagttttggagcaaaggctggagttgttttgaatcctgcaacccctctcactgcgatagattatgtacttgatgttgttgatctagaattgattatgtcggagaatcctgggtttggtgggcagagctttattgaaagctcagtgaagaagatttgtacagttgagaagattattgtgcagagaagggtgtaaacccttggattgaggttgatggtggaggttggttcccaaaaaacgcctacaaggtcattgaaatcttggggtcaactgccaattgttgcttggtacaagccgtttttcgggtgctccagaactaatgcagaaatcctattcaaagggtaatcaaggacctgcctaaaaattttgtggctgtaccagcatagaggatcctaaagtagt

SEQ ID NO: 24820 - DNA, 90 bp, Oryza sativa
  Clone ID: uC-osflm202103d08b1
atcgccggcgaatcggcggcggcgactactaggacgactaggaggccatagggttgtggaggaggggtgggggacctgtctttgatgctc

SEQ ID NO: 24821 - DNA, 335 bp, Oryza sativa
  Clone ID: uC-osflm202103e04b1
tgaaaatgcacacaccgtaaaaaagaagctgcagattgcgcttaatattcccactgaagagagttcactgacatgtggtgatcaacttttgaacaatgatctcagctacattagcaatgacttctctattggcttctaaactaggaatcacatgcactagaaagttgtcttcacaaccttgcctcttctacaaaatggaaaaggaatgttcaaccactggtgattgaatagtagatagttatttgaaaattcgtggggtgtgccacaaagccccctttcttggcatggaaattgaaagtcaaatttcgtttgaatggataattaggtttcggggg

SEQ ID NO: 24822 - DNA, 372 bp, Oryza sativa
  Clone ID: uC-osflm202103e05b1
gtgaggtcaatttgagcttccatctcgcatctctctcaggctcaccgtcaactcctcccttaatctctcatgcttatgctcatggcagccgacgtctccattcacacgccgcctctctgctctctgctctccctccacacctactgattcttcttccccttcccttctccgctttccctgccttgcaaatccgccaaagggctcatcttagtgttcctcttgcgtgattccgagctaaaggtgccgtcttttctcccaaaccaccaccattcatttagtgttccgggggtgatccagtgcaacaaattggggagtaattttgtcggtttttggagattgctcaattttggggcaaaatttgagaagaggatg

SEQ ID NO: 24823 - DNA, 105 bp, Oryza sativa
  Clone ID: uC-osflm202103e06b1
accactcaggaaaagcaaagccgccaccccggaccggaccggaacaccaggcccgacccacgcgtcctattcaattaagaagagacgagacgagtgaaagaagga

SEQ ID NO: 24824 - DNA, 126 bp, Oryza sativa
  Clone ID: uC-osflm202103e07b1
ttgataagtaccacattggagcaccaccgttttcaaggtgtttgatggaattgatatggatatcacccagccaagcaagaggctacatgtctgttaatgaaatactcataagcaaaatctgtaatg

SEQ ID NO: 24825 - DNA, 274 bp, Oryza sativa
  Clone ID: uC-osflm202103e08b1
tctatttcaccaactagctagctagctagccacgccatccctttctcctcctccttcttcttcttcttcttcttctacttggtccggagagagtagagaggatggcgcgcagcgagatggcttgcccggcgcagtcgatgctgtcggcgagcaccaccagctgctgcgcgttcctgaggagcagcgccgtcgtctagccacaggccgcggtgtctgctgcggctagccttgcgcgaggggggaggctgttcctgctgacctgcaacgcctcgtc

SEQ ID NO: 24826 - DNA, 156 bp, Oryza sativa
  Clone ID: uC-osflm202103e09b1
ttgttttcattgagtagttttaggtcatctgagggcctttgaatggttctcggcctccttcatttttcatagcatttgtgtagtgtgtgcaaatacattatcatatcttcatatcttgaagaaatgaaggtgaccatcttaggtttaagtctcatg

SEQ ID NO: 24827 - DNA, 320 bp, Oryza sativa
  Clone ID: uC-osflm202103e10b1
tcgctaggagggcgtcgctatcgagatagccgaagctgtctgcggtgcactgagaggtgagctcgcagcaacagccgtgaatgctcccatggtcccagctgaggtcatgtcagagcttgccccgtatgtttcactggcagagaagctgggcaagctggcggtgcagctcgttgcaggcgagagcggcggcatcaagggcgtcaaggtggtgtacaccacggcccgtggcctggacgaccttgacacgaggctccttcgtgccatggtgaccaagggcattgtggagcccgtgtcgagcacgtttgtcaacctggtgaact

SEQ ID NO: 24828 - DNA, 221 bp, Oryza sativa
  Clone ID: uC-osflm202103e12b1
tcgtttcgaattcccatatcagaatccgagggcttggggctcttctacgatcccccgcctccttctcctacttcatacgggatatttctcggtggcatctcgaaatcctcatccggtttttggtgaaggtttccgtggcgaggattaaggggtggtgtgttctttggagaggaaagaaaccggatcgtacgggtttgaattacaggggtaacaggaaactt

SEQ ID NO: 24829 - DNA, 100 bp, Oryza sativa
  Clone ID: uC-osflm202103f01b1
acgattagttagaagcataggcaagaacacataaatggcggacgagaagctagccaggctgagagaagccgttgtctgttattgcagaacatagaaaacg

SEQ ID NO: 24830 - DNA, 370 bp, Oryza sativa
  Clone ID: uC-osflm202103f07b1
tcggttactttcatctcatactcctaattgtcatcactagcttctagctagcttaattaattaattagccatggcggaggagaagcaccaccaccacctgtaccaccacaagaaggacgacgagccggccaccggagtagactcctacggcgagggcgtctacacgtcggatacggtgaccaccgaggtggtcgccggcggtcaggacgagtacgagaggtacaagaaggaggagaagcagcacaagcacaagcagcacctcggcgaggccggcgccctcgccgccggcgcctttgccctgtatgagaagcacgaggcgaattaagacccggagaacgtgcacaggcacaagatcacggaggaaatcgtg

SEQ ID NO: 24831 - DNA, 471 bp, Oryza sativa
  Clone ID: uC-osflm202103g05b1
gtggcatcgcatctggaggtggaggccaatccgctcgctcgctcgctcgccggcgacccgaatccggccaggagggggggcggctggccggagctagggtgggtgggtggttggccgcaccaccttcctccgcgccgccggagcgtgggcagcggcggcggccggtgggaggaggggaagcatggcgggctccatggtggaccgggcgaccagcgacatgctcatcgggcccgactgggccaagaacatggagatctgcgacatcttgcaccgcgaccccgggcaatcaaaagatgttgtttaggctctcaagaaaaggattgggcacaaaaatccaaaagtccaaattcttgcgctgacttttttggaaactgcaattaagaactgtggggatatattccacatgcctgttgcataaagagatgtgttgcatgagatggtgaagaatgtgaaaaaaaagtttgttctgaa

SEQ ID NO: 24832 - DNA, 291 bp, Oryza sativa
  Clone ID: uC-osflm202103g08b1
tcgtttcgcctataaaactatcaaccccgccattcggagaaggaggagcaagagctccaagaagagctcccccccctccaccaccaccaccaccgatctctcctccaatccgcggctcatcctcccatccccgtgttgcgggatctttccgggcggagcaacggtggtcgggtcgccggatttgggggtgatccgggtttcatggggtcgccggagggggaggaggcggtggtggccacggcggccgtcgtggaggacgggctgcgggggaacggggatggtggtggaggt

SEQ ID NO: 24833 - DNA, 103 bp, Oryza sativa
  Clone ID: uC-osflm202103g09b1
atcgataatcgcgtgagcgccatcatctctgtagacagaataaaaaaaaatcaaaagggggaggaagcctagggaggtttcagctgagaaggatatgggtagg

SEQ ID NO: 24834 - DNA, 372 bp, Oryza sativa
  Clone ID: uC-osflm202103g10b1
tcgtttatcgccatctctttcagctctcacagctcactgcttcaatggccgcggccaccatggcgctcttcttcccggtgatggcccgcgcggcgcctgtgaccttctccgcgctcttcggcgaggcgcggatcaccatgcgcaagaccgccgcgaagcccaagccggcggcgtcgtcggggagcccgtggtacggcgccgaccgcgtcctctacctcggcccgctctccggcgagccgccgagctacctcaccggcgagatcccgggcgactacgggtgggacaccgcggggctctccgccgacccggagactttcgccaagaaccgggagctggaggtgatccacttcccggtagggtcgattgcttggg

SEQ ID NO: 24835 - DNA, 244 bp, Oryza sativa
  Clone ID: uC-osflm202103h01b1
cttaagtggtggaggggaagaggagcacaaggagaggcagacggcgataagtcgctcgcttcccaaattcgcatgaacggggggggcttccctaccgtacacgccccggaggaagcccaggccccgcccatgctgctgagctcgtgatcctgcgctcctggccacaggctgcgattcggcgttggggtttctggtccgaggcggccatcaagatccgtgcttcttgtcctttggcccgggcgga

SEQ ID NO: 24836 - DNA, 386 bp, Oryza sativa
  Clone ID: uC-osflm202103h02b1
tcgattcacgccaaaatattgccgcacccaaagccggctccgctcctccgcgtgcgccgccgccgactcgatcgaattcgatcgctttcgcctccttcaccacctcgacgcccgtcttccgccggggggggggggagctcccaaatcctagggtaggctaaggcccccaacaatcaaccacagaaacccacgggggtcttcctttccttcaattccaccgcctctcatcgggccgcgggaagaaattggtcggaatcccctccgcccgcgctgccgccgggaggtccttagctttaaaggtctagctggagtatcctgaatggatttgaatgcttcaccatcgcctgaggaagatgaccagtcttatgaagagcatgctgattttt

SEQ ID NO: 24837 - DNA, 404 bp, Oryza sativa
  Clone ID: uC-osflm202103h04b1
tcacacatctcctctaaagcagctcacagctcaagagaaggagagggcaacaatggcgacggcgaggttgctcctcctcctcacggtggtggcagcggcggcgggctcctgcttctgcagcggccaggaggcgaagccaccgacgccgccgccgccgccgtactgcggcagcgtgaggacggcggtggaggcgcacaacatcatcgggtggaagacgtttccggcggattgcgccaaatacgtcgccgactacatcaccggcgaccgctacggccgcgactccgacgtggtgatcaacgaggccgtcgcctacgccgagagcctcaagctctccggcagtggcaaggaggtctgggtgttccgacgttgacgagaccggacttttcaccgtgccctaccaggct

SEQ ID NO: 24838 - DNA, 475 bp, Oryza sativa
  Clone ID: uC-osflm202103h05b1
atataatttagcaaaaccctcggccctcacccgccgccgccgtcgtcgacgccttcaccggtaaacggaagcatgagtcggcaccctgaagtgaagtgggctcagaggattgacaaggtttacataactgtacaattagctgatgctaaggatgctaaggtcaatctggaaccagaaggagtattctctttctctgctacagctggaactgatgggaacttatacgaatcaaagctagagttgaacgacaaagtaaatgttgaggagagcaaaataagtgtaggtgttaggtccatattctggattgtagaaaaagctgaggcctaatggtggaagaagcttgttcgagatgatcaaaaggcaccacactttgtgaaagttgacttgggacaaatgggttgatgaagaagattatggtgctggtgtcaacgtggatggaatggacttttcgaattttggtggcatgggtggaatg

SEQ ID NO: 24839 - DNA, 106 bp, Oryza sativa
  Clone ID: uC-osflm202103h07b1
tcgctttgatcctgtgctcctcagatagctatgcgattcttggaaatccttaggctacccaccatagtaacataaaatcctacgtaattacatggttaggattctt

SEQ ID NO: 24840 - DNA, 402 bp, Oryza sativa
  Clone ID: uC-osflm202103h11b1
tcgctcggatgagaaagactataatagagttgccacgggctccaacaaatctattacctgataagaagtacaacagcctggtgtctctcagtggccacctctttgataagttccttattaatgaagctctggatattattgaaacagccggaggttcttttcacttgattagatgcgatgttgggcaaagcattgatgatatgtcatactcagagcttgaagtaggagcagatgatacagctacattggataagattattgattccttgacttctctagctaatgcacatggagaacctaatgccagaagagaaattgaattatctctaaagatgggaaaagtcaatgaagtgtggaactgataacagcttggttaaagaagggtcaaagggttaaattttt

SEQ ID NO: 24841 - DNA, 131 bp, Oryza sativa
  Clone ID: uC-osflm202104a02b1
gacatgtacacatattcggtattgacccacttgagtgagtatattcaaaatctccagaagactgggttgctggaagaaaaggaaatggcccatctagatgatgctttgctgacagactagtagaagttcat

SEQ ID NO: 24842 - DNA, 225 bp, Oryza sativa
  Clone ID: uC-osflm202104a04b1
taccggtccttactggctggaccgacgcgtgcgttcactctcacacaacacaaccctccccaaaacctgccgaagagagcaagatgttcggcttcgggcaccacggccaccatggccaagaccagccgccccagcaccacggcggcggcggcggcggcgcgcaccagcccaccttcaagatcttctgccgcgccgacgaggggtactgcgttgccgtgcgcgagg

SEQ ID NO: 24843 - DNA, 120 bp, Oryza sativa
  Clone ID: uC-osflm202104a05b1
ttgcgtgagagatctctcccgagctcgatccggtccaccgcgacacgaagacgaccatggcgatggctcgctcccagcttgccgccgtgttcctcgccgtcctcgtctcggtggttctct

SEQ ID NO: 24844 - DNA, 397 bp, Oryza sativa
  Clone ID: uC-osflm202104a07b1
ttggcttgcactgaaaggagtgcccaaactgaaggtgcttcctacgcacagagagcaatagccaatatgcagggaggatgtgaacaaatggcggatgttgcagacttgctgcttggagttaaccttattaatcaagctagatgtgccacatctgattcagagagagcttcttggcagtgtgaagctctggaggtgcttgaaaatgctgaaaataagatgcatgggaaagatcctcgtgcaatgtacagtctcagccttgaaaatgctgtccagagaaaattagatgctgctgtcttttatgccaagaaattgttgaatattagaggctggattggaattgttgagttgtctttttatatattttatactttttgttttttaattattttttctttat

SEQ ID NO: 24845 - DNA, 147 bp, Oryza sativa
  Clone ID: uC-osflm202104a09b1
tgtgtcctccacggtaaggttcgttccatccaagggcctttttatttctcctttctctgtgtctcgctcgtttccattgagcctttgctctcgcgtctctcgtgtctcgtggtgtttttggtcttggccttcctctcgccatggacc

SEQ ID NO: 24846 - DNA, 208 bp, Oryza sativa
  Clone ID: uC-osflm202104b02b1
gtattcggcaagtttgtcctttcagtcgcatggagtcctgatggcaagctcttagcttgtggttccatggatggcaccatcgctgtgtatgacgcagttcgcatgaagttcctccaccacctagagggccatcacatgccagtgagatcaatggtgttctcttcagtggacccgcacgtgctcttcactgtctccgaccattgccaca

SEQ ID NO: 24847 - DNA, 229 bp, Oryza sativa
  Clone ID: uC-osflm202104b04b1
tttttaccgtcggcataacaagccatctccgggtgtcttgatttgtgatctagctacccttacgatcattgtgatataggcatgggcaggatatcgtcgccgatgctcgaacatacggaccgggtggtgactcactctggctgcagagcgaccgtgcgaagtgcctactcacacgcaattttattcgatcgatcggggcctgtacggtggcgcacacgtctactttgtc

SEQ ID NO: 24848 - DNA, 576 bp, Oryza sativa
  Clone ID: uC-osflm202104b06b1
ttattaccaccagtgcaagaacccttctaggttatggtcttttaggaggaggtggagtttattattatttttaatttttatttattttttttcatatatttttttttttctttttctttattttccttatttttttactttttttcttcttttttttatttatttttttttttttattatctcttttatatatattctttattttctctttttttctattttttttttactttatttattattttctattttttatctatctttttttctatttttttattttttatttttattattttattatttttctattttatctctttcttcttttttttttttttttatttttctttttactttttttatttcatcttatttattttttctttatttttatttatttatattattattttttattttattttttaatatattttttctatttatatattactttttttaatctttttcttttttttactattctctatttatttgtttttatattttatactcacttttacttattttattattttttattactaacttatattatctatctttttttat

SEQ ID NO: 24849 - DNA, 455 bp, Oryza sativa
  Clone ID: uC-osflm202104b07b1
gtttcatccttggcacggttgcaccagcagggaatcatgaaccctaaacaaggggagaaccctgcagcgaactttcaggctatgaagacttctcagaacactgctattgggttacatggaagcccgacaccgtcaaacattcagcagcagaattactctttactccatcaaatgcaagccatgagacacgtggatgttgatccggcaaatatagctggaaagaagcttaaatcacctgaaacaggttctgatgcttcacaggttgactggaaatctggtcagaggtttgcgcatggaaccaataactcggtcagatcgtctgtagataacattggcaatgcaaatgtcccagggccatcccctgctgacatgaagatgcttagctttgctccaaggaacaatgaagatagagcgtctcagcataccctttcaatttcttcaggagttccttcctt

SEQ ID NO: 24850 - DNA, 175 bp, Oryza sativa
  Clone ID: uC-osflm202104b10b1
tcggtcgcgcccccacacctcgcctcctcctcggcttggatctcgccgcatcatctgccgccgacgacgacgaagaggaagacgaccgccatggggacggcgagcggggaccagccggcgggggcgttttttgacaagctgcggcacgtggagtccatgtaggagctgccctacg

SEQ ID NO: 24851 - DNA, 188 bp, Oryza sativa
  Clone ID: uC-osflm202104b12b1
tcgttcgcacaacgaatccagagagattctggcacgagtgatgcatctatacgtagccagatccagaatgaatcagctcagctgggagtagcactgcagcatttgggtgcaatgtttttggagcttggtcgaacaatgatgatgcatctgatggggccatcccctgctgatgcttttgttaatgctgg

SEQ ID NO: 24852 - DNA, 331 bp, Oryza sativa
  Clone ID: uC-osflm202104c01b1
ttctgctcgcctgtcgtccgcaacgagcgcttgcttggattgcatcgacgcggagcttgcgcgggcgcaggaggagcgcaagaagatggaggaggccctggccgccggcgcgcccatggccgtctcctccgtcaccttcgacactgatctttacggcggcggcggctccgaccccaaccgctttgccggctacgacaccttcattcccgcctccgaggacgactcgcccgaggactaatccgaggcggccgttaaccccgtcgtccgtcgcctcgcctactacaccggccacgccgtcgccgtccccgacattcctcgcgccgtctaggac

SEQ ID NO: 24853 - DNA, 122 bp, Oryza sativa
  Clone ID: uC-osflm202104c02b1
gttaagaggagcagttgtcaatgctggattcaggtgacttaaaagttagactttttatggcaaccgaacttgatgacaggcacctgaaatatattttcgtagatgaaaaaattaacttaaaa

SEQ ID NO: 24854 - DNA, 198 bp, Oryza sativa
  Clone ID: uC-osflm202104c03b1
aataggtgatgctctagcaaaaaagaagtctaagatagcctacaaagccaaattgccacctggtgcttcaaggactaccatcgaggatatgttgatgcatgtgaatgaaatgcagtctcgcgtctatgttgtccatgtaaaccctgactctggcctggcagttttttttacttaatattttttgttatttattttttc

SEQ ID NO: 24855 - DNA, 265 bp, Oryza sativa
  Clone ID: uC-osflm202104c05b1
ttgatgctactccagcatagaacattcaggctcccgttaaaggttgtggaaaagatggttttcgctccatcaattctctccgatgacccctatttccccttcatcaattcctcttttcatctcattcctcttcctctattttttttcctatctctccccatctcttttcttttccctttccctttcttctctttcttattccttctttcttctctccctctttcttttccttctctctcctttctccctcctttttcctcctttt

SEQ ID NO: 24856 - DNA, 55 bp, Oryza sativa
  Clone ID: uC-osflm202104c07b1
tctgagcaaagaaggagagagcttggtgagctgcagagatggccccctccgtgat

SEQ ID NO: 24857 - DNA, 101 bp, Oryza sativa
  Clone ID: uC-osflm202104c08b1
tcggacatggcagcatcgctccaagccgcggccaccctgatgcagccggccaagctcggcggccgggcctacttcgtcgtgctgccatcgcgcccgttttc

SEQ ID NO: 24858 - DNA, 100 bp, Oryza sativa
  Clone ID: uC-osflm202104c11b1
tcgatcgctcggcgcggcttagggtttttggcggcagctattgcgtcggagaagcactttaagtacttcatcctcggtgtctgttttcatactagtattt

SEQ ID NO: 24859 - DNA, 511 bp, Oryza sativa
  Clone ID: uC-osflm202104d02b1
ttttgaattcagagatccaataaccaaaagcgagaacaccatgagagccccatccttcttcttcctctccctcctcctcctcctcctcctcatccacatctccatccattgcaatgctgcagattcccagctaggttcagagaaggtcaccaacctcctcttctacctgcacgacaccctcagtgggaaggatccaactgctgtcccagttgctcgtgctgagaacgctgtacccaagcctgataatccggtacccttcagcacgatctatgtggtcgatgatctgctgacagaggggcctcagagagaatccaaggtggttgggaatgcgcaggggatgtacatttcgacagccaagaaagggctcacgcttgttcttgggatcgatttcgagctcactgatggcccctacaaaggcagctcgttcgtcgtgtactcgcggaacccggtcatgcaagggaatggcagggagctcgccattgttggtggccgtggtttgttcaggatggct

SEQ ID NO: 24860 - DNA, 513 bp, Oryza sativa
  Clone ID: uC-osflm202104d03b1
gtttcaacgctggcaattgttcccgggaactggtgaagagagacctgtactggcaaatcaattttctgcgttcatttcccgcaaagatggtagaaactattcctcagtgctgcatcctgggaaaccagatttgccaaaaggaagtaacatttcaggaattggatcctgggactggaatatgagtggacaaaactctacgtaccacgctctttaccctaggtcctggacgatatacaatggagaacctgacccagatgtcaacatagtgtgtcgtcagatttctccaattattccacataattatcaacagagcagctatccagtttctgtattcactttcacagtaatactactttccatgagataccttcaatacactattttagtaactaactcaggcaatacggctgctgatgtaactttgctttttacatgggctaactctgttggtgggaaatctgaactaactggatatcactccaatttccctatgatagaaaaggatggtgtgca

SEQ ID NO: 24861 - DNA, 520 bp, Oryza sativa
  Clone ID: uC-osflm202104d04b1
atcgtcgtcctcctcctcctttcctctcttcggggaacccttcctcctcctctggctcgctcgccggaggcgatgacggcggaggcggacgacccgacggcggcggagacgctggagaagttccgcctctacgagacgcgcgcgaggttctacctgatcgggacgtcgcgggagaagcggtggttccaggtgctcaagatcgaccgctccgagcgctccgagctcaacatcagcgaggaccccgtctggtactcccagcaggaggtcaagaacctcctccagcgcatctccgagggcaaccgctccactggcggcctcaccttcgtcaccaaggcctatggcatcgctggttgcatcaagttcttggagtcatattatctgattttggtcaccaagcgctgccaaattggttgcatttgtgggcatcctatttactgtatagatgagagccagatgataaccattccacactcatctgtgcagacagatgttgcaacctctaagaatgagctaaggtaca

SEQ ID NO: 24862 - DNA, 520 bp, Oryza sativa
  Clone ID: uC-osflm202104d05b1
gtgagcgaagccagcagcagaagcagtagagagaaagtagagagatggaggggaaggaggaggatgtccggctgggagccaacaagttctcggagaggcagccgatcggcacggcggcgcagggctccgacgacaaggactacaaggagccgccgccggcgccgctgttcgagccaggggagctcaagtcgtggtccttctaccgcgcagggatcgccgagttcatggccaccttcctcttcctttacatcaccgtcctcaccgtcatgggggtcaacaactccacctccaagtgcgccaccgtcggcatccagggcatcgcctggtccttcggcggcatgatcttcgccctcgtctactgcaccgccggcatctccggcggccacatcaacccggccgtcaccttcggcctcttcctcgccaggaagctgtccctcaccagggccctctttacatggtgatgcagtgcctcggcgccatctgtggcgccggcgtcgttaagggcttccaaaaggcctgt

SEQ ID NO: 24863 - DNA, 509 bp, Oryza sativa
  Clone ID: uC-osflm202104d07b1
tgtggcttgagcggtggtgacaccgctcgcctccgtccgcctcgcctccaccgagaggttctctctgccgccgattcagatttacagggagattatcttgtgatctgtaaacatgtttgggcgtgtaccgaggagtaacaacaccaagtactatgaggttcttggagttcctaaaactgcaagcaaggatgagctaaagaaggcataccggaaggctgccataaaaaaccatcctgacaagggaggggatccagaaaagtttaaagaattatcacaagcgtatgaggttctcactgatcctgagaagagagacatatatgaccaatatggggaggatgctcttaaggatggaatgggaggaggcagtgacttccataatccatttgacatatttgagcagtttttcgggggtggtgcctttggggggagtagctcaagagtacgcagacagagacgtggtgaagatgtggcgcatactttgaaggtgtctttagaagatgtgtataatg

SEQ ID NO: 24864 - DNA, 511 bp, Oryza sativa
  Clone ID: uC-osflm202104d08b1
tctttaattatcatatgcagactattatgaaagggcactgataaatggtgttttaagcatccaaagagggactgatcccggggtgatgatttacatgctacctcaggcccctggacggtctaaagcggtttcctatcatggttggggaacaaagtatgactccttctggtgttgttatgggacagggatagaatccttttcgaaacttggcgattccatttacttcgaggagaaaggagatagaccggtgctaaacatcattcagtacataccaagtgcttataactggaaagcagctgggcttactgttaatcaacaactaaagccaatcagctctttggacatgtttcttcaagtttcactctccacttctgcaaagacaaatggtcagtctgccacattgaatgtgagaataccatcatggacatctgccaatggcgcaaaagcaactctaaatgacaacgatttaggattaatgtctccagggtctttcctttaatctccaaacagt

SEQ ID NO: 24865 - DNA, 510 bp, Oryza sativa
  Clone ID: uC-osflm202104d09b1
tcctaaccgcttctcccgccgcgccggcgccatggacggcatcgacgcggagcttgcgcgggcgcaggaggagcgcaagaagatggaggaggccctggccgccggcgcgcccatggccgtctcctccgtcaccttcgacactgatctctacggcggcggcggctccgaccccaaccgcttcgccggctacgacacctccatccccgcctccgaggacgacgcgcccgaggacgaatccgaggcggccgtcaaccccgccgcccgccgcctcgcctcctacaccggccacgccgtcgccgcccccgacatcccccgcgccgccgaggacgacggcctccccaagaagtcgcagcgcatcatcgaccgcgaggatgactatcgccggcggcggctggcccgcatcatctcgccggagcgccatgatcccttcgccgctggtgaggccaccccggacccttccgtgcggacatatgctgatgccatgcgcgagaatgacctgcagaagcagaa

SEQ ID NO: 24866 - DNA, 522 bp, Oryza sativa
  Clone ID: uC-osflm202104d10b1
tttttagatagcttattggagagaaaaaaggggcgaagcgcaagcaaatcgatcagcaacacaagatgaagaagatgcggatggcaatggtgagcctggccctggtgctggtggggcttctcctcgtcgccaccactgctaacgccaagaacgcccatgccggtggcttgaagaagggcggctctgaagctgaaggccgcgtcgtctacgccgacatgagattggtcgttccctccgactccgactccgcccccgcccccgcccctgcctccgcctctgatgggccagcacctgcgccatcccccaacaattaattcaacatcgacctagcatatatatatacgtatatatttgttattttcatgtgttgttttcgcattttatataaccatgcgcgctctagttgtacatgcagccgattgatgtgcatttgatttatgcctgctcatttttatttctttctttttatttacgttaaatgaaacactttcttcatgcatacatgggttgtcttattttatt

SEQ ID NO: 24867 - DNA, 519 bp, Oryza sativa
  Clone ID: uC-osflm202104d12b1
ggtcccatggcttccttcctcttctcgcgcgggcattcttccccttttcccctccgccgcgggtgggctggtaagtcggtaggtaagggatcaatcggtttcgatctcacctcgttcgctgccgtttgttgattgatgatcaggcgcaccaactagccggatagattgcccgcttgctcgtccttttctggtgcttgatccgttcggtttggggggggtctagtttcggcgatttgcttctgctgttgtgttagttttctgaacacagtatctctttcgattggtttatggctaattgtggtttgctgtgttgggtacaatatgcgcgatcggttggtttgtgtcaattcatgtttggtgcgatggatttgtcatggatattttgggcttgatcaaaggctagatgaactgaagttttcgctctgaattggtcatggttaggattgctcactggcctcagattattgttcggttccttttaagttcgtgatgcttggtttttgtttgagacccgtcgtc

SEQ ID NO: 24868 - DNA, 487 bp, Oryza sativa
  Clone ID: uC-osflm202104e01b1
gtcttttcttgtctagtgatgacaaatccatcatatgctttccaccttcaaaatctgtactttgcgtgctgctgatcaactaaaaaaggaatcttgcgcatctttgatacttcactatgttattctcattaggtagaaggcacaaatccagtcgtgtatgtgctgaatgttagggatacttcactaagaacatacttaattgtgaactttgataagtgggatgttaagtttgtcaattttaggcttttcctgaacattagatatcaagttatctaatgtgtgtgggaataggaaatattttccactggtagttgcacactgagatgtttcctattatattctaccttgcattttcatggcatatccttggtgatttcttgctgatgtcgtgcacgtcaggagttccaagtaggtatttacattgttctacctgctagtaagttttttacaatctgacaaatctcatggtgctaattgacttgagggt

SEQ ID NO: 24869 - DNA, 510 bp, Oryza sativa
  Clone ID: uC-osflm202104e03b1
ttcgtcttcgccaagatggggatcaaccccatcatgatgagcgccggagagctggagagcggcaacgccggagagccggcgaagctgatcaggcagcggtaccgtgaggcggcagacatcatcaagaaggggaagatgtgctgcctcttcatcaacgatctggacgcgggtgcaggtcgcatgggaggcaccacccagtacacggtgaacaaccagatggtgaacgccaccctgatgaacatcgccgacaacccaaccaacgtgcagctccccgggatgtacaacaaggaggacaacccccgtgtccccatcatcgtcaccggcaacgacttctccacgctgtacgcgccgctcatccgtgacgggcgtatggagaagttctactgggctcccacccgcgacgaccgtgtcggcgtctgcaagggtatcttccgaccgacaacgtccccgacgaggacatcgtcaagatcgtcgacagcttcccaggccaatccatcgatttcttcggcg

SEQ ID NO: 24870 - DNA, 520 bp, Oryza sativa
  Clone ID: uC-osflm202104e04b1
tttttctggaggagggcgatggaggaggggagggagcagctgctgcagacgccgccgtcgccgtcgacggcgacggcgatagccggtgcaactaccactggtgctgctgcgtcatcgtccggcggcgagcagccgaggtggttctcgcacccggagctggtccggccgtcgtcgaggccggtggcagcacagcgagccaccgccgacgacgatgctgccgccgttcgtcagccgccggcggtgagcgttggcagggcggcagccatggttttgcagagctcggggtgtaggagcgatgtggaggtggacacctcgcttcacttgtgaagaagtgaaaattaagtagatagctagtagtagctagatgcttatttagctcggccgaattaatcatttttcccccctttgatccttctagttcttgtttttctcttgatcgatcacatcttgtatgcgctcgtggatgctgtcgaatttgaattaatttggttctagttcatgttgattagatgtttagatg

SEQ ID NO: 24871 - DNA, 520 bp, Oryza sativa
  Clone ID: uC-osflm202104e05b1
gtggcggggggaggctgctcgtcggggtgctgctcctgacgctggtggtgtccgggcactgcctggagagcacgcaccaccgcgggctgaagcggcggcggcggaagcacgagatccactcgccgatcaagacggtggtggtggtggtgatggagaatcggagcttcgaccacatcctcgggtggctcagccgcacccgccccgacatcgacgggctcaacggcacgcaatccaaccgcctcaacgcctccgacccttcctccccggagatcttcgtcaccgacgaggccggctacgtcgactccgaccccggccacggcttcgaggacatccgcgagcagatcttcggctccgccgacacctccgccgtgccggcccccatgtccggcttcgcccagaacgcccgcgggatgggcctcggcatgccgcagaacgtcatgagcgggttcaagccggagtccgtgccggtctacgccgccctcgccgacgagttcgccgtgttcgaccggtggttcgcctc

SEQ ID NO: 24872 - DNA, 519 bp, Oryza sativa
  Clone ID: uC-osflm202104e06b1
tgtgttgttcatgtcaaagaggttccttttgctcgatcgtccctgaatcatgatgacatatttattctggacacgaagtccaaaattttccagttcaatggctccaattcgtctattcaagagcgtgcaaaggctcttgaagtcgtgcagtacatcaaagatacatttcacgagggcaagtgtgaagttgcagctgttgaggatggcaggttgatggccgatgctgaagctggtgaattttggggtttttttggtggctttgcccctctaccaaggagagcccctgtagaagataatgagaaatatgaagaaactgttttcaaattgctctgttttaaccaaggaaagttggagcctatcaattatgaatccttattgcacgagttgctcaagacaaataagtgttacttgttagattgtggtgtcgaattatttgtttggatgggcagaaccacatctttgcaggagaggaagagtgccagtgaagctgctgagaaattgctctctgatgataaccga

SEQ ID NO: 24873 - DNA, 496 bp, Oryza sativa
  Clone ID: uC-osflm202104e07b1
tttggaggccgccgcaaccaaaaaaaaaaaagtctaaccctagatccaggccccgcgtctccggcgatctcccggccatggcgactcgccgggccctctcctccctcgtccgcgccgcctccaggctccgcggggcctcgcccgccccgcgcccgcgcgggccgctccaccgaccgtcgccatcggggtacctcttcaaccgcgccgccgcgtacgccacggccgccgcggcgaaggaggcggcgcctcccgcgcccgcgacggggaaggccacgggtggaggtaagatcaccgacgagttcaccggcgccggcgccggcgggcaggtgtgccaggtcatcggcgccgtcgtcgacgtgcggtttgacgaggggctgcctcccatcctcacggcgctcgaggtgctcgaccacaacattcgtctcgtgctcgaggtggcgcagcaccttggcgagaacatggtgcgcaccatcgctatggacgggactgaggggct

SEQ ID NO: 24874 - DNA, 492 bp, Oryza sativa
  unsure (1)..(492): unsure at all n locations
  Clone ID: uC-osflm202104e08b1
ttacaacaacaaaaaccacttctcgtgggtagaagagagagagagcgaggcgatttcgaccaagaagatggccgggatcgtggtggtgttcgacttcgacaagacgatcatcgacgtcgacagcgacaactgggtcgtggacgggctcggcgcgacggaggagttcgagcggctgctgcccaccatgccgtggaacaccctcatggacaccatgatgggcgagctccacgcgagcggcaagtcgctcgccgacgtcgcgggcgtgctcaggtcggcgccgctcgacccgcgcgtcgtcgccgccatcaaggcctgctacggcctgggctgcgacctccggatcctcagcgacgccaaccgcttcttcatcgacaccatcctcgaccaccacggcctcacgggttacttctccgagatcaacaccaacccgagcgccgtcgacgccgncaccggccgnctccgcatcgcgccgtaccacgacttccacgcttg

SEQ ID NO: 24875 - DNA, 491 bp, Oryza sativa
  Clone ID: uC-osflm202104e10b1
ttgtatctaggcagagatactaagcctcttgggcatgattatccatattcaagtggatatcgtggctcagatgatattggccctattgacagctatgcaagttatggcagctcccaggtctctggaggaggttatggggcttatggtggatatagtggtcgttctggcacgcagggggttatctggccctagttcattatcctatggaacgcgacatggttattaggacttagattgacaaatgcaacaggtatggctcatccaccttgtcttgaaatgaacagaatgatcatgctatcaagacttgctccttattgcatctgtgcctactaaacacatggaaccgacctcagctatcttctgacggacctgatctattcacctttgccccatgcccacctgccttactaaaaacagccaagacagaagaatgccaagaccaatgaagtatggagcctgcttatcggagccccttaccaaaccagatgacc

SEQ ID NO: 24876 - DNA, 497 bp, Oryza sativa
  Clone ID: uC-osflm202104e11b1
tttttacaggagaagaaaaccttggcccttgaagggttgtgttcttctctgaaacctttttagagaggtgagtgcttgttcatcagaagcagagagacaagatgtataacgctccaatggcacaggacatgtcctactatgaacatgtgcagaggcgccatgaggagaagggttgcctctatgcatgcatcttcactgcactgtgctgcttctgctgctacgagacctgcgagtgctgcctcgactgcctctgctgctgctgcaactaggctgccatatcaagccatagcaagaacatgatcaagatgaggatggagatcgcctccatctctcttacccctgagatttcataatttatcagcccgttgtcatcatgtaaaattaataaacatgtagtagatggaaactttgtcagaatcgagcatttgtgttctgaaaaagaggactattgtaagaaacccagaatactgttatctgaagtgctttctatgcgtgtg

SEQ ID NO: 24877 - DNA, 491 bp, Oryza sativa
  unsure (1)..(491): unsure at all n locations
  Clone ID: uC-osflm202104e12b1
gtatttgatcaggttacagttgctggcctgggagttaattaatctcttgctggttgattagttgctatcagctacacgctctcgctagctgccactgtactaatacatactcccatctattcgcctgagaaaatatcgaaaagtagcagcaaagaggagcaggcaagatggtgatgaaccctgacgccgtccgcaatgtcgttggaatcatcggtaacttgatatcgttcgggttgttcttgtcgccattgccgacgttcgtgacgatcgtgaagaagaaggacgtggaggagttcgtgccggatccgtacctgncgacgttcctcaactgcgcgctgtgggtgttctacggcctacccttcatccaccccaacagcatcctcgtcgtcaccatcaatggcaccggtctcctcatcgagatcgcctacctcgccatctacttcgcctacgcccccaagcccaagcggtgcaggatgctcggcgtcctcacc

SEQ ID NO: 24878 - DNA, 503 bp, Oryza sativa
  Clone ID: uC-osflm202104f01b1
tttttattctgaactatcttgctggtttaatcattagtcacgacaacggtggacctgagggttgtgatttaaatgacctacagactttgtcagaattaaggcaccttcacatagagaacctggatagagctacttcaggcgcttctgcacttgcaaacaagccattcctcaaggatctacacctctgtgaacaggcaccattgatagaggagcagcaatctgaacaagaacaagagaatcaagatgaccaaaaggaaacagaggaagaagagaaggaagtacttgatgtaaccaatagccaatttagtagagaggaatcaatcaaagcgagcgaaaagatatggaacgaactcaccccaccccagaacattgagaaactagtaattaagaactaccgaggtggaaagtttccaaactggttgacaggtccaaagctgggcatatcattccctagtcttgtgtacttggatatcgacaactgcatgtcatgcacggcactgcct

SEQ ID NO: 24879 - DNA, 471 bp, Oryza sativa
  Clone ID: uC-osflm202104f02b1
ttttgcttccggtctccggtctcctcctccaaactccggtcggtctccggcgcggcgtagccgagcccccaccatacgacgcggggaggcagacgacggggcgccgctgctgctgcccggggagccaccgccggtcgccgccgcagcagcagcagcagcgtgttcagaggagaagggggcagcaggtaccttggggctctgccgcatgccgctgtgggggacaggctcgtccgcgccgtccgcggcggcggagggcagcgcggccggaggggatggggcggcccgctcgtcgtccggcggcgccgcggtgatccggtcgctgctccccacccgccgccgcctccgcctcgacccgccatccaagctcttcttcccttatgagcctgggaagcaagtccggagtgctgtcaagatcaagaacatcagcaagtctcatgtagcattaaagttccaaacaacagcaccgaagag

SEQ ID NO: 24880 - DNA, 484 bp, Oryza sativa
  Clone ID: uC-osflm202104f03b1
gcgttttaaccttggcccttgaatagttgtgttcttctgtgaaacctttttagagaggtgagtgcttgttcatcagaagcagagagacaagatgtataacgctccaatggcacaggacatgtcctactatgaacatgtgcagaggcgccatgaggagaagggttgcctctatgcatgcatcttcactgaactgtgctgcttctgctgctacgagacctgcgagtgctgcctcgactgcctatgctgctgctgcaactaggctgccatatcaagccatagcaggaacatgatcaagatgaggatggagatcgcctccatctctcttacccctgagatttcataatttatcagcccgttgtcatcatgtaaaattaataaacatgtagtagatggaaactttgtcagaatcgagcatttgtgttctgaaaaagaggactattgtaagaaacccataatactgttatctgaagtgctttctatgcgt

SEQ ID NO: 24881 - DNA, 518 bp, Oryza sativa
  Clone ID: uC-osflm202104f05b1
ttctacttttctttacgttttactcctccttttcgcctcttcctcttccctcttccctctcttcgcttccactcctccccacccacgcctcctcctcctcgcttccccgaccatcgcatcgcggcgcagcgcagcggaggaaaccctagcgcagcagcaagccaccgccgccgcatggcgtccccggcgcggcccgccgcagcctccgtctccggcgccttcggcctctccgccgacccggcgcggtgctcctttgaccagacgctccgccgagaggatttccaggacaaccggctgctgaggtcacttgttaatatccatgaacaagaaacttattccagagaaataataacggaagctatagagagctgcatgaagaaacaagcagacaacttggtgaatacactggatgtcatcagtgggaggctatcacagttggagctgtattgctataagctggaaaggtcaattggagaattacgaagtgatgtgatggattaccatggtgaagcaaatat

SEQ ID NO: 24882 - DNA, 517 bp, Oryza sativa
  Clone ID: uC-osflm202104f10b1
tctgtgagagagagagagagagagagagagaggagtggaagtggatcggggcatcgctgcggcgtcggggctgtgcagatcggaggaggtcatgaacgactaatctccgttcatttattatggacttgcaccagttattaaagtacagattgactggcgctaacgttgtgtacgaaattcctacagagaacaacttgcaaaactctccctggcaagctaacccactgaagtacgagttcagcgattccccatacacccctctctcttcccaaattgagtgtgacaatttgtctgctcttaccaacactccagataaccagagctctacagaaaccatttcagcccaaccaatctccccattggaagcagacagctcatatagacaggcgggtattcttctccaggagaacattcaagtgggagctgatccgttgtatgctacatcaagacataatatgcaacacgccttacgggagattgagactgttctgatggcacctgatacagatgatgcaac

SEQ ID NO: 24883 - DNA, 513 bp, Oryza sativa
  Clone ID: uC-osflm202104f11b1
gtcaaatgccatgaggtatagttatctcagaggcccaggtggccgattcagaaatccatttgaccatggggtgcgtaaaaactgttctgacttcttgctgaaagggtacaatgaggatattgagagggtagaacagacattacaacctgatgaggaattgggaatgattcaaatgacaagaagtgcagtctcacagaatggcgagagcatgtcacttcatgctaatggcacagaccatggttgtgctgatccacaagggaactcaaaatcccatcgtcactcgcacggttcatcacaatgttgcagtcacagtaagagacctgacaagacccccttggggctaggattgggccttggtcgtaacaacccatctagccgctacacacgttcacttccttccattcattcggagagtagtgcttatttgcccttgtgattcttttggagaaggcgagctagatcgtatttcaacttgtaggtgtttattgcacaaccacagctttcttttggcta

SEQ ID NO: 24884 - DNA, 496 bp, Oryza sativa
  Clone ID: uC-osflm202104f12b1
tggacgcgtgggctggcaataggagttgctgggttgtgcaaggcgctgcatagcagcttggtgataccaccagtttctcagaagaagttactttcgaactcagatagactttattacactggaggcctgaaaaatcttggcaacaattgctttcttaatgttatcctgcaggcacttgctagctgtgacgggtttgtttcctctctagataatttgcttggaagtgaggatgtgctacctgaggaaaagtccgaaaaaatgcctcttatttttgctctaagttctcttataaaagacttgagcgtagttcgagacaaaaggactgaactgagtccacacagagtaatggatgctttgagcttctacgtcggccactttaatttgacaagagagcaggatgcttcggaagcctttcatcatcttttgacctcactgagggatgaattttcccgttgttatgtaccaaatagggagttctctggcagacatcaccatg

SEQ ID NO: 24885 - DNA, 525 bp, Oryza sativa
  unsure (1)..(525): unsure at all n locations
  Clone ID: uC-osflm202104g01b1
ccctttccgcctctcgtttcttctcgtcctctccacgcccccgagatctcaggagcacaggaggaggaagccatggcgtcggagaccgagacgttcgccttccaggccgagatcaaccagctgctgtccctcatcatcaacaccttctactccaacaaggagatcttcctccgcgagctcatctccaactcctccgatgcattggataagattaggttcgagagcctcacggacaagagcaagctcgatgcgcagccggagctgttcatccacattgtccccgacaaggctagcaacaccctgtcgatcatcgacagtggtgtcggcatgaccaagtcggacctcgtcaacaacctcggtaccatcgccaggtcggggaccaaggagttcatggaggcgctcgctgctggtgctgatgtgtccatgattgggcagtttggtgtcgggttctactccgnctaccttgttgctgagagggttgttgtgaccaccaagcacaacgacgacgagcagtatgtgtgggag

SEQ ID NO: 24886 - DNA, 523 bp, Oryza sativa
  Clone ID: uC-osflm202104g03b1
ttgttatacaaatgatcttgggcaataatatctgatcatatacgtattccaataaggaaggaggattttcaatgcgggatataaaaacatatctctctgtagcacccgtgctaagtactctatggtttggggctttagcaggtttattgatagaaattaatcgtttatttccagatgctttgtcattcccctttttttcattctagttgttgctatgtgaggaatagagttcttcgtgacatgataaaaaattaccacttttcaatccctttttagtataggaaagaaaaagaaagaaaagatagattgggttggaccttagagtcatgaaaaatttggtaaatctcatttttgaaaaaagaaattcaattaaaagcagtatccaagctaagtcaggcctcagaaatcagagcatagaaagaggctgggttggctactaaaatgaaaggattttgcttcaaaatccttgctaatttgacaaggattgtattccttaattatttctctattttttattacttaa

SEQ ID NO: 24887 - DNA, 507 bp, Oryza sativa
  Clone ID: uC-osflm202104g05b1
tttggaagtccggagttggaagcgatcgatggcggctactacgacgggacgagttgttgcactcggcgcggtggccgtggtggtggcgctgacattcctcgccggcggcgcggacgccgactgctacgacttctgcttcaaggactgcatggccagggagaacaacatggtcgactactgcagctacgcctgcgacaagacgtgccagccggacaagcccacgctgtactcgtcgtcgtcgtcgtcccgcctcgccggcgacatggagtgccaactctcctgcgccttgggctcctgccaccgcctccttccggacggcaagggcgccgtggaggcctgcttcgggcagtgctacgacggctgcaagaccacggcggcggccagactgccgaggcctctccgcgccggccactacgtgctctctagtccccctgatgacgtagaccatgatccggaccaccgctacgtgttctctagcccccatgatgacgtaaaccatgatccgga

SEQ ID NO: 24888 - DNA, 516 bp, Oryza sativa
  Clone ID: uC-osflm202104g08b1
tttgtttttgctgtacttctttttcacactgttttgcagttgagtagttatctttcatgcatgctttggtgtagattgagatgtccaacttgatgtgatgatctggaaaagaagaagcaatctgaaggttgtccaacttaaggtttgatgccttagatcaaatggcccagcatctgtacctaacctagatgatatgacctaaaacctgcaacgagctgtctgaatgtctgatcgagaagcaatctgaagcctcttcttttttcagatactataatgccattgacctgactcttcaggttgtgctatctccaggcaccatgtcctctcaaggcccatttagaaaggccaatccacacggtccaagaaatggcccattaagggtcttgatgcagaggatgaagatgaacagtgatcgatatgctcaaatgcataagggagcccgattgattctctgattaaaaaaatatccaacgacttggatttaagccatgttatatttactggattattgaaaaa

SEQ ID NO: 24889 - DNA, 525 bp, Oryza sativa
  Clone ID: uC-osflm202104g09b1
tgtaatcaagcaaacaaagaaagaaaagcatcacaaatctcacgcactgtctctcgttcgcgcaaagcacgctgcttttctccgctttgcgagcaccatagcctagcccaccatgtgcggcggcgccatcctctccgacctcatcccgccgccgcggcgggtcaccgccggcgacctctggctggagaagaccaagaagcagcagcagcagaagaagaagaacaagggcgcgaggaggctgccactgcgccaagaggaggaggatgatttcgaggccgacttcgaggagttcgaggtggattccggcgagtgggagggtggagtccgacgccgacgaggccaagccgctcgccgcgccccggagcggcttcgctaaaggtggattgaaaaacactactgttgctggtgctgatgggcctgcagcaaggtctgctaaaaggaagagaaagaaccaattcaggggtatccgccagcggccatggggcaaatgggctgcggaaatcagagatcctcgcaaggtgtccg

SEQ ID NO: 24890 - DNA, 455 bp, Oryza sativa
  Clone ID: uC-osflm202104g10b1
ttcttctaatccagggaaaaatgatacgatcggcgtcgccgtcgccggcgttggttcgatacgacgagccgagagagagtgaatgatcgaaagggggaaggagtgcttggccgagatgtcgtgcgcgcgcttggctgaccgccgaccatggaagcggcactgtatggggtgggacgttggccccgagatgcaccaagatcaaattgtgctatgtgggcaagaaggtgtatatgttatcagagatgggactctgggggttttgtgccacgaaatacttcgagtagtgtcccctaatgtgagagaagatgacaaggatggacattttgtatttgatggtggagacaggcttgcaccacgatacaggattaatgcaaaaagggggaaggtttattggccgagctgcctcttttagaattaaacatcttaacaccataggttttttgcttgctaaattt

SEQ ID NO: 24891 - DNA, 493 bp, Oryza sativa
  Clone ID: uC-osflm202104g11b1
gtgtaattttgaggagagactccgacccgcgccgccgccgccgcagccaagccatggagggatccgccggggcgccgctccgcacgcgcgtgtgcatcatcgggagcgggccgtcggcgcacacggcggcgatctacgccgcccgcgcggagctcaagcccgtgctcttcgagggctggctcgccaacgacatcgcggcggggggccagctcaccaccaccaccgacgtcgagaacttcccggggttccccgaggggatcctcggcggcgagctcatggatcggtgccgcgcccagtccctccggttcggcaccagcatcatctccgagaccgtcaccgcggtcgacttctccgcccgccccttccgcgtcgcctccgactccaccaccgtgctcgccgacgccgtcgtcgtcgccaccggcgccgtcgcccggcgactccacttcgccggctccgacgcctactggaaccgcggcatctccgcctgcgccgt

SEQ ID NO: 24892 - DNA, 486 bp, Oryza sativa
  Clone ID: uC-osflm202104h02b1
aaaataagctctcctcgttcgtctcctcctccgccgcttctcattcccaaaatccaccaaatcccggcagcaaggcgcgatctctggcgcttccgcggttcgcgcgatccccgatcggtccgcgccaggggcgctggtttcatggattggagttgctgggacggctcttcgtgggaaccctcgtgctgacctgattcgtttgggcgtggttgatttgggtcttagtttttggtggactttgagtccctttgcgggtggttcttgtttgtaggctgtgattggggaatcctgggaggttgtaggaatgggattatctagattgctgtaaatagaggtgaagacaattcttttaggtactaatttggtgcacataaggtgagaattttggttaggactaggtggagatcaggattattgttagggaaggggatgggtggcctctgcttaaaggtttcagcggtagacaagttcccgagcgacaccacg

SEQ ID NO: 24893 - DNA, 494 bp, Oryza sativa
  Clone ID: uC-osflm202104h03b1
gtggtggtggcggtggcgggggcgggaggaagaaggccatattaggggacgcggccgacatgaagacggtggtggggatcccggagaggtacaggctggcggcggagctggggcgcggggagttcggggtgacgcggcggtgctctgacgcggccaccggggaggccctggcctgcaagacgatccgacggaagcggctgcgccggtgccgcggcgacgccgaggacgtgcggcgggaggtggagatcctccgccgcatctccgtcctcggcgccggcgccgactccgtggtgcgactccgcgacgcctgcgaggacttcgacggcgttcacctcgtcatggagctctgcgagggcggcgagctcttcgaccgcatcttcgcccgcggccactacaccgagcgcgtcgtcgtcaagctcgcccgcaccatcgtcggcgtcgtccagctgtgccacgagaacggggtgatgcacagagacctgaagccggagaac

SEQ ID NO: 24894 - DNA, 391 bp, Oryza sativa
  Clone ID: uC-osflm202104h04b1
gccttcacgacgtggtggacgtcgacgctgacggcgacgaggtgaggtgctaccggagcgcggtggtcgggccggaattccacagggagctcggcgtcgacccgaccaagacgccgtcgggctactcggtgctcgacttccgcaagatgctccgcggcgcgttcgggctggaccgcgccacagcgacgccgagcggcgaccggtgggacatccgccgccgaccccgcctcctgatcatctcccgccgcgccgcccgtggccgcgcgttcatgaacgagcgcgccatggcggacatggcggcgagcctgggcttcgacgtgcgtgtcggggagcccgacgcgtccacggacaccttcaagtttgctcgcctcgtcaactcctgcgatgtcat

SEQ ID NO: 24895 - DNA, 513 bp, Oryza sativa
  Clone ID: uC-osflm202104h06b1
gtatgaccaagtggcaaatatttcttcagatggagcagtccttccaagttcatcgcagttatggaagtatgcttgaaggggaggctgatgagctcaagagagttttccttgaaggaaatccatactttttgggattgaccatgattgtttctctgttccactctctgtttgattttctggctttcaaaaatgatattcagttctggaataagaacaagtccatggaaggtctatcagcaaaatccgtggttctgaactttgtatgccagctgattattttcctctacctgctcgacaatgagacttcatggatgatccttggtagctctggaattggtgtttgcattgaattttggaagattggaaaagcaatgcatgttgagatcgatagaagtggaaagattcccatgttgaggttccgggaccgtgaatcatatgcacagaataagacaaaggagtatgacgcaattgcaatgaagtatcttacatatgtacttctcttcttgggttctg

SEQ ID NO: 24896 - DNA, 475 bp, Oryza sativa
  unsure (1)..(475): unsure at all n locations
  Clone ID: uC-osflm202104h07b1
tcgttcttagctaagcccccactgggagtattctttgcagctgttgcacctcgcctacaaccgcgttactactccatatcatcatctccaaagatggctccttccagaattcatgtaacatgtgcgttagtttatggacctacaccaacgggaaggattcaccaaggagtttgttcgacatggatgaagaacgcaatcccatcagaatatagtgaagagtgtagctgggcaccaatttatgtgaggcagtcaaattttaagttgcctgcagatccgaccactccaattatcatgattggtcctggtacagggttagcaccatttagaggcttcttgcaggaaagattagctctaaaacaatctggagttgaactgggcaattcagttctcttctttggatgcaggaaccgtaatatggactacatatatgaagacgagttgcaaaacttcattcangagggtgcactttctgagc

SEQ ID NO: 24897 - DNA, 490 bp, Oryza sativa
  Clone ID: uC-osflm202104h09b1
gtaagctttctaagggagggattaactttgttggatcattatctggctggacggccacacttctcttcatgtggatgccagttgcgcagatgtggacaaattacctcaacccaagtaacatcaaagggttgtcagctttcactatgttgcttgcaatgattggaaatggacttatgattcctcgtgctgtatttatcagagatctcatgtggttcactggttctgcctgggcatctttcctacagggttggggtaacttggcctgcatgtactgcttcgatagcatcagcagagaatctttcttggcaacaacatttggacttcttctgtggctaggatttactctctggagagataccattgcccatggcaacagctcacccgtgacttctttgaaggaacttcttttcggaaagtgaatagaactccattatgtccatattcagcagcaaactgctgccaggcaggaagctctcctacaataataatg

SEQ ID NO: 24898 - DNA, 461 bp, Oryza sativa
  Clone ID: uC-osflm202104h12b1
tgatgccctgtgccaggccgccgaccttcgccgccttgaggagaacatcaagagctccgtcaagaactgcgtcacccaggtggccacgaaggtgctcaccatgaaccccaccggcgacctctccagcgcgcgcttcagcgagaagaacctcctgaccggcatcgaccgcgaggccgtgttcagctatgccgacgacccgtgcagcgccaactacccgctcatgcagaagctccgcgccgtgctcgtggagcacgccctcaccagcggcgacgccgagcccgaggccttcgtgttctccaagatcaccaagttcgaggaggagctccgctctgcgctgccccgggagatctaggccgaccgcgtcgacgtcgtcaacggcacccgccccgtcgcccaccggatcgtcgagagccggacattcccctttaacgctttgttcgcgaggagctcggctgcgtatt

SEQ ID NO: 24899 - DNA, 267 bp, Oryza sativa
  Clone ID: uC-osflm202106a01b1
ggaatttcggatgcggtccacccgcagatctccgaccatcagcctaacccacggtttccccgcccttcacaccccaacctcgtacgctccgtcgccgacgacgactgcctcctaccccatgtatataacccccgccactcctctcgatgttgaggtaaatcgagtgagtccgcaagtcgttcgcgattcttgatcgagatctgtcagggtgataaaggtttagaacggtgctgagtttgttaatcttgggagaaaagggaaactgct

SEQ ID NO: 24900 - DNA, 431 bp, Oryza sativa
  Clone ID: uC-osflm202106a04b1
ctcatttgatttgcaggccaattccagttgagtttctccacgggccacatatatggcttccggcaggatagctctgctctgccttcttggcttgctgctggtagcagcctcaccggctgccattgctgccaaagatgacaaaatcttctaccagattactttcatgtggccgggagcgtactgcgcgcagacgaaggccggatgctgcatgccgaagaccgacgtcgcgccggcgtccgacttctacgtcgccggcttcacggtctacaacgccaccaccaactcttccctgtccagctgcagcaacactccattcgacatgaaccaaattggggatgtcacgaggctgatgcagtactggaacaacatcaggtgccccagcaagagcggccagaaaggctggaagaacgcgtgggagacgtccggcgtct

SEQ ID NO: 24901 - DNA, 550 bp, Oryza sativa
  Clone ID: uC-osflm202106a07b1
gtttgttccatcacactcacacaacacaaccctgcccagaaccttccgaagagagcatgatgttcggcttcgggcaccaccgtcaccatggccaagaccagccgccccagcaccacggcggcggcggtggcggcgcgcaccagcccaccttcaagatcttctgccgcgccgacgaggggtactgcgtcgccgtgcgcgaggggaacgtagtacttgccccgaccaacccgcgcgacgagcaccagcactggtacaaggacatgcgcttcagcgccaagatcaaggacgaggagggcaacccggcgttcgcgctcgtcaacaaggccaccggcctcgccatcaagcactccctcggccagggccatccggtgaagctggcgccgttcaacccggagtacccggacgagtcggtgctgtggacggagagcggcgacgtgggcaagagcttccgctgcatgcgtatgctgaacaacatccgtctcaacttcgacgcgttccacggcgacaaggaccactgtggcgtgcacgacagcaccaccatcgtgctttg

SEQ ID NO: 24902 - DNA, 460 bp, Oryza sativa
  Clone ID: uC-osflm202106a09b1
ttaattatcacttcaagactgcactagggacaagcaagccgtatgctctccgtgaaactgttgttgaagttccaaatgtctctcgggaggatattggtggactggagaatgtcaaacgggagctgcatgagactgcgcaatatccagtggagcatcctgagaaatttgagaagtttggcatgtctccgtccaaaggtgttctgctctatggccctcctggctggggtaagactttgttggccaaggcaattgctaacgagtgccacgctaacttcattagtgtcaagggacctgagctgcttaccatgtggtttggtgagagtgaggccaatgtgcgtgagatttttgacaaggctaggcagtcagatgcttgtgttctcttctttgatgagcttgactcaattgctacccatagaggaagcagcgttggtgatgccggaagtgctgctgatagagagct

SEQ ID NO: 24903 - DNA, 375 bp, Oryza sativa
  Clone ID: uC-osflm202106a11b1
tttattatccatcccgaccgccatcgaatcgacctcgggagatctatggcctagtccgggctggaccaaaccaccagcttcctcggcaccgcccctcgccgggatgagctcgtccgccgcgtcggcgactccggtggccgcatcaccatgcgccgcaccgtcaagagcgcgccccagagcatctggtatggacctgaccgtcccaagtacctgggcccgttctcggagcagacgccatcgtacctgaccggagagttcccgggagactactggtgggacacggcggggctatcggccgacccggagacgttcgcgaggaacagggagctggaggagatccactcgcagtgggcgattctgggggcgctgggctgc

SEQ ID NO: 24904 - DNA, 410 bp, Oryza sativa
  Clone ID: uC-osflm202106b01b1
acgatgcctcatctccggcggcgccaccgccgccgcctgctcgctgccgtcgtcttcctcctcctctctgccgtcgtcgcgcgaccagcagcaggcgccttcaccgagctcgagtccgcccagatcggccgcttccaggactacctccgcatccgcaccgcccacccgtccccggactacgccggcgccgccgccttcctcctcccctacgccgcctcgctcggcctccgcgccgccacgctccacttcaccccgtgcaagtccaagccgctcctcctcctcacgtggccgggcaccgacccctccctgccctccctcctcctcaactcccacctcgactccgtcccggcggagcccgagcagtggctccacccgccctttcgtcgccaccgtgacgccgtcacgggccg

SEQ ID NO: 24905 - DNA, 539 bp, Oryza sativa
  Clone ID: uC-osflm202106b02b1
cgggagagaagcgcacgcacctccgtccctcgtcgggagcgcagaaatggcgaccctctcgatggtctccgtccccatcgccacctcctccctgcccctctccgcccgaggccgcagctcctccgtctccttccccgttcccaagaaagggggtattggtcatggtggcctgcggatcgagtgcattcgtattggtggagtggagatcccgaaccacaagagggtagagtactcactgcagtacatccatggcattgggcggtcacgctcccgtcagatcctcttggacctcaattgtgacaacaaggtcacaaaggacctctccgaggaggaagtcatcactctccgtaaggaggttaccaagtacatgattgagggagaccttaaacggtttaatcgtgtggcgattgagaggttgaaggagattaggtgttacaggggcatccgccacaagctagggctgccagttcgtggacagaggacgaagaacaattgcaggacgctgaagggaaggagggcttctgttgcgaaagagaagt

SEQ ID NO: 24906 - DNA, 397 bp, Oryza sativa
  Clone ID: uC-osflm202106b03b1
gtctgttctatttaatttacctccttcacctccacctccgcgcgctgatcggagggggccagctccttctcctacggcatcgggaccgacgaggtagataggacaagagggccgcactggatacatgcctatgtactgagactcatggaacgaggaccaccctgacaagctctgcgaccaggtctcagatgctgtgcttgaagtacggctagggggggaccctgacagcaaggtcgtttgtgagacctgggccaacacaaacatggtcatggtctttggggagagcactacctaggctaacggtgactgtgagaagattgatagggagacatgccgtgacatctgatgtgcgtcagctgatgattgtctccatgctgaccagtgcaaggtgcttgtg

SEQ ID NO: 24907 - DNA, 461 bp, Oryza sativa
  Clone ID: uC-osflm202106b06b1
gcgttcttttatctgagggtctttgaatggctctcggcctgctttattattcatagcatttgtgtagtgtgtgcaaatccatcatcgcatcttcatatctgaagaaatgaaggtgaccactcagcttaagcccatggcctcctcgtcgacgtcgccgtcgccgacgcggctgccgcggagcgcgagcggcaaggcgcccacctcgccgccgtccagctccaacgcctcgcgccgacaccaccagcagccgccgcgggcctcggcgtcgacgcccgccaccccggcgccgtcgcgccaccacctcaggtcgctgtccatcagctgcatgacgatcaggaccgacgacgactcgccgccgtcggccgacacccacaaggacaaggcggtgacggccaagccgctgtcctactactcgtcgatgctgtcgccgaggaagctcatgcagcgcgcgttccgcgcgt

SEQ ID NO: 24908 - DNA, 541 bp, Oryza sativa
  Clone ID: uC-osflm202106b08b1
ttcattatctgaattaacacaacgttttgatggtcgaaaggtaatgcttggtgttgaccgacttgacatgatcaaaggaattccgcaaaagattttggcctttgaaaagtttctcgaagaaaaccatgaatggaatgataaagtggttctacttcaaattgctgtgccgacaagaactgatgtccctgagtatcaaaagcttacaagtcaggtgcatgaaattgttgggcgcataaatggccgatttggaacactgactgctgttcctattcatcatctggaccgatctcttgatttccatgccttgtgtgccctttatgcagtcactgatgtggcccttgtaacatcgctgagagatggaatgaatcttgtaagctatgaatatgttgcatgccaaggatcaaaaaaaggagttttgatattgagtgagtttgctggggcagcacagtctcttggagccggtgctattttagtaaacccctgaatattactgaagtcgcagactcaatcaagcatgctttgacatgtcatctgatgagag

SEQ ID NO: 24909 - DNA, 130 bp, Oryza sativa
  Clone ID: uC-osflm202106b09b1
tttattgtgtgaccaaatcggctagcgagtgagggaggaggtatttttgacaggggcagtttcacgctgacagcagtgtccatagcagagcgcgaagggtatagggctcatttaggaggatgagtggctg

SEQ ID NO: 24910 - DNA, 485 bp, Oryza sativa
  Clone ID: uC-osflm202106b11b1
ctccttgcttcggctctcaccaaccaaaccaacaacctcgctccgatggccgcgccaacgtcgtcgcagccggtggcgcgcttcctcccccgcggcggcggcggcgggttccgcgcctttccggagtccgccccggcttccctccgcttctccgtcggccgacgccgcgccgctcgactaggtccgcctattggaatcgtttcgcccccccttgtctgggtccgttcggtggaattcgggtagagtttgcttcctgcgcggctacggggcagttgggaattgcttggctggcctctctcggctttgagttttgtctggtcatctactcgtgggtgaagagggttgccactcgttgtctggctaagaaagaatcttaccatttttttagcattgttttatgccatgattgtgtctattgtatagggtaatttgaaaggagagaaaaacggctgcttcgttctatcctagcattaagagtttgttta

SEQ ID NO: 24911 - DNA, 389 bp, Oryza sativa
  unsure (1)..(389): unsure at all n locations
  Clone ID: uC-osflm202106b12b1
ttcgtttgcaagaccttcttcatcccgatcgcgacgcgcctacttgaccgcgtcggacggaggccgctcctcctcgccagcggcggcggcatggccatcttactcttcaccctggccacgtccctgctcatgatggaccggcggccgcagggcgaggcgaaggcgctagtcgccataagcatcgccgcgatgctgtcgttcgtggcgtcgttcgcctaggggctgggccccgtcgcgtgggtgtacacgtgggagatctacccggtgcggctgcgtgcgcaggcggtggccatcgggacggggctgaaccggctgatgagcggtgccaccaccatgtccttcctctcgctctccaacgccatcaccatcgncgggagcttgtacctgta

SEQ ID NO: 24912 - DNA, 540 bp, Oryza sativa
  Clone ID: uC-osflm202106c01b1
caggtttattgtaccaagccaccccgacacgaatcgctgaggccttccccctgttgttcatccctcactcaacttttgggcagcttggctttattcaattccccttcctttttattgcgaatttgcgactgcgagcgagcttttcttcctcaaaggaagacgacgacggaggagcagccctgcagagcataaagagaggagaggagaggagagggggccggtcaaggaagaggagggaagatgagcagcacagctccactcctcacaccctacaagatgggaagatttgatctttcccacagggtagttctcgcaccactgacaaggcagcgatcctatggtaatgttcctcagcctcatgccattctgtactatcagcagagaacaaccaaaggaggccttttgattgctgaggccactggaatctcggacactgctcaagggtacaaagatactcctggtatttggacaaggagcatgtggaagcgtggaagccaatcgtagaccgcgttcatgccaaaggaggaatatttttctgtc

SEQ ID NO: 24913 - DNA, 384 bp, Oryza sativa
  Clone ID: uC-osflm202106c02b1
gttgttttgttatatgaaggagaaaaatgtggcaaaagcagaaggcaggcctgagcctgcattgtatggtagtgaggacattcgtcctctgaccttagatgatttcaaatgtgcccatgagcaggttcgtgcaagcgtttaatctgatgcagcaaacatgaatgaacttctataatggaacgacctatatggtgagggcggttcgaggaagaagaaagcactgatctacttcatgtgagagcgattccatcataacatgtgagagagattaagaccctgccatattgatattgtacagtcgctataccacccctcttggcaagcgcttcgcgacttggccggccaaaaccagacgggttttttcctgttctcccttcaggagca

SEQ ID NO: 24914 - DNA, 564 bp, Oryza sativa
  Clone ID: uC-osflm202106c04b1
ctccttttcctccccctcccggtaaggcggacgaccgagctgaggctgttctagggctagggcacccacctcctccccttccgtatcctggatggctgctggtcggggcattaaccagctcctacggagaacactccataatcagtcctcaggctcatctctgctatcctcgttccggataaagcatgaagaatcctccgctggactgagagcattggctcttcttggagttggtgcttctggtcttttaagctttgctacaatagcttctgcagatgaagctgagcatggtttggcagcagctgaatatccctggccacatgctggcattcttagctcttatgaccatgcatctattcggcgtggacatcaagtttatacacaagtgtgtgcctcttgccattccatgtcattaatttcgtaccgagatttggttggtgtggcctacactgaagaagaaacaaaggctatggctgctgagattgaggtggttgatggtcctaatgatgagggtgatatgttcacacgtccctgtaagttaagtgaccggttcccacaaccata

SEQ ID NO: 24915 - DNA, 440 bp, Oryza sativa
  Clone ID: uC-osflm202106c05b1
gacctatccactcctccatgcggcatcgcacctcacttcccagccactacttgccaccaccaccaccacccacaccgaactaacctcgccgtggaaaccaaacccccgcgtccgaaccaccacctcgcctcctccccccctcttcttccagccccaccgcgcgcagcagcggcagaccacggcacggcgccgcgcggccgtaccatgccgtgaccggccggaacccaccaccgcctcgaccgccgcgcatatgcaccccatggccgtggctgtggccgccgccgtctcatgcccgcgcctcgtccccgggcgtatccccctctccgccgccttcgtcgccgtcgcccgtggccgtggctgcggggtggcggtgagggcgcgtggccaaagcgccgccacgcccgacccggctgccatcctgcggcggtcggcggtcgtga

SEQ ID NO: 24916 - DNA, 539 bp, Oryza sativa
  Clone ID: uC-osflm202106c07b1
gtacttaccaagtttaatttggagcacacatttcagctcaccactgctagcttgggaagaggaggaggagcttgagcttggagagagacaacaatggcggctcaggctcttctctctgggaggcagctgctggggaggccattgcaatcttcagtctccaggtcttcttcctccaggaaggcacccttcatggtcagggcagaggccactccccctgccaagcaaggtgctgacaggcagctgtggttcgcatccaagcagtccctgagctacctggatggcacgcttccgggagacttcgggttcgacccgctggggctatcggacccggaggggaccggtgggttcatcgagccacggtggctggcctacggcgaggtgttcaacggccggacggcgatgatgggcgtcgtcggcatggtcgccccggagctcctcggcaagctgggcctcgtccccgccgagacggcgatcccgtggttccagaccggcgtgatcccccccggggcacctacacctactgggccgacccttacact

SEQ ID NO: 24917 - DNA, 468 bp, Oryza sativa
  Clone ID: uC-osflm202106c12b1
gggagattggatcggaagcttctagaagtttccgtgggcgatggcgatccgcgcgaggtcctcctcctacgccgccgcggcggtcgcgctggcgctcgcgctggcgtccgtcgccgctgtcgccggcgaggtcttcttccaggagaagttcgaagatggatgggaaagtcggtgggtcaagtcagaatggaagaaggatgagaacatggctggtgaatggaaccacacatctgggaagtggaatggagatcctgaggacaaaggtatccaaacctctgaggactacaggttctacgctatttcagcggagtacccagaattcagcaacaaggataaaaccctggtgctgcagttctctgtaaagcatgagcaaaagcttgactgtggtggtggatatgtcaagttgcttggtggtgatgttgaccagaagaaatttggtggggacacaccgtacagcattatgtttgg

SEQ ID NO: 24918 - DNA, 448 bp, Oryza sativa
  Clone ID: uC-osflm202106d02b1
caacattgtgttaaaggatgaaagggatatcttctatctctctccgattttcaatgggcagaattgtctgtagtatttgtttctaaatcaaacaaaatgctgtgaagtcttcttttttgtaaagaacaaagatcagttattctgtcaagtctttttttttgcagcaaacaaaaataacttcttgtttttgtcaaacagtattcatagcactctcattttcaagttgggcaatacattcactgttttgtgtgtaagcatgcatctgctgtctgcttctcaataatgatgttggttgcattttgctaaaccaaggagaaaaccaccgaatcatgttctcaaattatctaaataacacttttatcttgtattgacatgtattggtttgggtggttcggacagtcttttctttgatatccatttctaaacatgtgggctctgttgatgtact

SEQ ID NO: 24919 - DNA, 482 bp, Oryza sativa
  Clone ID: uC-osflm202106d03b1
gtagtttctttctttattgctctctccctgtgcggcacgcgcgttgaatcgaactgtgcggtgagtatacacatcgagatcggggggaaatgtcggcccagatcacatcggggcatatctgatgagacgaatgcaactattgcaacactatccttgtggtgaatgtgccaaacactcgtccctacagcattgtgactgttagatgtgggcattgcgcattagggcgctccctggaaattgctccgtattacccagcacgcactgttaaagatcaccaggttcagagcagacgatctcaaggccatagctttggaagcaatgacatagcttgcataactcagaggacatcgactgccaatgtacccaatgccaaccagtcagcagcaggtgtgacctatacataggactgagaaaagacagcgtgtcccatctgcatacaacagattcatcaaggaggagatacagaggattaatacccgcaa

SEQ ID NO: 24920 - DNA, 560 bp, Oryza sativa
  Clone ID: uC-osflm202106d05b1
atgagatgggtggcaaggtgattgcacttggagatgtgacaggctcaatcagaaacaagaatgggttagacatacctgctctgatgaagcacagaaatgagggtggtgctttgaaagattttcatgatgcggaagtcatggattcttcagagctactagtgcatgaatgcgatgttctcatcccatgcgctttaggtggagtgctcaacagggaaaatgcacctgatgtgaaggccaaatttataattgaagctgctaatcatccaactgatccagaagctgacgagattcttgccaagaagggagtgaccatattacctgacatttacgccaactccggtggtgtgatcgttagctattttgagtgggttcagaacattcaagggttcatgtgggatgaggagaaggtgaacatggagctccacaagtacatgaacaattctttccagcacatcaaggccatgtgtaaatctcatgattgcaacctgaggatgggggcgttcaccctgggagtcaaccgggttgcacgtgccaccctcttgaggggatgggaggcatga

SEQ ID NO: 24921 - DNA, 517 bp, Oryza sativa
  Clone ID: uC-osflm202106d07b1
gtggcattgcacgatgcggcggtggtgcgccgccgccggcctcggcctcggccgccgcctcctctcctcctctgtctccgcccctgcccaccgccctcttccggcgcacctcatccccagccccaggccattgcccttctcctcccgccaccacctcttgactcctcctctgggtctccatccctcctccccaccgccgatgcaatggcagacgcagcaggtgcgccacttcgccgccaaggacagatcgcgcgcgccacggacgcccaccacctccaaggtcaagaagtacaagatcaagcccccctcctccatgaagtttcgattcagagtcatgaatgacggccaggtccgcaggtggagagccggcaagcgccacaatgctcacctcaagtcgaaggaagcgaaaagaagacttcggaagcctgcattagtgcacttagcttatgcaaaagtgataaaagagctcaacttctgcagctaggaaatcaggacagacatgatggagtttggcatg

SEQ ID NO: 24922 - DNA, 520 bp, Oryza sativa
  Clone ID: uC-osflm202106d08b1
gctaatgatgatgataaagtgagatatgcacgatttatcttacgtgcatatgttgaagatagcaagaagactaaatggtgtccagctcctgactgtacatgtgcagtggaatttgtcagcgatgggaactatgatgtctcatgcaattgcaaattcagtttttgttggaactgcacggaggaagctcatcgaccagtgaactgtgagactgtttctaggtggatattaaagaatagcgcagaatctgaaaatatgaactggatactggctaattctaagccgtgcccaaaatgcaaacgaccaatagagaaaaaccagggatgcatgcatatgacttgcactccaccttgcaaatttgagttctgctggttatgtctgggttcatgggctgaacatggggagagaactggtggattttacgcttgtaatcgctatgaatcagcaaagaggagggagtttatgatgagactgaagcaggagggaaagagccaaaaattcacttgagagatacatgcattac

SEQ ID NO: 24923 - DNA, 499 bp, Oryza sativa
  Clone ID: uC-osflm202106d11b1
gtcggtgccgccggcgagggctcgggccgactacgattacctcatcaagctgctcctcatcggcgacagcggtgttgggaaaagttgtctcctcctacggttctctgatggttccttcaccaccagttttattaccaccatcgggattgatttcaaaataagaacaatcgaactggatggtaaacggattaaacttcaaatctgggatacagctggtcaagaacgtttccgaactattacaactgcctactacaggggagcaatgggtattttgcttgtttatgatgtcaccgacgagtcatcatttaataatataagaaactggattaggaacatagagcaacatgcttccgataatgtgaacaagattttggttggcaacaaagctgacatggatgaaagcaaaagggccgtaccaacttcaaaggggcaagcacttgctgatgaatatggcatcaagttctttgaaacgagtgcatagacatacctgaatgtcgag

SEQ ID NO: 24924 - DNA, 538 bp, Oryza sativa
  unsure (1)..(538): unsure at all n locations
  Clone ID: uC-osflm202106d12b1
cttgttccctgaaaggattcaagatgttatatgcaggggggcggttctttttgacatgcttcctgaagagtacacgttccaagagatcattgccaagttggggccgattccaagcacattttctgctgttcatctttctagctatctgctacagaatgttgatcggtacagataccttctcccagggtactgcaggagagaaagtgggtagattttgatgatctacactcttcaatctgatgtgcaggcctgtcactgccatgttctccacctccgagattggctggccgtgacggttgcatctgatatgattggctaacttagctggatgattgcttgggatgagtggctatggatgatttcatcatccttcactgtgcaatctaacaccggacgaccctacaggctacagcatattgtatgctcggtcgtggcatggttaccttcccagaggagctcattaccctgtggtagccaccacangttcacctgtcattcatattacttccctgattgatacataaactgagaactgctg

SEQ ID NO: 24925 - DNA, 235 bp, Oryza sativa
  Clone ID: uC-osflm202106e02b1
ccatatgcattcccccccccctacagcaccacctcctcctgcggcttcgttctcgaacccgatgggctcccgcgccgccggcgccccacgagggctgctgctgcgcggaggagttggtatcgacggcgagcaatagttctcctggggctcgccaccatggaccacaacctagccctaaacattgccgagaagggcttcccgatcttcgtgtacaaccggaccgtcgccaaggacg

SEQ ID NO: 24926 - DNA, 428 bp, Oryza sativa
  Clone ID: uC-osflm202106e03b1
caagagtacgtatacagagacgtggtgaagatgtggcgcatactttgaaggtgtctttagaagatgtgtataatggatctatgaagaaactatcattatcacgaaatatcctgaggccaaagcgcaaaggaaaagggaccaaatctgaggctccagcaacatgctatggttgtcatggtgtaggaatgaggaatataatgcgacagataggactaggcatgattcaacatatgcagactgtctgtcctgaatgcagaggatcaggtgagatcataagtgacagggataaatgcacaaactgcagagctagcaaagttattcaggagaaaaaggtgcttgaggttcatattgagaaggggatgcaacatggccaaaaaatgtattcaaggtgaagctgatgaagctcctgatacagtgacaggagatat

SEQ ID NO: 24927 - DNA, 541 bp, Oryza sativa
  Clone ID: uC-osflm202106e04b1
gtgaggagctcgtcgggggcggcggccgagccgcctcctacgccggttgcaagttctgcaggaccctcgtcacctgctatgcaagctaatgttgccagcatagattggtcgggtagcagacaagcttccagagttgattcctcatcacatgttgctccgcatgcccatcagccttctcatagtttcgatgccactggaactgctttggattctgcaccgtcatgtaggccatgggaacgcggagacttacttcgtcgactggcaacatataagcctacaacttgggcttctaggcctaaggctgctagttctttggcttgtgctcggagaggttgggttaacgttgacatggacaaaattgaatgcgagtcatgtggtgcacatctcatattcagtacattgacatcctggtctccagctgaagtttcaaatgctggagaagcctttgccgagcagcttgatgcatcacaccataatagctgtccctggagaggcaatagctgtgctgacagcttggtgcagctccacctaacacaatcag

SEQ ID NO: 24928 - DNA, 523 bp, Oryza sativa
  Clone ID: uC-osflm202106e12b1
ccagttcttaattacttcaaggtttctgaaggggctgagcctcactcagccactttattcacagctttcatttgtatctgctgtgtggttattggcaacttggatttgattacgcccaccatcacaatgtttttccttctgtgctatgctggtgtgaacctgtcatgctttctccttgacctccttgatgctcctagttggcgtcctcgttggaaatttcaccattggagtttatcacttgttggtgcattgctttgtgttgtgatcatgtttttgatatcctggtcttttactgttgtctcccttgcccttgcaagcctcatctattactatgtgagcttaaaaggtaaggctggagactggggagatggatttaagagtgcatactttcaattggcactacgaagtctcagatcattaggagcaaaccaagtgcatcctaagaattggtaccccattcctctgatattctgccgtccttggggtaaacttccagaaaatgtaccttgtcatccaaagcttg

SEQ ID NO: 24929 - DNA, 469 bp, Oryza sativa
  Clone ID: uC-osflm202106f01b1
gatcattcctttcacgcctctctctcttctctgattgattactactccactacagtactagtccaaggcgggcggagacggcgacggattgcgcgggcgcaagcagcactcaagttcgctagtcctcctcctccttcctgtgtagtggagcgaggcgaggcgagccgacgccatggccgcggcgcagcgctggctccctgggatcctccgccgaggggacgggctcgcgcggcgcctctactcctccgcctcctccctcctcttcgacgacacccaggagcagttcaaggagagcgtgcacaagttcgcgcaggagaccatcgacccgcacgccgacgtcatcgacgcctacaaccatttccccaaggacgtcaacctctggaagctcatgggcgattttaatctccacggtcttaccgccccagaggagtatggtgggatggggctcggctacatgtaccactgcatt

SEQ ID NO: 24930 - DNA, 499 bp, Oryza sativa
  Clone ID: uC-osflm202106f02b1
cccgataccttgaaaccctagatcgccatatggcctcctccgccgccgccgccttctaccgcgacagggaggacgcggcgccgccgtcgtccggccccgggggaggcggcgccatggcggcgtacgacccgagctacgtgccggactcggtgaagacgttcgtgtcgcacctctaccgccacatccgcgaccgcaacgtgtacgagacgcaccagatgtacgagggcgggttcacccgcctctccgaccgccactttcgcgacacgccgtggccgccggcggaggccgtggcggcgcactgcgacggcgaccacgtcttcctcctcctctaccgggagctctggttccgccacgcccacgcccgcgttcagggcctcaccccggcgcagcgcgccgagtcgtgggacaactactgctccctcttcagcgtcgtcctccagggcgtcgtcaacatgcagctccccaaccagtggctctgggacatggtcgacgagttcgt

SEQ ID NO: 24931 - DNA, 444 bp, Oryza sativa
  Clone ID: uC-osflm202106f03b1
atcaagttggtcatcgagctcgagctgaatctaaacctttgcaacaatggcggcgcgtgttgttgtggcgttcgcggttgcgtccgccatgttcgtggccgtctccggccagaagttcaacgccatcttcagcttcggcgactccatgtccgacaccggcaacctctgcgtgaacggcccccccgccggcctgacgctcacccagcctccctacggcgagaccttcttcggccgcgccacctgccgctgctccgacggccgcctcgtcgtcgacttcctcgcggagaagttcgggctgccgttgctgccgccgtcgaagaggggcggctccgactttcggcgaggcgcgaacatggcgatcatcggcgccaccaccatggactccggcttctttcagtcgctcgagattggcgacatgatctggaacaatggcccccttaacac

SEQ ID NO: 24932 - DNA, 511 bp, Oryza sativa
  Clone ID: uC-osflm202106f04b1
ctcattctttgatttgggtggttgccattcatctccatctctcgatccatttctccccccaaattcttctccaatcagctcgattccgtcctcttcgagcagatcagctcccgctgatcgaatcggtgtcgaattttggttgtggttgctgttcttgggttggatcttggtggtgagaaagatcgtgatttttgttgttgggatttgggaggaattgtttgcgctggagggaggagttgagctcgctggccatggtttgccgaggcgagcagagaagaaatctctgagctttatgaagatcgccactcacctgcgccgctcctgcttcctccactccttctcggttgtcttcctctactggttttatgtgatctcataattctgggggaatcatcttctccgcgtcaatccgccattgttactagtagtagtagagctctcttgttgatggtcttcttcttcgtgttcttcttcggttgattaaataatcgtagcagcagaagaagcagct

SEQ ID NO: 24933 - DNA, 551 bp, Oryza sativa
  unsure (1)..(551): unsure at all n locations
  Clone ID: uC-osflm202106f05b1
ggcggtcgactcgagctgaggctgagctagggctagggcacccacctcctccccttccgtatcctggatggctgctggtcggggcattaaccagctcctacggagaacactccataatcagtcctcaggctcatctctgctatcctcgttccggataaagcatgaagaatcctccgctggactgagagcattggctcttcttggagttggtgcttctggtcttttaagctttgctacaatagcttctgcagatgaagctgagcatggtttggcagcagctgaatatccctggccacatgctggcattcttagctcttatgaccatgcatctattcggcgtggacatcaagtttatacacaagtgtgtgcctcttgccattccatgtcattaatttcgtaccgagatttggttggtgtggcctacactgaagaagaaacaaaggctatggctgctgagattgaggtggttgatggtcctaatgatgagggtgaaatgttcacacgtcctgntaagttaagtgaccggttcccacaaccatatccaaatgagc

SEQ ID NO: 24934 - DNA, 485 bp, Oryza sativa
  Clone ID: uC-osflm202106f06b1
cgccattcctgacaccgatcgagagagagagatcgcaccgatcgacgtacggtacgagacgaccatggcgcgtcctcgcttcgccaccacggcgccattgttggcgctcgccgtcctcgccgccgtggtgtccgtcgccgtcgccaccgctcccgccggcaaggaccccggcggcttcgtcgtcaccgggcgcgtctactgcgacccctgccgcgccggcttcgagaccaacgtctccaaaagcatcccaggggcgacggtgtcggtggagtgcaggcactacggggcggggagggagagcctgaaggcggaggcgacgacggacgagaaggggtggtacaaggtggagatcgaccaggaccaccaggaggagatctgcgaggtggtgctggacaagagcagcgacccggcgtgctccgagacggagaagacccgcgaccggtcccgcgtaccgctcaccagcaacaacggcctcaagcagaacg

SEQ ID NO: 24935 - DNA, 442 bp, Oryza sativa
  Clone ID: uC-osflm202106f07b1
ggaagaacattcaatctatttccctttttggtaaaaatgtgtctggttacaatcggatataatcaattgtacaacaaacaaaaaatacatcaactagaatacgcttgacgatatgtatatatccctttctcagatgatgaaaacatgggggaacatctgtgtctgttttccaatgcagcgctgttctattctgcatcaacgaaaatctctatgtctgacaaaggttcgtaaagcttcttttactgcacggcatacagtgtaattccagaaattttttgcacgcctacttgagtagctaccatactcaagtcaaaggtgatggattcaaaagcctcaactagtggcaaaaccaacttctgaaatccattgaccagaacatatttctattcattaaagtcccttggtgctaaaaatacttggaaagggccaactgtattgtctg

SEQ ID NO: 24936 - DNA, 232 bp, Oryza sativa
  Clone ID: uC-osflm202106f08b1
gtatgttcgagagagggaggaagggaggcggcgccggcacccttttacttctaccgtgacagggaggacgcggcgccgccgacattcggccccgggggaggcggtgccatggcggtgtacgacttcagctacgtgacggactcggtgaagacatacgtgatcaacctataccgtcacatccgagaccgcagcgtgtacgagacgcaccatatgtacgagggcgggttcaccc

SEQ ID NO: 24937 - DNA, 482 bp, Oryza sativa
  Clone ID: uC-osflm202106f09b1
ttcgtggcagcttgcttggcgctcgcctccctcggccgcacttctttcttcctgattcctgacgtcttggatggtgcgctttattatgacacacgacctgcactagtgtttacagctccaagtatgggttccagagaacccttcctgagtgccatcttcttcttcttcttcttgcttttgttctgcctcggctgcaagtgtatagcttcagagttacacttacacacgacccagactgcggtcctcaaggttgatgcctcactgcaacatgctcgacagatccccgacacgctatttggaatattttttgaggaaatcaaccatgcaggagctggtggaatatgggctgaacttgttagtaacagaggttttgaagctggaggccctcataccccatcaaacattgatccatggtccataattggagatgactcttccatatttgtggcgactgatcgaacgtcatgtttcagtcggaatac

SEQ ID NO: 24938 - DNA, 553 bp, Oryza sativa
  Clone ID: uC-osflm202106f10b1
tcggtgctgtaaggctcccaccaggcattgttgtttctgaaacatatctttttccacggagattgtggggtgatcctagtgaggacctgagtagcgaaccacggtaccttgttacttttacagttggaattacacagaaggctaatattgatgctgctgtcaaaaagttttcagataaattcactatcatgctattccattatgatggccggactactgaatgggatgaatttgagtggtctaaaagagctatccatgtgagtgtcaggaagcatactaagtggtggtatgcaaagcggtttttgcatcctgatgttgttgcccgatatgactacatattcatctgggatgaggacctaggtgttgagcatttcaatgcagagaagtatattgaacttgttaggaagcatgggctagatatctctcagcctgggttgcaacctgacgagggactgacatggcaaatgacataacggctaggtgatcaagaagttcacagagttactgaggagaggccaggctggtgcactgatccccatctgccaacatgtgc

SEQ ID NO: 24939 - DNA, 562 bp, Oryza sativa
  unsure (1)..(562): unsure at all n locations
  Clone ID: uC-osflm202106f11b1
actcgttctcaccatgccgctcctcctccgctgctcgccggcggcgtcaccgcctctgctcccgcgccgccgcagcggctccctcctctccgctgcgccgccggggcgccggccgctgctccccgccgccgcaggccgcgtcgtgctgggttgcgggctggtgacgctggactacctcgccacggtggacgcgtacccgcggcccgacgacaagatccgcagcggcgagctgcaggtgtctggaggtggcaacgccgggaacgcgctgacaggagccgcccgcctgggcctcaacacgaggctcatctccaaggtggcaaacgatgaaattggaggaaccgttctttcggagcttaaggaagctgggattgatatatctcatgttataatttctgatggtggaaacacaacatttgtatatgtcattattgataagcaaacaaaaactcgtacgtgtataatcacatcagggtaccctccaatgatacctagtgactngagaatgtcaagtttgtcagctgcactgcaagacgtaagcttactatacttagatggatattca

SEQ ID NO: 24940 - DNA, 465 bp, Oryza sativa
  Clone ID: uC-osflm202106g02b1
ggacgttggttgtgggcgtgcgggcggacgccgcgagccggacgctgctcacgtgggcggtcatcaatgtcgccgaccccggcgaccgcatcgtcgccgtccacgtcgtgctcgcctccgcgcccgtggccgtcgccaccaccgccgtcgactgcgacaccatgctcgccgtctacgagggcttctgcagtctcaagcagatcaatctaaagctcaagatttgcaaggactcctcggtccgcaaggcgctagttcgtgaggccaacctgtttggggcatccaaggttatcgtcggcatcgccaagaagaagcgcgggatttcgtccctgcactccggcgccaaatactgctccaagaagctgtcggccaagtgcgcggtgctcgccgtggacagcggcaagatcgtgttcaggagagaatccaatgtccactcaagcaaggtcttccgggagattcctggatgtg

SEQ ID NO: 24941 - DNA, 494 bp, Oryza sativa
  Clone ID: uC-osflm202106g03b1
gacgtgtctttgtggagcaacaagaacggcgcggcgagcggcggggaggagagattggatcgacgccggggggttaggaagggagcttggagagatggcggcttccgcgaggcccgtggatgcaggcggtgagagggcgacgagcttcgccatggcgtgcagcctgctcagccgctacgtccgccagaacggcgccgccgccgtcgagctcggcctcggcatcagaggtgagggtgaggctccaagggcggcgccggcgacgatgagcttgctgcccggcgaggccgagaggaagaaggagaccatggagctcttcccgcatagcgccggctttggccagcaggatgccatcaccgccgattctgctgctgatgctagggaacaagagcctgagaagcgtcagctgaccatcttctatggtgggaaggtgcttgtgttcaacgacttcccagccgacaaggcaaagggcttgatgcagctggctagcaagggca

SEQ ID NO: 24942 - DNA, 386 bp, Oryza sativa
  Clone ID: uC-osflm202106g04b1
cggacttttgggcgctcatctccatcttcctcctccctgcctcgctcctgtgcttcttctcttcatcaacaagagagctatccctggatctgtgtgtgtatatatatagagagagagggactgatctgggtgtagcgagctaggtagcctagctagcatggggaggtccccatgctgcgagaaggcgcacacgaacaagggagcctggacgaaggaggaggaccagcggctcatcgcctacatcaaggccaacggcgagggatgctggaggtcgctccccaaggccgcagggttgctgcggtgcgggaaaagctgccggctgccatggatcaactacctgagaccggacctcaagcgaggtaattataccgacgagtggacgagtt

SEQ ID NO: 24943 - DNA, 525 bp, Oryza sativa
  Clone ID: uC-osflm202106g05b1
gaagtgttttacaatcccgtgcaggtccacaatagagatatgtcagttgctcttttaaggactttcattgccaagcgtgaggaagaacataaggcaatgatggataagagggacaaggcgcataacaaagtgagccagagtaaatcatctggtccaaatggagagaatgggtcaacaggacagcatgatgaaatggatgttgatgctgaaaaggaaacaaataaagttgcggatgaaacagaagatctgtcaacagaagcaacaaagacaccttcgcggaaagtagccagagagcttaaggcaccagttgttcttgaggctttggctgcttctgggttgagatctatccgttatgctcgtgaaatagacgtgttagaaaaggtggtcgctctggacattgataaagtttgtattgaagcttgcaggcggaatataaagtttaatggtgcttctgctatgagtaagatcgagccttatttgactgatgctcgagtttatatgctcacacatcccaaagagtttgat

SEQ ID NO: 24944 - DNA, 536 bp, Oryza sativa
  Clone ID: uC-osflm202106g06b1
ccaagttcatgagatcgatcatatcgtattttgtagtaatgtagcagctagctagtgcagctgcaagctattagcgactgcatgctttgatcgatccatctagctaattgttgaatccatctaagcttaatggctctgcagcagagcatggcgatgccgatgatggtagtgtctgaccttggcaccgctcctcggtcatcgccgatggttcagctgcagaggatgaagaagcatctggtggtggtggcggcgttcaagagcagaaccaaggcttcccccaaggtggacaagtcgaacaagaacaagtcgatcgtggaggacggcatcttcggcacctccggcggcatcgggttcaccaaggagaacgagctgttcgtggggagggtggccatgctggggttcgcggcgtccctcctcggcgaggcggtcaccggcaagggcatcctggcgcagctcaacctggagacgggcatcctcatctacgaggccgagccgctgctcctcttcttcatcctcttcacgctgctgggcgccat

SEQ ID NO: 24945 - DNA, 401 bp, Oryza sativa
  Clone ID: uC-osflm202106g08b1
ttcactctcaagccagctccagccacacgagcctagttcaggtagatacaatggcgtccaccgcctctttcatgctcgccgtcttgctggcggtggccgtcgcggcggcgccggcgagggcggtgcgatgcccgccgagcgacaagcaggcgctgatgagagtgaagcagtcgctgggaaacccggcgacgctgtcgacgtggtccctggcgtcggcggactgctgcgagtgggaccacgtccggtgcgacgaggccgggcgcgtgaacaacgtcttcatcgacggcgccaacgacgttcgcggccagatcccgtccgccgtggcggggctgacggcgctcatgttgctggagctgttccgcctaccgggcctctccggccccataccggcgtgccttacc

SEQ ID NO: 24946 - DNA, 536 bp, Oryza sativa
  Clone ID: uC-osflm202106g09b1
ttgcttaaagatccactgggagatggtgtggcccgaggcagaatactaatcacaacacggagcgaggaagtggcaacaggcatgaaggccatggtccaccgcgtcgacaaaatggatgcagagaatggctgggcattgttgtgcaggcagtctctcccagagtgcagttcagaagagctcgcgtcactgaaggatgttgggatcaagattgtggagagatgtgatggccatcctctagcaatcaagatggttgctggtgtcctaaggtctagaggcaagagcaaggctgagtgggagatggttatgagaagtgatgtttggtccatgcggccaatcattcctgagctgcctcaagctctctacttgagttatgttgatctgccttctgaattaaaggagtgcttcctccattgctctttgtatccagaagaattacccattcagaggtttggtcttatccgacgttggatagctgaaggccttgtaagtgacaaagacaataagttgctagaagattctgctgaagagtactatgc

SEQ ID NO: 24947 - DNA, 274 bp, Oryza sativa
  Clone ID: uC-osflm202106g10b1
acacctacttcacctactactcctagggccgatcggatcggaccgggtcctactacttcaacaccgccaccgtcgccgaagataggagaagagggccgtactagacaccttactctttaccttggagtttgtgaacgagggccaccctgacaagctgtgcgaccaaggctgagatgctgagctaggtgcctgactcgtcgaggaccatgacagcaaggacgcttgcgagacctggaccaagacaaacatggacatggtgtttggtgagatcacc

SEQ ID NO: 24948 - DNA, 569 bp, Oryza sativa
  Clone ID: uC-osflm202106g11b1
gtttttatatattatttagtatgatctttcggaacttatggtgcttttgttttgtcattgcaggttaccagagctcccaaggaaacagtttggagaatgatcccaataatacaacaatctttgtgggcgggttagattccaatgtaaatgaggaccatctaaagcaagtatttactccatatggggaaattggttatgtgaagattcctctaggcaagcgttgtggatttgtccaatttactagcaggtcatctgctgaagaagccatccgtgtgctgaatgggtctcagattggtgggcagcaagttcggctttcatggggccgtactcctcagaacaagcaggctccccagcaggatgccaaccagtggaatggcaactactatggataccaacagggctatgattcttcttactatggtgcacccaatgcacaggatcctagtgcgcaaaactactatggatattctggctatggcaattacgaacagcagcaggagccctcacagcagcagcagcaacccccacaacagcccccacagcagtgaccatggcgacgtgcaactttt

SEQ ID NO: 24949 - DNA, 503 bp, Oryza sativa
  Clone ID: uC-osflm202106g12b1
agcaaatccatcatccaccaaatcaaaggcacgtaagggagcaccaacagctgcatcggccatggctcgcgcgctcgttctcgtcgtgatcctcctcgccgccatcgcggtggcgccgttcgcagaagcctcgacagtgagtgccgcctccagggtattgttggcctccgaagcgcccgctgagagcccggctgggcctgcgccggccccaggcccaacggaagagtccagcagcacatctgccgagtctccaagtgctgatgcctgaatgagtaagagtgaagctcaagtgaatgattcctaatacctggaatattgaccaaacatatatatgccagacatcctttgttaaggctaacatagcctcattttttttatttttttttgtttatcactacctctacctatgttgttgattgatcatgttaatcatgcaacattatgatttaatataagttggatgaagatcttcgttttccgttgttcaaagggtatgttaaaaa

SEQ ID NO: 24950 - DNA, 374 bp, Oryza sativa
  Clone ID: uC-osflm202106h01b1
cgagctctcgccccaacgagatttcctctttttcgggaggattttcctctacccggatccggttgctggtgccatagatcgacgcgccgtcttctcctgatcgcggtggtgttttttttttttgttttggatttccggtgctgggagtggagagattcgctcggattggatctgtgtgtgctgatccgtgtgggtggtggatctgacggagaatcggaggagaggaagaggagagtctggttgggtggtggagactacgatttctgtggaggattcgacttgcgcatcggctgcagatctggaaagggctttgggtgacctactgctccaaggtgcctaagtatatcgcgaagtgtctagctttcacgcccacc

SEQ ID NO: 24951 - DNA, 121 bp, Oryza sativa
  Clone ID: uC-osflm202106h02b1
cccacccgtccgggtattatccgatatccgcagcgagggacacatgggaggggacacctgaccagccccgtatgcccaagcatgatatcgaggcggagcggtacgaggggagcccgggccg

SEQ ID NO: 24952 - DNA, 464 bp, Oryza sativa
  Clone ID: uC-osflm202106h04b1
tgatgttgcttaagaaaactagaagactgtcaaaaatgccaggtgaagttagagctgagcataggcccatatcatcaatgaccgttcagatataacagaggagctaagtgaaaagttagccaagacaggaaatatagtcggagatgatgctacagagcaattcataagaaaggggctcactcctagatggggtgacctcgatgtcaatcatcatgtgaacaatgttaaatatattgggtggatccttgagagagcttcaatttcagtactggagaagcatgagctagcaagcatgaccctggattacaggaaggagtgcggtcgagacagtgtgctgcactcacttaccagcgtgtcaggggaatgcaccagcattggcgccgacaagcaggcttttgccattcagtgcgaccatcttctttagcttgagttaggagctgatattgtgaaggcacacacagagt

SEQ ID NO: 24953 - DNA, 559 bp, Oryza sativa
  Clone ID: uC-osflm202106h05b1
aaacattcgtaagttcctgatattcaccgtttagcagggagaacaaagggtgctttggtaaatgtgccttactttgaacagttcggtgtcaccttgatagaggctgccatgcatggtttgcctgtaattgcaacaaaaaatggagctcctgttgaaattcaccaggtgctggacaatggtctccttgttgatccccatgatcagcatgcaattgcagatgcactctataaactcctttctgaaaaacaactttggtcaaaatgccgagagaatgggctgaaaaatatacatcagttttcttggcctgaacattgcaagaattacttgtcaaggatatcaactcttggcccaaggtattctgcttttgctagcgatgaataccggattaaggcacctattaaggggaggaagcatgtcactgttattgctgtagattctgtcagtaaggaagatctgattcgcattgacagaaattctatcgaggctgcacgtaaagaaaatttgtcaggatcgacaggttttgtgttggcaacttccctgaccataggggagatacatt

SEQ ID NO: 24954 - DNA, 474 bp, Oryza sativa
  Clone ID: uC-osflm202106h06b1
gtccctgtcttaacttatccaagatcgctgatgcttccaaaggagtttgatgccaggtctgcgtggtcacagtgtaacacaattgggaccatacttgatcagggtcactgtggctcgtgttgggcatttggtgctgtggagtgtctccagcatcgattctgcgttcatttgaacatgaacatgtagctatctgtcaatgacctagtggcatgctgcggttacatgtgcggcgatggttgtgatggacgctatactatcatggcatggcgctactttgttacggaatggtgttgctaccgatgagtgcgatccatactttgatcaggtcggttgtaagcatccaggatgcgaacctgcttatcctacgccagtgtgcgagaagaaatgcaaggcgcagaaccaagtttggctggaaaagaagcattttagtgtcaatgcatacagagtaaattgtgatccacatgacataatggc

SEQ ID NO: 24955 - DNA, 521 bp, Oryza sativa
  unsure (1)..(521): unsure at all n locations
  Clone ID: uC-osflm202106h08b1
ttgctttatctgtctttggttttatcgcttgttgtttggtctggttcaataatacagcttatccgagtgagttttatggacctactgggccagaagcttctcaagctcaagcatttacttttctagttagagatcagcgtcttggagctaatgtgggatctgcccaaggacccacaggtttaggtaaatatctaatgcgttccccaacgggagaggttatttttggaggggaaactatgcgtttttgggaccttcgtgctccatggttagaacctctaaggggccccaacggtttggacttgagtaggttgaaaaaagacatacaaccttggcaagaacgacgttcggcagaatatatgacccatcctcctttaggctctttaaattctgtgggtggcgtagctaccgagatcaatgcagntaattatgtttctcctagaagttggttagcgacttcccattttgttctaggattctttttttttgtgggccatttgtggcatgcaggaagagcccgggct

SEQ ID NO: 24956 - DNA, 496 bp, Oryza sativa
  Clone ID: uC-osflm202106h10b1
gcgattagatcctcctcgtggcggagagctctcgcgactcgactcttgtgtcgcgcgcgcgcacggcgccatcaatcgattctcacatccatccatctgcctatctatctctcgcaattctggcggcgcgctgcgcgcatagggggggatcgaatttgatctagtggtgatggaggcggcggcggcgatggaggcggggcggaagctggcggcgcggcacccgcacgggcggagcaggacggcgcacaacatgtcgtcgtcgtcgctgcggaagaagtcggacgccgcgctggtgcggaaggtccccgtggcgccgctccgcccgctgctcgccaacctccaggaggtctttctcgccaccaagctcgccgtcctcttccccgccgtcccgctcgccatcggcgcccagtgctttcgcttcgaccaggtgtgggtgttcgctcttagattactgggccttattcctctcgccgagagagtcagcttccttacagag

SEQ ID NO: 24957 - DNA, 484 bp, Oryza sativa
  Clone ID: uC-osflm202106h11b1
gttctttgctaacacggagacattcaccctgatgatcagtgtgttcgggaaggtcagaattcatagcacaatattgtttttcagttcactgtaaaaatcttttcatttctctttctttgaaaacttacctctgaagaatttctgacatatattttttcatggtcaatttgaatggcaaagcaaccaatgtcatcgatgaaagttttcaacgagatgaagtcgattgggtgcaagcctaatatctgcacttacactgccctggtgaatgcatttgctagggaaggcctgtgccagaaggctgacgaagtgttcgaggagatgcaccacgcagggcacgagcctgacgtgtatgcttacaatgccctcatggaagcttacagccgcgctggattgccccaaggcgcataggagatcttctccttgatgcagcacatggggtgtgagcctgacagagcttaatacaacatcttggtagatgcatatg

SEQ ID NO: 24958 - DNA, 553 bp, Oryza sativa
  unsure (1)..(553): unsure at all n locations
  Clone ID: uC-osflm202106h12b1
ctctgttcaacattgtggggagtgttgccataaactggggttccaaccttctgaaattgggccatgatcagagagagaagctttcgacaaccaacaacaatcaaggcaatgacaaatttgttccgaagtcagttatgcattttcaaacttggagaataggcatactgttctttgctgcgggaaactgcctcaacttcatgtccttcgcatatgccgcacagtcacttcttgcagctcttggatcgattcaatttgtgtccaatattgcatttgcttactttgtgttgaacaagaccatttcagtgaaagtcatggtagcaacaacatttattgtatttggcaatatcttcctagtttcctttggtaatcatcaatctccagtttacaccccggagcagctagttgcgaaatacagcaatttagtgtttgttctctattgcatgtcactggtctttgtggttgcattcaatcagtatctctacaggagtggagaaactatcattttggatagtgcgaaacatactggctcacanttgcggacatttgtgccatt

SEQ ID NO: 24959 - DNA, 466 bp, Oryza sativa
  Clone ID: uC-osflm202107a01b1
gtttttggttcgccaaactgccacatccgcatccggcaccagatgcgctcgccggcgatgctctgatggaccgccgccgaggaggcgctcgcgctcgtcttcctactcctcatcgtcgccgtgccccccgccggggtcttctacctgcccggtgtcgcgcccaacgacttccagatgaaagatccacttcaagggaaggtgaacaagctgtcatccacaaagacacagctcccctattgataatactcccttcctttctgcaagccagatacgatagttgacagcgcataaaatcttggagaagttctacgtggggaccgcattgagaattctccttatgtagcagagatgagagagcccaagatgtgtcagatcgtctgcaaaagcaccattatcgattaacatgcgaaggagcttatggacaagatagaggatgagtaccggctgaacatgattcttgacaacc

SEQ ID NO: 24960 - DNA, 270 bp, Oryza sativa
  unsure (1)..(270): unsure at all n locations
  Clone ID: uC-osflm202107a04b1
gttttcctttaatcggaagccgccgaaccctcnctgctgggggacgcttagcggccagccggccaccttccactgcctagagctcctctccttctccgggttggtgtggcgtggagatccatcctggccgacctctttcgctagtttatgaaatttacttacaaaaacaagataaaagtggagtactcgaatatcttccccttgcgccatctagcggttgaacaggggaggggcgccaatctccatcttgcgagcaggggaggggagggg

SEQ ID NO: 24961 - DNA, 471 bp, Oryza sativa
  Clone ID: uC-osflm202107a07b1
gatatggagcggccggcgccggtgaggaagtccgggaccttgacggtcgacctactcgcctggccacagcagcagcaccagcccgacggccacgccgcctccaccccctcccccgctcgccgcccccaccagccatcggaggcgctgaggaaggtggtgatcggtggccaggtcacggaggaggaggccgagagcctcaacaagaggaagccatgctccgcgcccaagtggaaggagatgaccgggagcggcatcttcgcggccggcgccgactgggaggcggaggagcccggcagcgccgccgagcccggccgagccgtcccgcgcaattaccagccagctactgtgagccacatttcatttgctgaggatggaagtgttcctcccaaaaagccaacttaagtggctgaggtagcaaagcagcgtgagcttagcggtactctgcaaagtgaagcagacagtaagatgaag

SEQ ID NO: 24962 - DNA, 541 bp, Oryza sativa
  Clone ID: uC-osflm202107a08b1
cgttaccgaggaggcgccagctcgactccgcgcgagccgaggcctagaaccctaacccccattcgatttccggcgagatgcccaccggcgtatgagccttgctcgtcggcggcgaggtggggtggggcggggggcgggggcggcgagggatggaggcgaggcgggtctccgcgaaccctcggccgtcctgcgtgcggagggtgcttgcgcggaagcggcggaggcccgaggcgacggcgaacagcgcgcggaagctgcagcggcgggagatctccgcgctgccgtgccgcgcgttctccgcgagcaccacgcgggagcggttccgcaacatccagctccaggaagagtttgatactcatgatcccaaggagatgggttcactactaccttacttgatgaaaaggtctgagattattgagatagttggagccagtgatatcatgtttgctttatcacagtcaggagtatgtgctgcattcagcagagtctcaaaccagcggttttgctttctggatggaagaccagatgaagtcattcgcag

SEQ ID NO: 24963 - DNA, 209 bp, Oryza sativa
  Clone ID: uC-osflm202107a11b1
tttgactacttttgctagtactgtgcgcctgcgggtcgtgtttatattacctcctccatggcgccgcacccgcacagcaccacaccacctgcctagcgccaagctccaacagaagccgctagcttgacgcaagtccaaggaaggggggaagaggcaggaggatgggatcccccaagaagggcaagagcgccatgaatcacggcatctgg

SEQ ID NO: 24964 - DNA, 186 bp, Oryza sativa
  Clone ID: uC-osflm202107a12b1
gcgatggccgccgccacctccatcaacgccggcccgtgctccgctggtcggccgaagcggaggagccagcgccgcggcgcctctacagtcgccgtgcgcgcgtccggcgacgctagcaccgtgacgctgcttgactacggcgcgggcaacgtgcgcagcgtgcgcaacgccatccgacacctcggc

SEQ ID NO: 24965 - DNA, 503 bp, Oryza sativa
  Clone ID: uC-osflm202107b01b1
ggttgtgcttatgaaaccccatgcccatacaaatgggtatcagatagatatcgtatgcctcactgatatactgctctggaagagttgatatacacttttgggggaccttggatatttggcctattactttcaggtcttcttgttttgttagctcttgttttaagtgttgccaggatgaaatttgttggtactgatgagttacctgggcccgcaccaactcaacaaggatcccaaattgatcattcttttcctttcctagaatctctaaatgaggtcttggaaactaatagggctgaggaatcgcatgggcatgtacacaggatgtatttcatgggccccaacaccttcagtgaaccttggcatcttccacacaccccaccagaacagatttctgagattgtgtatgaggatgcatttaaccgatttgtcgatgagataaacactcttgcagcttaccagtggtgggaaggatcgattcacagtatcctctgtgtacttgcata

SEQ ID NO: 24966 - DNA, 501 bp, Oryza sativa
  Clone ID: uC-osflm202107b02b1
agttaggtttcttctctagtctagaccaaaggaaggaaaccaaccgagaggcgaggcgaggagaggagaggagaggagaggagaggcggaggaggagggaggagaagatgagagagatcatcagcatccacatcggccaggccgggatccaggtcggcaacgcgtgctgggagctctactgcctcgagcacggcatcgagcccgatggcaccatgcccagtgatacaacggttggcgtcgcacacgatgcgttcaacactttcttcagcgagacgggcgctggcaagcatgtgcccagggccatctttgtcgacctggagcccactgtcatcgacgaggtgcgcactgggtcgtaccgtcagctcttccaccctgagcagctcatctctgggaaggaggatgccgctaacaactttgcccgtggccattacactgttggaaaggagatcgtagatctatgcctggaccgtgtgcgcaagttggcagacaactgcactgggc

SEQ ID NO: 24967 - DNA, 460 bp, Oryza sativa
  Clone ID: uC-osflm202107b03b1
ctctctccaagtccgtctgcctctctcaccaccaccaccgtgcgctgctccaagggggagatggcggtggtgaagtgcatcagggtccacgagctgggcgggcctgaggtgttgagatgggagcaagtggaggtcggggagcccaaggagggcgagatccggatcaagaacaccgccatcggcgtcaatttcatcgacgtctactaccgccagggggtctactccgctccactgcccttcgtccctgggagggaagccgttggagtggtgaccgctgtaggtcctggcctgactggcagaaaggttggggacgtcgtcgcctattgccggcatcccatgggctcttatgctcaagagcagattatttccgcctccgtcgctgttccccttccttcttccatcgaccacaacacttgtgccgctattatgctcaaggggatgactgctcacgttctacttc

SEQ ID NO: 24968 - DNA, 411 bp, Oryza sativa
  unsure (1)..(411): unsure at all n locations
  Clone ID: uC-osflm202107b05b1
ctcagtgttcaccattgctgaccctccctctccaatccaagctccaacaatggctaaaccatccttgctcctccttcttcctctgctcatcttctccatcggcgcggctctcgcccgcgccgatctcatgctggacaggttcgagcagtggatgatcaggcatggccgcgcctacaccgacgccggtgagaagcagaggaggttcgaggtgtacaggaggaacgtcgagctcgttgagacgttcaactccatgagcaatggctacaagctggctgacaacaagttcgccgacctgacgaacgangagttcagagccaagatgctggggttcagacctcatgtcacgattcctcagatttcaaatacctgctccgctgacatagcaatgcctggagagagcagtgatgatat

SEQ ID NO: 24969 - DNA, 305 bp, Oryza sativa
  Clone ID: uC-osflm202107b06b1
cttgaccgtatcaggaagcttgctgacaactgcactgggcgccaaggtttccttgtgttcaacgctgttggaggtggaacgggctctggtcttggttcccttctcctggagcgcctttctgtggactatggcaagaagtccaagcttgggttcactgtgtacccatcccctcaggtctccacctctgtggttgagccatacaacagtgtcctctctacccactccctccttgagcacactgatgttgctggtctgcttgataatgaggccatctatgacatctgccgccgctcccttgacattga

SEQ ID NO: 24970 - DNA, 520 bp, Oryza sativa
  unsure (1)..(520): unsure at all n locations
  Clone ID: uC-osflm202107b07b1
tcggacttgtttggtattgttgagggtttgatgaccactgtccatgcaatcactgcaactcagaagaccgttgatggaccctcgagcaaggactggaggggtggaagggctgccagtttcaacatcatccctagcagcactggagctgcaaaggctgtcggcaaggtgcttcctgctctcaatggaaagttgactggtatggctttccgtgttccaaccgtggatgtctctgtcgttgatttgactgtcaggcttgagaagccagcatcctatgatcagattaaggcagctatcaaggaggagtctgaggggaaactcaagggtattctgggttacgttgaggaggaccttgtttccacagacttccagggtgacaacaggtcaagcatctttgatgcaaaggccggtattgctctcaatgacaactttgttaagcttgtgtcttggtatgacaacgaatggngatacaagctctcgcgttgtgacctgatccgtcacatgtacaacacccagtagaaga

SEQ ID NO: 24971 - DNA, 447 bp, Oryza sativa
  Clone ID: uC-osflm202107b11b1
ccctgtctcccctccttcctcctctcctttcccctgctctcttcccccctctcacaagagagagagagcgccagactctccccaggtgaggattcagccatgaagggggccaaatccaagggcgccgccaagcccgacgccaagttggctgtgaagagtaagggcgcggagaagcccgccgccaagggcaggaaggggaaggccggcaaggaccccaacaagcccaagagggctccctccgctttcttcgtttttatggaggagttccgtaaggagttcaaggagaagaaccccaagaataaatctgtcgctgctgtaggaaaagcagccggtgataggtggaaatccctgaccgaagcggacaaggctccctatgtagccaaggccaacaagctcaaggccgagtacaacaaggccattgctgcctacaacaagggcgagagcact

SEQ ID NO: 24972 - DNA, 510 bp, Oryza sativa
  unsure (1)..(510): unsure at all n locations
  Clone ID: uC-osflm202107c01b1
gatgggggggagggcaaagcgatggctccgatgaagctgtacgggtcgacgctgtcgtggaacgtgacgaggtgcgtggcggtgctggaggaggccggcgccgagtacgagatcgtgccgctcgatttctccaaaggcgagcacaaggcccccgaccacctcgccaggaacccctttggtcaggtgccggctttgcaagatggtgacttgttcctctgggaatcacgtgcaatttgcaagtatgtatgccgcaagaacaaaccagagctgttgaaggatggcgacctcaaggagtcagcaatggtggatgtgtggcttgaagtggagtccaaccagtacactcctgcactgaaccccattctttntcagtgcctaatccgtccgatgatgtttggggcaccccccgacgagaaagttgttgaggagaaccttgagaagctgaagaaagtgttggaggtgtacgaggcgcgcctgacgaagtgcaagtacctggctggagactacatcagt

SEQ ID NO: 24973 - DNA, 498 bp, Oryza sativa
  unsure (1)..(498): unsure at all n locations
  Clone ID: uC-osflm202107c03b1
gtcactttccactccccagttcccagtgaacagagcaggagcagcctccactcctcctctgccactccactccccaccaccactcgcatcaccatccatccatccatctccaacccaagccgaatcacaccaatcgccatcgccatcgccatcgccgtgcgtggtcgccggtgccggcggcggagggggagggggaccaagggaaaagagagaaggtgagctgagctgagctgaggtgaagtggtgctgaggcgagtgactggggggcaatggcagcggcgtgggtgctggccgcggcggcggcgttggcgctgtgggcggcggcggcggagggggcaaggtcgccggcggcgagggtgcaccggcacctcaagaggctcaacaagccggccgtcaagagcatcgagagcccagatggagacatcatcgactgcgtgcatctctctcaccaaccagcatttgatcatcccctactcaagaaccatactctncagatga

SEQ ID NO: 24974 - DNA, 510 bp, Oryza sativa
  Clone ID: uC-osflm202107c05b1
gtgttagtttatgctgggaagatgggaaatatatggggggactaatacttaaagctacactggacagaacacggagattaacggaggagtactctgaagcacttctttctatattccctgaaaaagtaatggttattgggaaagcccttggaataccagataacagtgtgagaacttacacagaggcagaaattcgtgctggcattgtttttcaggtatctaaactatgcacagtacttcagaaagcaattcgagaagtacttggatcaactggctgggatgttcttgttcctggagtggcccatggaactctgatgcgggtggaaagaattcttcctggatcattaccttcatctgtcaaagaacctgtggttctaattgtagataaggctgatggagatgaagaggtcaaagctgctggggataatatagttggtgttattcttcttcaggaactacctcacctttcacatcttggtgttagagctcgtcaagagaatgttgtatttg

SEQ ID NO: 24975 - DNA, 388 bp, Oryza sativa
  Clone ID: uC-osflm202107c06b1
gttgtcacctccacgaacccaccaaatctccatcgctgcggctacactgctccggccatggccatcgtcgccgtcacggccggaggacggcgccctccctgccgccgcgtgccgcccgccgcttccccgcccgcgaggctctcctgccgctgtgccacccacaccgttcccaggaggaatgtactatccacaatgctatccacttcaacagtcttcctcttcggaccgaaacagatcacactggccgagacaactggtggtacattcagggagtacatcgacacattcgatggctactccttcctctacccaaagagcctgatccaggtcccgggaagctgtgctgacatattcttcagagacccgtttcttctcgacgagaacatgt

SEQ ID NO: 24976 - DNA, 543 bp, Oryza sativa
  Clone ID: uC-osflm202107c07b1
atctgatgtgatttcttgatatcctaaatataagattaatacttcacgttgctgagttgagaaaaagatggttgaatcaaaagaattctttttttgaagttcattttttatcaggggacaatatgaatattataccgtgttccattaaaacactcaaggggttatacgatatatcgggcgtagaagtaggccaacacttctattggcaaataggaggtttccaaattcatgcccaagtacttatcacttcttgggtcgtaattactatcttgctaggttcagttatcatagctgttcgcaatccacaaaccatcccaaccgatggtcagaatttcttcgaatatgtccttgagtttattcgagacttaagcaaaactcagattggagaagaatacggtccctgggttccctttattggaactatgttcctttttatttttgtttcgaactggtcgggtgctcttttaccttggaaaattatacagttaccccatggagaattagcagcgcccacgaatgatatacatactactggtgctttag

SEQ ID NO: 24977 - DNA, 529 bp, Oryza sativa
  Clone ID: uC-osflm202107c08b1
gcgcaaagccctcgcctccctcctcctcctcgtcgccgccgccgccgcggtctccaccgcgtccgccgacgacgtgctcgccctcaccgagtccaccttcgagaaggaggtcggccaggaccgcgccgccctcgtcgagttctacgcgccatggtgtggtcactgcaagaagcttgcccctgaatacgaaaaactcggtgcaagtttcaagaaagccaaatcagtcctaattgcgaaggttgactgtgatgagcacaagagtgtgtgcagcaagtatggagtttctgggtaccccacaatccaatggttccccaaaggttccttggagcccaagaagtatgaaggtcaacgtaccgcggaagcccttgcagaatatgttaactctgaagcagccaccaatgtaaagatagctgcagttccttctagtgtcgtggttcttaccccagagaccttcgactctgttgtccttgatgaaaccaaagatgtccttgtagaggtctatgccccatggtgtggtcactgcaagcat

SEQ ID NO: 24978 - DNA, 512 bp, Oryza sativa
  unsure (1)..(512): unsure at all n locations
  Clone ID: uC-osflm202107c09b1
tcgcttcaacatgaagatgccattgctactcctcatcgccatcgtcgtcgtctccctctcccgtggcaacggggagcagaccgacctcacgcgggagacgttccccgcgggcttcgtcttcggcaccgcgtcgtcggcgtaccaggtggaggggaacgccctccagtatggccgagggccctgcatctgggacaccttcctgatgcaacctggtgtaactcctgataattcgaccgcgaatgtgaccgtcgacgagtaccaccgctacatggatgatgtggacaacatggtgagagtgggcttcgacgcgtatcgcttctcgatctcctggtctcgcattttccccagtggacttgggaagattaacaaagacggcgtggattattaccacaggctcattgattacatgcttgctaacaacattattccatatgttgagctctaccactacgaccttncacaggtgctgcatgatcaactacagggatggctacaccccagaattgtgagag

SEQ ID NO: 24979 - DNA, 494 bp, Oryza sativa
  unsure (1)..(494): unsure at all n locations
  Clone ID: uC-osflm202107c10b1
tttcaattctccttgctggaatattgtgcatatatataaactatgactgtgatcgtcagcgccaagaattccgtcggacaaatgggaaatgctcaatatggggcaaagctccatctaagattgttgcttcctatcagactacaaatggagaaacaaaaagcagtcttctcttgacttctggatggttaatatattcgtcatttcttctttacatagttcatcaaaagtgatttgtaccatgtttgtttcaatagaggcaatgaatggcttttgagcatgcaccctcattttccatttggacaggtggggcttgtctcgtcattttcactatgttccagagattctatctgcttttttctggacagttccagctctttntgatcatttcctgccgtacttctatgtgatctttctgaccatattgctgttcgaccgagctaaaagggatgatgaccgatgctcatcaaagtatggcaagtattggaagatgtact

SEQ ID NO: 24980 - DNA, 517 bp, Oryza sativa
  Clone ID: uC-osflm202107d02b1
aggtatacttgttcaggtcgagcagcggcgactgcgcggcgttcctgtccaacttccacacgagcgcggcggcgagggtggcgttcaacgggcggcggtacgacctcccggcgtggtccatcagcgtgctgccggactgcaggaccgccgtgtacaacaccgcgacggtgacggcggcgtcgtcgccggcgaagatgaacccggcgggcgggttcacctggcagtcgtacggcgaggccaccaactcgctggacgagacggccttcaccaaggacggcctcgtcgagcagctcagcatgacgtgggacaagtccgactacctgtggtacaccacctacgtcaacatcgactccggcgagcagttcttgaagtccggccagtggccgcagctgaccgtctactccgccgggcacagcgtgcaggtgttcgtcaacgggcaatacttcggcaatgcgtatggtggctacgacgggccgaagctgacgtacagtgggtacgtcaagatgtggcagggcag

SEQ ID NO: 24981 - DNA, 386 bp, Oryza sativa
  Clone ID: uC-osflm202107d03b1
ggttaccttaactttattgaacatagcataaactcactcaggaatggcaaagaaggtgtgatgtttattcaggaaatcgctagcaacctaagagaactgcgagcaattgctggtagtaaataacacgcacaacttctttttagttttttacacaacttatttgtatagcagatacccatccatcttgtaaattgtatacttggcaatctgttctagtttgagggaaattgcatagaaaaagcttgtattaaacacaaggcagacataattgtaagctgtgcatgtttttcatttttttgagctttgggtttgctcataatttttttaattgtattactccaagacagatttgttcacaacaaaaataataagaaaaagtataattg

SEQ ID NO: 24982 - DNA, 499 bp, Oryza sativa
  Clone ID: uC-osflm202107d04b1
tgatgatgcatggcttgctcttaccatgaagctattggattgtttcaattctagtcttgcttatacatcaaatgagcaagaatggaagatattaattgggatattgtgccttattttaaaccattcagcaaacaaggtgcttattgagcctgcaaaagccataatcttgaataattgtttggttttgttgatggatggtatagttcaagaagcttgtgcaaagggcccatctttatttcaacacaatcaggagacaacctttggggaattattgattcttatgcttttattgatatttttctctctacgaagcctgcaagcgatcttagaggcaagcattgactggcaggaattcctgcaatattcagatgacactgagtcttcctctgttcttggcattccgtgccatgatttgtgtcgtctcatgcactttggcccttcttccgaaaagctattgcttcacaatgcctgttggaattgcttaacagaatttcagatc

SEQ ID NO: 24983 - DNA, 438 bp, Oryza sativa
  Clone ID: uC-osflm202107d05b1
ggtttccttcaccatggccctctcgtccccggcgctggccggtaatgccgacgcgaaggtgttcggcgaggggcgcatcaccatgcgcaagtcggcggcttaagcccaagcccgccgcgtcggcgagcccgtggtacggcgccgaccgcgtgctctacctcggaccgttctctggcgagccgccgagctacctgaccggcgagttccccggcgactacgggtgggacaccgcggggctctccgccgacccggagacgttcgccaagaaccgggagctggaggtgatccactccaggtgggcgatgctcggcgcgctgggctgcgtgttcccggagctcctcgcccgcaacggcgtcaagttcggcgaggctgtgtggttcaaggcggagtcgcagatctttagcgagggcgggctcgactacctctggaacccgagcc

SEQ ID NO: 24984 - DNA, 411 bp, Oryza sativa
  Clone ID: uC-osflm202107d06b1
cggttctctaaaacctctcccgctccacgcgcggggcgcgtgaaaccctagcgagaggcgccagatctcccgcatccggatcgccgccatggccgccgccaccgcgctggactcgctgccggcgccgctccggtcgctgcggctgaagacgaagcagcaggagctcctgctccgggtctcggcgctggcgctcatctacgtgctcgcgttcgtcgtccgcctcttctccgtgctccgctacgagtccatgatccacgagttcgatccctacttcaactaccgcaccacgctcttcctctccgaccatggattcagcgagttctggaactggttcgatttcgagagctggtacccgctcggccgcgtcgtcggcggcaccctcttcccgggcctcatggtcaccgccgcgct

SEQ ID NO: 24985 - DNA, 532 bp, Oryza sativa
  Clone ID: uC-osflm202107d07b1
tcgggtacttgttttttgtatttttcttttcggtagctactttctacatctctcttatttggatcacgtattatcctttttcattccacgaccgacgaccaatgttccgacacctcgccgccctgatcctgtccgccgtcgtcttggcggcgtccacaagctccggcgtcgtcgatgcccgtcctgtccacaccggcccgtaccacgtcgtcatcagaaccgccgccaagcccagccgtcgcctgatcgggctcggcggcaatgccgccatatgccaagaggtgcactacaaggcgctgtgcggcacgctgacgacgctgccgggggtgatgacgccgcagcagctgctggacgcggcgttgcgggtggcggagtccaaggccatgatggcggagaagcggctggccgacgtgatgaagtcgcgcgcggtgaaggccgaaggcacgagcatgtcgtcgacgctcgacacgtgcaagggcgcctactcgtcgctggccgacgcgctgcagaagacgcgcgacacgatcaagag

SEQ ID NO: 24986 - DNA, 524 bp, Oryza sativa
  Clone ID: uC-osflm202107d09b1
gggggcgattttgctcatcgccctccgcctagatcgaatccgaatcccgcctcctcctcctcctcctcctccccccgcgccgatcttgccccgctccctcgccgcagctgcgggcttgccctagcccgccgcatcgccgacgtactacgcccgctcggctccaggctccagatccggcctccagggcgtgcccgctgctggacggcgctctcccgcgtccgtggctacctcctcctccgggtttgcgttgccgtcgccgaagcgatccgttggtggattgtgtgtagctctgtaacaaaggatcttggtccataggagtgaaccagaaggtacaaaacttcttggctattatgacatcggtgggtctagtagattcttcatcaggtttcccggaaacgagtactagtggagccactgatcgtctgacagatgatatcagcgagatgagcataagagataaggaagttgaagctgtagtggtcagcggcaatagtatggacataggtcacactattgtgacaact

SEQ ID NO: 24987 - DNA, 541 bp, Oryza sativa
  Clone ID: uC-osflm202107d10b1
tctcacaaagtgggagagagagagagagagaggggatggaaatggcggatgagctggggcacttgctggtgttcgggttcctcttcaacctgggcgtttacatggtggcgccggcgatgaccgacgtgaccatggacgccctctgccccggccaggacgagtgctccctcgccatctacctcaccggcctccagcaagccgtaagctacctaccttagctagctcatcatccatgcatatcatgattcatcatctgttcaatttcgatctcttcagctgtaaatgatccatgatatgcatccataatccatctatccatccatccatccatatcatcattttagaagttaagctcaaatcaatcgataattttttttaaggaaaaacagcatgagactgtgctttttcattatatatagcgagagaaaaataccgcccctaagagcaagaaaggggaaaagctctatagtgtgaggcaaaaggtcacgtaaacgctttgcagatcaattgatatttgctcgtgttgacatgatcatatata

SEQ ID NO: 24988 - DNA, 451 bp, Oryza sativa
  Clone ID: uC-osflm202107d11b1
tcgacctcaccgagcgagcagctagctagctgcggcgatggcctccagagcggcggcggtcgccgtcctcctcctcgccgtggcggcggcgccgctcttcgccgcggcgagcgcgcatggccgaggctaccttggtgccaagtcctggcctcctgacggcagcctgagctcatcaagctccggcgaggctgcagcggcggacgtcgacgacggccacacggactggaagtgctactcctcctgcatgagcaagtgctgtcaccgccacgacgacgacgacgacgacaaggccaatgccaaggccaacgccaccgccggcgccgccgccgtcgggctcgacgatgactacaagtgcaagaagcagtgcctcggcaactgcttcaaggacgtgccggccgtttgctaccacaagtgcgtcgacgactggtgcgcgaagctgccaccatatagc

SEQ ID NO: 24989 - DNA, 547 bp, Oryza sativa
  Clone ID: uC-osflm202107d12b1
tttgtttttcctcgccgtacattcaaaagctttctctggagactttctacattctgaagattatattgggaataacattttaacatgaaggccgatcggttaatgttgtccaatctcgaccatgatttgggatacctacacaagtttccctcagattttccaatgtctcatgatcttgggttgagcttgtttacgcatgccggtacaatggtgggaagttctttgcgacagcacaggcagatctgttcttcaggaaatttgattgttcaggaagcatttgatcgcctcaacaagtttgccagagctttctgctactggctttctagagtgtctaatcccaagaatttacgtaggctaatgagtatggaaggccctagctctggagcttgccagtcacatatcaatcatttgagctcccgtatgcaaaatttggctgtattgcagtttggttatctagtaagagaagagcatgctgtacaactgcttttagctaacttcgcaagcacaacacttgggcgactctggaatgatttcagcagcacatgcc

SEQ ID NO: 24990 - DNA, 481 bp, Oryza sativa
  Clone ID: uC-osflm202107e01b1
ctctatcattgctcatcatcacaatcatcaacagctcagttcatccgtgccgtgttaatttagctagctagcaatcgagctcagttttcctaattaattgctagctcgatttgctcggtgatctcttcaattcgccggagcttggaatcaatcgagagattagagtgtacgtgagagctagcgggagatcgtcggcggcgatggtgaacacggcggcggtggcggcggcgaagggcagcaggggcagcgggctgccgctggcgtcgctgaaccacatcagcatcgtgtgcaggtcgttgcaagagtcgctcaccttctacaccgacgtgctcggcttcttccccgtccgtcgccccggatccttcgacttcgacggcgcatggctgtttaattatgggattggtatccatctgcttcaggctgaagatcctgacagcctgcccaggaaaacagagatcaaatcctaagataatcacatctc

SEQ ID NO: 24991 - DNA, 425 bp, Oryza sativa
  Clone ID: uC-osflm202107e02b1
gtttatccgtggcgcatcccatctcgccccggcgactcgtcggcgtcggcgtcggccatgggcggcgactggcaggagcttgcccaggcggcggtaatcggcctcctcttcgccttcctcgtcgccaagctcatctccacggtcatcgccttcaaggaggacaacctgcgaatcacccgctccacgccgacctccccctgcggcgtggacacccccgtcgccccggccccacctgcggcctgcctcgacggcggccatggggacaccagcgacggcagcggcagcgacagcgacagctactgggagggcgtggagagcacggagctcgaccaggagttcagcgcccgctccgagttcgtcgtcggctccgctgcgtctggcacgagcgtccccgagcaagcccagcttcagctctatgggctcta

SEQ ID NO: 24992 - DNA, 536 bp, Oryza sativa
  Clone ID: uC-osflm202107e04b1
gcttcaatgccccaaaaggttgccacgagctggaccctgcagcaactccagtggaccttcttaaggtcattacagaagttacggaagatacagcaacacaacctgctaagtagaagagggcaactatgaacactgaagatagcttggatgtctcaactgtcaaatgcacttcactgaactcaacatttgttggtcacttaagttctagtatgtcatcttatttttggctgatgacttggacaactctaccagggcaagcagcttatgtcgcagaattctgacataattcttaggcattttctaacattttggttttactgcaatacggatatcttcctgagagtaaaagactatttggaggccagttttggcaattgacgaggcgaccaagtggtgcttgctgaggctattagtcaacggaagctaagaagcctcatgaatcgctgaaagtgctacttgtttgtcactctttaagtacggcgctctgcatccacagctgaatttgaggggaagaccactaggctttcccatgtacc

SEQ ID NO: 24993 - DNA, 489 bp, Oryza sativa
  Clone ID: uC-osflm202107e05b1
catgaagctcagctcctcctcctctcgcatggcagccatggccaccaccgcgtccagcctcctcaagacctccttcgccggcgtgcgcctccccgccgccgcccgcaaccccaccgtctccgtcgcgccgcgcaccggcggcgccatctgcaactccatctcgtcgtcgtcgtccactcccccctacgacctcaacgccatcaggttcagccccatcaaggagtccatcgtgtcccgcgagatgacccggcggtacatgaccgacatgatcacctacgccgacaccgacgtcgtcgtcgtcggcgccggctccgcggggctctcctgcgcgtacgagctctccaaggacccctccgtcagcgtcgccgtcatcgagcagtcggtgtcccccggcggcggcgcgtggctcggcgggcagctgttctccgccatggtggtgcgcaagccggcgcacctgttcctcgacgagctcggcgtcgcgtacgacga

SEQ ID NO: 24994 - DNA, 513 bp, Oryza sativa
  Clone ID: uC-osflm202107e09b1
ttgtactaatttcggagaacagatgaacctgaaaaacaaactgctgatgagacaggaccttttggtggaataatgacagagtgtggcaccaatcaacctattgagaaagtactcgcacctgaagatgcggagtgttgcatttgcctttcggcatatgatgatggtgcagagctgcgtgaacttccttgtgggcaccatttccactgtgcctgcattgataaatggctgcatatcaacgcaacatgccccctgtgcaagttcaatatccggaaaagtggcagtagcagtggaagtgaagaagtatgattgtgtgaatatcctccggtcgagaacaccgatccatttcaacttcacacctgtctctgctaatgcaaccacaggacctgaccagtgtaaattttgtatccaaaatgtgtgattagcgtcatatatgtacttgaagtgactcaagactgctgttcatatccacatacatggttgtccaatgtgtcttttactgaccggaatacatgc

SEQ ID NO: 24995 - DNA, 526 bp, Oryza sativa
  Clone ID: uC-osflm202107e10b1
tcgatttcagtgctccagcaaagaaacttggttttggtctgattggctctggcaagcggacatctgtaccttcagtttttgctgaagaggatgacgaagataatgatgataagcgggcaagacctttagttcctattgattactcaacagaggaactgcaagctgttcaggccaattcttctactggccaaccaaatattgtagcagctgctgaatttgccaagcgcatattggtaacaaaggatgataaatctgatgttgagaaggataggagtaggagatcaagtgatagaacgaaccaaagggatagagatagaaatgatcaagatgttggtcgcaccggtgatgagagaagggaaaagacacatgaccgagagaaagataagcacgataagccaaagtctgagaacaagaatattttggatgcaaacaattaattgacatgattccgaggacaaaggaagagctttttgcctatgatattaattgggcgatatatgacaagcatgagttgcatgagagaatg

SEQ ID NO: 24996 - DNA, 463 bp, Oryza sativa
  Clone ID: uC-osflm202107e11b1
tcggctccaacttcacccacttctcattcaccatggtgcctacaagatggatctactgcgcctcccaccttctgataactgccttgctcacaagagaatcgtatgaccacttctccaccaccacttcatgctgcatccttaccacgtggaatggttacaatgcgtcgcgacatcactacgtgcagttcttctcatgtgtcacttcttgtttctggtagcgcacaaacttgttttgatgaccagcttttggaaagccacatcaaggatgagatcattgagaagagccaactaatccatgctctgccaaataatgatgataagttatcatcaagtgtgcctttcacttcaatgtccacagcttgtggggcttctacctttgaagattggatgacccttcctaagtgggcagcacaggttctgaagcatttatcgccagacatctcatacaggagcttagtggcac

SEQ ID NO: 24997 - DNA, 439 bp, Oryza sativa
  unsure (1)..(439): unsure at all n locations
  Clone ID: uC-osflm202107e12b1
tcgtttcttcctcctccccttcgccgaatcccccacaggaatccgccatggctagtgttctcgccgtccccctcctgctgtgcctgctcgcctccgcctccgccgcccgcttcgccccggcggacaaccacctcctcgcctgcggcgcgacggcaccggccgtgctccccgacggccgacgcttcgtccccgactccggctgcgcctccacgcgcctccgctccccggcacctaccctcccgtccgcggcctccagcggccccgcagccgacccctctccacgccgccgcgcgggtcttctcctgccgcgcgtcctacgacctcgccgtccgccgccgcgggtaccacgtcctgcgcctccacttctaccccttcgagcccgcgctcgcgtccgcgcgcttncacgtcggcgccgccggattcctcctccttcacaact

SEQ ID NO: 24998 - DNA, 541 bp, Oryza sativa
  unsure (1)..(541): unsure at all n locations
  Clone ID: uC-osflm202107f04b1
cgtttttctgtgataaaggaaactataacaaaggagtatgagaatttcaaatttcggcaaccatatcagcaagctttctactattgttcattgatattagaggagcaaacgtgggcatgggatgaagaacttgctgcagtatctcaaattgaagctagcgatctcgagaagtttttgcctcatctgctggggaaaacatttattgagagctactttgctgggaacatggaaccgggtgcggtaaaaggtgttatgcagcatgttgaagacatcttattcaatgcacctgtcagtctgtgcaaagcattaccctcatcacagcatcttacaaagcgaattgtaaagcttgaaaggggtttgaggtattattatccagcattatgcctaaatcaccaggatgaaaattcttgccttctgcattatattcagattcatcaggatgatctcaaaaaaatgttatactccagttgcttgctcttgntgctaagcaaccagcttttcaccaattaccgtcagttgagcaacttggctacataacact

SEQ ID NO: 24999 - DNA, 497 bp, Oryza sativa
  Clone ID: uC-osflm202107f05b1
attatttttaataattttagtttttttttttttggctttagatatattcccaatccccaacctcccaataatccgatctctcccagttctgttcggatcaaggctgtgtcgatcgcaaaaaaagaaaaaaaaaaacaatttccttttggggtggttcatctgttgatcacttctttgtttcccgcgttttgttggggattcgattttcgggttaagattttctacacgatggccttgaacttggctcagagcgccgcggcggcagcgtgcttcgcgaccgccggtgatgcgcggcgagctgcttcggtggtcgccatgccgtcgtcgtcgtcgtcggccacgacgagcctgaggatgaagaggcaggcggcgtgcgagccggtggcgtgccgggcggtggccaggcacgtggcggcggcggccgcgagcagcaggaggaacggcgtgccggtgttcgtgatgatgccgctggacacggtgagcaagtgcgggagcgc

SEQ ID NO: 25000 - DNA, 496 bp, Oryza sativa
  Clone ID: uC-osflm202107f06b1
attcggtgcctctgcccggagccgaactccgacgccttatcgactcactcaccaagtgctcgacgcaattccccaccggggagcccgcccgccatgccggagagcaacggcgccgcgtgcggcgcggcggagaaggtgaagccggcggccagccccgcgtcggaggagccggccgccatcgccggtaacatctccttccacgcgcagtacagcccccacttctcgccgctcgcgttcggccccgagcaggccttctactccaccgccgagagcgtccgcgaccacctcgtccagagatggaacgagacgtacttgcatttccacaagacggatccgaagcagacgtactacctctccatggagtacctgcagggccgcgcgctcaccaacgccgtcggcaacctcggcatcaccggcgcctacgcggaggccgtgaagaagttcgggtacgagctcgaggccctcgtcgggcaggaaaaagatgcagctctgggaa

SEQ ID NO: 25001 - DNA, 431 bp, Oryza sativa
  Clone ID: uC-osflm202107f08b1
tcgctatattcccaaaggcaacagacttttcttttgctaacaagcttaagcagcacttgaggggaaactctgccttcaggggtgaacaagaaggtgcttttaagatttgccattatgctggagaggtgacgtatgatacaactggtttcttggagaagaacagagatccgttgaactctgagttaattcaactactctcatcatgtaaatctgaactcccaaaatactttgcctctgtcatggttgctgattctcagaataaatcaaccttgtcatggcactcagctgttgattcacaaaagcaaagtgtcgtgaccaaatttaaggctcaactgttcaagctgatgcagcaattggagaacacaactcctcatttcattcgatgcatccagccaaatagcaaacaacgtcccatgctatttgagcatgat

SEQ ID NO: 25002 - DNA, 495 bp, Oryza sativa
  Clone ID: uC-osflm202107f09b1
tcgctctcctcctcgtctaccttacctagcagcagcagctagctagcttaattagctatagcagccatggcggcgacggcactgagcagccaggtccggttgccgatgtccctgcgggtggcgacggcgccggcgccggcgcgcgtgtcggtgctgccggcgagcaacaagctgggagacaggctgcggatgcaggcgacgtacaacgtgaagctgatcacaccggacggcgaggtggagctgcaggtgccggacgacgtgtacatcctggaccaggcggaggaggaagggatcgacctgccttactcctgccgcgcgggctcctgctcctcctgcgccggcaaggtggtctccggcgagatcgaccagtccgaccagagcttcctcgacgacgaccaggttgccgccggctgggtcctcacctgccacgcctaccccaagtccgacgtcgtcatcgagacccacaaggaggacgacctcatctaatcaatcaag

SEQ ID NO: 25003 - DNA, 541 bp, Oryza sativa
  unsure (1)..(541): unsure at all n locations
  Clone ID: uC-osflm202107f11b1
tcgctttccggacctcgtgcgctcccaccaccaccaccccgcggtttcgctcgcgccaccgccactgattcgccggagagttgctgttcccttcgtgatttcgtcggcggtggcggcggcgggggtggtctcctgttgctgtacagaccagcatcgttggggggaatcggatgagatgagatgagatgagatgcgggggtggtggtgatggaggcgctctcccggaccgagcgtgtaggaggaggaggtggagccatggttgaagtggccttcgcttcgtccgccggatcctccgtcgcggccccgcgccgtcttcgtggggagctcgtcgtcagggacgctattccgtatgccggggtggctcctccgtcgcccgcgctgtcgctgccgcagccgcagctgcagccgcaggtgcaggctactacgagtggnggcggcggccgtgggaagattagccccgcggtgctggtcatcatcgggattctcgcggtggagttgttcatttccggcttgctcaccttctggtgcggctacttatgaa

SEQ ID NO: 25004 - DNA, 509 bp, Oryza sativa
  Clone ID: uC-osflm202107f12b1
aaggaacctcgatctccatctccatctccgcccggaaaccctaacacacacacgccgactctccaaaccctacaccccccccaacccccaaccccgccgatccccccgctcgccgccgatgggtcgcaagaagaacgtcgccatcgatgacgatgagtactccttcccgcaggaggacgccgcccccgcccccgccgccgacaaggacaagtccatcaagaagggcggcggcaagaagggcaagaagggcgccaaggccgccctgcccgacgacgacgactacgagccccccgcgcccccgcccccgcccggggacgacgacgacgacgaggagcccatcaacctcgtcttgaccggtaagaagaagaagaagaagggcggcggcggcgccgtgagctccttcagcgccttcgacgccctcgcggccgacgaggaccagggagcttcgggtccgaggaggaggaggacgaggaggacggcggcggcggcggccagggggagggggaggg

SEQ ID NO: 25005 - DNA, 570 bp, Oryza sativa
  Clone ID: uC-osflm202107g03b1
catttcttgttctcaatcagcaacaacatctatctccttcttgcttagttaagtccttcgccctcccaagaagaagaagatgtcttgctgcggcggaaactgcggctgcggcagcggctgccagtgcggcggcagctgctgccgatgcaagatgttccctgatgtggaggccacagccaccaccaagaccttcgtcctcgctgctccatccaacaaggcgagctctggaggaatggatatggccgtggagagcggagagaacggcgggtgcggctgcaacacctgcaagtgtggcaccagctgtcgtcgctgcttctgctgctcctgcaactgaatgtatcgtcgacgtcgcccggctgcatgaggatttatccgatggatgctgctactgtcgatcagagctttgatcgaggccttattttgcttgcattagtacccagcttatatgtacgcagccctgccttttgctctgacgcctaaataaaaccgtcgtcgtccgtgtcagtgtgtgcgggtgtcgatcaatgttggatggatccctagctaggctggatggatcatctatcatca

SEQ ID NO: 25006 - DNA, 509 bp, Oryza sativa
  Clone ID: uC-osflm202107g04b1
ccatatatcgtagagaaaaaaaaatctcccctcgaagcgaagcgtcgaatcgccttctcaagatgcagatctttgtgaagaccctcaccggcaagaccatcaccctcgaggttgagtcctcggacaccattgacaatgtcaaggccaagatccaggacaaggagggcatccccccggaccagcagcgtctcatctttgctggcaagcagcttgaggatggccgcaccctggccgactacaacatccagaaggagtccaccctccaccttgtgctcaggctcaggggaggcatgcagatcttcgtcaagaccttgactggcaagaccatcacccttgaggtcgagtcgtctgacaccattgacaatgtcaaggccaagatccaggacaaggagggcatccccccggaccagcagcgtctcatcttcgctggcaagcagcttgaggatggccgcaccctggccgactacaacatccagaaggagtctaccctccaccttgtgctcaggctc

SEQ ID NO: 25007 - DNA, 276 bp, Oryza sativa
  Clone ID: uC-osflm202107g06b1
aggataatttgtgtaagccgtcaggggcagcggctgctaccgtcggtggcggcggaggcgatggcacggctcgtcctctccgagtgctgcggcctcacgccgctccgcctgcgcgggcgcggcgccattgcgctgccggcgcctcccagcctcgccgcggggccgcgccgccccgtgtccgccgccgccgcggggggagccatccaccgcgagtgggcgctccgcgtctccgcccccacccgcctcacctccgtcgtcgaggaggataatagaggg

SEQ ID NO: 25008 - DNA, 437 bp, Oryza sativa
  Clone ID: uC-osflm202107g07b1
gtttcggcccacgacccacgcgttcggtttatggtgcactagagcaaagaaggagagagcttggtgagctgcagagatggccccctccgtgatggcgtcgtcggccaccaccgtcgctcccttccaggggctcaagtccaccgccggcatgcccgtcgcccgccgctccggcaactccagcttcggcaacgtcagcaatggcggcaggatcaggtgcatgcaggtgtggccgattgagggcatcaagaagttcgagaccctctcctacctgccaccgctcaccgtggaggacctcctgaagcagatcgagtacctgctccgttccaagtgggtgccctgcctcgagttcagcaaggtcggatttgtctaccgtgagaaccacaagtcccctggatactacgacggcaggtactggaccatgtggaagctgcccatgt

SEQ ID NO: 25009 - DNA, 513 bp, Oryza sativa
  Clone ID: uC-osflm202107g08b1
tcggcatttgctagctagctcatcgtcgataccaatggcgactaccagggccacatcgacgctgctgctgctgctgctgctggtttcggcaacatgggcggcatcggcgccgacgacgagtcgggcgaggaacgtgataacacacgtgaaggggttccaagggaggctgccgttccacctggagacggggtatgtggaggtggacaacaccgataccgttgagctcttctactacttcatccagtcggagcgcagccccgccgatgaccccctcatcctctggatcaccggcggccccggctgctccgccctctccggcctcctgttagagattggccctctcaagtttgacgtatctgggtacacggaagggttccctcaattgttctacttccaagattcctggaccaaggtgagcaacgtgatatttctggacgcgccggtggggacggagttctcctacgcccgtgaggaacaagggtacaacgtcaccctcacacagacgggacagca

SEQ ID NO: 25010 - DNA, 546 bp, Oryza sativa
  Clone ID: uC-osflm202107g10b1
tcggtctctgctccaagcagcaccagccaaacagttcaaaccaaattggctggaggctttgacaagctgctactcgacagcctctacgaagacgagacgaggcggcggcagatcgccggagtcacctacaccggtagcattggaggaggagcacccaaccctttcgacaccaacgatccatttgctacgtcgagcagcttcttgcccccatccaatgtccagtttgcaatgctgaaccagcagcagcatcagtactaccagtctcaacaccagcaacaatactaccagcctcatcatttccaggatcatcaacatcaccataacatgtattttcagacacattatcaacaaaatcagatataccaacaacagcagcagcagcagcatcagtaccctgcacctcaggctggatcttccaatccgtttggtgaccctttcggtgacctcgtaccaatggcaatggctgtcttctcaaaacatggacattcaagtttgatatgaatttgccatattcatgttgttaatgatcccaggcaatttaacata

SEQ ID NO: 25011 - DNA, 500 bp, Oryza sativa
  Clone ID: uC-osflm202107g11b1
ttggcttatcaatctctccttgctcctcctcccagcatcaaatcttcagaaaattcccccttcttcatcacatcaccagaatctatcacctctgtcactgttcttgatcacaaaaagttaagacagattttgctgttcttgctatcttccctgctctgctcatctcctctgctccagttcagaaattgctgctggttcttgcacattggtgctcatcaagaactgatcaggagctgaagaaatcttgtgagaagctgaagaaatgggagggaagaatctggtggtgttgttcttggtgtcggtggtgatggcgatggtgccagggagcacgcagctgcaggcgtcgcaaacatggtcgctgctcaagatccagcagatgctcggctacccggcggtgctcggccactggcacaactacaccgacttctgctacggcggcgactacaagaccacgtcggcgttcgtcgagtgctacggcgacagcgtcacgcagctgcaca

SEQ ID NO: 25012 - DNA, 136 bp, Oryza sativa
  Clone ID: uC-osflm202107h01b1
gagctcgttgccgtcaacgaccccttcatcaccaccgactacatgacctacatgttcaagtacgataccgtgcacggccaaaggaagcacaacgacatcaagatcaaaggactccaagactctgctcttgggcgag

SEQ ID NO: 25013 - DNA, 220 bp, Oryza sativa
  Clone ID: uC-osflm202107h03b1
acgcgcttgtctttcactcgaaccaccaccaccgctcgctgcgtgagagatccagcgccgccgtcgcgccgccactgacggcgccgctggtggtgccgatgacgacgccgaagccgagcccgacgatccggaggctggacgtggcgtcgccagtgccggaggacattgacatcgccaacgccgtctcgacggatcccatcgtcgacatcggcgcggagct

SEQ ID NO: 25014 - DNA, 529 bp, Oryza sativa
  Clone ID: uC-osflm202107h05b1
gcatccagctcacatggacttccggttcttttctctggggaatttatggtccatagtaagcagcttggcaacaactcatcaatcccatgccattttggatctgattgaatccaaatggtctgatttagtggcagagatgccattgaagatatgctatcctgctctagagaaccaggaatggaagatcattactggaagtgacccaaagaatacgccttggtcatatcataatggaggatcctggccaacattgttatggcagctcacagtagcatctatcaagatgaacagaccagagattgctgcaaaagctgtagaggtagctgagaggcgaattgctatcgacaaatggcctgaatactatgacaccaaacgagcacgcttcattgggaaacagtctcgtctttaccaaacctggtctattgctgggtaccttgtggccaagcaactgctggacaaacctgatgctgctagaattctttcgaacgacgaggatgcagaaattcttaatgctttgagcacgaacagg

SEQ ID NO: 25015 - DNA, 538 bp, Oryza sativa
  Clone ID: uC-osflm202107h06b1
tccttctccatctccctctacacatctctctctttctctgtctctccctctcttcatctagcctgtgaagaaaggaggacaaggctcgtaggacgtgttcaaaaggacaagatcttctttgcagtacacagtggatgaaactccaaggctgattcaatttgccagtgtgtgagaaacgagaaacaaccaagaggctcatcaggatcaagtggctgatcatcatcatctctctctaggatgtagagctagtggtgatcatggtgcaaggtgaggagagttcttggaggatggcagcaagcacccaccatgagagagcaatacctctcaaccaagcacttgcttatggagtccaagcccatgcttctccttctgttgctgctgcaccacctgccagcttcttggacttccagcctgctgccgcggcagctgcctacttcggcgagctggaggaggccctcatccatggcgccaacgccggcggcgtcgtcgatcccggcatgatcagagccgacgtgcacagcaagtccgcggcagcggc

SEQ ID NO: 25016 - DNA, 277 bp, Oryza sativa
  Clone ID: uC-osflm202107h07b1
tcgaccttcgctggtccgtatccattccactctgctccgacccctaccgctgccggagtgctagggcatcacacgatgagtgttgcaactgaagcatgcccttcaccaaagctacacacaagactaaggctgtgggagtttgcagaccgttacgtatttgaaccagttgacggtcttgctgatttgttcctgtcagttgatcggacaaatggatcaatgagtctagtggaagagttgccacctcgtggtccctctacaaatcctaaagttagaatag

SEQ ID NO: 25017 - DNA, 251 bp, Oryza sativa
  Clone ID: uC-osflm202107h08b1
ttgcttttaaggattaattacttctcgtctccaccggaggagatatccagcggcgatggcgagcccgatgaaccgctgccgcggtggaggcggatgacgccgccgcagcgtgatgaaaaggatgggcctttttcgtgtgcagtactactgcgtgatgggcttcgtcgccgcacgcgtcgtgctcgccacgctccgatacatgcctgcccccgacaccgcgccccccaccgtagacggaggcggcgcaaccg

SEQ ID NO: 25018 - DNA, 413 bp, Oryza sativa
  Clone ID: uC-osflm202107h09b1
cgcgcgcacgcctgtccctcccctcctgctccgtcgcgccttgcagagtggaagaaaggaaggaaggctaaaaccctagggagcgcgcgagcgagcgagggctctatgcttccttgcgatgacggcgccggcggacaaggggaagaaggtcaagaccgacgccgacggctgtgccgcccatgagaacgagcagatcgacggcgccctcgtcctctccatcgagaagctccaggagatccaggacgagctcgtgaaggtcaatgatgaagctagtgacaaggttctggaggtcgagcaaaaatacagtgagattcgcagacctgtctatctccgaaagagtgacgttatccaaacaatacccgacttttggctgacagcgtttctgaggcatactctacttagtgagcttttga

SEQ ID NO: 25019 - DNA, 529 bp, Oryza sativa
  Clone ID: uC-osflm202107h10b1
tcgggagtaggagtaggagtgacgcctccggatttccgacgccttgacgaacccccacaaccccgagatcgatcgggaggaggacgaccacgcccttcacctgcccccaaatcttgccccgatctcccccgaccgcggcaatgggggccgcctccgacgacgccgtcaagcagctcgccctcctcatggaccaagtggaggcgccgctgaggaggacgtttcagaatgtgcaccagggctatcctaaagaaacattattgcgtttccttaaggccagagagtggaacgtatctaaggctcataaaatgcttgtagactctttgaattggaggattcaaaacgaaatcgatactgttctggagagacctatagtcccagtagatttgtacagatcaatccgtgattcacaacttgttggactctcaggatacacacaggagggtctcccagtttttgccgttggtgttgggcagagcacatatgacaaagcttcggtccattactatgtgcaatctcatattcagattaa

SEQ ID NO: 25020 - DNA, 455 bp, Oryza sativa
  Clone ID: uC-osflm202107h11b1
tcgaacttacccctctcactcccagatacctgctgcgggcactattgcactaccatggatgcttgcaagctccggccgtagagctcgttcgacacgaagacgacgacgacgaacgcgggagctccggtgtggaacgacaacgaggcgctgacagtggggcccagggggccgatcctcctccaggactaccacctgatcgagaagggggcgcacttcgcccgggagcgcatcccggagcgcgtggtccacgcccgcggcgcctccgccaagggctgtttcgagtgcacccacgacgtcaccgacatcacctgcgccgactttctccggtccccgggcgctcagacccccgtcatcgaccgcttctccaccggtatccacgagcgcggtagcccggagacgatccttgacccgcgcggggtcgccgttgagttctacacccgggagggcaactggga

SEQ ID NO: 25021 - DNA, 340 bp, Oryza sativa
  Clone ID: uC-osflm202107h12b1
tcggtttggttcgggtccggttcgatttcggtttttcggtcggtttgggggttggtgggaaagcatggcggcgccggatgttgagtaccgctgcttcgtcggcggcctcgcctgggccaccgacgaccgctccctcgaagccgccttctccacctacggcgagatcctcgagtccaagatcatcaacgatcgggagacggggaggtcgcgcgggttcgggttcgtgacgttctcgagcgagcaggccatgcgcgacgccatcgaggggatgaacggcaaggagctcgacggccggaacatcaccgtcaacgaggcccagtcgcgccgctccggaggcgga

SEQ ID NO: 25022 - DNA, 566 bp, Oryza sativa
  Clone ID: uC-osflm202108a01b1
gttctttcattcattctgtcttctctgcagatactgagagcgaatatgagtagcaaggttcttctgatcagtggtgtcctggtggggctcctttctctgagctcatgcaggagcctgggagagttgtctgaacagaagacctactcttctactactcagtatggtggctccccaactccatcatatggatcagatggtggttacaaaccaacaccaaccccaacaccagcttacggctctacaccaacaccatcttatggcactacaccaacaccatcttacggcactacaccaacaccatcttacggcacgacaccaagcacccccagcacacctgatgtccctgaagttccgacaaagcatgatttctgtggatcctgcgattactggaagaaccatccagatgttatcatctcagctattgggtcccttggcgacattggcaagacactcggtactgcttgcagtttgatcactggcaagaagctagaaaatcttcatgatgcactctcaaacactggaactgatggtactggtgctctgctccgcgagggagcagctgcata

SEQ ID NO: 25023 - DNA, 574 bp, Oryza sativa
  Clone ID: uC-osflm202108a02b1
aacagtttattatcgatcgatcggacaattaattaagggagagcaacggcggtggaggaggatctcccaaggaggcagcggtggtggtgccgtcctccggcgacgccaccctgggcgggcacctggctcggcgcctcgtgcaggtgggcgtgagcgacgtgttcgccgtgccgggggacttcaacctgacgcttctggaccacctgatcgccgagcccgggctccgcgtggtgggctgctgcaacgagctgaacgccggatacgcggccgacgggtacgcgcgggcccgtggcgtgggcgcctgcgccgtgaccttcaccgtgggcgggctgagcgtgctgaacgccatcggcggggcgtacagcgagaacctgccgctgatctgcatcgtggggggccccaactccaacgactacggcaccaaccgcatgctccaccacaccatcggcctcccggacttctcccaggagctccgctgcttacaacccctcacctgctaccaggccgtcgtcacaacctcgacgacgcccacgaccagatcgaccgcgccatctccaccgtcatcagggagagc

SEQ ID NO: 25024 - DNA, 427 bp, Oryza sativa
  Clone ID: uC-osflm202108a05b1
atcgttccatacaatcacgtcggtcgacgagaagaagtgagtgatggcgtcaccgacccggccggtgccgtacatgccgcgcccaccggcggtgccggagtggctgaacaccggggacaacgggtggcagctcgcggcggcgacgttcgtcgggctccagtcgatgcctgggctggtggtgctgtacggcagcatcgtgaagaagaagtgggccgtcaactcggtcttcatggcgctgtacgcgtacgcgtccacgctcatcgtgtgggtgctggtcggcttccgcatggcgttcggcgaccggctgctcccgttctgggggaaggccggcgcggcgctgacagaggggttcctcgtggcgcgcgcgtcggtcccggacacggcgcactacaggaaggacggcgccctggagtcgacgcgcaccgag

SEQ ID NO: 25025 - DNA, 375 bp, Oryza sativa
  Clone ID: uC-osflm202108a06b1
cgatttcgatgaggaagacgaggacgaagaggaagaggcggatgggctcgacaagtgcgcgatcgacgacgaggacgacgacggccttctcggcatcgggcgcggcgaggacgaggcgtgcgagtcgctcttcctgcttccaatgagcaagactaaggagagcggcggtggccatgaagcggcttccggcgtcacctcgccggaggcgccgcccgcgcctcaacagacgcgcgacgcgaatccggtgctcagctcggtggagaatctcacccagcggaaggacgccaaggcccgcgccgacaccgtcaccgccgggccgaatgcttcggacaaggagaacaaaacgactgcgaacttgctccccgagccggtgat

SEQ ID NO: 25026 - DNA, 423 bp, Oryza sativa
  Clone ID: uC-osflm202108a08b1
ttgtgttacatggcatgctgcggcggcgtaagggggggggtggaggaactgacggagtcctttgcctacctggagggagaggcgcttagggaagcccgggaactggtggccgagctgtgccggctcttctactgacacgggtgggtctccgaagcgggcagcctcttcaccatgaaggacaacgacccggggctgcccgtcaacaagagctcatcgttatgtacacgtatggtgtgtaaaaggtgaggatggtggtacaggacatgtacgcgctggctgcagatgggatggtgctctctttacctgcgtcaaaagcatggccacacatgcctgaaaaggactgactgtgcacgtctgcttatgaaggcttatctgatcataggacctgcggctgataattatagccgtcagagggaaacttgc

SEQ ID NO: 25027 - DNA, 243 bp, Oryza sativa
  unsure (1)..(243): unsure at all n locations
  Clone ID: uC-osflm202108a09b1
gttactgacggtacgtgcgcccgcatgttgtgtacgcacgcaacgtctactgacgtgctcagccatggcggcaacatggccgtcgtcgtgtctcgcgtcctctctctcgcgcgtaaccgggagcgcattccanagctacaacgcgatatacaactttggcgactgcatcaccgacaccggcaacctctgcacccgctgttgcccctagtggctaaataccgggcaggctcggtacggcaacac

SEQ ID NO: 25028 - DNA, 534 bp, Oryza sativa
  unsure (1)..(534): unsure at all n locations
  Clone ID: uC-osflm202108a10b1
tttggttttcctctctctctctcgcatcgcatggatcggctcgtgtcgccgccggcggaggctgcggcgagccttcaccccccacccgcccaccgccggcgagccacggcgtgggcgacctcctctcctctcccgatcccctctcgcccttaggtaggggcttctccccagtccccaccacacgcgcgtgcgtggccgacgagcaccccaggttcggatcggatggaagaccagaagaaacatgcaaaaccagaggggtcttctggctcgcaaaggggagctcccccggcacctgatgcaggccttcccaatccttttgatttttctcagtttagcaacttgctcaatgatccatctataaaggagatggcagagcagattgcaagcgaccctgtgttcacccagatggcagagcagctgcagaagagtgctcatgtgaccggngaacagggtggccctgcattggatcctcagcagtacatggaaacaatgacacangtcatgcacaaccctcaatcatgtcaatggcagacg

SEQ ID NO: 25029 - DNA, 517 bp, Oryza sativa
  Clone ID: uC-osflm202108a11b1
ttttgatcttcgtatcttctcctgctgctgaggggaaggtctattacagcagccagattacaaatgttaatactacaaggatttatatgggatatcagcctttagcatgccaaaataatggtcacacatatccatggtctgaagacacttttcaggttgatgttggtccaccacctatgggtttcactactaattcttcgaaggtggaacgattcttttcccatgaaacaatcactaccaaaatctatagatgatgatgtgcctattacggagacaggggcgatggctgatagcacatcatatggttatcatatcacagccacaggtagtaggaattcaacctctgtaactggccatggaaatcagctcatgggagatcctttcgacagtggtactgctgataagttcaatgcgaactcagtacgtggattgccttttgacttcattggtagtagtccaatccctgacatcggggtattgctagacgacgatgatataatgccatatctgggaacat

SEQ ID NO: 25030 - DNA, 185 bp, Oryza sativa
  Clone ID: uC-osflm202108b01b1
atctttactttagagagccaaagcaacagcaacggggggggtttcaattaaaccaccatcatcatcaaatcgcggggctgcctaggtacccacccatggagaacccacacgacaaacgggcttgcgccgccaacatcgccaccggcgagagatgcaatactacgggtccgcttccgcacgactcc

SEQ ID NO: 25031 - DNA, 548 bp, Oryza sativa
  unsure (1)..(548): unsure at all n locations
  Clone ID: uC-osflm202108b02b1
gaaggaaggtagaagagcaggaggagcccaacgcccgcgaaaccctagccctcgcgctcgcccaccgccttcctctccccccctaccctaccccgagctcgccacccgatccgatcgaagatgcataagctggggagaggaagccgcgacaaggtgcagcagttcatgaccataactggtgcgagtgagaaggtcgcccttcaggccctgaaagctagtgattggcacttggaaggagcttttgattttttctacagccaaccacaaatttctctgacgaactctcggcatcttgaagatctgtacaacagatacaaagaacctgatgttgatatgatcatggtggaaggtgtatctcagttttgcactgatcttcaggtggatccccaggatattgttatgcttgtcatatcatggcacatgaaagctgccacaatgtgtgaatttactcgccaggaattcattggtggactgcagtcaattggggtggattcaattgaaatgctccgtgagaaatngccatctntacgggctgagataaaagatga

SEQ ID NO: 25032 - DNA, 494 bp, Oryza sativa
  Clone ID: uC-osflm202108b03b1
gtctgttaatcatctgcgaagccataaaaatccggagatacagaagaaggcaaagtgtcttgtcgaaaattggaagaagcgcgttgatgctgaaatgaagtcaaatgatgtgaaaccagtggtatcaggtcaggctgtatcctggccaggcaaacctgggtttccagaaatttctagtgctggaaacagacgaagtggctcaagtgagtctagtctgaaaagcccagtgtctcagctttcttcatcgaaggccttgacttctaaacctgtagccgccgatgctgctgcgaaatcgagtccagtgatatctggttcttcaaaattgcaacatatgcaaccaggaaatgctgtaaccaacttgaaggagcaaccctccaaatcaactggtggcacttgtggctctgagctgcctgcagtgaaagaggagaaaagcagcagttcaagccagtctctgaacaacagccagtcatgttctagtgaacatgcaaaaacaa

SEQ ID NO: 25033 - DNA, 545 bp, Oryza sativa
  unsure (1)..(545): unsure at all n locations
  Clone ID: uC-osflm202108b04b1
aagttgtgagtgatctctcccgagctcgatccggtccaccgcgacacgaagacgaccatggcgatggctcgctcccagcttgccgctgtgttcctcgccgtcctcgtctcggtggcgccgctcgccggcgcggcggacaacctccaggacgcgtgcaaccggacgctgttccccaaggtgtgcatccaggcgctgacgacgaacccggagagccggacggcgaacgcgcggcggctggcggagctgtcggtgtacgtggcggcggaggtgggcacggcggtggcggcgttcgcgcaccacgagctgaacggcgtgaaggaggacgccctgttcaagtgcgtggacagctgctccgacgacatcgaggaggcggtggcgcacctcagcgcgctcacccgcgagctcaccgacgccaagttcctcgaggtcaaggcctggctctccgccacgctcggcggctcctccacctgcgaggacacctgcaaggacgcccncatcagcgagatcaagaacgccgtcgtcaccaagagcctcgagttcgagaa

SEQ ID NO: 25034 - DNA, 129 bp, Oryza sativa
  Clone ID: uC-osflm202108b05b1
acccggagatggagcgggcaccagcccacacccaacggaccctaaagcgcgacctaataccccggctaaccacagccagccaggccacccgccaaggcatcaactacgcccagcccgccaacccccctc

SEQ ID NO: 25035 - DNA, 530 bp, Oryza sativa
  unsure (1)..(530): unsure at all n locations
  Clone ID: uC-osflm202108b07b1
ttgtttcttacaccagtaaaaaaggatgaacctcccattgaggaaaagaacattaactcatcagatggtggtgcattggaaaaaaaggatgcttcaagatcacacaggaaaaatggttttgcaagaccactcttgaaatgtgcagaagatgttatactaaatggtgatgtcgcaagtacttctgggaaagccattgcaagtttacaggtggaagcttctgatttggcaaacttcctcaccatggaccgaaatgggggttacagaggttctcaaactctcctaagatctgtactgtcagagaagcaggagctatgcttctctgttgtctcattgctctggcagaagctcattgcatctcccgaaatgcagatgtctgcagaaagtacatcagctcatcagggttggagaaaggttgtggatgcgctttgtgacgttgtttcagcctcaccgaccaaagcttcagctgctatcgttctgcaagtcaagatattgatattgtatacttacatactngttatcatatttaaaag

SEQ ID NO: 25036 - DNA, 429 bp, Oryza sativa
  Clone ID: uC-osflm202108b08b1
caagcgccgccattgcaggacgagcgatgccctaaagatcgacaccgtcacggcggcggaagggggaggagcgtcgtggcgacccgctgctccccgtgcccgtccgctccaactctccataaaccctagatgttcgacaattgcgaggtcactataatcgtctctggagcgatgcatagtgctaaaaaggcaaaggtggaaccatcatctgcgttgaggtcagacatattcagcatcctacctcaagagataaaggtcaccatcctctccaagctgaattccttagatgctattagagccagcatcctatacagtgcttgatggactgcctggactactttgccccaactatatcgatgagacctgcatatcaactgggggtactctgagacgacacaccgctccaactgtattacgctcgtagatctg

SEQ ID NO: 25037 - DNA, 325 bp, Oryza sativa
  Clone ID: uC-osflm202108b09b1
ttcattagagaagaatcctatttgacttattggatcggcatggtcagcataccgtatgatcaagagatggctttccaaacagctgcttcaatgaggaattcactggagggaccgcctattttgggtcaggttgatcacgggacagaaccacctcagtttatagacctttttcaggccatggtcattctaaagggtggaatcaggtctggataccagaagtccagtgactaaaatggcttgtaggatgaactcatattctagccactgcatccgtctttgctgaatctctggagcatccattgacatcagtatagtgcttaaagct

SEQ ID NO: 25038 - DNA, 450 bp, Oryza sativa
  Clone ID: uC-osflm202108b11b1
tctttttgcacaagaaaaagattcaagaacagtttagatttcagaaaaagaagtgatcgatcgattgattgattcttgcacatgagcatggcgagcagtggcggctactactcctactacaacggccaccagccggcgccgtactactacggctacgcgcagccggcgagggtcgccggcggcggcggcgtcggcgggtcgcaacggacgtcggcgcacgcgctcctcctcgtcgcgacgctgctgctcgtcgccgtgaccacgctgtactcacggtgcgaggaggcggtggagagcctgctcgaccagctccgcgtgctactcatcctctccccgatgctgctcatcgtcgccgtgcaggtatgggccgtgagcgccgccgccgccgccgacgaccgtcgtggctccggcggaggcctgatgttcctactcacacagctgatgggcatg

SEQ ID NO: 25039 - DNA, 391 bp, Oryza sativa
  Clone ID: uC-osflm202108b12b1
tctctttaaacgccaggaaagcggaaggtctgggtgggctcctctccccaaaaccaaaggctcctctccgaaaatctccaaaaatccagcgaaaaccatgcgatccatcgatcgatcgatcgccgcatgactgcttcgggttttttttttgctctggctccgatcgactgcgtgcgcctcgaatcgaaatctcgagggatatcacgcgggagttgatccagacttaaaccggattgcctgagaagttgatgggatcgcgcgaattctcggcgctgacgtgagatcgggaaagggttggacatcaaattgctaggaggttgcggcgatttggctgcacgactgcatgaactggttcgtgaacctgggactcaactcgaactcgaaccactac

SEQ ID NO: 25040 - DNA, 554 bp, Oryza sativa
  unsure (1)..(554): unsure at all n locations
  Clone ID: uC-osflm202108c02b1
gccttgtacataatatcaggagtagcttgcattctcctatatcttgagtacaagcacattgctaggctgaggctccgtcatcttacttgtgcaatgcccaatccaagccattttactgtccttgttcgtggaataccaaaggaaaccaaagaatcatgcagtaatgctattgatgatttcttcaccaagtaccatggatcaagctacctgttccatcaagttgtttacaaagttggaaaagttcagaagataatggtaaaatctgcactcgaagggatgtgctgcatataaatttgaacatattgtaataaagaatattgctgattgtttattgggaattttaaaagacggccttgatagttgttgtcatttgatattaattttgggtctactatcttgtagttgggtaatcactgggggaaacaagcaaaacctatcacattcttcccactaatttgattctcagctctgtgcttntatatagaagtagtgttcattaatctccngttccngaaatgaatttatggctttgcatattttatttcactttcttc

SEQ ID NO: 25041 - DNA, 509 bp, Oryza sativa
  Clone ID: uC-osflm202108c03b1
cagctatcgttggcggcggcgacgctggagaggcggtcctgcgacgatggtccacgtcagcttctaccgcaactatggtaagacattcaagaagccacgtcgcccttacgagaaggagcgtcttgatgcagagctgaagctagtgggtgagtatggactgaggtgcaagcgtgagctgtggcgtgttcagtatgctttgagccgtatccgtaacaatgcaaggcacctgctcacacttgatgagaagaatccacgccgcatcttcgagggtgaggcactgcttcgccgcatgaaccgttatgggctccttgctgatgggcagaacaagcttgattatgtccttgccctcactgttgagaacttcctcgcaaggcgtcttcagactcttgtcttcaaggctggcatggccaagtccatccaccatgctcgtgtcctgatcaggcaacgccacatcagggtcggcaggcaaattgtcaacatcccgtcgttcatggtgaggggtgagtctg

SEQ ID NO: 25042 - DNA, 392 bp, Oryza sativa
  Clone ID: uC-osflm202108c04b1
ggcatgatgtgcccgtacatgatcgtgttctccgtgatgagggggaccatcatctggtgcggtgtaatgaggacgtacatggagtcaaaggagggcatgtggtgcccaagcaaccttgggcccaacagcacttaacggcatcagaggttacaaggtgttcatcgggttgtacatgataatgggtgactgcctcttcgtctgcctatgcatgatggtccggacaacatgtgccatgatcaagcggcgtcggcaggcaatgcaaggaggcggcggtaatgcgcagacattccagggtatagacatcggcgatcagccggtgaagagcttcgatgatcgccgcagggcgcaggtgttcctgcgggacgagataccagactcaggcaccattggct

SEQ ID NO: 25043 - DNA, 528 bp, Oryza sativa
  Clone ID: uC-osflm202108c06b1
ctcgtctccgcttctccactctccggtagatcccaccctccaccgccgccgccgccgccgtgctccggtgagccgccggtgagccggagactacagcgacgtcgcgcagagccgttgggcgggtaggcggttgggggctttgcccgagatggcgacgatggggagcctgatcgggctggtgaaccggatccagcgggcgtgcaccgtcctcggcgaccacgggggcggcggcgaggggggttccctctgggaggcgctgccctccgtcgccgtcgtcggaggccagagttccgggaagtcgtcggtgctcgagagcatagtggggagggacttcctgcctcgtggatccggaatcgtgacgaggaggcctcttgtgctgcagctgcacaagacggagggtgggcaggagtacgccgagttcctccacgccccgcggaagcgtttcactgactttgcttgctgtaggaaagagatggctgatgaaaccgatcgcattactggaaaacgaagctatatcaaatattccca

SEQ ID NO: 25044 - DNA, 471 bp, Oryza sativa
  Clone ID: uC-osflm202108c08b1
tattgttaccgacgacaaggaggggctaaacagcgagctggagaagcacattgaggatatgcatgtcttgatcaccacccctttccacccagcctatgttagcgcagaaaggatcaagaaggcaaagaacctcgagctgcttctcacagctgggattgggtcagatcatattgatctgccagcagctgctgcagcaggtttaactgtggcagaggttaccggaagtaacactgtgtcggtggcagaagatgagctcatgcgcattttgattttgctcaggaacttcttgcccgggtatcagcaggttgttcatggtgaatggaatgttgctggcattgcctatagggcttatgatcttgaaggaaaaactgtggggactgctggggctggtcgtattggcaggctcttacttcagcgtcttaagccctttaactgcaacctgctgtaccatgacatacttaaaattgaccc

SEQ ID NO: 25045 - DNA, 566 bp, Oryza sativa
  unsure (1)..(566): unsure at all n locations
  Clone ID: uC-osflm202108c09b1
cgcgtgaaaaagtcaaaagcagcagcagcggcggagcaaccaagcctacctccaccaaaatcttctccccccctctcctctcctctccacccgccggtgacccgagcccccccaccgcctcacgccgccgccgccgccgccgcggggagttccattccaccgggtcgccttccggccgtctcctgcagagaggttcatgaggggctcgaggatgaatccaggtgaccgtagaacgcggagcacgatgtccatcgtaattgtgatgagtttgtgctgcttcttttatatactaggagcttggcagaaaagtgggaccggaaggggggatagtattgcattgagggtgacaaaagagaccgactgtacaatcttgccaaacttgcactntgagacccatcatagcttaggtggtgttaatcctttggtcatgaccgataaagtctttgagccatgccatattcgatacagtgactatactcctngtcaggatcagaaccgagncatgaactnntctagagaaatatgaactaccgagagaggcatngtcctacagagactaagaaact

SEQ ID NO: 25046 - DNA, 475 bp, Oryza sativa
  Clone ID: uC-osflm202108c10b1
agatgttctcgagcaaagaaggagagagcttggcgagctgcacagatggccccctccgtgatggcgtcgtcggccaccaccgtcgctcccttccaggggctcaagtccaccgtcggcatgcccgttgcccgccgctacggctactccagcttcggcaacgtcagcaatggcggcaggatcaggtgcatgcaggtgtggccgattgagggcatcaagaagttcgagaccctcttctacctgccaccgttcaccgtggaggacctcctgaagcagatcgagtacctgctccgttccaagtgggtgccctgcctcgagtgcagcaaggtgggatttctctaccgtgagaaccacaggtcccctggatactacgacggcaggtactggaccatgtggaagctgcccatgttcgggtgcaccgacgccacccatgtgctcaaggagctcgaggaggccaagcaggcgcaccctgatgcat

SEQ ID NO: 25047 - DNA, 490 bp, Oryza sativa
  Clone ID: uC-osflm202108c11b1
ttttatcttatctgcagtaaaacctatgagtgaacggaacatgaaggattcctctgctcaaaggaataaaacatttgaagctactaatatgatagcagctgaaaaagctgcttccagaccagcagatcaatctgagcacattgtgaaatgtggtccttctcacaacccaatgtgtaggcctaaagatcttttatccacctcatttggccatgtaaagaagccctcacaattgtacgggcaaaccaatgagcaggatatgagaaacacttcgagcaacaaagcttccacagatggtagcaagttgaaacccaatgagtgccagactgtatcagtcaagacaggaagattagttgatggcagcttaactatgccagatgctctgatggacaaatcttcaactgttccagagttggatttcatatggcaaggtggttttgagctgcagaggactggaagatctcctgagctatgtgatggttttcaagctcac

SEQ ID NO: 25048 - DNA, 427 bp, Oryza sativa
  Clone ID: uC-osflm202108d01b1
aaatttaagttcattcttgtcagcaccgtttggtttcattgctgctactttgtttttggatgctgttcatcagagcgcatggatcacgcaagctgtacatagcgtatctcggtgacagaaagcatgcacgcccagacgacgttgttgcttctcaccatgatacgctctcgagtgttcttggaagtaaagacgaatccttatcttccatcatctataactacaagcatgggttctcaggctttgctgccatgctgacagctgagcaggcagaacagcttgcagagttaccagaagtcatcagcgttcagcgaagcaggaggtacaggacggcgaccacacggagctgggacttcctggggctggattaccaaaagcccagtgaattactcagaaggagcaaccacggacaagagataatcatcgggat

SEQ ID NO: 25049 - DNA, 530 bp, Oryza sativa
  Clone ID: uC-osflm202108d03b1
tggtttctcttcatgaccggtcggcggccaagccgtacgcgaacggcagcacggtggcggcggcggcggcggggaggaaggagaacaacaaggtggtgcggtacagggagtgccagcgcaaccacgccgccagcatcggcggccacgccgtcgacggctgccgggagttcatggcgtcgggcgccgatggcaccgtcgccgcgctcctctgcgccgcctgcggctgccaccagagcttccacaggcgagaggtggaggccgccgcggtcgaatgcgactgctcctccgacaccttctccggcaccggccgtcggtgatcgccgtggatttgattcggcctcgtcgtgcgagtagatcagcatcatcagttggtaaggtggtattggcgatttggcattcacaggattcggtggatgaatgaatctgattgtgtatgaaccgattaaaaagttctcttcctttctttctttcatattttgatctttggtgaatcgatggtgtgtaatgtaacataatatatgttaaaaagc

SEQ ID NO: 25050 - DNA, 488 bp, Oryza sativa
  Clone ID: uC-osflm202108d05b1
ggagttaagtttacgcaaaaggttatcaacagtaagtactcattgaagtatcacttcttcaggagtagtatgggtattgaaatcgtacctaaatccttcaatgaggagctggattctactgttactatcactcctgctagtgacaacatagatgtgtctgatgatacaagtgttactaatgcatcagaagtgcctgccacagtaaatgctgctctagtagagcactctgataattcaatctctgaacctttggaatctgatggagccaatggagctacagaatatgttgctcccttggcaagtgagaagtctactgacaacaatgatgctatgaatacagagccagtgaattcagaaccatatgaagcatctgctgctaataatgctgaaaagggagatgtgatgcaacagagtgatgagaacaatggcgataaacaggagaatcaggatctggtgtctccaatggcagaaacagcacgatgtgacag

SEQ ID NO: 25051 - DNA, 509 bp, Oryza sativa
  unsure (1)..(509): unsure at all n locations
  Clone ID: uC-osflm202108d07b1
tttattttacccggcctagcgagcgagagagagggaagggttgcgacttgcgactcgcgagcggcgagatggcgaaggacgtggagatggcggtgcggaacggagacggcggcggtggcggcggctactacgccacccacccgcacggcggcgccggcggcgaggacgtcgacgacgacggcaagcagcggcgaaccggtaacgtatggacggcgagcgcgcacatcatcacggcggtgatcggctccggcgtgctctctctcgcatgggcaacggcgcagctcggctgggtggtcgggccggtgactctgatgctcttcgccctcatcacgtactacacctgtgggctcctcgccgactgctaccgcactggcgatccggtcagcggcaagcgcaactacacctacatggatgccgttgcggtctacttaggtggctggcangtctggtcctgtgggtgtttccaatatgtcaacctggttgggacagcaatnggtacacaatcacag

SEQ ID NO: 25052 - DNA, 519 bp, Oryza sativa
  Clone ID: uC-osflm202108d09b1
gctatcacccctgctcgctcccaatccccaccggccaccacccctatgtggctatgttccccacaccgcgaaccctaacgaaacaaaggaggaggcggccatcacttggccctgcaccggcgcggcggcggcggtgacgacggactcctcccctcctctcttcctgttcccgcggtgggattcctgcgcatctgatcggcgtgcatttggcccacgctctagccgctagcattgcgactccgccacgcccgcgaaggcacggccctgttgttgacgtcctctcttccgacggtatcaccacttcaccactctgacggtggtcctgccttgtgccaccattgcaaggggctctcacaatcagagaggaaattgagctgatgatggagcagagaaaagaatccaagagatgaactggcaacgacaagattgtggtggtctaatctgtagagattcacactgatcatctaaaaacctcaacaaccaattcacagcgttagaatgctgaacagggacaccact

SEQ ID NO: 25053 - DNA, 518 bp, Oryza sativa
  unsure (1)..(518): unsure at all n locations
  Clone ID: uC-osflm202108d10b1
tgttttgtgtggcctgcgtctcgtgttatctcttctgttcttcccaccccctctctctctccttctcctcccttgcgccttcatcatcggcggcaaaccccttcttccatccacttgccccaccgaattcgcgcgcgcgcgccccgtggctgcggcggaggggaaggtgaggacggcggcgggcacggccacggcctccgagccgccgatgagattgcgcgccaccgcgacatgcaacccccgacgggcgccgtgtcagggtcgtcgtcgtcgtcgctggagtgcgtgagctcgtgcaggacgtcgtggaggggcggagggaggccgtacgaatgcagcgtgctctcgtgcgcctggaacgcgccgcgggcgctcacgggggcgctcgccagcaccaccgcgcagtgctcctcctgcagccacgccgaggctggggcagggtggaggcggcggngccagtcgcagcggagtaacaattcgttactgcacataacctgggcagaaggcatcaacagggg

SEQ ID NO: 25054 - DNA, 445 bp, Oryza sativa
  Clone ID: uC-osflm202108d12b1
tgtcttgccttgctttccccaactaaaccctaactcggggccgccgtctccgcctgcggctgctcgtcggagcaccgagccgctgctccttctcctacaccaccagccatggcgacccagatcagcaagaagaagaagttcgtgagcgatggcgtgttctacgcggagctgaacgagatgctgacgcgggagctggccgaggacggctactccggcgtggaggtgcgcgtgactccgatgcgcacggagatcatgatccgggccacgaggacgcacaacgtgctcggcgagaaggggcgcaggatcagggagctcacctccgtcgggcagaagcgcttcaacttccccgagaacggcgtccagctctacgccgagaaggtcgtcaaccgcggactctgcgccatcgcccagggcgagtccctccgatacaagcttcttggaggcc

SEQ ID NO: 25055 - DNA, 455 bp, Oryza sativa
  Clone ID: uC-osflm202108e01b1
aaacctcccttcacaaaagaaccagagagaagaggcgggaagcgaagccgcagcccgccactcgcctccgccctccgcgcgcgcgaacccctccctcggcggcggcgacgaccaaggcggcggcggcggcagcggcgcaagaggacgcggtagcccgatggcgccgctcgtgccgtcctcgcagccatgggtggagaaataccggccgaggcaggtgaaggatgtcgcgcaccaggaggaggtggtccgggtgctcaccaccaccctccagaccgccgaccttccgcacatgctgttgtacaggccgcctggcaccgggaagaccaccaacgcgcttgccattgcttaccagctgtacggaccagagctctacaagtcaagagtggtagaactaatgctagcgatgatcgcggaataatgaggtgaggactgagatcaaggacttgctgctgtgc

SEQ ID NO: 25056 - DNA, 503 bp, Oryza sativa
  unsure (1)..(503): unsure at all n locations
  Clone ID: uC-osflm202108e03b1
ggacttagagtcattctcaaacattcccacaaacgctgtgaatgcggtcacatggggtgttttccctggcaaggaaatagtccagccaactgtcgttgactcagccagctttatggtttggaaagacgaagctttcgaaatttggtcaaagggttgggcttgcctgttccctgagggcgactcatctagggagatactagacaaggtccagaagagctacttcttggttagtcttgtggacaacgactacatcaacggtgatctcttcgcggcgttcaaggagatttgatgacatcttatagtctgcaacctctcgtgtctgaattcctatctttatcaagtgttattgcttccacgactataggacagctttcgtcgaaagcttttgctcatgtgatctcgaaggattcatctagtctgatttttcgtgacttgtatccgttttattggattcatccaacatatatncaataaaaaatgagtgggttcctttcttcctagtc

SEQ ID NO: 25057 - DNA, 461 bp, Oryza sativa
  Clone ID: uC-osflm202108e04b1
atttctctttcctccaccacctaaaccgcaccgaaccccgctcgcactttcgcagaaacacccctcaccgaccccgtatttacattaaagttacctacctttcctctttattggattttttgcggagagccccctggtaagtttgtgattatcgcatcggtgcccttcgccggagctgtgggtggtgccctctatgaatggtcaaaccccgatggggctcgccgccgccgccgcagtcgtagtgaggccgtgccgccggaggctgctgtcgtcggccacggcggtggcggcggtggcgaccgtcgccaccgcgaccccgctgttccccagatgcccccacccgtaccaccagctgcacggtcgacgtctggcctttctcgcatccgcggcgtcgcagcagcagcagcagtccgggcagaccgccgtctcgacggcgaccccacctataccctgcgatcccc

SEQ ID NO: 25058 - DNA, 530 bp, Oryza sativa
  Clone ID: uC-osflm202108e07b1
tccacgcgtccgcccacgcgtccgcaacagtgcattaattgatagggagtggaaagttgctgaggtgtgccagaaactagagcacagcttagagattcttggtgtcagtgctatagaggaccgcctccaggctggtgtaccagaaactattgaaatactgaggcagtcaggaataaacttttggatgttaactggcgataaacaaagcactgctattcaaatcgcgcttttgtgcaatctcatttcttcagagcccaaggggcaactcttgtatatcaatggaagaactgtggatgaagttgctagaagcttggaaagagttctacttactatgcggataactacttctgaacctaaggagctagcttttgttgtggatggttgggctcttgaaatcatcctgtcacgctacaatgaagcctttactgaattagcagctctttcaaaaacagcaatatgctgccgggttacaccgtctcagatagcacagcttggtaagcttctaaaatcatgtgactatcgaaacttgg

SEQ ID NO: 25059 - DNA, 548 bp, Oryza sativa
  Clone ID: uC-osflm202108e08b1
tgtctgtggcggctatcttcgtgtccctctccctcctcctccccctctcctagggtttatccaccaccacctatcgcctctacctaccacaagaattttttttaccatctatattccacccctgccttctttgccccccgtacctcctggaattttcgccttcttgggatccaatccgcgaggagggaaagaaggcgggtttagatcgaactgggacggagggaggaggaggaggaggaaccatggcggccgctgctcctggcgctggcgaccaggctactgacatgatgcagaagctgtcgttggagagcaagaaggaaggcgccacccctgacgctaccaagaagcctgccgggatgccctatggatctgcaagcgccggcgatgcgcagaatgcggcgtcgacggtggacaggtcgatcactcccctgctccaggaggccgtgaatgccaacatcttgtatcagaccaatggatatggaccctcagcatattactatcctactggttatgacggctcagccaatgaatgggactgcagatatgct

SEQ ID NO: 25060 - DNA, 386 bp, Oryza sativa
  Clone ID: uC-osflm202108e09b1
ttttgttttaccatcagattctagtgcagcagaaacaactgttgctcttgcaaagactgtttcatcttgtgtgctccatatggaactaggtgctcttagtgcttgccttgctgctgtcgtatgttcatctgagcagccacctctgcgtcctcttgctagctctgctggtgatggggcttctcttattattaaatcagtactggaccgagcaaccgagttgctgactgaccaccatgctgcagccagctatacagtgtcaaaccgaactctctggcaggcatcatttgatgctttctttggactcctgacaaaatactgcctcagtaagtatgaaagtattaagcagatgtctgtcatgcagtcaccatgctctgtaactggatctg

SEQ ID NO: 25061 - DNA, 447 bp, Oryza sativa
  Clone ID: uC-osflm202108e11b1
tcttagtgtaaaggagaaaaaaaacaaaacacaccatggcaaatatatgcgactatgggagcggtcaccaccaacatcgtcctcgccgtctccgcggtggcagttctggtcggtggtggttcgcgcggacggcccaaggtgccacccggtctgatcattacgaccaactacagcgccccgtggctgcccggcagggccacctggtacggccagccctacggctccggctccaccgacaatggtggcgcgtgcgggatcaagaacgtcaacctgcctccctacaacgggatgatctcctgcggcaacgtcccaatcttcaaggacggcaggggatgcggctcatgctacgaggtgaagtgtgagcagccggcggcgtgctcgaagcagccggtgacggtgttcatcacggacatgaactacgagcccatctcggcgtaccacttcgac

SEQ ID NO: 25062 - DNA, 326 bp, Oryza sativa
  Clone ID: uC-osflm202108e12b1
ttgattttcctgcgatagctatatgaaactcacattggcgcacatatcaaccctgagaggtggcgctcacctgctaggcgttcataggctctcctgtggaccctctagaattggcgtagatgatgagaaacccggtggacccgaattctataacgactgtcgctgcacaccgccggtcgatcgtgcgtagtgcgaaggatgtcctcgctctccttaggagatagacgatcccacctgggcaataaaattagattgagtactacctctaatcctgcgctgcatgggggctgttaatgacggccttggtttgaccattgaaccgacac

SEQ ID NO: 25063 - DNA, 348 bp, Oryza sativa
  Clone ID: uC-osflm202108f01b1
caaattgcgtgagagatctctcccgagctcgatccggtccaccgcgactcgacgacaaccatggcgatggctcgctcccagcttgccgtcgtgttcctcgccgtcctcgtttcggtggcgccgctcgccggcgcggcggacaacctgcaagacgcgtgcaaccggacgctgttccccaaggtgtgcatccaggcgctgacgactaacccggagagccggacggcgaacgcgcggcggctggcggagctgtcggtgtacgtggcggcggaggtgggcacggcggtcaaggcagttcttcaccacctgctagacacgttgaagggggacaccctggtaactgcctggaca

SEQ ID NO: 25064 - DNA, 494 bp, Oryza sativa
  Clone ID: uC-osflm202108f02b1
gccggtgacctcgccggaggtggcgagctcgggtgccggcgatctcctccccgcgggcggcgtccgtccatggctcgtcggtcctcctcctcctcgtcgtcgtcgggggcgtggcggtacctcaacccggcgtattacctcaagcggccgaagcgcctcgccctcctcttcttcgtcttcgtcgccgccaccttcgccttctgggatcgacagtcgctcgtccgcgagtacgagtcagaaatttctcgattggatgataaagtaaatcagttgcgtgaccagttaagaaaggctggagttcatctggatgaaaatccaacaggtgacaaagtatccagagaaaagcttgtagaaattgatcctattaataatgaaaggagagaaaaggttaaggaggctatggcccatgcttggaattcctatgtgaagtatgcctggggaatggatgaacttcagccacaatcaaagaatggtgtcaatagctctggtggtct

SEQ ID NO: 25065 - DNA, 452 bp, Oryza sativa
  Clone ID: uC-osflm202108f03b1
gcgactctatccgacggaatccccaaccccaacccccaaaaccaatccgccgccgcgctgcctcgcctcgctcgtcgctcccaccaccaccacaaacccgcgcctcctccgccgccgcacgcccgcccgccgacgaatcagagtttggatttaatattacaggcgcagccatgttcaacaggctctttggtaagcccaaggagcaggccaatgctagtgcgttggccacgcttgataagttaaatgagacccttgacatgctggagaagaaggagaaagtcttagagaaaaaggcagccgcagaactggagagggctaaggagttctcaaaagcaaagaataaaagagcggctatccaatccttgaagagaaaaaagctttatgaacaacaaattgagcagctagggaacttccagttgagaattcatgatcagatgatcatgttagaagct

SEQ ID NO: 25066 - DNA, 465 bp, Oryza sativa
  Clone ID: uC-osflm202108f04b1
gagaattaacagctagcgggcttggggaagggaaaacagcaagtgggagatcggcagggagaggtgaattactacttgagtagaagtggtacaagaagagtcgtcgtctacctgtgagcgaattatttcgaggttgtgcgttgcgatgatgggaggtggtctggtgatggaccagggcatgatgttccccggcgtgcacaacttcgtggatctcctgcagcagaacggcggcgacaagaacctcggcttcggcgcgctcgtgccgcagacgtcgtcgggggagcagtgcgtgatgggggagggcgacctcgtggacccgccgccggagagcttcccggacgccggtgaggacgacagcgacgacgacgtggaggacatcgaggagctggagcgccgcatgtggcgcgaccgcatgaagctgaagcggctcaaggagctgcagctgagccggtgcaaggaccccgc

SEQ ID NO: 25067 - DNA, 564 bp, Oryza sativa
  unsure (1)..(564): unsure at all n locations
  Clone ID: uC-osflm202108f05b1
gagctctcggaaagcaccaccaccagcacagagccagcgcgagagagagagagagggagaccaaaccccatcccggatctctcgtcgtcggcggcgtctgcgatggcgctctccgaccgctcccgcgagtcgctcctcccgagcttcctctacacctcctccgccgcgaggtccttcgccaccggcgccacccgcttcccctccccggtgtccccagcttccccggctccgggtgccgtcgggggcggcgcgcccatctcgatccaggctcccagggagaagatcgagatgtactcgccggcgttctacgccgcctgcactgccggtgggatcgccagctgcgggctcacccacatggccgtcacgccgctcgacctcgtcaagtgcaacatgcagattgatccagcaaaatacaagagcataacatctgggtttggcgtcctcttaaaggagcaaggacctagaggcttcttcaggggatgggtgcctaccttgcttggttacagtgctcagggcgcatgcaagttngggttctatgagttctttaagaagtactactcagat

SEQ ID NO: 25068 - DNA, 349 bp, Oryza sativa
  Clone ID: uC-osflm202108f09b1
gtcttttgttgcacaggctgctgaaacagaaacggagtggactagcctgcgtgccactggcgcatataacccaatgcttctagcgacgccacaacccggcgcgctctacgcctaatcacgcgccatctgcttgatatgaacaaacggatgatataggacagggacgggcgtgtacaagacgaccgctggaatgatcaaggtgcatgcctgtggttgggcgcctgtaccgcttgacacgcttgacgaaaccgtagacgtggtggagctgagggctactgcaatatagtaataacttgacgctggactggagagggctaaggagttctcaaaagcaaagaataaaagaggg

SEQ ID NO: 25069 - DNA, 554 bp, Oryza sativa
  unsure (1)..(554): unsure at all n locations
  Clone ID: uC-osflm202108f10b1
tctttctcagggaggaggaggagaaggcgaaggcgaagcaaagcaaaacctcggaagagcggcagagcccactccacacgcggagaggagaccacgccgccgccggaagccatggccgccgccaccgccgccgccttcgcggagcccaagaccaagtacgatcgccagctcaggatatggggtgatcaaggacaggctgcactggagaaggctagcatatgcttgcttacctgtggccctacaggaactgaagcgatgaagaaccttgtgcttggaggagtagggagtgttactgttgttgatggttccaaagttgaacaatctgacatgggaaacaatttcctgttggatgcagaatgcttggggcaatcaagagcaaaatctgtatgttcgttcctgcaagagctgaatgatgctgtaaatgccaatttcgtcgaggagtctcctctggctctcatagacacaaacccttcattcttttcccatattaccgtagtcattgctactcagcttccagagagatncttactgatactagatgatatctgcaggaa

SEQ ID NO: 25070 - DNA, 429 bp, Oryza sativa
  Clone ID: uC-osflm202108g02b1
cgccgtcgcttcggccaccggcggcgactgtggccccgtccgtgccggatccctccccgtcgggccacgtgacgatccgcccctccgagctgtcccgcagggaggcccaggtgctccgcgcgcggctcaccggcgagctcagccgggtccgcgccctcctctccgacatcgacgggtgggaggcgcggcggcggcggccggcggagcctccgcggcagcgggggcacgtgtcgccgcccccggccctccaggcggcgatgcggaagcggtgcacgcagatcctgacgcggctgcggaagcagaagatcagcgtgtggttcaactcggcggtggacgttgagcggctgaagctgcacgactaccacgccattattaggaaccccatggatctcggcaccgtcaaggagaacctcgccttcgggaggtacc

SEQ ID NO: 25071 - DNA, 375 bp, Oryza sativa
  Clone ID: uC-osflm202108g03b1
actaccttcttctccggctcttcttcagtatcgaatcctctgttctcctcgtgcccaccaccaccaccgtagcaatggcgggcaacgggccgatcaacaaggaggacccgctcaactggggcgcggcggcggccgagatggccggcagccacctcgacgaggtgaagcgcatggtggcgcagttccgcgagccgctggtcaagatccagggcgccaccctccgcgtcggccaggtggccgccgtcgcccaggccaaggacgccgccggcgtcgccgtcgagctcgacgaggaggcccgcccccgcgtcaaggccagcagcgagtggatcctcaactgcatcgcccacggcggcgacatctacggcgtcaccaccg

SEQ ID NO: 25072 - DNA, 215 bp, Oryza sativa
  Clone ID: uC-osflm202108g06b1
gttctgttttttgcaacaggctcggcggactagtggggagggttattttagaccgcggtgcgtgcaccagcacatgacggagttgtgcgcatagcctgtcggtgacaccggggtgaccacgttcaccgtgaaccacgaggccacggatattaccagccttgcgcgactcgaccgcctgctgccgtccctgcttgagaccgccgacccgacccaca

SEQ ID NO: 25073 - DNA, 465 bp, Oryza sativa
  Clone ID: uC-osflm202108g08b1
ttcattcaggcaatcagcggcgaggcaccagcccaccggccggctatggcgtccacctcctgcttcctccaccagtccacggcccgcgtcgccgcgcgcgtcgccttcccgtccccggcgacacggacccaccttctcgtgtgccgcgcccagaagcaggacgacgccgacgtctcccgccgcgcggcgctcgcgctgctggccggagcgacggcggcgctgggggtgaaggtggcgcccgccgccgcggcctacggcgaggcggcgaacgtgttcgggaagcccaagacgaacacggagttcatcgcctacagcggcgaggggttcaagctgctgatcccgtccaagtggaaccccagcaaggagcgcgagttccccggacaggtcctccgctacgaggacaacttcgacgccaacagcaacgtctccgtcataatcaaccccaccaccaagaagaccatcacc

SEQ ID NO: 25074 - DNA, 430 bp, Oryza sativa
  Clone ID: uC-osflm202108g09b1
tccatatctatctcttctctcatcttcttctctcctgcggatttgcaaattacacacttctgcaagctaaaaaatccagttttcttgctcaggctagtgcctggttgtatctacagctcagctcagaaagaaaggagtggtttttgaggagtggtttttgtctacacagctgctgcatatcatgcctccacttgccacaatgtcatcgccaggttcgcttcttctgttgacccccgctgtgtaccaggggattgggagaaatcgtggaggacaaagccaggaaggacaatctatctcgtcttcacgatctctcaagactaaactcagcgtttctgccagagcagtttcttcatgcgaagcatccatgagaataacatgttgcgcataccagacacagactgcacgacgcatatctttctatggacctacc

SEQ ID NO: 25075 - DNA, 436 bp, Oryza sativa
  Clone ID: uC-osflm202108g12b1
gctattgctgccacgccgctcggcggcgcaatgcgtccgagatatggcagggttctgggaatcatcctcctactcactttcttgtgcggcttgactggcgccaccaccggtgtgaccacattcacctcgaaccagaagccgacgtatatgaccagccttccgggactcgacagcgcgctgccttcccttctcgagaccgggtacgtgaccgtcgacgaggagaacggggcagagctgtcctactacttcgtggagtcggagggcgaccccggccgtgaccccgtcctcctatggctcaccggcggccaccggtgcagcgcgctcagtggattggtcttcgacatcggccccgaggagctcgtcagggagccggatgacggcatcatcctgccgcggctgcggtggaacccaaactacgggaccaaggtggatggca

SEQ ID NO: 25076 - DNA, 436 bp, Oryza sativa
  Clone ID: uC-osflm202108h01b1
ctcatgatgttcatcatagaggacaaagggggtgccattgccctcatgctggcctccctcttcttcctggggacatggcctgcggtcctcaccctcctcgagcgccgaggccggctcccgcagcacacctacctcgactactcgatcacgaacctcctcgctgcggtcctcatcgcgctcaccttcggtcagctcggcgatagcaagcccaacatgcccaatttcttcacccagctcagtcaggataattggccttcagtgctgttcgcaatggcagggggtgttgtgctcagtatagggaacctctctactcagtatgcatgggcatatgtaggtctctcagtgactgaggtcatcagctcaagtatggatggtgtaataggcacaacactgaattatttcctggacaaccgcatcaacagagcagagattcttt

SEQ ID NO: 25077 - DNA, 423 bp, Oryza sativa
  Clone ID: uC-osflm202108h02b1
acgatgagttgatgcaacactttgaggactacaatggcggtaactggatacaattagaagaactttgttatgaagacatgcaactgctgtatggaagaattgctgcattgctaaaaagcctaggcatccctgcactttctaaggttatttatcgagaagcaatattttacggtacagtggataacagagaaaaggttacagcaatttattggctatgaccatatatgcaacgctacatctatgagatgcatagagatacatatgtaaactgatgacaaaatgaaatcacgaagcttagcaatctacaagctattgttgttgagaagtgattccacatgtataagctgaaagaacgtgtgagactttgtaagagaagatgtagatgcaattgcctattgcagggaaataatctatatgctacgc

SEQ ID NO: 25078 - DNA, 346 bp, Oryza sativa
  Clone ID: uC-osflm202108h03b1
cttttaccgtccgcttcccttcccttcccttcccagaccctaacccccccaaatctcccacaccgctcccccgccgccatggccgcctccgacgccgacgccgcggaggtcgagcggctctacgagctcggcgagcgcctctcctccgccaaggacaagtcccagcacgcggcggactacgaggcgatcatatcggccgtgaaggggcagagcgtgaaggcgaagcagctcgcggcgcagctcatcccccgcttattccggagcttcccggcactcgccccgcgcgccatggaggccatgttcgacctcgtcgacatggaggaactcgcgactagaatacaagcta

SEQ ID NO: 25079 - DNA, 462 bp, Oryza sativa
  Clone ID: uC-osflm202108h06b1
ctcctttgccaaaccagtctcccccaaatctcctttgcgtgctctcgattcctcagcaaccatgtcggcctactgcggcaagtacaaggacgagctcatcaagaacgctgcctacattggcactcctggcaagggtatccttgctgcagatgagtccactggcaccattggcaagcgctttgccagcatcaatgtcgagaacgttgaggagaaccgtcgctctctccgcgagctgctcttcaccacccctggtgccctccagcacctaagtggtgtgatcctcttcgaggagaccctgtaccagaagaccaaggacggcaagcccttcgtcgatgtcctcaaggagggtggtgtcctccctggcatcaaggctgacaagggtaccgttgaggttgccggcaccaacaaagagaccaccacccagggccacgatgatcttggcaagcgttgcgccaagtacta

SEQ ID NO: 25080 - DNA, 481 bp, Oryza sativa
  Clone ID: uC-osflm202108h10b1
ttatttttgcaagaagagacgagacgagggtgagaaggggacgagggggccggccgcgggcgtcgtcgtgttcctccccccctctctctcctctcctgtcctctcgatctgcatccttccttccatccattcctccccgcacccttcgcattgctctcgtcgtctcgattcggtcgaggatctccaggaaaagaggaggaagcgatatgggttgcttttcatgctgcggagcggatgatgtcggcatgaagaagaagcgcgacgatccttacgtcccgatccctgatccaggtgggaactatggacgtagcaagcccgggcccccagccccttcgcgttctccccccaccagcagaaatctgccaattgctgtaccggcaattccccttgatgaaataaagggaataaccaagaacttcagcagcgatgctctcatcggagaaggctcgtacgccagagttttcttcgtgtgctgagagat

SEQ ID NO: 25081 - DNA, 553 bp, Oryza sativa
  Clone ID: uC-osflm202109a01b1
atttcatattgtacaagaagctatcagaaatcaggggggctagctagcagtaggaacaaacattgaggccgaccccgatcatcttcctgctcctggccgccgccgacgacatcgccgctccgtggcaggttgcgcacgccgcgggcaagtgcggcaagacaccggaggagaaggtggcgctgaagctggcgccgcgcgcgaaggcggcgcaggaccccggggcccggccgccggccgcgtgctgcgcggccgtgcgcgacatcggcacgcaccagagccacgcgtgcctgtgcgccgggctgctgtccagcaccgggaggcgctccggcgtcaagccggaggtggccatcaccatccccaagcgctgtagactcgccaaccgccccgacggatacaagtgcggcgcttacacgctgcccagcctgcaaggctgatgacgacgtacgacgggcttgcctaggctctggcgccactaaaagctacctacagatcgcttacagtatactactcctataatactggtgcttaagtgtgctagctataccctgcactg

SEQ ID NO: 25082 - DNA, 450 bp, Oryza sativa
  Clone ID: uC-osflm202109a02b1
ctttcttttccggttgtgcttgccttgactgtgggggggaaactagaggtactaacaaacgtcctgccaaaaataatgggaaacaataagtatcttgggcaggaaaagcttccaatcattgtttgggttattgctcaggcatctcaaggtgacctagtgactggaatgttttgttgggctcatttcctgtttcccacactgtgtgctaagccaagtgggaatccccagacgagagatttagttctgcagttgctcgaaagaattttgtctgcccccaaagctcgaggcatcttactgaatggtgctgatagaaagggggaacgcctgattccccctgttacatttgatctgttcatgagagctgcatttactgtttccagcgctcgtgtaaaggctacagagaggtttgaagcagtctacccaacaatcaaggaagttgcccttgctggt

SEQ ID NO: 25083 - DNA, 425 bp, Oryza sativa
  Clone ID: uC-osflm202109a05b1
tgtcctgtccggcaacgcatcctcaccgttcaggcgggggttaatgccaagtcaacggggtgcagcacaagcgccatggccgccccggaggcaccctcctgctacgttgggatcgcgcggaagtccgccgccttccgcctcatgaagcaaatggggtgggaagaaggtgaaggccttggtaaagataagcaaggcattaaggggcatgttagagtgaaaaacaagcaggacactcttggtgttggtgtagacagtcctcataacaaatgggtatatgacaccacccaatttgacaatatactaaagaaactgaaagtgcaatccgctactgctgcttaaaaagatttgaagatgatgtcagcaattcaccagatagtacaccaaaggaagctaaaccagcaaacaatgaagttaccaaagttacc

SEQ ID NO: 25084 - DNA, 276 bp, Oryza sativa
  Clone ID: uC-osflm202109a06b1
catgatctccattcgtttatgagttcctcgtaggcgggggttatattaaactcatgggcgttattaacatcggaatcaatgggttcggacgcatcatcaggctggtggtcaatgtcgcgctgtacagcgaggatgtcgagctcgttgccgtcaacgatccattcatcaccaccgagtgcatgacatacatgttcaagtatgacacccgccacggccagtggaagcatcatcaggtcaaggtcaaggactccaagaccctcatctttggcaccaaag

SEQ ID NO: 25085 - DNA, 375 bp, Oryza sativa
  Clone ID: uC-osflm202109a07b1
tggtgctctccacacggaggcgaagacggcggggggggtgattaactttctcgtgagggtcgacaaccagacgccctacacggtcacccaatgcctccagggcacgagctggcttctgcccgaggcggtgcacctgatctacatggacagctaggccacccttgcggcacatccggccccatcgccggctgctgcagcagacgccacggcagcggctgcggcagcagttgacgaggaggcggacacgactaggatacctgaccccactcttgctatactgagcgatggaatgctacagggacttggggtggaagaggaagcgcggggaccagtacgcacaaagcggtagagtctctgctgcgatgcccccatggg

SEQ ID NO: 25086 - DNA, 459 bp, Oryza sativa
  Clone ID: uC-osflm202109a08b1
ttcttcagccacctcgacgaggtgaaccgcggggggggtcttttaattaagccggtggtcaaaaaccagggcgccaccctccgcgtcggccaggtggccggcgacgcccaggccaaggacgccggcggcgtcgccgtcgagctcgaccaggaggcccgcccccgcgtcaaggccagcagcgagtggatcctcaactgcatcgcccacggcggcgacatctacggcgtcaccaccggcttcggtggcacctaccaccggcgcaccaaggacgggcccgccctccaagtggagctcctcaggcatctcaacgccggaatcttcggcactggctccgatggccacacgctgacgtcggatacggtgcgggcggccatgctcgtgcgcatcaacaccctactacagggctactccggcatccggttcgagatcctcgaggccatcaccaagctgctcaacacc

SEQ ID NO: 25087 - DNA, 365 bp, Oryza sativa
  Clone ID: uC-osflm202109a09b1
ttcttgtctatgtcgcgtagccctagcatcggggggctctatgagcaagattggggtctgaaacaacgggttcggaaggatcgggaggctcgtggccagggtggccctacacagcgaggatgtcgagctcgtctccgtcaacgacccctttatcaccaccgactacatgagctacatgttcaagtactataccgtgcacggccaatggaagcacattgacatgaagatcaaggacttcaagactgtgctcttgggcgagaagccggtcaccgttttcggtatcaggaaccctgacgagattccttgggctgacgctggtgctgattatctcatggagtccaccggtgtctatactgacaaggaga

SEQ ID NO: 25088 - DNA, 458 bp, Oryza sativa
  unsure (1)..(458): unsure at all n locations
  Clone ID: uC-osflm202109a10b1
tttcttttgaagcctccatttatacangaattgcgggggctaaatacttccgtgaggggggctataaaatcagtatgatggctgattctacttctcggtgggctgaagctttgcgtgagatttcaggacgtctggctgaaatgcctgcggatagtgggtaccctgcatatttggctgcacgtttggcatccttttacaaacgtgctggtaaggggaaatgtctctgcagtccatatcggacaggcagtgtcacaattgttggtgctgtctctccacctggaggtgatttttcagatcctgttacctctgcaactcttagtattgtgcangtcttttggggatatgataagaagctggctcaaagaaagcatttcccatctgtcaattggctcatctcttactcaaaatactcaaaggctcttgaatccttctatgagaagtttgatcaagatttcatt

SEQ ID NO: 25089 - DNA, 390 bp, Oryza sativa
  unsure (1)..(390): unsure at all n locations
  Clone ID: uC-osflm202109a11b1
ttgctttgccaatggtgatgtcaaccacacaggggggggttgaatgaataatcagggggtacagaagaggagaaataggagtgggggaagaatagaagagctagggatagattccggccatgtcatcggcgttcggcgacttcagcccgctcaccgagcggggccgcgccgagaatgcgcggcatcagcgcatgcgcatcatgatcgccctcggcacggtgtccatcatcattatcctcatcgtcatgggcgccccctccatcacgtacagcgggaagaaatccgaggaggacgaaggctgctccaagggctcgtctaaggggaaatctaaaggcggcngantgtggagactaccaagacggttgctgcggcggcggcaaagcggacctg

SEQ ID NO: 25090 - DNA, 225 bp, Oryza sativa
  unsure (1)..(225): unsure at all n locations
  Clone ID: uC-osflm202109a12b1
ttgtttctgccgctgctgaagaaaaacacacatncgtacttattaacaccaactcggcacccaataaggccattaccttccaaaattctcccatccaatggcgctactcctctccgtcttcttctctcacgggccggctttctcgcccgccatcttcacatgccgcccccccgcctgcgggcacttacccaccttgctcagcggccgtgtggcttctcaaaggaa

SEQ ID NO: 25091 - DNA, 285 bp, Oryza sativa
  Clone ID: uC-osflm202109b01b1
cggatgcttgggaaataaaaggctaaatccggtggcgacgatataaaagaatccgcgggcaacaacccataaacctacaaggaaagattttggtcggaaagtcgcagacacatatgaaaagcttggactagcagacgagaaaaaggagtggcttgggaaacacaatgcattgtttgacaagccatcaagtaaagagataaagaacgggcgggagatcaaacaggctgtgatgaacacgaacaccgggtagacatcgcatgatgcctccacctataaaatctacag

SEQ ID NO: 25092 - DNA, 524 bp, Oryza sativa
  Clone ID: uC-osflm202109b02b1
atttctaaaaaaggatgatacatctgatccatttgctatatgtggaattatcgatcaatattcgcagcaaccatctctgaaagaaaaaagcgctctgaataggctagaaatcatcaacaaatgcttttccaaaaaaacagtggaagaaatcatagcctctcttgaacaagaggctccaaatgttgctgatgaatggattgcttctgcaatccagtccatgaggaaggcttctactactagtatgaaaatatccttgagatcgataagagaagggcgaacacaaactgttggtgaatgcttacgtcgagaatatagaatggtttgccatgtgatgcgtggtgacttcagtagagactattgtgagggatgcatggctatattgttggatagagatcgagacccagagtggatgcctccaaggctggaagaggtgcacgacgaggtggtcgaaaaatatttttccaaagtctatgatccagagtgggaagatgtggacctacctcctagacgttcccatggaagga

SEQ ID NO: 25093 - DNA, 510 bp, Oryza sativa
  Clone ID: uC-osflm202109b04b1
gtttattctaacctccgcgccgcaccggacgggggggggctcgtgtaccacctccgggggggcgaatcccctcatcttcgccggtcgcctcctccaagcctccgcgacgcgcacggcagagatgtaccgcatcgccgggagccacttgcgctctctcaagagatacagttatagtaggtttgctagtacaagtgttgtgaagcagtcttcaggtggtttgtttagctggcttcttggggagaagtcaagccaattgcctcctcttgatgtccctctcccgggtattacccttcctccaccactgccagactttgttgaaccgtctaagacaaaagtcaccactctcccgaatggcatcaagattgcttcagaaacgtcagtgagtccagcagcatctgtgggactgcatattgactgtggttcaatatatgaaacacctgcttcatctggagcatcacatcttgtggagaggatggcgttcaagagcactacaaacaggagtcatttgcg

SEQ ID NO: 25094 - DNA, 482 bp, Oryza sativa
  Clone ID: uC-osflm202109b06b1
cttgcgttcgagagatcgaagcaagctgctacacagaggtcacgacatggccgaggcggcgtcggcggcggcggcggcgacgacggagcaggcgaatgggagcagcggcggcgagcagaagacgcggcactcggaggtcggccacaagagcctcctcaagagcgacgatctctaccagtacatcctggagacgagcgtgtacccgcgcgagcacgagtgcatgaaggagctccgcgaggtcaccgtcaaccacccatggaacctgatgacgacgtcggcggacgaggggcaattcctgaacctgctgctgaagctcatcggcgccaagaagaccaatggagatcggcgtctacaccggctactccctcctcgccaccggcctcgccatccccgacgacggcacgatcttggcgatggacatcaaccgggagaactacgagctggggctcccgtcgatcgagaaggcgggagtggcgcacaag

SEQ ID NO: 25095 - DNA, 533 bp, Oryza sativa
  Clone ID: uC-osflm202109b07b1
tctctctctctctctctttcctctccactttgaatcaatcaaaacggagaagaagaagaagaagaagaagaagaagaagaagacatcaagaacacgtggagcagaagcttctctgccggcttctatcgtagctctcaaggataaagaaaatctgctgcagaggtacaagatctagtggcagaacatgatgagcaatcttaagcttggggtggaggttaccagtgctcatgacctcctaccaaaagagcagggcacatgcaacccctatgtcgagatcgaattcgatgaccagaagttccgcacagccatcaaagagagggatatcaaccctgtctggaacgagcagttctacttcaacatatctgatccatcccgcctcactgagaaagacctcgaggcgtatgtgtaccacgcaaaccgcgccagcaattccaagacttgccttggcaaggttcggatctccggtacatcctttgtcagccactcagatgccacacctcttcactaccccctggagaagcgcacgatcttat

SEQ ID NO: 25096 - DNA, 321 bp, Oryza sativa
  Clone ID: uC-osflm202109b11b1
tggttcattgccccgtggccacgggctacgccggagggaggggagagacgcggttccttggtcgccatggacgggctcatcaaggggctgatcaacgtggcgatcgacgccgtcgaaggcgccggacgaggtgagcggggcggcgaggacgacgcgccgaggaggcaccgccccgcgcgggaggaggaggagggccgtggcgacgagcggtcgcggtcgacgtgggccgaggtggtctacgatcacaagggcggcgaggcggaggagcgcccggaccatcggaattcgaggcgggatgggaggcaagagaggatggaggat

SEQ ID NO: 25097 - DNA, 446 bp, Oryza sativa
  Clone ID: uC-osflm202109c01b1
atttgtaataatactagatttttttatttggctggagatatatttccaatccccaacctcccaataatccgatctctcccagatctgttcggatcaaggctgtgtcgatcgcaaaaaagaaaaaaaaaagcatgttccttgtggggggggtcatctgatgatcacttctttgtttcccgcgctttgttggggattcggttttcgggttaagattttctacacgagggcctcgaacttggctcatagcgccgcggtggcagcgcgcttcgcgaccgtcggtgatgcgcggagagctgcttaagtggtcgacatgccgtcgtcctcctcatccaacactacgagcctgatgatgaagactcaggcggcttgctagccggtggcgagcacggacggggccacgaccatgacttgcgctgccgcaagctacaggaggaacagattcccat

SEQ ID NO: 25098 - DNA, 549 bp, Oryza sativa
  Clone ID: uC-osflm202109c03b1
catattaggctcgggttaaggagttcaacctaaagcaaatgtggaagagccccaatggcacaattaggaatattatcaatggcactgtattcagagagccaattatatgcaaaaatgtcccaaggcttgttccaggatggactaagcccatttgcattggaaggcatgcttttggtgatcagtaccgagcaactgatgcagttctgaaggggcctggcaagctcaagctggtttttgagggaaaggatgagcagattgatctggaggtgttcaacttcactggtgctggaggagttgctttgtctatgtacaacactgatgagtcaatccgagcttttgctgaagcttctatgacaactgcttatgagaagaaatggccgctttatcttagcaccaaaaacacaatcctgaagaaatatgatggaaggttcaaggatattttccaggaggtctatgaagctgggtggaaatccaagtttgaggctgcccgaatatggtatgagcatcgtctcatcgatgacatggttgcttatgcacttaagagtgaag

SEQ ID NO: 25099 - DNA, 518 bp, Oryza sativa
  Clone ID: uC-osflm202109c04b1
ggtgcttcctccacgcctcgccaccatctcccggtccgcaagcggatcttcgcctatgccctctacgccctcctccccctcgccgccctccactacctcctcctctcccctccccctcctcccctcgccaccacctccacctccaccacgccgccggttgcggcggtggcggtggcgaggaaggcggcgccgcggtgcgactactcggagggggagtgggtgcggagcgcgtcggcgccgcggtacaacgggacgagctgcggctcgacgatcaagggcgggcagaactgcatggcgcacgggcggcccgacacggggtacctgcactggcggtggcgcccgcgcggcggcggcgggtgcgcgctgccgccgttcgcgccgggggagttcctggagctggtgcgcgggcggcacgtcgcgttcgtgggagactcgctggcgcggaaccagtgcgagtcgctcgtctgcctcctcgcctcggggttccccgccgagctggtgcgccgcggcaacggcgg

SEQ ID NO: 25100 - DNA, 492 bp, Oryza sativa
  Clone ID: uC-osflm202109c06b1
atgcggttttttgcgagagcggcggcatcaagggcgtcaagggggtgtacaacacggtccgtggtccggacgacctcgacacgaggctcctccgtgccatggtgaccaagggcattgtggagcccgtgtcgagcacgttcgtcaacctggtgaacgccgactacacggcgaatcagcgcggtctgcgcatcaccgaggagcgggtctcccacgagagccccgccgtggaggcgccgctggagtccatccaggtgaggctctcacacgtgcagtccaagttcgccggcgccatcagcgacggtggtgacatcgtcctcgaggggagggacaagtacagcgtgccgcaccttaccgttgtagggccctacgaggtggacgtcagtctggagggcaacctgatcctgtgccggcagatcgaccagcccggtatgatcggtaaggtcggtaacatactcggccagacgaacgtcaacatcagcttcatgagcgtcg

SEQ ID NO: 25101 - DNA, 536 bp, Oryza sativa
  Clone ID: uC-osflm202109c07b1
gtttgcctactccatgttcatcattcagctcgagatctgaaagaaactactccaatttatactaatagtatgtgtgtagataggaaaatgatggagtactcgttgttgggataggcttatggcttgcatgccccaggagctgcatcaaccctacatggaccctctttggattgaagggagctctgcatcttttgtcaccctcgagcagctttactgttctggatttccatcgttctcctcttgagtcttcttgacttagcgctttttttttctttttttaaaagaaaaaataacttttttttcaggattgtgctccatgcgtatgagcatggtggtgatgatgtatgttgccagatagcagtagtattaatattgttgcaggtgtggtggagggtactaggaatttaggtggtagcagtacatacttggtcaccagtatctagtgcccttttctttgtgggaaaaagttgcttctatcgccatgcttatccttcctctttcggctcttctttgcacagcagctctagatcttttgg

SEQ ID NO: 25102 - DNA, 523 bp, Oryza sativa
  Clone ID: uC-osflm202109c09b1
ttttagcaagaagctcagctcctcctcctctggcatggcagccatggccaccaccgcgtccagcctcctcaagacctccttcgccggcgtgcgcctccccgccgccgcccgcaaccccaccgtctccgtcgcgccgcgcaccggcggcgccatctgcaactccatctcgtcgtcgtcgtccactcccccctacgacctcaacgccatcaggttcagccccatcaaggagtccatcgtgtcccgcgagatgacccggcggtacatgaccgacatgatcacctacgccgacaccgacgtcgtcgtcgtcggcgccggctccgcggggctctcctgcgcgtacgagctctccaaggacccctccgtcagcgtcgccgtcatcgagcagtcggtgtcccccggcggcggcgcgtggctcggcgggcagctgttctccgcctggtggtgacgcaggccgcgcacctgttcctcgacgagctcggcgtcgcgtacgacgagcaggaggactacgtcgtcatcaagcacg

SEQ ID NO: 25103 - DNA, 336 bp, Oryza sativa
  Clone ID: uC-osflm202109c10b1
tttatttctcaacaactagattccattccttggggggggttggataaatgcgccctgcccacatggcctgcaggcgctctgtatgatgacattggcagggctgcgatctgcctctccctgaggggagggggactggcactgcatccgacatgcggtgctacacgtccacaagagttgtgcactgggacacgatgatgaccatcgtagacagcgctctagcacggtctgtaagaggtgccaccttcggggtggagggcacggacttatgcacccacaaagcggaacctgccatttactgaggctctgatgcgactgccacatacagcatggagctga

SEQ ID NO: 25104 - DNA, 436 bp, Oryza sativa
  unsure (1)..(436): unsure at all n locations
  Clone ID: uC-osflm202109c11b1
caattccagcgcgggagccgtgaggggcttcacttacgtacgattgcagcgcggtggggtgggcgaggtgcgtggccatggcggacgcggcggtggagctgcctggacggctcgcgatactgccgttccgcaacaaggtgctcctcccgggggccatcgtgcggatccgctgcaccaaccccagcagtgtgaagcttgtggagcaggaactctggcaacgggaggagaagggtctgatcggggtgctccctgtgcatgactccgaagctgctggctcattgctgtctactggtgtaggcagcgattcaggtgagggtgggagcaaggcgctgggtggttctgcaggagaatcaacgaagcaggatactaagaatgggaaggagaccattcactggcacagccgnngagtagctgctagggctttgcacctttcaga

SEQ ID NO: 25105 - DNA, 362 bp, Oryza sativa
  unsure (1)..(362): unsure at all n locations
  Clone ID: uC-osflm202109c12b1
tttgttaatttcctctctctttctgtgattggggggtttgtttgactncttctggcgcctccaaacaatcnatcatctcccatcggcgggggcagcagacccgatctttctggtgattcaaaagatgggggggtactactagcgtgagttctggcatttcagcgaccagctccgcctccacaacttctccagcctctccatcgccgactccatctgggcctccccctcgcctggctccgtcgatcatagcancaacaagctctccctccccaacaacagcaacaacaactccaccggcaagacctacttcaacaaggtccctctggaggccgggcaacaacaacttcaacttcaactacaac

SEQ ID NO: 25106 - DNA, 483 bp, Oryza sativa
  Clone ID: uC-osflm202109d02b1
agttttcaaaccagcaggagtcgcctcgcctcctccttcatcctcctcgtcgtcgccgcgggggtcgcctgagatcacattaacaatggtgaaggctgttgttgtgcttggtagcagtgagattgttaagggcactatccactttgtccaagagggagatggtcccaccactgtgactggaagtgtctctggcctcaagcctggtctccatgggttccatattcatgcacttggtgacaccaccaatggttgcatgtcaactgggccacactacaatcctgccggaaaggagcatggagcaccagaagatgagacccgccatgctggtgatcttggaaatgtcaccgctggagaagatggtgttgctaatatccatgttgttgacagtcagattccacttactggaccaaattcaatcattggcagagccgtcgttgtgcatgccgatcctgatgatcttggaagggtgggcacgagctgagc

SEQ ID NO: 25107 - DNA, 515 bp, Oryza sativa
  unsure (1)..(515): unsure at all n locations
  Clone ID: uC-osflm202109d03b1
gtttttctctctccctctccatcccacgcctcgctggctagcgcacagatctcctaccaccaccaccaccgtcgcagccatggcgaccgggtactaccgcggcggcggcggcgccagggaccacgccgacgagcccgacgacttcgacgagtacgaccccacgccgtacggcggcggctacgacctcttcatcaccttcggccggccgctcccgccctacgacgagacctgctacccttgctccgatggctgcacctgctacgacgccccgcactactccgacgacgagccctgcccctacgcccaccactccaagccgcagcccgcctacggtttacgaccccagcacgagcagcagcagcagccgtcctacgcctcctccggctaccgcccccagcacgagcagcagcaatcttacggctcctctggctacggatctaagccccagnccgactatggctatcggccccaggccgaggaggagaacacctaccgctncggctatggatctgggt

SEQ ID NO: 25108 - DNA, 533 bp, Oryza sativa
  Clone ID: uC-osflm202109d06b1
actgcttggcgcacgaccaggtggccgacgccgtcgacgaccgtgcggaggaggaccggatggtcgcctttacctacctccggatggggcccgacctctttcacccggacaactggcgccggttcgtcgccttcgtccgccgcatgtccgagtctggctcgccgcgggaggccgtcgagagcgccgcgcacggcgtcgcgcaggccaccggctcgctcgtgcacgaggccgaggtcgcgctccggagctagcacggtcagacgctcatatacaccgtcgcctcgaggtcggattccgatgtgggatcattcgatctcccttttttttttcttctttttgccattttgtacagacttttggggagctttggatttgtgctttttgtctcgggaggaaaaccgctctggaggtcgaagagagcgtcattttcctcccgttgaagatcacgaatcatttacgttagagatgatgtaattaagcaaggaggggaggggaacacacacacactggcactcaatagttgttgtcacgct

SEQ ID NO: 25109 - DNA, 545 bp, Oryza sativa
  Clone ID: uC-osflm202109d07b1
tttccaccctcgccgccgccgccgccgcaagtagccacccgcgccgccgccgccgccgtcgccggagaaggagaggagcagccatgggtcgcgtgcggaccaagacggtgaagaagacctcgaggcaggtgatcgagaagtactactcgcggatgacgctcgacttccacaccaacaagaaggtgctcgaggaggtgtccatcctgccgtcgaagcggctgcgcaacaaggtggccgggttcaccacccacctgatgcgccgcatccagcgcgggcccgtgcggggcatctcgctgaagctgcaggaggaggagcgcgagcgccgcatggacttcgtcccggagaagtcggcgctcgaggtggaggagatccgcgtcgacaaggagaccatggagatgctcgccgcgctcggcatggccgacctcctcggcgtcgagcgccagcaagaggtctccgcgccgacctactcccgcccgtcgtacggtggcccccgccgcgaccgcgtctagatcgtcgtcgcctctttcgccgcgtcgtcgccatgg

SEQ ID NO: 25110 - DNA, 510 bp, Oryza sativa
  Clone ID: uC-osflm202109d10b1
ttcttacacacagacgcactcacacactcagcttgggcgagcgagcgagtgaacgtgagagagagacagagatggcgagtgttgcctccttcccggtgatcaacatggagaacctggagaccgaggagaggggcgcagcaatggaggtcatccgcgacgcctgcgagaactggggcttcttcgagatgctgaaccatggcatcgcgcacgagctgatggacgaggtggagcgggtgagcaaggcgcactacgccaactgccgggaggagaagttcaaggagttcgcgcggcggatgctggaggccggcgagaagggcgccgacgtgaagggcatcgactgggagagcaccttcttcgtccgccaccgtcccgtcttcaacctcgccgacctccacgacgtcgacgaccactacaggcaggtgatgaagcaatttgcgtcggagatcgagaagctctcgagagggtgctggacctgctgtgcgagaatctgggcctggagaaggttacctg

SEQ ID NO: 25111 - DNA, 427 bp, Oryza sativa
  Clone ID: uC-osflm202109d11b1
ttgttcgtcaagaactacgtctactaatccgatccaatccaatcaagacagtgaacctgctgctgctgctgctacgtactacagctactgctatactgctagtacctcgagggcactgtagccagtgtgtcgtcacagttacaggttgagatcgatggacaaagttaaaactatactgcattaattaattttaccttgagaacatacgtggttcatcatgtatttcatcacatgaatcttttctagagcgtttgatatacatacctcgtgttttgcctctgcaataaccttgtgtgtagacgaatctgtatactacctgtatgtgtggcctgtgaatcgatttggttactgcaaagatttgcgtctttttgaaaaaaaaaaaaaacaacacagaaaaagaacaaattaaaataaaaaaaaagggcgg

SEQ ID NO: 25112 - DNA, 387 bp, Oryza sativa
  Clone ID: uC-osflm202109d12b1
cggccggaatgcccggccgacccacgcgcccgggtgattctccacgcctcggcccatctcccggggggtttgttaagacagtgatgcctttacgccctccccccctctggatggggcgctgacctcggcgctcccctaccggtcctcccctcgtcaccaccttcacctgcacgacgccgacgggtgcggcggtggcggcggccaggagggcggcgccccggtgcgactactccacgggggagagggtgcggaacgccccggtcccgctgcgcagcgggacgggccggacgtccgacatcacgggcggctagaagcgcaaggcggacgggcggtccgacacgggggacctgcactggcggaggcgccccctcggtactggcggttgcg

SEQ ID NO: 25113 - DNA, 449 bp, Oryza sativa
  Clone ID: uC-osflm202109e01b1
gtttatgagcattcctccaaatcagatgatcagggggatgtgtttgaagagttggatcccacattctgcttcatgtgtgatcttgagcatgacaccattgagaattgcatggtccacatgcacaaaaagcatgggtttttcatacctgatagcgaatacttgaaagatccaaatggtcttcttatatatgtcgggctgaaggtgaagcgtgattttatatgcctatactgcaatgacagatgccagccttttcaaattctagaggctgtgagaaagcatatggatgcaaaaggacactgcaaagtacgatatggagatggtgcggatgatgaatatgctgaccttggaaatttctatgattacagccgcagttatgctggatgtggagggaaagaattggttgctgcagatgacaggataacattgaactggatgtggtgaggctgaac

SEQ ID NO: 25114 - DNA, 395 bp, Oryza sativa
  Clone ID: uC-osflm202109e02b1
gttatttcacacccgcaagcgtgaggtcgccgggttcctggcccagacttcccacgcgacctctggtgggccctactcgtggggctactgctacaaggaggtgaagggcgcgacgtcagacttctgcgtgccgaacgcgcgctggccgtgcgcgcccggcaaggcgtaccacgcccgcggacccatgcaaatcgcatacaactacaactatggggcggccggcgaggcgatcggcgcggacctgctgggcaacccggagctggtggcaacggacccgacggtggcgttcaagacggcgctgtggctgtggatgaccgcgcggtcgccgagccagccgtcgccgcacgccgtcgtcacggggcagtggactccgactcccgcggacagtgcgggcg

SEQ ID NO: 25115 - DNA, 528 bp, Oryza sativa
  Clone ID: uC-osflm202109e04b1
cgttgatcctcctccccgttcttggctcccctcgcgggcgtcctcacttcccttcttgcatgggggttcgccgccgtgagtgaggaggaggaggagtagtactaggaggaggtgaggccatggagagggtggaggatccggacctggaggacccgaacccggacgtgggggagctgttcagccactacgacgggctctacttccgcggcgcgctcgccggcgccggcttctccgtccagtggagctcgccgccgtcgcggatggccggttcttttggatcgtgtaccttcggaaaaccggataataccataacattgtctgaaactgtgctgaaatatcgctcacgtattgatatgaagaatgcattgctgcatcagatgatccatgcaatcttatttgtaaagcatcataggaaggactgccggggtcatggtcctaattttcgtgcttggatgactgctattaacacctgttctattgacgatcaccagagaccacctgatgggtacaatatcaccaccagacatg

SEQ ID NO: 25116 - DNA, 494 bp, Oryza sativa
  unsure (1)..(494): unsure at all n locations
  Clone ID: uC-osflm202109e05b1
ctttttcctcgcaccaccctgcttgttacagctgcgccgtctattgcttccttctcctcatcgaccgccatggcttctctcaccgatctcgtcaacctcaacctctccgacaccacggagaagatcatcggcgagtacatatggatcggtggatctggcatggatctcaggagcaaggctaggactctatccggacctgtgactgagcccagcaagctgcccaagcggaactacgatggctgcagcaccggccaggcccccggccaggacagtgaggacatcctgtacccacaggctatctacaaggacccattcatgaagggacacaacatccttggcatgtgcgattgctacacgccagccgggagaaccgatccccaccaacangaggcacaatgctgcaaagatcttcagctcgcctgagggtgcttctgaggagccctggtacggtattgagcaagagtacacccttctacagaaggacatcaactggc

SEQ ID NO: 25117 - DNA, 527 bp, Oryza sativa
  Clone ID: uC-osflm202109e06b1
gatgattgcgaccctcgccacgggaagtacatggggggctgtctcatgtaccgcggtgatgtcgtgcccaaggacgtgaacgccgtcgtcgccaccatcaagaccaagcgcaccatccagttcgtggactggtgcccgacggggttcaagtgcggcatcaactaccagccgcccagcgtcgttcccagcggcgacctcgccaaggtgcagagggccgtgtgcatgatctccaactccaccagcgtcgtggaggtgttctcccgcatcgaccacaagttcgacctcatgtactccaagcgcgccttcgtccactggtacgtgggtgaggggcatgaggagggctgagttctctgaggcccgtgaggatctcgccgcgttggaaaaggactactaggaggttggcgctgagtccgaccagaatgaggatggcgatgatggtgacgagtactagaggagtcgtcgtcgtctgggggcttgatgatctgtgtgtcaaggcctgattgataactgctgctatccatgatctg

SEQ ID NO: 25118 - DNA, 473 bp, Oryza sativa
  unsure (1)..(473): unsure at all n locations
  Clone ID: uC-osflm202109e08b1
tgtttctgaccaccattggttcctgaaattgagtcatggctgccaagctagctcgcctccacagtctccgcgaacgcctcggtgccaccttctcgtctcatcccaatgagttgattgcactcttctctaggtatgttaaccagggaaagggaatgctccagcgtcaccagctgcttgcggagttcgatgccttgatcgaagctgacaaagagaaatatgctccctttgaagacattctccgggctgctcaggaagccattgtgctgccgccctgggttgcactggccatcaggccaaggcctggtgtctgggactacattcgggtgaatgtaagtgagttggcagtggaagagctgagtgtttctgagtacttggcattcaaggaacagcttgttgatggacacaccaacagncactntgttcttgagcttgattttgagccctttcatgcctncttcccgcgcccgtccatg

SEQ ID NO: 25119 - DNA, 521 bp, Oryza sativa
  Clone ID: uC-osflm202109e10b1
ttttatagctagctaactgttactgtacctgctcccatatatcatcttcatattcttgcagatcgataagcgagaaaaatgggagcacgctgcctcgcattgcttctactctatggcacgttgctgctgctgttgctgctgccacagatgccgctcgccggcgcggcgacgagatactacaccttcaatgtgaagcttcagaatgtgacacggctgtgcaacacccgggcaataccgacggtgaacggcaagttccccgggccgaaaatagtcaccagggagggagaccgcgtcgtcgtcaaggtggtcaacaatatcaaggacaacattaccatacactggcacggagtgaggcagatgcggacggtgtggtcggacggctcggcgtacgtgacgcagtgcccgatccagacggtgcagagctacgtgtacaacttcaccatcaacgggcagaggggcaccctgttctggcacgcgcacgtctcctggctgcgatccacgctgtacggccccatcatcat

SEQ ID NO: 25120 - DNA, 461 bp, Oryza sativa
  Clone ID: uC-osflm202109e11b1
gctgtatctgtcctctccacagccgacgcgacatgggggggcgttcgtcgaggtcgacgcgggcctcgacctccccaacggatcctccggcaccgccacaaccgacaagaagaagtctcgggagagcgagcgccgccgccgccgccgcaagcagaagaagaacaaggccgcgtccaacgccgcagatgctgatgcggccggggacgccggggccgacgactacgccgtcgaggagaagcctgatgtcaaaccccatgtggaggtggaggtggagtacgtcccggagcaggcggacctggacgacggcctgctcgccgacttcaagagcatcttcgacaagttcaccttcaaggattcctctgccgacgccgaggatgactagaagaaagatgaggctggcactgatgccgcaaagaaggctgcagggtctgattctgacgacgaccagcaggggacacagc

SEQ ID NO: 25121 - DNA, 248 bp, Oryza sativa
  Clone ID: uC-osflm202109f01b1
agtctttttctctatagtctcagctcttcttccggggcacccaggtcctcctcctggtcctcgtcgttgttcgccaccaccgctcggagagatggcgagccagaccgccgacgccacggggttcgtcgcgagcgacccgctgtcgtggggcaaggcggcgctggagatgacggggagccacctggacgaggtgaagcgcatggtggcgcagtcacgggaggccgtggtgaagatcgaggggtccagcc

SEQ ID NO: 25122 - DNA, 559 bp, Oryza sativa
  Clone ID: uC-osflm202109f02b1
cataatttgcttcccttccttccgtatagtgtaacgtacgcatcaccacctcgcgggctggagatggagaaggagtaggagtaggagtgacgcctccggatttcccacgcctcgacgaacccccacaaccccgagatcgatcgggaggaggacgaccacgcccttcacctgcccccaaatcttgccccgatctcccccgaccgcggcaatgggggccgcctccgacgacgccgtcaagcagctcgccctcctcatggaccaagtggaggcgccgctgaggaggacgtttcagaatgtgcaccagggctatcctaaagaaacattattgcgtttccttaaggccagagagtggaacgtatctaaggctcataaaatgcttgtagactctttgaattggaggattcaaaacgaaatcgatactgttctggagagacctatagtcccagtagatttgtacagatcaatccgtgattcacaacttgttggactctcaggatacacaaaggagggtcctccagtttttgcccgtggtggtgggcagagcacatatgacaaagct

SEQ ID NO: 25123 - DNA, 470 bp, Oryza sativa
  Clone ID: uC-osflm202109f05b1
agttatctcacgtagtctccctctcccggtcttcgggacgacgctagctttacacgttcgtgataatggcggcgctgctgctgctggcggcggcgatggtggtggtggtgttcgcgcacgcggcggcggcgcagcggtacaatgctatctacagcttcggcgactccatctccgacaccggcaacctctgcgtcggcggctgcccgtcgtggctcaccaccggccagcccccctacggcaagaccttcttcggccgccccaccggccgctgctccgacggccgcgtcgtcgtcgacttcctcgctgagcactttgggctgccgctgccgccggcgtcgaagggcggcggcgacttcaagaagggggcgaacatggcgatcatcggcgccaccttcatggacgccgcctttttaagtccatcggccctagcgacaagatttggaacaatggccccctcgacacccagatca

SEQ ID NO: 25124 - DNA, 554 bp, Oryza sativa
  Clone ID: uC-osflm202109f06b1
ctttaacctatcagccatggaacaagttcatgttgggaccaatgagaaagactcgaacttacttgcagctatttcatctgaaaccaaccacgatgacaatcccatatcaaccctcccaacaagggaaggatggtccaccccacttaccctttacaacaactgttgacttagatcacacatggtcaccaaattcatgcttgtcaaggagaactttaagccccgccatgacgacgtcatcctcgtgacacaccccaagagcagcactacttggttgaaggcccttgcctttgctatagtcaaccgctcaagctttgaatccattgatgctagccaccaccctctcctcacccaaaacccgcagcaccttgtgccgttcgttggtgcacaggaggtaatctcgactaccttgagacattgccatctccacggctgctcaccacccaccttcctctctccctgctcccttccactgtcaccaccatgggctgccacatcatctacctttgccgggaacccaaggacgcctttatatcaaggtggcacttcgacaacag

SEQ ID NO: 25125 - DNA, 510 bp, Oryza sativa
  unsure (1)..(510): unsure at all n locations
  Clone ID: uC-osflm202109f08b1
tctttttggctcataacaaccttgaggtgttgcgtgaagacctcagaaatttgtcttcgctcgttgtattaaacattagtcacaacaatatttcttccctccccgcagctattggagaccttcctttgctaaaatcgttggatgtatcttctaatcaaataaacgcttttcccgaagagattggttttgcgaccgctttagtcaaggttgactgctcaaataattgccttacagatctcccagttagtcttgccagatgcctggagttgtcagaactcaatgcgtcaaacaacactatatccgtactgccagatgaacttgctggctgttccaagttattcagattgaatctagagggtaacaagctcgtgacgctatcagacaagatgtttatgtcatggacaatgcttacagagatgaatgctgcanagaatctactgacagccatcccggatggtattggtgcactgtcaaagctaattcgtctggacctgcatcagaacaaaataa

SEQ ID NO: 25126 - DNA, 478 bp, Oryza sativa
  unsure (1)..(478): unsure at all n locations
  Clone ID: uC-osflm202109f11b1
tttctgattctctcgccctcctcccataaagcgagcggtggttgacaccggacggatgccccaatctttgcatcgaggggcaacgaagcgaggtcacggatgcgggcgatgccaccgccgtcttcttgtccctagatccatcaagtgaccagttctctgatcagtgagaataatggccgctgctgaagcaagggctgcttggcagcgtgctgcaaaccgttgcatcgttcaggaggatagaaaaagagcaccaaaactagcctgctgtccaccatcatcagaacagcagcatgtcaaaagcaatggaaattgtaggaattctgaagaccgccctgtgcccaatttcatgccattgagctggaatcccatgaactccagtctgccacctgatattagatggtggcttcagttacaaccaaatttaggagggcagaagaatcttgcaggtgagcacctatattntctgggaagagagatc

SEQ ID NO: 25127 - DNA, 347 bp, Oryza sativa
  Clone ID: uC-osflm202109g01b1
atgcgaattatttcctcctactcctcctcgccgaccacgggggggtctcttaaaccggaggcggggggaactcgctgccgacggtggggcctgacagtgtcaatctgagtttgtgctacttctacgacgcggaggtggggaactactactacaggcaggggcaccctatgaaacctcaccgaatacggtttaccaacgcgtctatacaccactacacgtctcctagatcaaatgcaagggctgaaacaacactccacactcgtgatggagacatgccgatttcactcccactactatcatgggctttctcccctccgacacgccggagacccagcaggaccaaattc

SEQ ID NO: 25128 - DNA, 531 bp, Oryza sativa
  Clone ID: uC-osflm202109g04b1
gttctttagagatggcgtcccacgccgccgctgtggggcatcatccgccgccgccgtcgccgcccgagtcgctcccctccaccgcgtgcacgtactcctcgcgccgccgcgcctctccgtggggcggcgctgggcggttgatactgttacgcctgcgggggcactgcccctcgcccgcctaggcgcgcgccgcgagggtggtctccccgcgctgctcctcctacggcgccgtcgccgacgccggggagtcgcccgcggaggcgctccggagggtcctggagtcccccggcgcccaccaggcgcccgcgtgctacgacgcgctcagcgcccgcctcgtggggcgcgcggggttcaaggtctgcttcacgagcggtttctcaatatctgctgcgcgacttggattgcctgatgtgggtctcatctactatggggaaatgatagatcaagggtgtctgatcaccgaagcggcctcaatcccagtgattggtgatgctgataatggttatggaaactgtatgaatgtcaagagaa

SEQ ID NO: 25129 - DNA, 511 bp, Oryza sativa
  Clone ID: uC-osflm202109g05b1
ccttttcaaacccgccgtttccaagcttgctctcctgtcccccccaatccttccctcccgagtggcagggtgctcgacgggatggcgcagaaggaggccaatggcagcagcaacggggagcacaccacccgcccgccgccgacgccctcgccgctccggttctccaagttcttccaggcgaacctgaggatcctcgtcaccggcggagctggcttcatcggctcgcacctcgtcgacaagctcatggagaacgagaagcacgaggtcattgtcgcagacaactttttcactggttcaaaagacaacctgaagaagtggatcggacacccaagatttgagctaatccgtcatgatgtcacccagcccctgcttgtggaggttgaccaaatctatcaccttgcttgccctgcttcaccaatcttctacaagcacaaccctgtcaagaccatcaagacaaacgttatcggaaccctgaacatgcttggacttgccaagagagttggagctaggg

SEQ ID NO: 25130 - DNA, 547 bp, Oryza sativa
  Clone ID: uC-osflm202109g06b1
cttacgcgtccggcgacgggctgcgcggcctcgtggagaggatggcgtcgcggccggggttcctgcacgagcacatgccggcggcgtggccagtgcccgtcggcgagtttcgggtgcccaagttcaaggtgtcatgcggcggcagcgtcgtcggcgccctcgagcagctgggcctccggctgccgttttcgccggagctcgccgacctgtccgacatggtggaggacgacggctccggctggccgttgttcgtcggcgacatccagcacaaggcggtgatcgaggtgaacgaggaaggaaccgtggctgccgccgccaccatgacaaggatgcttccttccggtgtgccgccgccgccggtggacttcgtcgccgaacatccgttcgcctacttcatagtggaggagatgtcaaagtgcggtcgtcttcgccggacacatcgtcgacccgtcgatggaatgaaatatgatgtaaattttcatgtgaaattggtcaaaaacacagtagaaggatacgcttccaaacgatgaacaatgatggataatta

SEQ ID NO: 25131 - DNA, 436 bp, Oryza sativa
  unsure (1)..(436): unsure at all n locations
  Clone ID: uC-osflm202109g09b1
gtgggtgtgtccctgtctcccctccttcctgggctcctttcccctcctctctgcccccctctcacaagagagagagcgccagactctccccaggattcagccatgaagggggccaaatccaagggcgccgccaagcccgacgccaagttggctgtgaagagtaagggcgcggagaagcccgccgccaagggcaggaaggggaaggccggcaaggaccccaacaagcccaagagggctccctccgctttcttcgtttttatggaggagttccgtaaggagttcaaggagaagaaccccaagaataaatctgtcgctgctgtaggaaaagcagccggtgataggtggaaatccctgaccgaagcggacaaggctccctatgtagccaaggcccacangctcagggcgagtacaacaggcccatgctgcctacaacagg

SEQ ID NO: 25132 - DNA, 421 bp, Oryza sativa
  Clone ID: uC-osflm202109g11b1
tgttgctcatcctgcatccttacttgcacatggggctctttgaaaactcacctggggtgtgaaaagcagctcgacgccatggcgcggaaagagcccaatggcaagagcaacggggagcacaccacccgcccaccggcgacgccgtggtcgatacggttctccaagttcttcccggcgaacctgaggatcctggtcaccggcgtagccggcttcatcatctcggacctctactacaagctcatgcacaacgagaagcacgacgccattgtcgcagacaactttatcactggctcaaaagacatcctgaagaaacggatcggacacccaatatttgtgctattccgtcatgatgtaacccatcccctgctcgtggaggttgaccaactctattaccttgcttgcgatgattcaccaatcttct

SEQ ID NO: 25133 - DNA, 429 bp, Oryza sativa
  Clone ID: uC-osflm202109g12b1
tttctcgggggtgatgcggcggaggcccaagagggagatcgtgtgcacgctgggggcggcgtcaaggtcggtggagatgatcgggcggctgctccgcgccgggatgtgcgtcgcgcgcttcaacttctcccacggatcccacgagtaccaccaggagacgctcgacaacctccgcgccccatggagagcaccggcatcctctgcgccgtcatgctcgacaccaaggggccagagatccgaactggatttctgaaagatggaaaacccgtacaggtgaagaagggtcaagaaatcacagtttcaactgattatagcataaagggtgatgacaacatgatatcaatgagctacaagaagctagcggtggatctgaagcaggcagtgtaatattatgtgctgatggcaccatcactcttactgtccttcact

SEQ ID NO: 25134 - DNA, 330 bp, Oryza sativa
  Clone ID: uC-osflm202109h01b1
catttgttcccctgatccgggtcatataggctgggggggacaggatcaccatggggggctttgtgggaaaatacgcagatgagctgatcaagacggccaagtacatcgcgacgccggggaagggcatcctcgccgccgacgagtcgacgggcaccatcggcaagcgcctggccagcatcaacgtggagaacgtggagcccaaccgccaggcgctccgggagctcctcttcacgacgcccggcgcgttccagtacctctccggcgtcatcctcttcgaggagacgctctaccagagcacggccgccggcacgccgttcgtcgacgtgctca

SEQ ID NO: 25135 - DNA, 280 bp, Oryza sativa
  Clone ID: uC-osflm202109h02b1
tcacccaccatcgttttttgtataccttttactcctccaggggggacttattgacttatgggggggttacaacacccaccggcggtaaccacccgccaccgggagcgaacacccctatataaaccgtcacgccacgccacggccaccaactccaaacacaacatggggccctctctcctcaccaccccgtcccatgccctggccctctcccccggcgccgcccccatccgcatcttcatcactaccacaatgtcctatcggcttatcttctccatctggc

SEQ ID NO: 25136 - DNA, 473 bp, Oryza sativa
  Clone ID: uC-osflm202109h04b1
ggtcattataacatgaaatgcagatggagtcctgggggtcccagtcatgagagtatgatgcataacaaccatggctttggtgcagaatctgctataattgaaactgatgacagtgagaaatcaacccacactgtgaaatttgaaattcagctttacaaaacaagggatgaaaaataccttcttgacttgcaaagggtcagtggaccacagcttctctttctggacctgtgctctgcctttctaactcagctgagagtcctttaattatgccggtgactgcattccaactgaacttactggagtataccgtgaattgtgacgtgacatttgagatatggacataatgaccatcaatctacagctgataatattggctgtagtgcgttgacgatagacgctgccagtgatgtatattgacggtacatggacaaaccataggtaacaggcaggaggcaaacctttcttgttttttt

SEQ ID NO: 25137 - DNA, 548 bp, Oryza sativa
  unsure (1)..(548): unsure at all n locations
  Clone ID: uC-osflm202109h05b1
tctggtgatcatcatcatcatcaagtcctattgggcgtcttgagaatggctgaggagaagaagaccccatgcctgaatgagcggatcctgtcgtcgctctcgaagcgatccgtggctgcgcattcctggcatgatcttgagattggacctggagctcctcaggttttcaatgttggtgttgagatcacaaaggggagcaaagtgaagtatgagcttgacaagaagactggaatgatcaaggttgacagggtgctatactcatcggtggtgtacccgcacaactacggtttcataccgcgaacgctgtgcgaagatggggatccaatggatgtgctggtcctgatgcacgaaccagtgattcctggctgctaccttagagccaaggccattggcctcatgcctatgattgatcagggtgagaaagatgataagatcatcgcgggttgcgttgatgatcccgagttccgccacttcaatgatctcaggagctctcntctcaccgacttgctgaaatccgccgcttctttgaagactacaagaagaatgaa

SEQ ID NO: 25138 - DNA, 544 bp, Oryza sativa
  unsure (1)..(544): unsure at all n locations
  Clone ID: uC-osflm202109h06b1
cgtgccgcggccatggcgaccaccaccaccacggggggcttctctctcaccgcccgggtcctccgcccgagctcgaacgcgaaccccgccccgagatctctgccgctcctcaggagccggaggtgcgctcgggccgtggcgaccgccgccgccgccgctggccacggggccgctcatcagaggagcgggatttggtcgatcagggatgatttggtggtgccgaggtcgccctacttccctgtggagtatgcgtcggggcaggaacgcgggccatcgcccatggtgatggagcggttccagagcgtcgtcagccagctcttccagcacaggattatccggtgtggtggacccgtggaggatgatatggcgaacatcatcgttgcccagctgctatatctcgatgccatcgatcctaacaaggatatcattatgtatgtgaattctcctggaggatcagtgacagctgggatggccatattcgacacgatgaagcatatcagacctgatgtttccacagtttgtattggactngctgaagtatggg

SEQ ID NO: 25139 - DNA, 437 bp, Oryza sativa
  Clone ID: uC-osflm202109h07b1
tgctccgcaaggtgtggggctccgtgctggggggggctgtattaaaggcggcgccgtctaaaaccttcaccgtcgacgcctacccgcgccgcccgaatgccgacgtggagtacggctcgctgggcgcgctcgacgttctcccgatcgacgtgctcgcgcagatcctgcgcctgctatgccccgccgacgacgcgcggtacaccggacgatgccgcgcctggcgcctgctcatctccgacaatggactgtgggccttcttactacagctgggccccgatccgggggagctcgtggtcttcgacgagacccacctaggtgctggaccggactagcaccccgggctgtactacgatagatggccacagctttaatacaagcatgtgtacacccgtcgagcggagggtcctggatcgattatagatatggtggatcgggat

SEQ ID NO: 25140 - DNA, 333 bp, Oryza sativa
  unsure (1)..(333): unsure at all n locations
  Clone ID: uC-osflm202109h11b1
tgataaataaatgtatcctagaaaattttaggggggacttgttctcaatgtgggtccatccttctttctctctctcaattgcttctgttttaaggtgcgggagaatcagggaagtctacgatatttaaacaggtgatgaatgttatattccatggagaatcataatccgtacgccgctagttagtctgatgtattcttactgttcacctgcagattaagctccttttccaaactggctttgatgaggcagaacttaggagctacacatcagttatccatgcaaacgtctatcagacaattaanatactatatgaaggagcaaaagactctcac

SEQ ID NO: 25141 - DNA, 473 bp, Oryza sativa
  Clone ID: uC-osflm202110a01b1
tcttcttctggccttccaatttatgttacaaagaggggggctggatccactttggtggggacttagatccagctcaacttagttcttggaaagaaaggttggattattactctgaacaaagcgaaaggtaaaaccgtctattttgtaatgcagcactttatgtatattttggcgtactttcacttatttcgtttgatcagatgtggcaatgggcgggagcggaacgattatctccatttaccctgatgatcttacttttctatgccagtccacaggactccttgagaatatctaatgatgttaacatttaccgatggatagcacttaacccatttttgttggttctttactccattaaattatgaggtgtagaatagctggataaagctcagctaatgcaatctcaaagaggagaacaacagctaggatcatgcgtcattcaacgaccatggtctccctttcatgaccatatt

SEQ ID NO: 25142 - DNA, 438 bp, Oryza sativa
  Clone ID: uC-osflm202110a04b1
cgcatcatcctcttgcctcgatctttactgctctgtaggatgctcgagctgtgtggggggggtgatgcggagagcttttctttttcttcttctattgatcggagtggccatggcggagatggctgctgccgcggccgcgctagtggcggccaagaggtgcatgaacgcctcgtgcggggccccggccccctccccggcaggaggggagtggaggaagggctggccgctgcgatccggtggcttcgccgtgctctgcgacaagtgcgggttggcatatgagcatcttgtgttttgtgatatatctcaccaaaaagaatctggctggagggactgctcattttgtgggaagcgtatccattgtggatgtattgcttctaagaactcctttgatctacttgatagcggtggagttcaatgtgtcacttgcattaaaaattc

SEQ ID NO: 25143 - DNA, 300 bp, Oryza sativa
  Clone ID: uC-osflm202110a06b1
aaacagatcaccgatcgatcacgcgtccaccgggggggcacccgctcggtcacccgagggtggtcgacaccacctgccgcctcgccgccgcgccgctcgtcctcgcaccgctgcctcgccgccccaccacggtcgcctttgccgtcgccgccaccggcatcaagtactgtctcagggcgtccaggggcgtggcgatcagggcggccgacggcaccagcaccgagacggaactaccacaggtcgtcaaggcatcccacgacgcgtgggccaaagctgaggacaagtacgccgtaaccgcca

SEQ ID NO: 25144 - DNA, 498 bp, Oryza sativa
  Clone ID: uC-osflm202110a07b1
tctctccggaccagggaagcagctaactgggggggcactaaaggtggttcaagcgcgatgagacggaaccatctttgcctggtcacttgcttgtggattctgttatgcgcagttctgcttcatgcttctcctgatggattgctgagaattagcctgaataagaagagattggacaagaagaccttggacggtgcaaaattggcaagggaggaaagccatcgtctgagagccgacggtttaggtgatgacatagttcctttggacaactacctggacacgcagtactttggagagatcggaatcgggactccaccacagaacttcactgtgatattctacactggaagctccaacttgtgggttccatcagtgaaatgttatttttcgatagcatgctacttacaccacaggtacaagtcacaagggtcgagcagttacaaaaagaatggagaatattgcagcatttcctatgggtctggatcaattgctgatttcttc

SEQ ID NO: 25145 - DNA, 491 bp, Oryza sativa
  Clone ID: uC-osflm202110a08b1
tatcatttcatttcttcttcttcttcgccgggggggcctccttacaccccttggggcgccactccaatccaaggaggatgagtgaagaggacaccaatgctgctgctgggcagcccaggcgcgcccctaagctcaacgagaggatcctgtcctccttgtcgaggagatcagtagctgcacatccgtggcatgatcttgagatcggccctggtgctcctgctgtcttcaacgttgttgttgagatcaccaagggaagcaaagtgaaatatgagcttgacaagaaaactggactgattaaggtcgaccgtgtcctatactcatcagttgtgtatccccataattatggtttcattccaaggacactttgtgaagacaatgatccaatggatgttctggtcctgatgcaggagcctgctattcctggttccttactccgtgctagagcaattggccttatgcccatgattaccagggtgagaaggatgacatga

SEQ ID NO: 25146 - DNA, 465 bp, Oryza sativa
  Clone ID: uC-osflm202110a10b1
tcactaaaaccctctgcctccttcgctcgcgggagcctcttctaggcgatccgtggcgggctgccacgaagttcttcgtcggcggcaactggaaatgcaatgggacaggggaggacgtgaagaagatcgtcaccgtcctcaacgaggccgaggtgccctccgaggacgtcatcgaggtggtggtgagcccgccgttcgtgttcctgccgcaggtgaagggtttgctccggccggacttctccgtcgccgcgcagaattgctcggtgcgcaagggcggcgccttcactggcgagatcagtgccgagatgttggtgaacctgcaggtgccttgggtgattctgggacactctgagcggagagcgctgatgggcgaatcaagtgattttgttgctgacaaaattgcgtacacactttccaaggtatcaaggaattgcttgattggtgagacccttgacagagaaagca

SEQ ID NO: 25147 - DNA, 497 bp, Oryza sativa
  Clone ID: uC-osflm202110b02b1
cttaattaaagagagctgtgtgtcttcttccgtaagggtcatttcaacacaatgttgaggtacaatggaagcctatatctcttagccactgatcagggttttttcagccaaagtgatttagtatggcaaaagttggatgaggtgaatggagatggagtttttctgaccagcaatttcacaccatttaaggctgaaaacccgagaaatgattcttggaatgaacagcaggctatgacaagtaccgctgactatcttgctcaatttgacaatactaccctgcagcactcgtctggaaactctgatctagagctagctatagcacttcaacaacaggagtttgagcggcaacaacctcaacgacaccagtcgtcaacacagcagcaggagccggtgccccagcagcaacagcagacacccaatcaatcacatggcacaggtcggccaggattagttgttggtccaacaacggcaaggaggccacctgctccacagccgac

SEQ ID NO: 25148 - DNA, 206 bp, Oryza sativa
  unsure (1)..(206): unsure at all n locations
  Clone ID: uC-osflm202110b03b1
ctcctctccctcaatctactccccggngggcttttttaaaaacctcgggggatccccaaacatccccaacctttctctccccacttccttctactcccacttcttcttcccatttttataaagaacctactaccatcatcatctctacactttctttacattaataacatcttcacctatcaccaaaactttaatgtatctcttcc

SEQ ID NO: 25149 - DNA, 353 bp, Oryza sativa
  Clone ID: uC-osflm202110b07b1
tctttttaatgcacagggaagcaacttactggggggggattatttgaacaccgagggcgaacaaacggaaccatctttgtctggccactggctcggggattctgcaacccacgtgatctgatacatgctaaatcctgcatgatgggagtcaataagcctgtatactaagaaaccgtacaacaccacttaaggctgcacacccgtgaaatgatactggggatgaacagctaggatctcgacaggtcacgttgtcgacacatcgttcattaggacaaatactatggacacacaagctcttttgagagctctgatctagagctccatcacagaccttaactgcaagagtcgacact

SEQ ID NO: 25150 - DNA, 494 bp, Oryza sativa
  Clone ID: uC-osflm202110b09b1
gttttctccatcaatgacgcggttggcgaggagggtgtatctgagttgggcgggggcatggacaggcagggattagatatgaaaattgcagcattggttaatgacactgtcggcacattggctggtgggaggtatgcggataacagtgttgttgctgctataatattgggcactggtacaaatgcagcatatgttgagaatgctaatgcaattcctaaatggaccggtttactgcctaggtccggaaatatggtaatcaacacagaatgggggagctttaaatcagataagcttcctctttcagaattcgataaagcaatggattttgaaagcttgaatcctggagagcagatatatgaaaagttgatttctggcatgtatcttggagagatagtgcgaagaatcttgctgaagcttgctcatgatgcagctttgtttggggatgttgttccatctaagctagagcaaccgtttgtactaaggacaccggatat

SEQ ID NO: 25151 - DNA, 508 bp, Oryza sativa
  Clone ID: uC-osflm202110b10b1
tcatgccacagcatgcatcttggggttcttgccagagcatggcatgctgttaacgcagggaccatgttcactgtctactacaagcctaggacaagtccagccgagtttgtggtcccttacgatcgctatatggaatcactgaaacaaaattactccattgggatgagatttaagatgaggtttgaaggtgaagaggctccagagcaaagattcactgggactattgtcggaatgggggattctgatccagctggctggcctgaatcaaaatggcgctcccttaaggtgagatgggatgaagcttcttccatacctcgccctgaaagagtttctccctggcaaatagaacctgctgtaagccctcctcctgtcaacccactaccagttccaagaaccaagaggcttcgtccgaatgctaccgctttgccggctgactcttctgctatagcaaaagaagctgctacgaaagttgtggtcgagtctgaaccaaatgggtacgcaaggacct

SEQ ID NO: 25152 - DNA, 485 bp, Oryza sativa
  unsure (1)..(485): unsure at all n locations
  Clone ID: uC-osflm202110b11b1
tcttgatttgttgaatgcttgcttccagcagggtggcatgctctctatttccatgggggatgtgtagggattgggagcagattcattcgcaggtcagcaagctagctgaaaattaggtgagaggcgacagttggtagcgagaaggtcagcctgatggtgcagaactctggcttgaggaagacatgcttcagtgtttctccatgcaccgacaacactatcatcctgccaccacaacacacaaatctggcgatgcttccacctgcatctgcatgcccctggctccctgcatacaagaaaaaagagtattcttttcctgtctcggtaatgcacttggctaagaaagnttggtgggcagtaagctgctcatgcttcttgatcaccaagttgctcatgctccttgatcagaacataaatggttaattaaagatgcacatgagaaaggctcgattatgcctggtgttatggtgctgaattgctgatcaaaa

SEQ ID NO: 25153 - DNA, 498 bp, Oryza sativa
  unsure (1)..(498): unsure at all n locations
  Clone ID: uC-osflm202110b12b1
cacaaggtgaagctactcctatgcgagaggagcggagagagataagatgagggaggttctcccaccaatgatgaagatgctcctcgccgccctcctcgtcgtcgccgccgcctccttcagggctgccgaggcggcgctcccgtcgatggcggagggcgtcaactacggcgccaacgccgacaacctccctccggccaaggacgtggcggccttcctcgccgctcacaccaccatcgaccgcgtgaagctgttcgacgccaacccggccttcatctccgccttcgccaacacacccatctccctcgccgtctacctccccaactccgacctcccttccctcgccgacaagcagaccggcctcgacaccgcccgcgcctgggtccgagccaacctctcccactacgtgcccgccaccaacgtcaccctacttctcgacggcaacgagatcctcctatgccctgaccccaacctngtgctctccctactccccgccatgcg

SEQ ID NO: 25154 - DNA, 405 bp, Oryza sativa
  Clone ID: uC-osflm202110c02b1
gtttacttcgggcgacaccttcggggccacacggaaacttcgggtcataggccatattcccacatgaagatggctatcccgggttacagcatcacatgggcagagatcgacgagttctggaggagaaaggagatggaagacgaggagcacagcctcaccgacgacaatgaagctgcaggaatcaaagccaccacactaatggtcagcacttattattattgatcaaatcgtaatctgttgcattaccaatcactatctggcactctgatctcattgaccagctgagggttaagctggttatcagtaaaaacaaagtacatgatggggttcagcataaggaatcaatggacctatgtaacgcagttaatatcttggatgcaaatacaggccacattatcctaccat

SEQ ID NO: 25155 - DNA, 309 bp, Oryza sativa
  Clone ID: uC-osflm202110c03b1
gtttatttacacaaaccttacacaactccagggggggttttattaaaaacatggggttcttcaacaacatcactatccggggaaaccaatcttccatcaacaccctcaacgacctagcaagtatcaacaagcccaagagcccctataataccaacacagttaattatccatctaatcgattgctctacaccacccttatagtaaacctaccgctaatatacgtgaaaccacttaactacctaacaaaggaattgcttgaacaactcctataggaccaccatgacagttatcttcaacccagagacatcc

SEQ ID NO: 25156 - DNA, 411 bp, Oryza sativa
  Clone ID: uC-osflm202110c04b1
gttccttataaccctaggccccccttctcctccgggggcgttttcaaaatccgacgggggctgcacaacctcggaatcggaggcggcgggcggccccatggacaacgccctcgcgagcgccgcggttatcgccgaccagactcctaagacttgagcacatggcatctacatgactctcctacgtcctgtcgacccacctgtcggacatatcactggcgaagcgcttcctcgaccacatggttcccgacacggtgccgctcgtggtgtcgcggcagctgctgcacacggacctcctagagcttgggaggttggagccagaagctcaaaaggaggacgcgcactacccgctcacgcacatccagcctaaagtggtctccttcgaggagcaggaggttgtgattcaagagaagc

SEQ ID NO: 25157 - DNA, 111 bp, Oryza sativa
  unsure (1)..(111): unsure at all n locations
  Clone ID: uC-osflm202110c06b1
tttaatcctctttcacaccttacaattcaatcacngggtctcttcaaaccccatgggggtatcataaccgttcataaaccgcgctcccccttgaacataataccttctatc

SEQ ID NO: 25158 - DNA, 213 bp, Oryza sativa
  Clone ID: uC-osflm202110c08b1
tatttatctaactgcagcgatggcctccaggggggcttttaataacatgcgcggtcctcaccaatggaaaggcactcctcgttaaccgcctccaacgcgcatggcaccaagcaaccattgcaccaaaaagcaaccctaaatgacaagcaaccagagctcaacaaactaccatgaagctgcaacagccaacatcaaaccactgacacaccaact

SEQ ID NO: 25159 - DNA, 500 bp, Oryza sativa
  Clone ID: uC-osflm202110c10b1
ctctgtttcactgtacaaggttctacacacaggggagtcgatactaaaccagcgtaggcacaacccatgtgcaggagatcgcggcggacaccaacctgcgctcagtctcgaaactctgatgatagtgaatcaagtgactgctgggtcttgagacatggatctaatgactctaagaggctcggcctccgaatttttgacttcatgattggtggagccactagatcggaactgctgacggtgcacatgcttactatgaaactgaagcgcgaaattgtcctgggatcttctagcatagatgaccttccacaatttatttcgaagctgcagatgctaactgcagtgtggtgccaatgacgtctaaactgcgcacttagttatgcagattaaccgatgaaacaaacttgtgaccttttgaacccattgctacgaacagttagaaacgttggatgtcatcaatgactggactactcacaatgattacacgatttttcatagtctag

SEQ ID NO: 25160 - DNA, 438 bp, Oryza sativa
  unsure (1)..(438): unsure at all n locations
  Clone ID: uC-osflm202110c12b1
tatttgttagagaatctgctagattttcatctgggaggacctccacaggtgctggaggcttcaatgagtccttcaaacgtggttcggaggggaagaagacaccttctggaactggtgtagacatcgaagctgaagtgaaggatgccgagtgattcttctgcaggaatgtgctaagaatctctgcctcgttgacatcagttttgcagctcttcatgggcaatttttcagagggctattaaatctggtagcagtgtcatgggtgtaccaaccgttcgctagatttgttgatatgctaggtccaggatatcaagacgaactgacacttgattccataagtgacgacatgtagcgccttcttctcgttgcaacttgtaaattgcaattacctctgcttgttaaaagtaacaacagaaaangtggatgtgaatatttacttct

SEQ ID NO: 25161 - DNA, 486 bp, Oryza sativa
  Clone ID: uC-osflm202110d01b1
cctgatcacaggagaagccgcagccactgagaggaacacaaacagtgaagatgtggcagcctgctgagctttcccgtgaggagaatgtgtacatggctaagcttgcagagcaggccgagaggtatgaggagatggttgagttcatggagaaggttgctaagacagttgactctgaggagctcactgttgaggagcgcaaccttctatcagttgcttacaagaatgttattggtgctcgccgtgcgtcatggcgcatcatatcatccattgaacagaaggaagagagccgtggtaatgaggatcgttgcacgctcatcaaggaatacaggggaaagattgaaactgagctctccaagatctgtgatggcatcctcaagcttcttgactcccaccttgtgccttattcactgtccagagtccaggtcttctacctcaagatgaaaggcgactactacaggtacctcgcagagtttaagactggagctg

SEQ ID NO: 25162 - DNA, 398 bp, Oryza sativa
  Clone ID: uC-osflm202110d02b1
gtttatttctctcaaatctgacagctcactgcatcaatggccgtggccaccatggcgctctccttcccggtgatggcccgggcggtgccttcaaccttctccgcgctcttcggcgaggcacgtatcaccatgcgcaagaccgccgcgaatcccaagccggtagcgtcgactgggagcccgtggtacggggccgaccgcgtactctacctcggcccgatatccggcgagccgccgaactacctcaccgaggagctcccggacgactacgggagggacaccgtggggctctgcgtcgacccggagacgttcgccaagaaccgggagctggaggtgatccactcccggtgggcgatgctgggcgcgcttggctgcgtattcccggagctcctcgcccggaa

SEQ ID NO: 25163 - DNA, 481 bp, Oryza sativa
  Clone ID: uC-osflm202110d03b1
cttactttcccatccacgcttctcgactcccagacgacgcttgttgctgcctttcgtcaaccccccacttctccttccccggcgacgctcgccgccatggatgaggagtacgacgtgatcgtgctggggacgggcctcaaggagtgcatcctcagcggcctcctctccgtcgacggcctcaaggtcttgcacatggataggaatgactactatggaggagattccacctcgctcaaccttaaccagctgtggaagaggtttagaggggaagacaaacccccggctcatctgggctcaagcaaagattacaatgtagatatggtcccaaagtttatgatggcaaatgggacactggctaggaccctcattcacactgatgtgacaaagtatttgccattcaaagctgacgatggaagctatgtcttcagcaaagggaagattcacaaggtacctgctactgacatggaggctctgaagtccc

SEQ ID NO: 25164 - DNA, 305 bp, Oryza sativa
  Clone ID: uC-osflm202110d04b1
ctatattaatgctgctcccctgggggacctctcctcaattccctgctcgacccacccctccgttttatctccctcccccctcctaccctccccgggggggtttttttaacaaccctggtggtttacaaaacctcctttcccctaccaccatcttctttctaaacccttaccttcctcttcctgatgcactacacctctcctcacctaatttccttcttttacctctactacatccatatgatcttcatccagaactatccctttattctccctaatgccctcccctataccatccacttttacct

SEQ ID NO: 25165 - DNA, 352 bp, Oryza sativa
  Clone ID: uC-osflm202110d07b1
tcttttactcgcatctggcgctctttgtggggggctatttaagaagccttgggggcaaaaataccgtataaagatcaagagaggaagctctttctcatccaagatattcaggttgttgcgattcacaattggcaataccatccagcaatccaaacacatggtatggtctgagaagcgatgattggtatcacacaggaacttctaactgagctctacaggatccgaagccccgttctacctctaccacgctcaactggacatctacggtcagagcactctggggatactgattattcaccgagactttccccactaccatgacagctgaccattaatgacatatacctgtggc

SEQ ID NO: 25166 - DNA, 275 bp, Oryza sativa
  Clone ID: uC-osflm202110d10b1
tcttatactcaactcaaaccaaccaaattggaggggtttatttaacatactcggggacacaaccaacacctgcccaaacatctgctcaccaatctcaaaaactacataacgcaacgcgtacatctgttactaacatcgcacccgaaatagaaccaccaaactcactactcctaccacaatatttcaagactctaacaattctatcaacacttgaaatgaaacatttcatccatctgcccgatttcacgatgctattgttgactcttcaaaaacta

SEQ ID NO: 25167 - DNA, 502 bp, Oryza sativa
  Clone ID: uC-osflm202110d11b1
tattctcttgtgctctgaccaggcggaggccaggggtatgggggccgtgctctggagcagaaccttcgcctctccactctcctcctcaggaaagcagcatccaccacaaaacaacaagtgcacctgttcctcacctcccacccgagataaattcagtcgactcactactaggaccaccattttccaagtctctaactattccaggagcacttcaatggaaagatttcaactttctgcccgattccaccagcctgtggttgactcttctacaaactacctcaccaggtggttttacaatgcaaacctcaagaggcggcggattgaatgctttctcacttcggatccaataaacactggttggctaaaaccaagaagatgggacaacttcactagtttggacactgcttgtgtccagccagactacaaaattccggtcagaacacgcgccgactgtaaagccgagcagtatgagataacgggatcaccgttgagcccttctgat

SEQ ID NO: 25168 - DNA, 409 bp, Oryza sativa
  Clone ID: uC-osflm202110d12b1
tcatgacctccgcctccccaatccgtcccggtggtcgcccggcaacctcgagtggggtctccacgcctggcgctggcgccgatctccatcctgctagcagagggggggccggcgtcctcctgctcccggcgcattcatcctaatccatcccatccgggctcgggctcgaatttcggctcctcgcccgccggttgcgccgatccccatcctgcgagcagagggggcgcccggggtcctccttcttccaccgcatcggcgctcgccgctaggatattgaagggtgaagctttgtgggtatccagcaaggatttcaatggcgctgctacaggttggaggtaccttggctcccaaacttggggaaaaacctcagctggtgcccaagtcacctgcacttacaagaggtatttat

SEQ ID NO: 25169 - DNA, 505 bp, Oryza sativa
  Clone ID: uC-osflm202110e01b1
cattctccgaaaacaccgtgcagcagcgaaacgggagaaacccgcgagcgcagaggggaaaaccgaagtctcctcgatggactcctccgcggcgtcggcggcggctgcggcggcggcgccggtggtgctggtgacgaacgacgacggcatcgacgcgccgggactccgcttcctcgtcggccagctcgtcgccgcccgccgctaccgcgtcctcgtctgcgcgcccgacacagacaggtcaggtgttagccactccatcacatggcgccctgcactccgctgtaaacgagttgatatagatggtgctacagcatttgcagcctcagggactcctgctgactgtgcttctttaggcatatctgggaagctctttgatggtttggttcctgatctggtagtcagtggaatcaatgttggcaacaattgtggatgccatgttatctattctggaacagttggcggtgctagggaggcattcttgtacgggattccttcattagccatg

SEQ ID NO: 25170 - DNA, 397 bp, Oryza sativa
  Clone ID: uC-osflm202110e02b1
gtttatgtaacacacactagctacttagccataatgcttatggccacacagcctctagggccagtgctatcccctagccatggcggcccttcttccttctccagctcggtctcgctaggaggccagtgggcgcctcgccgccccgctgtctcctccaaagtaagctgcacccgcatcggcttgtccgaggtcgataatagaaaagtagtaggccatatagacgtcgatgaagaagaacagaccatgcaggtacagggcataaccacggtgacggccactgtggcggtgcgcttgaaagaggggatatccactccccagaaggtggccaacatggttaaccgaaactggcttttccttgatttctttagcttgagtacagagaggcacacggagcccc

SEQ ID NO: 25171 - DNA, 70 bp, Oryza sativa
  Clone ID: uC-osflm202110e07b1
gtcatatgcaaaacggcctacttaacctgggggctttttaacacacagcgggtgcaacaattgctataca

SEQ ID NO: 25172 - DNA, 435 bp, Oryza sativa
  Clone ID: uC-osflm202110e08b1
ttcatctctcgccgttcgcagagaaaaactcagcgcctgtcatcgctcaccctctgcgaacagatcgaatccagacccagacgcggatctaggattcgagagcggggatgtgagtcaacacacgccctgctccggatcgacccgctgctctttagccatggcaggaatggcgcctacaggctcccagcttgatgctcagcactatgacaggacgatgcaggagctactgcaccaaggtgacaatgcggaatgcttcactacatatgatgaagtgctagagagcggcgatgacatgagccttagagagaccctcctaagaagcgtctatacttatggttccgagaacgcatcatctatcgatcataaggggattgttcactacagcacagggctcgatgagatgcagtatgctcagtctggaacaggaaaaactgc

SEQ ID NO: 25173 - DNA, 240 bp, Oryza sativa
  Clone ID: uC-osflm202110e09b1
tttgataaacacaaagcaacacaacccaacggggggatctttaataccacatgggggccacaaacgcaaaaaacgcacgaggaaagcgaatacaaatcaccaaaaaccaccatacgccagcgatacatgaagaacgagaagtgcaaccgacacggcaccaccaagctcaactaccctacacaggcactgaataacaccccaacgctagagacaccacgaataggactcctgatcccactg

SEQ ID NO: 25174 - DNA, 233 bp, Oryza sativa
  Clone ID: uC-osflm202110e10b1
tctcaaacacaaaccaacacaacccaacccgagggggttcattaacacccttgggggacaacccaaaacacgcctcaaaatacccaacaaatcacccaaaaccaccatacgccagctctacatggagaacgacaactgcaacctacactgcaccaccaagctcaactaccccacaccagcagtccaccactctacgatacatatcaccccacgacaagcacacctgatcccac

SEQ ID NO: 25175 - DNA, 502 bp, Oryza sativa
  Clone ID: uC-osflm202110e11b1
ggagcgcgcaccccggcgacatcagagctcgtggacaccggggactctgcgcgggggctagggagttcgcccgccggagcaagggctgggcgggacaaagagaagaaatctgcagcgaacccatggcgattctgcccctctcgatttcccactctcttacctccgccttgtacgacacctcctccggcatctgcaggccagttgcccgctctcctgcacccgcgggtcccctcccgtcccaccgacatctgcctcgccgggccgtccaaggtacccgtccccatcgcctcaccggcttcactaggggacgacccttccaaatgggacccggccgagtgcgacgcccttctccgctgcggcgagcaggtcgcctccgtgctccaggagatgctcaagctgatggaagacatggagatggatggctcgtttgaatcattggctgtggagttgatcgctcaggagtcattgagatagagttgatgagatgaatctgctgtctaat

SEQ ID NO: 25176 - DNA, 421 bp, Oryza sativa
  Clone ID: uC-osflm202110e12b1
gagaagcttccgcccgacgccgagtcgcgcctgtgcttctcgcaggaccggtgggtcttccacgtcctccgctcccctccccccgccgccgccgatgggctcaccttcctctgcatgggcaacgacaccttcggaagacgaattccctttctttacctcgaggacatccaaatgagggtcatcaagaactatggcagaatcgcccataatgcgctcgcctatgccatgaacgatgagttctctagggtcctccatcagcaaatggagtacttctccagcaaccccagcgccgacacactcaaccgtctccgtggggaagtcagtgagatacatactggcatggttgacaacattgagaagattctcgacagaggtgagcgcatctcgctactcgtcgacaagacctccaccatgcaagaca

SEQ ID NO: 25177 - DNA, 437 bp, Oryza sativa
  Clone ID: uC-osflm202110f01b1
acccacgcagtccgcctgctttagccacacgagcctagttcaggtagggcaatggcgtccaccgcctgtgtcatgctcgccgtcttgctggcggtggccgtcgcggcggcgccggcgagggcggtgcgatgcccgccgagcgacaagcaggcgctgatgagagtgaagcagtcgctgggaaacccggcgacgctgtcgacgtggtccctggcgtctgcggactgctgcgagtgggaccacgtccggtgcgacgaggccgggcgcgtgaacaacgtcttcatcgagggcgccaacgacgtccgcggccagatcccgtccgccgtggcggggctgacggcgctcatgtcgctgtcgctgttccgcctcccgggcctctccggccccataccggagtgcctcaccgggctctgcaacctccagttcctcaccatttccac

SEQ ID NO: 25178 - DNA, 497 bp, Oryza sativa
  Clone ID: uC-osflm202110f02b1
gtcaagccggggagggcacgcacgcacagatccctcccctctcctcgctgcccatctctctctctctcttcccctcgacgcggcgagatcaggaggaggaggaggagaggggggaagggaggaagggaggctgagatcccgaggccccccaccggagacggcgaatcctggcccggcgcctggtttgcccccggattcgggaggagtttccgatcggggtcgagggatctcaggggcgcgcgcagccatgaacgagaaggcctccgactacaaggagctcaacgccaagcacaagaagatattggaaggcctcctgcggctgcctgagaatagagaatgcgcagactgcaagtcaaagggtcctcgatgggcaagtgtaaatcttgcgatctttatacgcatgcagcgttctggaattcatagaagcctcggggcacatatagttaagggaagatcggctaccctggatacatggctgccagagccagtagcattta

SEQ ID NO: 25179 - DNA, 508 bp, Oryza sativa
  Clone ID: uC-osflm202110f03b1
cttggttgctatatcgccgtcattaattggagctaggtagggaggcagcaggcagagcgcatgggggcggccgggcggcgagggaaccatgagcaaaggtgctatcatcggcgcttccaccgtgctggtggtggcggtggtggcagccgtgtgcgtggtgtcgttcaagaacggcggcggcggcaaggaggatggcgagctgtccacgtcggtgaagtcggtgaaggccttctgccagccgacggactaccagtagacgtgcgaggaggagctggggaaggccgccggcaatggcgccagctcgccgacggacctggccaaggccatgttcgccgtgacgtcggagaagatctccaaggccatcagcgagtcgtcgacgctggaggagctcaagaacgacaagcgcacgtcgggcgccctgcagaactagaaggagctgctggagtatgccgaggacgacctcaagacgtcgttcgagaagcattgggggttcgagatgaccaacttc

SEQ ID NO: 25180 - DNA, 52 bp, Oryza sativa
  Clone ID: uC-osflm202110f06b1
ctcacctacctccctcaaatccataggggggtttttttaacatccggggggt

SEQ ID NO: 25181 - DNA, 493 bp, Oryza sativa
  Clone ID: uC-osflm202110f10b1
ttctaacacaacgcaacacaacccaaccggatggtctcctccaccacccgcccgccacacgcccaaaaaacgccccgaaatcccctccaaatcgcccaaaaccaccgtacgccgtcgctacatggagaacggcaagtgcaacgggtcgtcgaccaccaagtgcaacggtgcggcggcggcggcgatgcacgtggcgatgctggtgacgccggggatggggcacctgatcccgctggccgagctggcgaagcggctggcggcgaggcacggcgtgacgtcgacgctgctcacgttcgcctccacggcgtcggcgacgcagcgggagttcctggcgtcgctgccgccggcgatcgagtcggtgtcgctgccccccgtcgacctctccgacctccccgtcgacgccgccatcgagacgctcatgtcggaggagtgcgtccggctggtcccggcgctcacggcgatcctgtccgggatcagggagaggcggcggctg

SEQ ID NO: 25182 - DNA, 503 bp, Oryza sativa
  unsure (1)..(503): unsure at all n locations
  Clone ID: uC-osflm202110f11b1
ccttctccgaatcccctcttcagatccgcccaggggtctttctccgatcctcggggcgttcccagttcctctcctgattcatcagcctcgccgatctgccccgctgcttcttctgatcgatcgatcaagatgccgatgcacatcgacatcgtgcaccgcctctgtggtggccagcttgttgatctcaacagggtgaatgcaggccctgaccataaccgcggggtgccagccaatggtgcccagcagtttaactggtcagggttcagtctcatgcttggtgcagcccagataatggttttggcttggcaagtgatacatgtgccgtggcctctgctgcctcaggctatatggttttcaaatcgcttttcctgtatattatcattggcacggtgacaacaacaaccaaggtgcagcagcaccagcaagtgcaggagcangacgtgatggtgaataatgctgtggaggagaacaccattccggatgggggcagtctagcctggagc

SEQ ID NO: 25183 - DNA, 428 bp, Oryza sativa
  Clone ID: uC-osflm202110f12b1
gttgctgcaacctccccgccgccgccgccggcggcattcctccccccgcccgggggaaccaccaccgccgcgccatgcccatctcctccttgttcttcttcttcctcctcctgcagcaggaggacccctactagattcttcttctccctcttttgtcttctttcttggtacggcggcggaggaggagccgatgggcagcctttgctccaaggacagcgtcgccgaggagctcacgccgcagccgccgcctgctgcggcagcggcggcggcgcccgtggggaggctgcagaagacggagagccagtcgttgaagcagctcatcacgctcaccgccaaggaggacgccgcggtggtcgcccccgtcgtgcacgccgtcatcacccgggcggagtccaacgccaaggccaagtccaacgccaaggccaagt

SEQ ID NO: 25184 - DNA, 516 bp, Oryza sativa
  unsure (1)..(516): unsure at all n locations
  Clone ID: uC-osflm202110g01b1
ggatcttctggctgggatgttcttgttcctggaggggcccatggaactctgatgcgggtggaaagaattcttcctggatcattaccttcatctgtcaaagaacctgtggttctaattgtagataaggctgatggagatgaagaggtcaaagctgctggggataatatagttggtgttattcttcttcaggaactacctcacctttcacatcttggtgttagagctcgtcaagagaatgttgtatttgtaacttgtgaatatgatgacacagttacagatgtgtatttgcttgagggaaaatatatcagattagaagcatcatccatcaatgtcaatctctcaatagtttcagaaaaaaatgacaatgctgtctctacagaaccaaatagtacagggaatccatttcaacagaaactccaaaatgaattctctctaccatcggatatcgagatgccactgcaaatgtctaagcaaaaaagcaaatcangagtgaatggtagttttgctgctcttgag

SEQ ID NO: 25185 - DNA, 481 bp, Oryza sativa
  Clone ID: uC-osflm202110g03b1
aatgccatctcgccctgcgttgcgagatccccgtgaaccgtcgcggccgggcggtggtaatcgtggcaaggacggatgcagcacaaatggaaggtcgtggagggcggcgccggtgccggtgccggcggcggcgggggagatcagcgccggcggtgcgtgacggcgtcgttgtccatgctgatcgcggccaccctggcgtttcttgcctacgtcgccttcttcccgtatgacggcgcgtgcggtctgtaccggtggtggagatgcgagggttgcggcgacgcagaggtcgggttcgccttcgacgaggcggccatggcgcaaggaccttacgctggtggcgcccgccgccgctcgccgacgacgctgtcgcacatcgtgttcggcgtcagcgcctcggcgcggacgtgggacatgcggcgcgggtacgcggagctgtggtggcgccccggggagatgcgcggtcacgtctggctcgacgagc

SEQ ID NO: 25186 - DNA, 501 bp, Oryza sativa
  Clone ID: uC-osflm202110g04b1
ctttattcctccgtcgccgccgtcgcctaatccggggtgcccagcctaggcgagatgtgggggcgcgcgatgaaggagaagcgcgggctggaagccgcggcggccggtggcgactgccaccccgaggccaagcgcgcgcggcctcccgcactggccagtgttattgttgaagcattaaaggtggatagtctgcagaggctttgctcatcactggaaccaattcttcgtagagtggttagtgaagaagtggagcgtgcgttgggcagactgggtcctgcaacaataactggaaggtcttccccgaagcgaattgaaggtcctgatggaagaaatctgcaacttcagttcaggacacgactgtctcttcctctttttactggaggaaaagttgaacgggagcaaggagccgcaattcatgttgttttgcttgatgctggcactggctgtgttgtatcttctggacccgagtcatgtgccaaacttgacattgttgttctagaa

SEQ ID NO: 25187 - DNA, 65 bp, Oryza sativa
  Clone ID: uC-osflm202110g07b1
tcatatttgctatctagctcccgtcaatgggggggtctttttcaccccccgggggctgcaaatgc

SEQ ID NO: 25188 - DNA, 503 bp, Oryza sativa
  Clone ID: uC-osflm202110g09b1
ctctattggaaactgcaatcaagaactgtgggggtatattccacatgcatggtgcagaaagagatgtgcagcatgagatggtgaagatagtgaagaaaaagtgtgatcagaatgtgaaagagaaggtgttaactatgatagatacatggcaagaagcattcgggggaccacgtgcaagatatccacagtactatgcagcgtaccatgacttggtgcgtgctggagctgcatttgcaaagagatctgatcgacctgcaccattgtttaatggccagtcttcagcaggcagaaatatgcgtagccctgatcagcaggatgaagctgaatcgtgtgctgcaaatgattttcctgctttgagcatgtgatagattcagaatgctcgtggcataatggatgtgctagccgatatgctagatgctctataccctggaaacagagagggactaaggcaggaggtaattgcggaacttgttgatcagtgactcacttacaagcagagagtg

SEQ ID NO: 25189 - DNA, 496 bp, Oryza sativa
  Clone ID: uC-osflm202110g10b1
tgtttgctcctaaattcccatgctctctcatgcttctcttccattcccagctccctccacagctttcttcacctgtgataccttcaagtagcacaaaacaacaaaaaggaagcagagctagcttaaattttccaaaatcactaggaaaagagcttctttggtccctaggttgctggcattttggtgcctacttttttgctcgctgttgccgccttctctaatcccaagaggggagaaatggagtagaaggctaaaataattcagatgcagctttgctcatggcttcctcaggcagttagggcctaggggtggagaagcctgaagctttgcctgattgcctccccaatcttcttgcctcctctcctttcacttcttctctcctctccgctgtggtttcttgctggttcttggaggcctccacttggttaaatgatgggtgtaggtggtggtcttggtatggaagctactaactgtggtgctttgctcagggagcttc

SEQ ID NO: 25190 - DNA, 503 bp, Oryza sativa
  Clone ID: uC-osflm202110g12b1
gtttaccacagattggggataagtttagtagtgggcatggtcagaaaggaactgggggaatgacttatacacaagaggacatgccatggactattgaaggcatcacacctgatattattgtgaatccacatgctattccatcccgtatgactattggtcaactgattgagtgtattatgggtaaagttgctgctcacatgggaaaagaaggagatgcaactcctttcactgatgttactgtggataacatcagcaaagcacttcataaatgtggttatcagatgcgtggattcgagaccatgtacaacggtcacactggaagaaaattaactgccatgattttccttggtcctacttattaccagagacttaagcacatggtggatgacaagattcactctagaggccgtggtcctgtgcagatacttaccagacaacctgcagaggggcgctcacgcgatggtggtcttccgtttggagagatggagagggactgtatgatt

SEQ ID NO: 25191 - DNA, 377 bp, Oryza sativa
  Clone ID: uC-osflm202110h01b1
cgcctttttctcctctcgccgctcgcagcgaaggggcgggtgttttccagcgcccacgcgatcccgacgaatcgaatcgagtccgagacgccgatctcggattcgagaccgttgatttcaaccaacacaagccctcctccggatcgatccgctcctcttcagccatggcaggaatggcacccgaaggctcccagtttgatgctaagcactatgacagcaagatgcaggaactactgcaccaaggtgacaatgaggaattcttcacttcatatgatgaagtttttgagagttttgatgacatgggcctccaagagaaccttctcagaggcatctatgcttatggttttgagaagccatcagctattcagcaaaggggg

SEQ ID NO: 25192 - DNA, 490 bp, Oryza sativa
  Clone ID: uC-osflm202110h04b1
ggtgcactccgcgtcccaaatcccaaaccggagctagggttgctgctgctgccactcgcgagcagcagcgccccctcacgctgagccgcctccggctccctcgccgccgatcctgcgcgtgcggcggcggcgggtggccggtttgaaggaggagaggaggcttttggtcgtcactccttgcgcaggatgggtgggagatatctgcattctccacctgctgttaatttaatctgtgaggaatcaacttttgtgcgctcaacaagttgctgtctccactcttgtctgtgtttgagatgcaaaacatcgaatttgaagccatgtcgaacactggtgttcaatatgccatcaaggcgcttcaatagaagagtggctgcgctgccagatgtcgatgatttcttttgggagaaggatccaactccaatcctggacacgatcgatgcacccatccatttgaaaaatctatctagtaaggagttaaagcaactagctg

SEQ ID NO: 25193 - DNA, 475 bp, Oryza sativa
  unsure (1)..(475): unsure at all n locations
  Clone ID: uC-osflm202110h06b1
gccacttgacacagaaccacctcgctgcttcgggctggcttagtcgctggttagggggagacgcggcaatggcgctcctacggcctctcgcgctctgcttgctgctcgtctcctgcgccgcgcagtcgccggcctcgtcgccgtcggcgtagaacggtcctccgctcagcgccgccacgccggaggcatccgccgcctcgtcgccacaggtctcggccgctgcaccgaccacggcagcctcggcgccacaggtgtcgtccgcggcggccccgaccaatgccgcctcggcgccgcaggtctccgccgcggccccgaccaatgccgcccaggcgccgaaggtctccgccgcagcaccgaccaatgccgcctcggcgccacgggtttccgcggcggctccgcccaatgccgcctcggcccacaggtttccgccgcggccccaccgaccacggncgccgcggcgccacagctggccgcc

SEQ ID NO: 25194 - DNA, 406 bp, Oryza sativa
  Clone ID: uC-osflm202110h08b1
tatttagaataaataaaaatcccaatcccgggcgggttttcttcttcctccgtgggcccttttcgattcgattggattggattgttttgctggctcgctctctctctctctctcgtggtgtggtgtggacaacaaaggaaggaaagatggagggcggcctatggggggaggtggaccacctctccggcgagagggccaccgcgcagttcgacgttgaacacatgaaggttgcctgggctggctccctccacgccgtcgatgtcaccgaccgcatggcgcgcctcgtcgcttccgaccccctgttccgcaaggataacaagactatgctccccaggaaggagctgttcaaggacacactcagaaaggcagcccatgcgtggaagcgtatcttcgagctccgtcttac

SEQ ID NO: 25195 - DNA, 337 bp, Oryza sativa
  Clone ID: uC-osflm202110h10b1
tctctctctccacatcacaagtcgccttccgggtgcgcccccgaaatcccctggggaaccaaagaaacctgaggcaccaccatcaccaccaccgtctccggctccggctccggctcctgcgcgcgcggcgaattcgggggaccctcgcgctcacgtggggtgtgggtggggggtagatccagacgtcgccgtcgccgggggggggggagggagctcgggttcaaccagcgggggaggggggggcccgcgtgtgccttatagggggggggctgcggagacccctgccgtcctggagtccgagagcgaagctccaactctggcgcgggaggcccagcac

SEQ ID NO: 25196 - DNA, 492 bp, Oryza sativa
  Clone ID: uC-osflm202110h11b1
ctcttctctctctcagtctcactctcccaggcgggctcggcccgagcgcgcgggcgctttccccccctcgccgccggcgacgagctcgaggcggcggtgcgctcgcctacctccggagggcggagcggggggatggagcccatgagcgtggacggcggcgggggatgcggcggcctggacacgcagatcgagcagctgatgcagtgtcgcccgctcgccgagcaggaggttaaagcactgtgcgagaaggccaaggagatattgatggaggaaagcaatgttcagcctgtcaaaagcccagtaacgatttgtggtgatattcacggacaattccatgatcttgtagaactttttcggatcggtgggaagtgcccagatactaattatttatttatgggggattatgtggatcgtggctattactctgatgagactgttactctattggtagcgctgaaggtgcgtcacccacatcggattacaatccttcgc

SEQ ID NO: 25197 - DNA, 455 bp, Oryza sativa
  Clone ID: uC-osflm202110h12b1
ttctaagcctgctgctgttggtggcagggatccgtgggcgcctccagcacgaggaggaggaggaagaggaggaggtccatgaccaggagggaggcagcagcagcttcacccttccggtgtgggcgccccacgttccggagtcgggggaggagcggcgcgagcacttccgggcgttgatggccaaggacatgaggcggatgatgcggcaggtgccggagctcatgtccaagacggacatgttcgagctgccgatgcgaagcgcgctcaacatcgcgcaggtgggcatgtacgtgggtggttgtccgcatcggcaccccggcgctcccctacagcctcgccctggagacggccaacgaagtcacctggatcaactgccgcctgcgccggcgcaagggcaagcaccctgggcggccccacgtgccccccgccgccaccaccatgtccatccaagtcga

SEQ ID NO: 25198 - DNA, 392 bp, Oryza sativa
  Clone ID: uC-osflm202111a02b1
gtattcattaaatggaagcccttacgttagtcctgggagttcatgtttactttaatccccatgcttattttatgtagacatacaaggttcaccaataagcttataagcacaacttttgtcaagcttagcggctttgtagtttaagcgtttcatttttcaatgccattctttctccttttatcttttataatctctggaaattaaatttcatttttttagaaaaaatgaatattacacctatcatgtttccacattttaatttcttcttttgtgtgtccctgtgtaaattgtgtacttttacttgctaaggagtattctttagtgaccggcttctagtggactaagctacgcactgttcaggttgcttttttttgtgttgggggggggggggc

SEQ ID NO: 25199 - DNA, 263 bp, Oryza sativa
  Clone ID: uC-osflm202111a06b1
cgctttctcgtagaagagacggcacaatttacacttcgggccctccaaatcttctcctgggcctcctcctcctcctgggcggaagatagttgggttcgggcaccaccacaaccaggcaccggcggcgccgtcggacccgaaccagatcttcaagatcttctgccgcgccaacgagaactactgccttaccgtccgcgacagcgccgtcgtcctcggccccgtcaaccccaaggacgagcaccagcactgggtcaagggacatg

SEQ ID NO: 25200 - DNA, 447 bp, Oryza sativa
  Clone ID: uC-osflm202111a07b1
ttcgaggcaagaaaagaagtgaaatctctccgttagacaggaagaggaaaagcaagggggaattggggatggcgtcaaagaggatacagaaggagctcaaggatctgcagaaggatccccctacatcatgcagtgcaggtcctgttggtgaagacatgttccactggcaggcaacgataatgggtccatctgatagcccatatgctggtggagttttcctagttaccatccacttccctcctgattatcccttcaaaccacccaaggtggcgttccgcaccaaggttttccatccaaacatcaacagcaacgggagcatttgccttgacattcttaaggaccaatggagcccagcactaaccatttccaaggtgttgctgtcaatcttgttccctgctgactgatccgaaccttgatgatcctttggtctcctgatatcgcccacat

SEQ ID NO: 25201 - DNA, 516 bp, Oryza sativa
  unsure (1)..(516): unsure at all n locations
  Clone ID: uC-osflm202111a08b1
ctccgtctccttcctccattcctccgccgctagaaccttctagaagctctcctcctcctcccatggcggcgacgatcgtgtccgtcaaggcgcgccagatcttcgacagcaggggcaaccccaccgtcgaggtcgatgtgtgctgctcagatggaacctttgcaagggctgcagttcccagtggtgcatcaactggtgtctatgaagctctcgaattgagggacggtggatctgattacttgggaaagggtgtttccaaggctgtcgacaatgtgaactcggttattgccccagctctgattggcaaggaccctacgtcacaggctgagcttgataacttcatggttcagcagcttgatggaaccaaaaatgagtgggnggtggtgcaagcagaagcttggtgctaatgcaatcctggctgtgtcactggccatttgcaaagctggagctatcatcaagaagattccttctgaccagcacattggcaaccttgctggaaacaagcaactggttttg

SEQ ID NO: 25202 - DNA, 273 bp, Oryza sativa
  Clone ID: uC-osflm202111a10b1
tttattcaagaacaaggaacatgggaaagctagtgcagccgctagtctgggaatgattcttctgtgggattctgattcaggacttgcccaacttgataagtacctgcacagtaatgatattcatgttgttgctggggctttgctaggtattggaattgtttcttgtggtgtgaagagtgactgcgatccggcatttgctcttatttctgagtatttcagcagggatgagtcaattatacgaattgcagcaatccttggtcttgttattgctta

SEQ ID NO: 25203 - DNA, 97 bp, Oryza sativa
  Clone ID: uC-osflm202111a11b1
gacgataattcaagaactcgaacctcgctaatgggggggctttttttaatctgggaagggttctactgcgggattctgattcaggacttgcccaact

SEQ ID NO: 25204 - DNA, 319 bp, Oryza sativa
  Clone ID: uC-osflm202111a12b1
gttttagatcgcgagcggccgcagcacaaaaacatgttctctcgcgagtcgcgagttgcaccgatcgaattaagggtcgaagatgtttgggttcgggcaccaccacaaccaggcaccggcggcgccgtcggacccgaaccagatcttcaagatcttctgccgcgccaacgagaactactgcctcaccgtccgcgacagcgccgtcgtcctcgcccccgtcaaccccaaggacgagcaccagcactggttcaaggacatgaggttcagcaccaaggggaaggacggggagggcatgcccgcgttcgcccttggtaacaag

SEQ ID NO: 25205 - DNA, 410 bp, Oryza sativa
  Clone ID: uC-osflm202111b01b1
gccttgtttggcagggacagaacgaattagctgcgtactgcagcaactaataaacgatggatcgtcccaacctcgccgtggccgtggtggggctactggcggtggtggcggcgacgctgccggcgccgtcatggcagttcttcgacctattcctccccgccggccccagccaccggtcctccggcggagggcttggcaagtgggtgctgatgaaccacgaggagtacgtcgagaagaagtcgctgtacgccatgaaggccgccggcgacatcggcgggaagaccatcgacgcgagcctctcggcggcggaagaggccaaggtgacgtgggtggttggccccaaggggacgccggtcgaaaccacctttaccacctttgtgggggtgctcgagaaggtccctaggggaaca

SEQ ID NO: 25206 - DNA, 562 bp, Oryza sativa
  unsure (1)..(562): unsure at all n locations
  Clone ID: uC-osflm202111b02b1
atcaaaatcgaaaccaaacctccccaaatttccccagagaccctaaccctaaccccacccggcgccatggatctcctccagtcgtcctacacgccggacgacgaggacgacgacgagcagcagcccctctcctcgccggacgcctcgccgctccgcctccccgtcaagtcggtcgaccccgccgtcgacgacacggcgctcgcgctctacgccggcgccgcgtgcacctcccgtccggtcgacccctgcctccacctggggccctttaaccccaccgccgaccagctctgggcgcccgtcctcgggccccagcacccccacgcccccatatcctccgcctccggcaatccgaaccacaagctcggccacgtcgaggacgccgccgtactccccttgctcttcgacgagcagtacaacaccttgcaccgcttcggctacgccgtcgacccctacggcctncacatcgttggcgacgcccagccctcggtcgagcccgacaccgaatacaaccttgccccctgcgagcacaagcagccgccgctgcagttcaaggacgaggagg

SEQ ID NO: 25207 - DNA, 497 bp, Oryza sativa
  Clone ID: uC-osflm202111b03b1
caggttttatgctctcaatgaatatactcctgttggtggttcttttcttaggacggtggagcgccaggttgggcccaaatttctctttccaattggtgttaatgacactgttgttgggatttatgatgatgaacctactagcatcatctcctatgcgcttgcttcccatgaatatcatcttcagctatcagatgaactggaaggcgacacaacagataattcactctcagtaactgatttgagaggtgcttcattaactgaatcagtggatgaaactgcttctgaacttctaagaagttttgtttctacagaggacaatatcctctatatgtcaggaggcaagaatccatccccttcagatccactcgcatacagaaaagcaagtcacataaaggtgaattttggagatgaaggtcctttaggacaagtgaagtatactgtaatttgttactatgcaaaacaattggatgctttgaggagaatatgctgcccatcag

SEQ ID NO: 25208 - DNA, 166 bp, Oryza sativa
  Clone ID: uC-osflm202111b04b1
atcctcgtggcggcccggcggccggcgaggccccacgcgcgctcgcgcgctcgtgccttcctcgtcacgacacccctaggttcatcctaggaggaggggaattcggattttggattttggggcatcgtgttaatggcggtgcggccggggtgggcggtggcggtgg

SEQ ID NO: 25209 - DNA, 446 bp, Oryza sativa
  Clone ID: uC-osflm202111b05b1
ctgtaatgggacccattcagggtcttccggactacaactggttcaggcgccggacctacatgctccgttactagactctccaaccgatgtactatgtttacattctgcaaaggcaagataattgcctcttttggcatcagtatattatggcctcgtccatgcacattgtgtgtgcgacgtggaggaaatttttttgagcaccattttccttgttttctttgtccaaaaccaacaaagctgtcaataatgataggcaaattcaactgacgtggcttacttgagttgccacccgttgtttctacgatgaatcgttacccctacttatccttttttttattgcaagattgctttctttttcttggaataatttgatgaagctgcttatgtaaagatgatagttttgctgtgtcgactattgacaactgcacgaggtgcgaattgtaccg

SEQ ID NO: 25210 - DNA, 485 bp, Oryza sativa
  Clone ID: uC-osflm202111b06b1
atcttcttttctctcagctctcacagctcactgcatggggggccgcggccaccatggggctctcctccccggtgatggcccgcgcggcgccgtcgacctcctccgcgctcttcggcgaggcgcggatcaccatgcgcaagaccgccgcgaagcccaagccggcggcgtcgtcggggagcccgtggtacggcgccgaccgcgtactctacctcggcccgctctccggcgagccgccgagctaccttaccggcgagttcccgggcgactacggctgggacaccgcggggctctacggggacccggagacgttggccaagaaccgggagctggaggtgatccactcccggtgggcgatgctgggcgcgctcggctgcgtcttcccggagcttctcgcccggaacggcgtcaagttcggcgaggccgtgtggttcaaggcgggctcgcagaccttaaccgagggcgggctcgactacctttggaacccg

SEQ ID NO: 25211 - DNA, 473 bp, Oryza sativa
  Clone ID: uC-osflm202111b07b1
gttttcaccatcaaggatgacttgcaagagcaactgaaaagtctagagagtggagaggttctttctgacaaggtgattgatgatttgaaaagaagaaagcttatcacaaaagagaaatcaatttggtatgccctaaagaaaggaccccagtttgtcgcgaagaggaaaaaactggcaactgatgtgacacaagagcatctcataagtggtgattggaaggatcttgaattcaaagactataactttggagcccagggacaacctattgccattggttatgtgcaacctttgttggaggtgcgagaggaaatccagaacatctttcttcagatggggttcactgagatgccaactaacaattacgttgagagcagcttctggaacttcgatgccctgtttcagccccaacagcatcctgctcgggattacacgatacattttctcttgaagcccctgctgctacaaacaattgt

SEQ ID NO: 25212 - DNA, 533 bp, Oryza sativa
  Clone ID: uC-osflm202111b08b1
catatgttcgcccacaagacgctgcggattccggggcccggtaggcacccacccgccgccaccgccaccgccaccgcgccatcccatcctcctccctcctcttcccctgccgccacccatcgtcccagagaatgggctacgcggcgccctccgaaaaattctgccttggatccactcctgaaaccaccgcagagcacagttgcaccatccatggacctcttgcagaactactatggccttgctcgacctccaaagggggacccagaaaatgaaggcactgaaatggcgacatacagtataggtcagcatacgaaagctagaagcttatcaacgggcttttctcttgtaaatggtgaggttgacgatgctgaaaagccaataagacgccgccagaaatctgatgctgagttctcaacaagggagggcaacagtggtggtgtactgatgaaggccggcccgggcttgcgctgaggccaaaatctggcagtcgaccggaaataaacaacagccagcaagatcttgtagcaaccgca

SEQ ID NO: 25213 - DNA, 262 bp, Oryza sativa
  Clone ID: uC-osflm202111b09b1
ttttctcagctcagatcatcgttgcgagaccgagtcgatcgatccatcttgttgttgcgttgctctgtttggtttccgtagtagatcgtttcttggttagccggcctgttgaattgttaatcacgagaatttgggtattttctgatcgatgacgcagtgggcggatctggacgcgctccggccggcggtggccgccgacgtgcaggtcgtcacgtcagacggtaagagcatctccgcccattcgttcgttcttggcacggtg

SEQ ID NO: 25214 - DNA, 327 bp, Oryza sativa
  Clone ID: uC-osflm202111b10b1
ttcttgtgatactgcctctgggagtgagagcaagtggggcaatgctggggcagaggaaaaggcagatgcctggaaaagtaaagtggggagtgaaaatagtggaggttggaatcagaaatcttcttggggtaaaccaagcttctcaggtggagagcaggaaccagcttggagcaatccaaagaatggtgatgataacagtggatatggaggggtggtattcaaaaccaacaaagctggtaattatgataggcaaatttaactgacgtggcttacttgaggtgccacccgttgttttttcgatgaatcgttacccgtacttatactttt

SEQ ID NO: 25215 - DNA, 313 bp, Oryza sativa
  Clone ID: uC-osflm202111c01b1
cgcttgataggttcacggctggacttctcggatctggggggactttatgaatcatccggggctgtctcctaggtatcatggcgaaggaggttggtgtaaacatgctctctgttgccgacgacggctactccgtggcggcggcgttcatggacgttggattgtccaattgcgccaactgcaccaggaagaacatgaaagctgaggccgctttcaagggtgttcgcgtggcgatcaagtgcaagaacagcaacggctagtactagactaaggccaccggcgaggtcggcaagtttggcgcgttcgccgtgcccct

SEQ ID NO: 25216 - DNA, 89 bp, Oryza sativa
  Clone ID: uC-osflm202111c03b1
gcatcgatatcgattcgcttcgtattcgttctcgctgttgatttgttcgtgagatttgaattctagcaatggctcctctcggtgacgga

SEQ ID NO: 25217 - DNA, 100 bp, Oryza sativa
  Clone ID: uC-osflm202111c05b1
ccctcgctaccgctctacccacccaccctctcgccgggggatattcgatccaggaagagctcgccgccgccgctgccatggtgctctccgtggagaagac

SEQ ID NO: 25218 - DNA, 272 bp, Oryza sativa
  Clone ID: uC-osflm202111c06b1
cacttttcccctttcccaccctcccgtgcgaacacacccgcggtgcggagcccagatcgggatcgcgacggatcggcggcggcggcggcgatgggaggcgaggcgggggagcggcggctggggagggcgatgagcttcgggatcccggacgtggcgctgcggatgatgatggggattgcgggtaaagaatattgcatgctggtcttatattttgttcttggagcgggttactcttgtgcggcgacgaccaggggcaatgggcggcgcggcgg

SEQ ID NO: 25219 - DNA, 169 bp, Oryza sativa
  Clone ID: uC-osflm202111c09b1
gatgtagatgatggtatcgaatcaaactaattaaaccggacagttgttgttgatgatgatataccatcgagcaggagcagctgaggattagcacagaatccatatattggtagctacgagcctacgacctcgctgcctcgtatcgtgaaatgagatactagctagaaag

SEQ ID NO: 25220 - DNA, 498 bp, Oryza sativa
  unsure (1)..(498): unsure at all n locations
  Clone ID: uC-osflm202111d01b1
ctatgatctcatgctctcgcatgctttggtggcgctggtcctcaacatgcatgtgctatggcaagatcccttggcatgtctgagttacttattcatcgctactgtggcatattgagtgcatatggaatgggccttgctgatgttattgaagatttgcaagagccatactctgctatttataatgttgattctgctgcagaggcatctcgaagagtagatcttttagttaagcaggtgaaagaaaagttaatagagcagggttttggagaggacagcatcaggacacattcatacttgaacttgaggtacgaggcaaccgatacagcaatcatggttaaacaaccagagagagaatctggaagtgattatgctgatgagtttgtgaaactgtttcagcaagagtatggcttcaaattattaaacagaaaaatactcatatgtgatgtgagggttcagggagtnggtgctacaaatatcttgcagcctcatgaactgaca

SEQ ID NO: 25221 - DNA, 530 bp, Oryza sativa
  Clone ID: uC-osflm202111d02b1
gcttattataggcgcaacacagaaaccctcaccgcggcccgcatccatggcggaggagcacgagacgaggccgccgtccgccggaaggccgccgtcgtccggccgcggcagggccgacgacgctgacgagagggaggagggggagatcgccgacgacgacttcggccacgcgccgccgcaggccaaccccgccgcgccgcacccgctcgagcacgcctggaccttctggttcgacaacccgcagggaaagtccaagcaggcaacctggggaagctccatccgccccatccacaccttctccaccgtcgaggacttctggagcctttataacaatatccatcacccaagcaagttggttgtgggagctgacttccattgctttaagaataaaatcgagccaaaatgggaagatcctatctgtgctaatggaggtaaatggaccttcagctgtggcagaggaaagtccgacacaatgtggttgcatactttattggcaatgattggcgaacaattcgattatggggatgaaa

SEQ ID NO: 25222 - DNA, 569 bp, Oryza sativa
  unsure (1)..(569): unsure at all n locations
  Clone ID: uC-osflm202111d05b1
cgcgcggtgaacgcggcctcaccatccggggctgggcgccgcagatgctcatcctgaaccacccggccgtcggcgggttcgtgacgcactgcgggtggaactcgacgctggaggccgtgaccgccggcgtgccgatggtgacgtggccacggtacgccgaccagttctacaacgagaagctcatcacggaggtgctcgaggtgggtgtcggcgtcggctccatggacttcgcgtcgaagctggagaaccgccgggtgatcatcggcggcgaggtggtcgcgggagccatagggagagtgatgggcgacggcgaggagggcgaggcgatacggaaaaaggcgacggagctgggcgtgaaggcgaggggcgcgctggagaagggtgggtcgtcgtacgatgatgttggaattctgatggacgagttgatggctcgccggggctccgtcaatgtgtgacagcactccctaacanggtgattgacggcttgacgcatcaagaagatgtgatcggacattcggacatnctcagagtccagactatggtctntntcctcagagnntttttttttg

SEQ ID NO: 25223 - DNA, 484 bp, Oryza sativa
  Clone ID: uC-osflm202111d06b1
gagctcaatcagcaacaacatctatctgggtcttgcttagttaagtccttcgccctcccaagaagaagaagatgtcttgctgcggcggcaactgcggctgcggcagcggctgccagtgcggcggcggctgcggcggatgcaagatgttccctgatgtggaggccacagccaccaccaagaccttcgtcctcgctgctccatccaacaaggcgagctctggaggaatggagatggcggtggagagcggcgagaacggcggctgcggctgcaacacctgcaagtgtggcaccagctgccgcggctgctcctgctgctcctgcaactgaatctatcgtcgtcgtcgcccggctgcatgaggatttatcgtatggatgctgctactgtcgatcagagctttgatcgaggccttaatttgcttgcattagtacccagcttatatgtaggcaggccttgccttttgctctgacgcctaaataaaaccgtc

SEQ ID NO: 25224 - DNA, 473 bp, Oryza sativa
  Clone ID: uC-osflm202111d07b1
gttctacattaaagtggatgatgatgtacatgtaaatatagcaactcttggtaacatattggctaagcatcggtcgaagcctcgagcttacattggttgcatgaaatctggtccagtcctggctcagaagggtgtaagataccatgagcccgagtactggaaattcggcgaatgggggaacaagtacttccgtcatgcaaccggccagttatatgcaatctccaaggatctagcttcttatatatcaatcaaccagcatgttctccacaaatatgctaatgaggatgtatcattaggagcatggttcataggtctagacgtcgaacacgtcgatgatcgcaggctttgctgcggtacacaaccagattgcgaatggaaggcgcaggcaggcaacgtgtgcgccgcgtcgttcgactggagctgcagcggcatctgcaaatcggcggatcggatgaaggaggtccatcaacgat

SEQ ID NO: 25225 - DNA, 488 bp, Oryza sativa
  unsure (1)..(488): unsure at all n locations
  Clone ID: uC-osflm202111d08b1
gcagctgcttcgctctgctttctccgtaggggttatccctttgcttctcctcgtctccctccccctcgcacgcaaaggcacaaagcccggattccaccgccggagccgacccgcttcgaggcgaatcgagagttagctttccagccagcaatcgaggatgtcgtcggtgcagctctccggtgccggagtcgccgcggtggccttcaccaagaatggcgcgtcttccttcgacgggctccgcctcgcgccgccatctgtgcgagtctgctcctccaggcgcccgtctcgtagcctcgtcgtcaaggccgccacggtcgtcaccccaaagtatacctcgctcaagcctctgggagacagagtgcttgtgaagcttggtgctgcagaggagaagactgttggtgggattctgcttccgtcaaccgcacagtctaagcctcanggaggtgaggttgtcgctgatggagagggaagaactatctgggataaga

SEQ ID NO: 25226 - DNA, 436 bp, Oryza sativa
  Clone ID: uC-osflm202111d09b1
cttgctgatcatcatatatctcttgtgagcttcagcaatgggggctctgccaagggctctagtcctcggcgtttgcgccgccgtcttgctggtgaacgtgctcgccgttgccgccgacggcgacgccgcggcggcggcgtccatggtcgtcggattggccaagtgcgccgactgcaccaggaagaacatgaaagctgaggccgttttcaagggtgttcgcgtggcgatcaagtgcaagaacagcaacggcgagtacgagacgaaggccaccggcgaggtcggcaagtctggcgcgttcgccgtgcccctcgcggcggacctcctcggcgacgacggcgagctgaggcagcaatgcttcgcgcagctgcacagcgcggcgtcgaaccagccatgcccacggcaggagccgtcgtggatcgtcaacgcacgcgacgac

SEQ ID NO: 25227 - DNA, 471 bp, Oryza sativa
  unsure (1)..(471): unsure at all n locations
  Clone ID: uC-osflm202111e03b1
gcctcattgtcaacgccatagccgccgaggttgaggtgagccacctagaggggagagagagcgcgccgagatgtccggcgaggaggaggagaacgcggcggagctcaagatcggggaagagttcttgaaggccaagtgcctgatgaactgcgaggtggcgataatcctggagcacaagtacgagcagatccagcacatgtcggacggggacccgtcgtcgcaggtgtcgcaggtgttcgagaaatcgctgcagtacgtgaagcggttcagccggtacaagaacccggacgcggtgaggcaggtgagggagacgctgagccgctacggcctcgccgagttcgagctctgcaccctcggcaacctctgccccgacaccagcgacgaggcctgcgccctcgtnccctccctccgctccggcggcaggttcgtcggcgaccccggcagcgagaagatcgacaagatgctcaacga

SEQ ID NO: 25228 - DNA, 527 bp, Oryza sativa
  unsure (1)..(527): unsure at all n locations
  Clone ID: uC-osflm202111e06b1
cgcttgggggaaggaggaggaaaggtgcacaaggtcagactaagtttgcgttgaagaacaaaggagaggaaaaatgtcgcctgctgaggcatcgcgtgaggagaatgtgtacatggcaaagcttgccgagcaggctgagcgttacgaggaaatggtcgaattcatggagaaggtggcaaagaccactgatgttggtgagctcaccgttgaggagcggaacctgctttctgtggcttacaagaacgtgattggtgctcggagggcatcgtggaggatcatctcttctattgagcagaaggaggagagccgtgggaatgaggcatatgttgcatcaattaaggagtaccgtagcaggattgaaactgagctcagcaagatctgtgatggtatccttaagcttctggattcccaccttgtcccatctgccactgctgcagagtccaaggtgttctacctgaaaatgaagggtgactaccacaggtaccttgctgagtttaagtcangagctgagaggaaggaagcagctg

SEQ ID NO: 25229 - DNA, 469 bp, Oryza sativa
  unsure (1)..(469): unsure at all n locations
  Clone ID: uC-osflm202111e07b1
ttgtttgcggcggcggcggtcggcgaggagggagccagctgttgcgcggtggggaaccggtggccgcggcaggagacgctggcgctgctcaagatccggtcggacatggacgccgcgttccgggacgccaccctcaagggcccgctctgggaggaggtctccaggaagctggcggaggagggttaccggaggagcgcgaagaagtgcaaggagaagttcgagaacgtgcacaagtattacaagcgcaccaaggagagccgcgcggggcgcaacgacggcaagacgtaccgcttcttcacgcagctcgaggcgctgcacggcaccgccgccggcgtcgtggcggcgccatcgccggtgacgtcgctggccccgccgccggcgacggctgtgggggtgtccggcggngtgcgcgcccccgacgagccgtcgtccgcggtggtgatggggaacgtgatgagcttttcgacgt

SEQ ID NO: 25230 - DNA, 340 bp, Oryza sativa
  Clone ID: uC-osflm202111e09b1
gcccgtcctgaccggctcgacccacccacgcggttttatattgccctcgcacgccacgatggcggggggggttattattgcatgtggggggggttcaccccaatgcccgcctgggctactcacaacgcgttctgctcaatatcggatacatagggcttgagggccaactgcctgatgaactgataggcaacaacaatactggagcacatatacaaacagatccagcacatatgggacggggacccctcatcggagaggtcacaaggggtagaaaaacatgttcaattcgggactgcggttaagacagcacaagaacacgtacacactgaggcatgtggtg

SEQ ID NO: 25231 - DNA, 299 bp, Oryza sativa
  Clone ID: uC-osflm202111e11b1
aatgacaggcgatttttggacgggggaagcatcgagtgctgagaatgtgttcatggcgaagaccgtcgagcgggctgagcgacgccaggaaatggcaccaccaatggcaacagcgccgaagaccactgaggcatgtgagctcaccgctgctgcggcggccctgcttgctgtggctcaacgagcgtgattggtgctccacgggcacatcggaggagcacctctggtattgaagataagggggacagccgagggactgaggcatatggagcttaaacaactgggccccacatatcgggtgt

SEQ ID NO: 25232 - DNA, 342 bp, Oryza sativa
  Clone ID: uC-osflm202111e12b1
ttgtggagcagtcatctaacggttcatccgggcggctgtcgttgcggcggcggggggtgcagcggccaataatcagcatggtaggagggtcacggacaacatgctgtcatcgcggatgctgccgaggggaatgccgctgcgagagaggactttagcgcttgggagtcaactgagtagcgacaccagcgagggggcacctctatagaggtgacaaaacgacttggtcctggtgggccactcggcaggagcgtgttgtttgttgaccaggccgaggacaacgcggggacccaagctgctgatgggatgttgactacaaagcttgtccagcatgatggacctact

SEQ ID NO: 25233 - DNA, 491 bp, Oryza sativa
  Clone ID: uC-osflm202111f01b1
cttggttgcaaaaaccaagacatacacacagaatgaaataataacaaaggtttcctagcctcaaaggatacatatatatagtttccctacaatacaatggagcctgtcaatgatttccaggaaggcatttcaacagagcatgcctttgaggcagagcctgtgccatcattgtcggaaacaataacgccacgatcaatggtggtgagcttcatccttagtgtaactctcagcatcgtcgccatgaaggtcaccttgagctctggcttcattccgtcgttcagcatcccagccggcctcctcggtttttgtgtatcccgtgcgtcgatccgcattcttgactacttcgcagtggcacaactaccattcacacgccaagagaacaccatcatccagacctgtgtcgtcgcatgcacctcgatcacattcaccggtggctttgggacatatattcttgcaatgggaaagaaagcagctgtaggggatgtcaatgc

SEQ ID NO: 25234 - DNA, 495 bp, Oryza sativa
  unsure (1)..(495): unsure at all n locations
  Clone ID: uC-osflm202111f02b1
gcgcgctcgttgccaccacaggctacgcaaaattctctccctgcctcctccaccacctccactccgacgatcctcctcctgatcctgtgccggccggcgatggcgtaccggttgctggagctcacgctggtctccgcgagcgacctcaagaaggtcactctcttctcgcgcatgcatgtctacgccgtcgcctccatctccgggagcaacgtccccatgcccatgcacggcacccacgccgaccgcaacggcggcagcaaccccgcgtggaacaccgtgctccacttccccgtccccgcccgcttcgacacccgcggcctcgccctccacgtccagctccgcgcccggcgctccttcggcggccaccgcgacgtcggggacgtgttcgtgcccctcgacgacctcctcgccggcgcgcacgacggcggcgagccgaggcccgctagctaccaggtgcgccgtcccatgtncgcccgcgcgcacggtacgctctac

SEQ ID NO: 25235 - DNA, 447 bp, Oryza sativa
  Clone ID: uC-osflm202111f05b1
ctccgccgattcctctcctcctcctccgggtggttctccggcgtcgtcggcgtcagcagcggcgccggccatgggttgcggtggctccaaggaggacgtggccaccggaaacaccaccggccccgccgccgccggcagcagcaagctcttccggaggaagtcctccgtctccgccagccaccgatcctcctcctggtggtcttccaatggatgcacctccgtctccgtcaaggacgtcgcgacgaagaaggaggaggagaccgaggccgacgccgtcgaggtgacgtctgccgaggaggcggcggcggcggcggtggtggtcaagaaggacgtcaccatcgccgctgccacgctcgcggtgaccgaggcgatggcgacagcggcggatccttaggaggaggaggaggaggaggaggagctgtccgagtccaccatggccgaccaggc

SEQ ID NO: 25236 - DNA, 576 bp, Oryza sativa
  unsure (1)..(576): unsure at all n locations
  Clone ID: uC-osflm202111f06b1
catatgtcctcacctttctgatgtcaatagccatggccgtcctcttgctcgttgcgttgttctatcggatcaagaagcaggcagctgccatggcggccaagaggaagcaacaacccaagctaccacccgggctagctaccatgccggtggttagcaacatgcaccaaatgctgatgaacaagccggtgttcaggtggatccaccgcctgctcgacgagatggacaccgagatcctgtgcctccgtttcggtcgcgtccacgtgatcgccgtcgcctcgccggagatggcccgggaggtcctgcgcaagaaggacgccatgctcgcctcccggccatcgtcgttcgcgtcgcggacgttcagctttgggtacaagaacaccatcatgtcgccggccggtgaccagtggaggaagatgaggcaggtgctcacgtcggagatcctctcgccggccatggagcggcggatgctcggctcgcgcgtcgaggaggctgaccacctngtcaattacgtctacagccactgtaatgatgggcactgagaacgtccgcacgtaacgagacacttctgtggcaaca

SEQ ID NO: 25237 - DNA, 426 bp, Oryza sativa
  Clone ID: uC-osflm202111f08b1
aaactcccccaaaccctagccgccgccgccgccgccgcagtcgtcgccgtcgtcgcagcagcagcggcagcgtcaccaccgcgaccggcggctgcagcgatgtactctatccttcgccgcgcggcgccgctccggcggcgcgccgtttccgccctggccgccgcggttctccggcgggaggaggcggcggcggaggtggtcgtgtcgcggcgggcgacgatcccggcggcgtggttccactcctccccggcgtggctggggttccgggagacgggggccgcgggggcggcggcgaggccgcagtacgcggcggatgaggggttgttctacgaggaggataagaggggggcgaaagcgggtggagttgctgcgggcggcgcggaggaagggttggaggtggccaagctcgggatctcgcccaagatc

SEQ ID NO: 25238 - DNA, 471 bp, Oryza sativa
  Clone ID: uC-osflm202111f09b1
tatttcttcctataacagggcaagagcagatcgatggtttccttttgatttctgaggagaagaggatcgatcgtttcgttcgatcgtttggttttgaattttgaggagaagagaagagaagaggatcggaagagatggccggcggcggcgtggaggacacgtacggcgaggacagggccaccgaggatcagctcatcaccccatggtccttctccgtcgccagcgggtacacgctgctgagagacccgcggcacaacaagggtttggccttctcggaggcggagcgcgacgcgcactacctccgcggcctcctcccgccatccatcgtctcgcaggagctccaggagaagaagctcatgcacaacctgcgcaactacaccgtccccctccagcgctacatcgccatgatggacctccaggagaggaatgagaggctgttctacaagctcctgatcgacacctggaggagct

SEQ ID NO: 25239 - DNA, 489 bp, Oryza sativa
  Clone ID: uC-osflm202111f10b1
tttttcaaagaaagaaaagcatcacaaatctgaggcactgtctctcgttcgcgcaaagcacgctgcttttctccgctttgcgagcaccatagcctagcccaccatgtgcggcggcgccatcctctccgacctcatcccgccgccgcggcgggtcaccgccggcgacctctggctggagaagaccaagaagcagcagcagcagaagaagaagaacaagggcgcgaggaggctgccactgcgccaagaggaggaggatgatttcgaggccgacttcgaggagttcgaggtggattccggcgagtgggaggtggagtccgacgccgacgaggccaagccgctcgccgcgccccggagcggcttcgctaaaggtggattgaaaaacactactgttgctggtgctgatgggcctgcagcaaggtctgctcaaaggaagagaaagaaccaattcaggggtatcccccagcggccatggggcaaatgggctgcgga

SEQ ID NO: 25240 - DNA, 460 bp, Oryza sativa
  Clone ID: uC-osflm202111f11b1
acgtctttcatcggcatcgaccttggcacgacctactggtgcgtgggcgtttggcaggacgaccgcgtggagatcatcggcaacgaccagggcaaccgcaccaccccctcctacgtaggctataacgactcctagaggctaatcggagatgctgccacgagccacgtctgcttgaacccacatcaacaccgtatgcgatgccaagcgtttcattggcaggaggtctagcgatgcttgtgcttacagtgacattgagctctggccattcaaggtgattgctggacctggggacaagcctatgagtgctggacagtacaagggtgaggagaagcagcatgctgccgaagagatctgatgcatggtcctgatcacgatgcgtgagattgctgaggcctaccttggcaccaccatcaagaatggcaggggcactggtcctgcatactataatgactcccagagg

SEQ ID NO: 25241 - DNA, 466 bp, Oryza sativa
  unsure (1)..(466): unsure at all n locations
  Clone ID: uC-osflm202111f12b1
ttcttgattccagatgggcagaatgttccgcgggggagagaattgagaagcacacctatgccacctcatcagaatcagagtactgttgctcctcttcatgggcattttcagtccaggaccgggtctgttgggcctctgcgttcgtcccaggcgatcaggctctcttcagtttcaagcaatgagcagtatacaaatgcccatccttacaattctcaaccggcgagtagtgggaggtcttcaacgctcaattatggatcacaatatggaggctttgaaccttacttggctgattttgcaagagatgctgggccgacctggcgtcctgatccagctgatggcttgcttggatatacagatgatgtccctgctgggaacaatntgactgaaaacagttctatctgcagtggggatgaacttgccagcacagtgaatgatggcatgatttatgaattatgactggaagata

SEQ ID NO: 25242 - DNA, 132 bp, Oryza sativa
  Clone ID: uC-osflm202111g01b1
atgcgttttttttacacctgtaaggacgcccccataatcgtgaggtatatcgctgtcgtgggcaggagcctatagtccgagaagctattccgcgtcaccctcgacctcatcacctgggcctgcggctccatg

SEQ ID NO: 25243 - DNA, 442 bp, Oryza sativa
  Clone ID: uC-osflm202111g03b1
cggtttcttgggaaacaagaaaaaaaagagagagagatggcagctacagactccctgaagaggagcctcctgctaccatctcctatgtgtgacttcagtagtgcagcactctccatctcaacccaggctaggaggaggtcatggccgccacggggggcaaggatgcaggtagcaacagctgcagactccaagaacattcttgtgatggggggaaccaagttcattggagtcttcttgtccaggatccttgtcaaggaggggcaccaggtcacattgcccactagaggaaaggcccccattacccagcagttgccacgagagtcagatgcaaagtatgcagagttctcttcaaaggtggaagacttgaaggtgacaggcaagactgtgatttcgctaagacaagacttgcggcatagggctttcatgtttgctacgacataaa

SEQ ID NO: 25244 - DNA, 549 bp, Oryza sativa
  Clone ID: uC-osflm202111g04b1
acattcttggctatttagccatcgcgctgcaactgggaaccgggggaaaaccttgggaaatgaaaatttcccatcgtctctcccgggcaagggtacgttctattcgagtcctggaaataattctcgatttgagtttggagaatcgtcggggaggtttgggtcatcgcattatgttcatcaccatgggggatctgtgcgggtagattgcccttcgtttgacggcgataatcctagggcatggaagcttaagtgcgaaacctattttcgagtcagtggagtctattttgatcattgggtgggagtagcagctttgcagtttatgggggcagcgcttacttggctacaatccactgatgctcatattgagtgtgtgtgttgggaggattttccggaagtagtgtgtcagaagtttgggagagaggagtttcagggattaaataggcagtttaatcagttaaggcaaaccggaactgtgactagctatgcagagaggtttagtgagttgattcatcaattgcagctcatcattcatcatggaacccaagtttc

SEQ ID NO: 25245 - DNA, 499 bp, Oryza sativa
  Clone ID: uC-osflm202111g05b1
ccgttgttgatcgccgcggcggtggggggcctcccggctccggcgacgactccgggggtggttgggagactgttgagaagagggtaaagaaaccagcgcaacaagttgggaaggggcaatggggacaatggaattctccaaatgctgcacctgcacctactgcaccacggagtggctctggagcttttcatcattctggaaacactttggttcgacattctgatcgtaggccagcaagaggcactcctaggccaccaccacaaaacaggtctatagaggcagaactgcaagcaccgcacggagttgtgactgcacctctggcaaatggttggcagtggggagccaggtcttgcccacctggtactgaaagcaaggagggtggtcttcctttgtctggttgtgatcctgaaacagacaatgctgaaggttatgacacatcggacgatgataatgatgatgatatgagtgacgatttgagtgatgactatgattctgatgc

SEQ ID NO: 25246 - DNA, 549 bp, Oryza sativa
  Clone ID: uC-osflm202111g06b1
atttttatttaaactcgcacaagggagaagagaagagaggcttcgtgagagtggtggaggaggagaccagcgcgtggtggtggtggtgttggcggcgatggatcgggttcgcggatgcgcgttcctgctcggcgtcctgctcgcaggatccctgtttgcattttctgttgcgaaggaggagaccaagaagctcggtaccgtgatcggtattgatcttggtacaacctactcgtgtgtcggtgtgtacaagaatggtcatgtcgagattatcgccaatgaccagggtaaccgtatcacaccctcatgggttgcattcaccgatagcgagaggctcatcggtgaggctgccaagaaccaggcagctgtgaacccagagaggaccatcttcgatgtcaaacgtctcattggaagaaagtttgaagacatggaagttcagagggacatgaaacttgtcccctacaagattgtgaacaaggaccgtaagccctacatttaggtcaagatcatggatggagagaacaaggtctttagccctgaggaggtcagtgc

SEQ ID NO: 25247 - DNA, 354 bp, Oryza sativa
  Clone ID: uC-osflm202111g09b1
gttgtaaagttgcgagagagagagagagagagatcagttagtttgttgagtggaagcacatcaggaagatgctggagaagctgtgggacgacgtggtggccggtcctcgaccggagaccggcctcgagaagcttcgcaaggccgctacaacccgcccccttgtcatcaacaaagatggcgacggcgaggcgagcggagtggcgtacaagcggacgcagtcgatgccgacgaccccgacgacgccggtgacgccgtcgtctttgttcccgacgacggcgacgacgacgacgccgtggggcagcaacgtgtggaggagcgtgtttcacccggggagcaacctcgccaccaagagcc

SEQ ID NO: 25248 - DNA, 546 bp, Oryza sativa
  Clone ID: uC-osflm202111g10b1
ccgttgtgatcgccgcggcggcggggggcctcgggggtcctgtgacgactccgggggtggttgggagactgttgagaagagggtaaagaaaccagcgcaacaagttgggaaggggcaatggggacaatggaattctccaaatgctgcacctgcacctactgcaccacggagtggctctggagcttttcatcattctggaaacactttggttcgacattttgatcgtaggccagcaagaggcactcctaggccaccaccacaaaacaggtctatagaggcagaactgcaagcaccgcacggagttgtgactgcacctctggcaaatggttggcagcggggagccaggtcttgcccacctggtactgaaagcaaggagggtggtctttctttgtctggttgtgaacctgaaacagacaatgctgaaggttatgactcatcggacgatgataatgatgatgatttgagtgacgatttgagtgatgaccatgtatctgatgcagtgaaaaaagtttgagacttggaaaatccaagttgttcaaggtttct

SEQ ID NO: 25249 - DNA, 462 bp, Oryza sativa
  Clone ID: uC-osflm202111h02b1
gcgctcttttttataaacacccaaaaacccaaccaaacggtagagccgccgtctccccgctgctccgtctccgactccggcgacgcccgcgcggccacgatgccgaacctcgagtgccggatgtacgagccgcggttcccggaggtggacgcggcggtgatgatccaggtgaagcacatcgccgacatgggcgcctacgtctccctcctcgagtacaacaacatcgagggcatgatcctcttctccgagctctcccgccgccgcatccgatccatctcctccctcatcaaggtcggccgccaggagcccgccatcgtgctccgcgtcgaccgcgacaagggctacatcgacctctccaagcgcagggtctccgaggaggaggcgcacgcctgcgaggacaggtacaacaagtgcaagctcgtgcactcgatcatgcgccacgtcgccgagaccctcgggatc

SEQ ID NO: 25250 - DNA, 384 bp, Oryza sativa
  Clone ID: uC-osflm202111h03b1
gtgttgtttctcgccacctgccgatctgcctcgccgtcgactagaggagtgagctggccgccggcgacccaggccaacccagccgtctcctcctgcttctgccactcgccatgccaggctctccgatccaaacgccccctccagaacccaaaccccaccgccgtcgtcgcctactctgggtgccggctctcctcgccgacgccgtcgccgtcctcctcgccacctcccccaatcctctcccccgactcctgcgatccctcctcgggccaaatacctccctcctccgctcgaaagagagaggtcctccgtacggcacctcgcccgacgcgcgacgcccaccatgtgttctatggatggcccctctcgcctccggcggcggctact

SEQ ID NO: 25251 - DNA, 359 bp, Oryza sativa
  Clone ID: uC-osflm202111h04b1
ctgttttttcctcaaggcgaacggcctccatcttggcggtcctgctactcccatggggtcgctcgtccccatcgccatcgccatggctctcatggtggttcaacctggccggcagatgactgcctttgctgctcggacgtccacagccgcggccgcggaggcgttctggcatgccgccatgcccggcgctcccatgccggacgccatcgtccagctcctccaccatgagcacgggcttgctagcgcccgcgggaaggccaacggcgggggcgactgtccaccgccgccgatggacttgagctacgactactacagggccctgccgtggagcgacgccccttccccggatgcattgaacc

SEQ ID NO: 25252 - DNA, 502 bp, Oryza sativa
  unsure (1)..(502): unsure at all n locations
  Clone ID: uC-osflm202111h06b1
ggatactttccgttttaggcgccgtcttcctccggggtgtgcaatgccccggcagcgtcccaagaagggggagcgccggatcgacgccgccatcgaccacttcacccccatgggctacgccaccgccgacgtccgtgccgtcgtcaaggaactcctccaggtgtacggggggaacgacgggtggccgttcctggaggaagactcgtaccgcgtcgtgcaggaggcgctcttcgagaagcaggagcaggaggatcaccaacagcagcctcaccctcatccacagcaattggaggaggcaccattggaagacaagagcatgtcaatcatagaggtgcacaatgtgatgcctgctgagactgaacaacaagtcgaggacgcggaccccatgcttgttgacctgcctgcagttgaagcaactctgccccttcctgaagccaaagtaacatatggcacanggaggccctgttatgggtggatcgaagagtacgaaagtgaatccgat

SEQ ID NO: 25253 - DNA, 489 bp, Oryza sativa
  Clone ID: uC-osflm202111h07b1
tatttaatcccgtgcgacgcgtagagacctccgcctgcgctttctcctccaaagcccaagctaatccccctcctcttcctcgtcgccggcgagagctcttcgtcttctccaactcgaccggaagcaagcgcgcttccgatccgccatggtgctctcccacggcgtgtcgggctccgatgagtccgtccactccacgttcgcctcccgctacgtccgcacctccctccccaggttccggatgccggagcagtcgatccccaaggaggcggcgtaccagatcatcaacgacgagctgatgctggacggcaacccgcggctgaacctcgcgtcgttcgtcaccacgtggatggagcccgagtgcgacaagctcatacaggcctccgtcaacaagaactacgtcgacatggacgagtaccccgtcaccaccgaactccagaaccgatgtgtgaacatgattgcacacctcttcaatgctcctctaggggactc

SEQ ID NO: 25254 - DNA, 508 bp, Oryza sativa
  Clone ID: uC-osflm202111h10b1
ttctgtctccccctccctcacggcctcacctgttggccctccaaattctccatccccggatccccctctcctcctcctcctccgccgctcgtcggagccggaggcgcggcggccttctcccgcgcccttcgtctcctcacacccgcggcggccggcgagaaggcccagaggcaaaggcgtgaagcggcctcctcccccggcgcggcaccctcggacgcacggcggccggtgagcaggagcaggttcggagggggcgacgcggccgggctccttccaccggccagcatcctggctcgagtcgaattttgaaggaagcatgaaggttgatgatggtcctggcgtcaatggcagtaggtgggccaaaatgatgagcacagattcgtggaggtggtgttaggattgatttacatggatgctgctgcgagtatatggattgctgcacgctacattgttcagtctgttggggatgagggggttcttcattcttgattacctacatatgcaattc

SEQ ID NO: 25255 - DNA, 388 bp, Oryza sativa
  Clone ID: uC-osflm202111h11b1
ttcttagctcccgaaaatggtgcggtaacgggagcgatcgcataagaggactggaggagatcgattccccattgaggacgtgaaattggattctgtggcagaagaaagatcgatcgatctggtttggtctggtctcctgtaaaagaattctcccatggcgccgccggccacctcgctcatcggcggcggcgtcggcggcgtcgcctatgtcgttctgctcttgttcctcgccaacgcctgcgtctcggatgctgggttcgaggtatccagccgtgttctgatgtcagatgagcaaggaagaagtgggttgctggctacatggaggcgattgatcgtcgagacaccgtcgccgggagccggtgctgacgctgctcatccaggaaccaaa

SEQ ID NO: 25256 - DNA, 251 bp, Oryza sativa
  Clone ID: uC-osflm202112a01b1
gccggtgacttagtacattgaccggatcagcatccggtccgcgctggtcaaccgcgcgttcggcgagtccctcaagaggatgtcgtctacgacgccgtcgtcagaggcagtggtagaggtgggatgctaagtttgtcaattttaggctttttctgaacattacatatcaagttatctaatgtgtgtaggaatgggctgctgctgacactgatagactgcatcacttagatgatttcatttttacccttctt

SEQ ID NO: 25257 - DNA, 360 bp, Oryza sativa
  Clone ID: uC-osflm202112a02b1
ctacacacacaattgtccatgttaatcagtagacaatattcaattattgccaggcataaattgtgtcattgatcacaggctgaatcaattcactaatggaacagagcagatgataatgtggacactggacaggaacacctgatccctcatctattacagtattattggaaactttttttttcagtgacaattagatcaagaacagtagcagcaagacggcgccggctgttcactcctgagcatctggtgcacggtaaagatggggaagccggtaaggttcgtcattttcaaagcctgccttcttgtaggatacaacgctgtcgacaagacgactcttcgagtttcctagtttttcagccc

SEQ ID NO: 25258 - DNA, 348 bp, Oryza sativa
  Clone ID: uC-osflm202112a03b1
atggttagtgtggtcctgcttcttcttcctcctcccgctcctggttgcggcgctcgcggggagcccggtggtcacggcccagcggaatgcgctgccggcggcggcggcggcggcggctagcgtccgggtcggggtgatcctgaacttgacgtcggcggtcggggtgaggcggcgggtcggtgtccacagggcgcgcggaggactactgccctccagaacccgggcccggtgacgaggaatagggtccaggtgtagtactctgacagggatgggcccgctttcaagaggcttcacactggagttaacaagctttgctgaccttgctggagttacactgctaccaaatgg

SEQ ID NO: 25259 - DNA, 396 bp, Oryza sativa
  Clone ID: uC-osflm202112a04b1
cagttccctttcccaaccctccccgaggtcgcagccttatggtctcctgtcccctccgcgaggtcaggaaatcatggcttcaacattcggtgccacttctacggatggcctcatggctgcgccaaccggaattgtatcagacaagaagccatcttctctatcttcggtgtcatctgtttctgttgccagccgaccacgcaatgcacgccttcagaggaagtgcaacttcagggtaaaagctgccaaggagttgtacttcaacaaggatggctcggctatcaagaagcttcagactggagtaaacaagcttgctgaccttgttggagttacactgggaccaaagggaaggaatgctgttttggagagcaagtattggtcccctaggattgccatgat

SEQ ID NO: 25260 - DNA, 392 bp, Oryza sativa
  Clone ID: uC-osflm202112a06b1
aacctttcttgcacccaatccaacccaatcccctgctgatgcactccgctctgcggccatggccgcctgctgctcctccctcgccaccgccgtctcctcctcctccgccaagcccctcgccggcataccccccgccgtgccgcactccctctccctcacccgcgctgccgccgacaggcccctccgcctgtgcgcctcctcattcagatccgcccgggccagcagcttcgacgcccgcgccggcggtgaggacgatgcgcccctggtcgggaacaaggcgcccgacttcgatgcggaggcaggacttcgaccaggagttcatcaacgtgaagctggccgactacatcgggaagaaggacgtcattctcttcttttcccggtggacttcacct

SEQ ID NO: 25261 - DNA, 114 bp, Oryza sativa
  Clone ID: uC-osflm202112a08b1
tgcggtgccggcagggacgacgacgacgtgcgccgttactccgatcatttcgggaggctggaaggagcaggagcccattccggcgaccttctggaaggtggtggtcactaccac

SEQ ID NO: 25262 - DNA, 272 bp, Oryza sativa
  Clone ID: uC-osflm202112a12b1
tccttgtagtacttgctgtagtcatcaactaggacggcgtacatgatatcaaagtactgctcattattgaagctgcaaaccaccccacagaccctgaggcttatgagatcctgtccaagaaaggggttatgattattagagacattctcacgaactccggtggtgggacagagagctacttggagtgggttcagaacattcatggtttcatgtgggacgaggcgaaggtgcacaatgagctgaagacctacatgacccgtggtgtcagggat

SEQ ID NO: 25263 - DNA, 427 bp, Oryza sativa
  Clone ID: uC-osflm202112b01b1
gcatctttgatacttcactatgttattctcattaggtagaaggcacaaatccagtcgtgtatgtgctgaatgttagggatacttcactaagaacatacttaattgtgaactttgataagtgggatgttaagtttgtcaattttaggcttttcctgaacattagatatcaagttatctaatgtgtgtgggaataggaaatattttccactggtagttgcacactgagatgtttcctattatattctaccttgcattttcatggcatatccttggtgatttcttgctgatgtcgtgcacgtcaggagttccaagtaggtatttacattgttctacctgctagtaagttttttacaatctgacaaatctcatggtgctaattgacttgagggttattggccaagccctggacaggtcacaaatatgtatg

SEQ ID NO: 25264 - DNA, 447 bp, Oryza sativa
  Clone ID: uC-osflm202112b03b1
cggctttctctgactgacattaagattgacatcaagcgtgtccctaagaagaccaccttgattaaggcaatggaggaagctgatgtgaagaacaagtgggagaacagctcatggggtaagaaactgattgtccagaagaggagagcatccctcaacgactttgacaggttcaaggttatgttggcgaagatcaagcgtggcggcgctatcagacaggagcttgctaagcttaagaaggaggctgctgcgtagatcattttggtggtgatcagttgagattttgatcaatgatgtttgatgtccctaaatatgaaacattgtgccagccactgttattgggatctcatgaaaaatttaagttttgaactcctgtgtttagaccttgtgccacaaattctattcagaatctaagatagcatgccatatgttgtgtgaagtgcttgaaca

SEQ ID NO: 25265 - DNA, 485 bp, Oryza sativa
  unsure (1)..(485): unsure at all n locations
  Clone ID: uC-osflm202112b05b1
cacgatgtttcctgtaccaagtgcagagataataccattacctccatgttctcctgaagcatcaagatcagatcaatgcaattgcctattcgtcggaacaggtcattcgccaaggacatcgcaggttctcagaaatgaacctgaccaggtgaatcggacattatatactccaccggcggaaggggggaatagcttgccatcatcagaagttaacccccctggtgaaaaataacaaccagcaaaaacagtagagtcctcatattcatgacagatcatgatccactaagctaggaccctgcaactagctgcttgaaatttctgctgttctgtctgctctctgccaggtgaaactacctgtaatattagaaacatcgacacagggggatccgtggattgctgtcataggttagttttggagcgngtttgatgtaaatatgagaaaccgttcaggtttcttgtaaagaaaaccacatttgtttgtcatc

SEQ ID NO: 25266 - DNA, 424 bp, Oryza sativa
  Clone ID: uC-osflm202112b06b1
catgttttttattcgaactagaaagattttacttattgatggactagcttttatgcagataaaaacatggtgagtgaaataatattccgagtttttaatacagaataaaaaaaaaataaaaaaaaatagcaaaaagaaacttaaaaaaaaaaaaaaaaaacaaaaaaaaaacaaaaaaaaaaaaaaaaaaaaaaaaaaaaaaggggggggcccttttaaaggatcaaagtttccttccccggggatgcaaaggaataatttttttttgggggcaccaaaattaaattaatgggccggggttttaaaacccccggaattggaaaaaccttggtgttcccaaactaaatggctttgaaaaaaatcccctttttcccagttgggtaaaaaaaaaaaaggcccgacccaatcgcctttcctaaaaatt

SEQ ID NO: 25267 - DNA, 285 bp, Oryza sativa
  Clone ID: uC-osflm202112b07b1
gctctccaagggggaaggcgacatcagggccgtgctggtgacccccgacggcaagttcaacaccgccggcatgatcgcggccaagtgcggctgctggaccatgctcaagggcggcgccacctcctacgacgacggcaagggcgacatcttcttcgagaccaacgtgacggcggaggtgatggcggaagggatggcgctgcagcccttcagcttcgacgaatggaagggccatcgcgcggagtccgtcaagaaggagaggatgaagaaggtgaagatcacggtggt

SEQ ID NO: 25268 - DNA, 433 bp, Oryza sativa
  Clone ID: uC-osflm202112b08b1
cggtctcgtgggagctaggtagctatatcgtcgtcattaattggagctagctagggaggcagcaggcagagcgcaggggggcggccgggcggcgagggaaccatgagcaaaggtgctatcatcggcgcttccaccgtgctggtggtggcggtggtggcagccgtgtgcgtggtgtcgttcaagaacggcggcggcggcaaggaggatggcgagctgtccacgtcggtgaagtcggtgaaggccttctgccagccgacggactaccagcagacgtgcgaggaggagctggggaaggccgccggcaatggcgccagctcgccgacggacctggccaagggcatgttcgccgtgacgtctgagaatatcttcaaggccatcatcgagtcgactacgctggaggagctcaagaacgaacagcgcacgtctggcgccc

SEQ ID NO: 25269 - DNA, 371 bp, Oryza sativa
  Clone ID: uC-osflm202112b09b1
tgttcattcgttcgcccacgcgtccgcccacgcgtgcggttcagcttcccgttcaggttcaggcaatcacgcctactctcctgtcctctcctctccttcttcactccactccaacgccccacgccctcccccgctttataagggggagctccacatcaccacccttgccacaccatcgggggagccaccgcatctttcctcctctttccctggagccatttcctcccctaaagggcctttccttttcttgatctctcttttatcttcgatccatccatccatccggccatccttcctaggtgaatatcaacgatgcagttcaacagtgtgtttcccttagaggggtaagcatgcctgagcccaataaggag

SEQ ID NO: 25270 - DNA, 385 bp, Oryza sativa
  Clone ID: uC-osflm202112b10b1
tattttgaatctctagcttacacactagtttttgttctacgggggcgtctaccttggcaaggttatcagggtgaaaacaagggtttccttgtgtgcaaaaagaaaatggctacgtctccagaatcattgagctgcttttgcccacaaccctttagggagtttgtagagtatgtggtcaacttgaagattgatgaacatcctaacatatgcaaagtgtatattccttttcgatactgcggtgggcccaaatgcccatatcaggccaattaacaccgatggtgctcagaagcttatacatctagttggccaaaagagaggtcgcttattgattggaagagacagatgaacatccaaagaagaagatcaggatggttcttcctgcaac

SEQ ID NO: 25271 - DNA, 317 bp, Oryza sativa
  Clone ID: uC-osflm202112b11b1
ttaattttgttttaaaaaattatatcaattcatattggaagtttttaaatcaatatttagattaatcacgtattaataggtaacattgttttcaggcggctcccgaactcagccgaaaggatcagcagatgaagcatgtggggcatgagctcccgtacttaaacccaacaaacaaaccgaggataggaggagatgcaaatcaaaatctcaaagccagcgaggcgcattgctgtcagtgtgagtgacactagctcttggtggtggagacagcgcacgagaggaggggagtctgcctgtgagacagcgagttgacttgg

SEQ ID NO: 25272 - DNA, 343 bp, Oryza sativa
  Clone ID: uC-osflm202112b12b1
tccgtttccttcctccattcctccgccgctagaaccggctagaagctctcctcctcctgccatggcggcgacgatcgtgtccgtcaaggcgcgccagatcttcgacagcaggggcaaccccaccgtcgaggtcgatgtgtgctgctcagatggaacctttgcaagggctgcagttcccagtggtgcatcaactggtgtctatgaagctctcgaattgagggacggtggatctgattacttgggaaagggtgtttccaaggctgtcgacaatgtgaactcggttattgccccagctctgattggcaaggaccctacgtcacaggctgagcttgataacttcatg

SEQ ID NO: 25273 - DNA, 282 bp, Oryza sativa
  Clone ID: uC-osflm202112c04b1
atcagttacaccgttgcgcaaagaaaaacacaacaaagcactatatagagttctggaaacaagttcctccgagtgaaccctatcgtgtaatactgagcaatgtcagagataagttgtacaatacacgcgagcgagcacgccatttattagccagtggattttctgaaattcctgacgaagcaacattcactgatgttgagcagtccttggagcctcttgagctcttgtacaggtatctctgtgcctgtggtgataattctattgcagatatgcaatctttat

SEQ ID NO: 25274 - DNA, 189 bp, Oryza sativa
  Clone ID: uC-osflm202112c09b1
tttttcttcctcccctctctaagccggggaagctaagccatggcgtccgtcaccgcccgcaccccggtcgcagccctccgctcgtcggcgtcgctcaagtctaccttcctagggcaatcctccacccgcctcgcccgcgcaccgactacgaggcgtaatgttcgggcggaggccatgggagagtgatta

SEQ ID NO: 25275 - DNA, 252 bp, Oryza sativa
  Clone ID: uC-osflm202112c10b1
tgtgttgtacggccgctgccgccttctggaacattcgcttgcctccgccaaaaaaaaaaaaaaaaaatccctcctcccctctcccctcgagtggggcgcagccgcctcgctcgtcttccttcctcctccaccgccgcgcgtgcgcgagtgcgcagccgccatcgccgtgcgcttctctgcctcccgatctgcggtgcgaccggtgtgatcgcggagcggcggccgaccagaaggatttctttgagggagggg

SEQ ID NO: 25276 - DNA, 176 bp, Oryza sativa
  Clone ID: uC-osflm202112c11b1
tcgattgcgggcggcggggggctcaaccggtcgtcgtggagggggcagctgccgccgcaggagcttctcgacgatctctgcagccgcttcgtgctcaacgtgcccaaggaggatttggagtctatttagcggatcacttttttgctttaatactaccctttatcacatccaattac

SEQ ID NO: 25277 - DNA, 417 bp, Oryza sativa
  Clone ID: uC-osflm202112d02b1
gaatttaattttcctccttttccccgtcttcccatcgctcgccggcgaccgacatgaactccggcgagcctactgcctcggcctccctcggcaatgccggagaggaggaggaggaggacgacttctactgggacgcccaggcggaggccgatctgcaagccatcgaggccgcctacgccgccgccaagcgccgccgactgcccgactgggcaagccccaacccggtcaccgcatccgcatacgcatacgcatccgggggttgatcccccgcgccgacatgggctccctctcctgccgctttccgaggtaatgtgaaggcaaggtaccaaccaagaatgttcaatggcagcatactgtactgcaggaccccttcagaagtggagaaagccaccagggacattttatgcaaaattgaaa

SEQ ID NO: 25278 - DNA, 373 bp, Oryza sativa
  Clone ID: uC-osflm202112d03b1
gacctctctttttatgagctcttctagtttgagtgagagagcaacagaaagacgtagtgcaagatgcctatccgcaccatctccatggagagccaccaggaggtgtaccacccgggtgcactcaaggaggagttggacgagttcatgtacaccctcatcttcttcttacccggccaggtcttccggatggccttcagcaagctgaccggctgaggagcgacgacccccgcccgtctgatcgaggaggaggttgtccacgccttcgccctgttcgaggcggtgctcgtcggggccaacatattcggcggccacgtgaacccggtcgtgaccttgagcgccttcatcatgcgcaacatctccctgttccagggtc

SEQ ID NO: 25279 - DNA, 460 bp, Oryza sativa
  Clone ID: uC-osflm202112d05b1
cggttttcgtgggctgtggcaaaagcgatgactgattgcctggtctaccactggagacatgcgaggttatggacgacgcgagatgcgatgatctgactatcatgggtaagaacaaccttccattcatggggaaaaacgtagaagctgggaccagcaataatattgtgaggcgcaaagaactagagaatggcgcgagggagattaaatgggaactacctacccttagtgtcggggacatgggaaggatacccttcctaactagatctgaaagtgcactggagtctcgcagagatgaatattaggacccaactacagaaagcacgagcagtgaatcactttctgaggcatgcctcaacatgagctcgggaacttgctagtcatggaaacaatgtggaggctgctgcaactgcggagagaccgatgctatcaccaacatcaggattatctgaaggaggagagc

SEQ ID NO: 25280 - DNA, 448 bp, Oryza sativa
  Clone ID: uC-osflm202112d06b1
cagccttataccctagctccgtctgccacctcccttgtctgttctagggtttttgcgtcggcgtcgtctccggcggcgattccgatggagttctggggtctggaagtcaagcctggacagactgtcaaatgttagcctgaagatgaacgcttgttgcacctttctgaggctgctcttggggaatcaaagaaaggatctgacaatgctaggatgtatgttacaaactgatgatcaaacgctagtcattggaaccctctcagctgacaagttccctcagatccagtttgatttggtctttgacaaagagtttgtgctgtcacacacttcaaagactgctagtgtgttctttcttggctacaaagtttcccacaccgctgaggaagatgaaatggattatgattctgaagaagctgaacatgaagatgatgaagataagatcattccagct

SEQ ID NO: 25281 - DNA, 428 bp, Oryza sativa
  Clone ID: uC-osflm202112d07b1
tggttattgtacgttgccaacgattgaaggaaatgctcatcatagctgttaacaatcagctagataatgttatatggcttgtgttgttatagccacgttaacttgatcaatattgtcactctaaatcttctgtaaactcttaagatatattccatcaagtactcccttcgtcccaaaatataactttgaacaatgcataattcatcccaagatataacatctaacattcaaaacttatctcaaatataacagcttggcttacattctcttatcaaccaatcacaaccttgcactattcaaattctacacctatttactcttaaccgaccacaactttgccccattatacccatgtacaaccctaaaactccttatattttgggacagagatagtaagtcttttccatagctgcatttgatcatagaca

SEQ ID NO: 25282 - DNA, 342 bp, Oryza sativa
  Clone ID: uC-osflm202112d08b1
tctgtttctctcattcaagcgagacgaagctctgcattcagacatttgcccgccagctcttcctgccgacgacgaagcggacgtggagcagccgcagctgaagcagtcagagggatggtggcatgtccaataacgggagctgcgcgaagcggacacatctcccggactgaggcgtctatcgtcgcgtctgctggggtagattaagagtcgtactcgaacgacgcgctgattgctaggtcgacaccggggtcggtgctcgctgcggagatctcgcagtgtaagctggaggccgcgctcctggggctggagcacagagagcccaacgacaaggagctggacacc

SEQ ID NO: 25283 - DNA, 482 bp, Oryza sativa
  Clone ID: uC-osflm202112d09b1
cgcctatcaccaccacggcttgcagctctggccgtagcagcagcagcgcgcgcgcgggtgcctgtgcccgccgctgctcacggctactcgccgccggctagtgcctccgatacgggagctccccacggtgcggcgccccgacggtgtgcgagggggtctggaaaccggcggatctcgggcgctcgccgtcggagaccggcacgggtggaggagtaccgcgacccgcttttttcttagcgaattggtttcctctgctctgaggctgagcctaattatactgccattgtagctccccaagcgccgtgaattggtaagacttttgtgggaggcgcttgattctgctctactcacaacaagtttctaaagactacgaagcaattgattgtgaagtatttctttcaagacggcttgacatccaagtagctgactgggtgcagcatatgctattcttaacgatgggcgaatgatgcaccccacaatgt

SEQ ID NO: 25284 - DNA, 486 bp, Oryza sativa
  unsure (1)..(486): unsure at all n locations
  Clone ID: uC-osflm202112d10b1
tttcttttccagcttgctgagaagaagcgcgcgagccagcaatctcgggcggcggctgcggcgaggaggaggaagtttccggagaggagggagatggagagcgacacggaggcagcgaacaagaatactcccgttgctctggcgcccataagaaatccgctcgccggctagaagctctgggagcgaaccctcaagctggtacgacgagcgtctgaggccaaatgcttgaagctaggagttaaggaggtcatgaagagcatccgccgcaggcagaaaggattgtgcatcattgttggcaacatttctaccattgatgtgataacacatgttcccatcctttgggaagaaaccaacattacttatgtatatgttccgtacgaagaggatctggacacagctgggactaccaagaggcctacctggtgagtattggttgtgaccaagccagancaggacgagcttgatgaagatgtcaaggagacactt

SEQ ID NO: 25285 - DNA, 384 bp, Oryza sativa
  Clone ID: uC-osflm202112d11b1
accacaccactccctccgcccctccggatgggtttctccgccgccacccccatggccaccaccaccaccacttcctgctcctcctacaattcccaaaaccctaaccccttcaacctaccgccatggctccgcagcctccgctgccccttcaccttcctctgcccgacctcaccggaggggcgcacccattctactacagggtgacccgcgcctcccccgctggacggggggtccacgatcactcggcggatgccaccggcgctgaggcggacccccgtcatccacagctatgacgtctcaacttcgcacagggggataggcgcctaccatggcggtgacggcagactgagaatgagggtccgatcccccagagggagcctgaga

SEQ ID NO: 25286 - DNA, 383 bp, Oryza sativa
  Clone ID: uC-osflm202112d12b1
tttgctgcatccttctatgcgacgagctcgacgaaaggtctacaaggaagctccgcgacatgccgctgccgtggccgggcaagggcgcttggaggatgtacctcaatggagatgtggccttttgtgaggacatcggcatcaggcaacacaaggattccatctagtatctggagatggagatcgtttcaccaagaacggtgaccaccaacatacccaccttcacctctgcagatcctacttcataccttgaatgggatcgtcgcatcagagaacctcaggcgacacgggtacgctccgagttccaccctggctcgtggagaatcactacatggagcatgcctatcccggtcactttattggacgactggcgccgagactgcact

SEQ ID NO: 25287 - DNA, 220 bp, Oryza sativa
  Clone ID: uC-osflm202112e01b1
ttttgtttatctacgggcggcaaccacccgaagttgtggggtgattctcgaaatgtgtatgaataaacaccccaaattccaggcagtaattttttcggagtgaaagataccaccaccaccagcagcttaaagcaagcccatggccaagtcgacgcccgctgcggcagcaggagtcgccgaagagggtatccttggctttcttcctccatttcatgcgccg

SEQ ID NO: 25288 - DNA, 269 bp, Oryza sativa
  Clone ID: uC-osflm202112e02b1
cagttgtgttttgcgatgataccgcctcctcagcgggcgcgctgggttaccacaaggcaatagcaaacccgaagctcaccgacaccacagacaagatggggcgaaaaccataccgatccgtggatctgagagggagctcacgcgcacgggaaggacattttgcggagctgtggctgacaccagaacgatgcccggggggaagcacaatggctccaagacggaccaggcccccgaacaggacagagagggcagccgggacccacacgcta

SEQ ID NO: 25289 - DNA, 553 bp, Oryza sativa
  Clone ID: uC-osflm202112e05b1
cggtctcgtgggcggacgcgtgggcgggcactgagctcttctactacttcgttgaatcggagaggagcccaagtacaggccctgtgatcctctggttgacaggcgggcctggctgctccggattcagcggtgtcgtctttgaagtaggacctatgaaatacgtgttggagccttataatggtagtttgccacgattggtttataatcagtattcatggacacagatggcaagcatcctcttcttggacactcctgttggttctggtttctcatacgctcatgatcctaaaggttataatgtcggggacatatcatcgtctttgcaagtcgtaacatttctgaagaagtggttcaatgatcacccacgctatctctcaaatcatttctatgttggaggaagctcatacgctggaaaggggattccaattatcatgaagttcatttcagaaggaattgaacaaaggcagcagccattggttaatcttaagttacaggggtatatagttggcaaccccattacaggctcgaagattgatgataatttcaaattcca

SEQ ID NO: 25290 - DNA, 458 bp, Oryza sativa
  Clone ID: uC-osflm202112e08b1
tttgtcttcctctccaagtccatccccttccccgatctaagatccatccgatccaggccatggcggcgaccatccagagcgtgaaggcccgccagatcttcgacagccgtggcaaccccaccgtcgaggttgatatttgctgctcggatggaacatttgcgagggctgctgtgcctagcggtgcatctactggtgtatatgaagctttggaattgagggatggtggctctgattacttgggaaagggtgtcctcaaggctgttgacaatgtgaactctattattggaccagcattgattggcaaggaccctacagaacagactgtcattgacaacttcatggttcagcaactggatggaaccaaaaacgagtggggctggtgcaagcaaaagcttggtgctaatgctatcctggctgtctcacttgctctatgcaaagccggagctattatcaagaaa

SEQ ID NO: 25291 - DNA, 513 bp, Oryza sativa
  Clone ID: uC-osflm202112e12b1
ttaagttattcattatatcttgtcatcatgattcatgagcgattttttaaatattctctcataagtatggataagtttgtaaaaatgcatggaagaaatattatagctatttttttgtcaggaatgaggcagatggttctgtgtttcttcttcgttcgcacttcaaatatgatcttaatatttcttcatttttttctctcttcaaagatgtttgtagcattcgtgtggcagaatcttatttatcatctagttagaaacttagaatagtgaacctaagtggtacagtatcccgttagaagttaattcacacaaatgcatatgaactgctttgcgaataatggaattcttcctgttcatgcttatgttatacatcatgacatcttttctgtttcaaacaaactatggatagtttgtaattttggttctgctttttttcttggtttcatgtaaacgtaacacaagggttaacattgttttggttgtctgtgatctttgtgactatattaacatcat

SEQ ID NO: 25292 - DNA, 352 bp, Oryza sativa
  Clone ID: uC-osflm202112f01b1
tcaatgccagagccttcccgtcgccgcccgtcctccgcactccagcggcagcggcagcggcagcggcggctcgcatcgcggcgccagcggcggagggagcggaggaggtggtggtggtggaggtgattctaacaaccttaaagatgcacatatatactcagagcatgttctctacgtactgctgtctctagagggtatcgttggacaagttttttgagctatattttaaggcgttttatgagatacgagagctcgaaaatttcttcagggaagagaccccgatgaggtagataggtcctgtgccgatttcaataatcttgtccatgatggtggcaaagaactgaccaaactt

SEQ ID NO: 25293 - DNA, 470 bp, Oryza sativa
  Clone ID: uC-osflm202112f04b1
ctcctttgtttcctctcgcccccactccgccgccgccgccgcctcgcctcccgcgggatcgcgccatggcattgaacgcccccgtcctcgtgctgaaggactcgctgaagcgggagtccggcacgaaggttcaccatgccaacatccaggccgccaaggctgtggcagacatcatccgtactacactcggtcctcggtccatgttgaagatgcttctggatgcttctggaggtattgtggtcactaatgatggcaatgctatattgcgagaaatagatattgcacatcctgctgccaagtctatgattgagctaagccgtacacaagatgaagaaggtggtgatggcacaacatctgtcattgttttagctggtgagatgctccatgttgcagaagcattcattgataagcactaccacccaactgttatttgccgagcatacaccaaagctcttgaggatgctttagct

SEQ ID NO: 25294 - DNA, 502 bp, Oryza sativa
  unsure (1)..(502): unsure at all n locations
  Clone ID: uC-osflm202112f06b1
attcctcctcttcctcatttcctcccaccgaaaaaaagctggggtttggagctgtgcgccgctgctcgtcgccgcccccatcctccgtcgcggggcgtcggcacgggctccctcctttccgtcggctggccgccaagaaaatctagggtttgggctgtgcgaggcagcgccggggaagcagggaagcggcgaggcggcaggcaggccggcaggggcaaggccagatccgccgcgcgcagcggcctcgacgggccggtggcaacgagggctcgctggctcgtcagatccagtgccccttttctccctccctccccctcctcgatttggtttgctgggggtgctcgccaaaagcttcgggattggagtatgattttgaggatctgaataaaagaagtcagtaaaatcatttgtctctcacgatggagaagatacaatctgattgcccttatcctggatgtttcttctgtgttatgaaagaggcanaccctagtaaacgaagagc

SEQ ID NO: 25295 - DNA, 349 bp, Oryza sativa
  Clone ID: uC-osflm202112f07b1
cacccgtccgcgcttagggccccgctcgcgggccgtacctctaccgctccttcgtcgccgcgggcggcgcgttgccagccttcgccggcacgctcaacgccgacacccacaggcttgaggtatctgctgccctgaccgaaacttaccacgcgacctctggtgggccgtactcgtggggctactgctacaaggaggtgaagggcgcgacgtcagacttctgcgtgccgaacgctcgctggccgtgcgcgcccggcaaggcgtaccacgcccgcggacccatgcaaatcgcatacaactacaactatggggcggccggcgaggcgatcggcgcggacctgctgggcaaccc

SEQ ID NO: 25296 - DNA, 400 bp, Oryza sativa
  Clone ID: uC-osflm202112f08b1
tggatctctctactgttatgatccaagtccaagctccactgaactgaagatggcatgtccagaatctgagtttccttttagcacacatactttcattgaaagcatagctcctctgcgcaaagattacttcatcaagcagatacagtgataatggtgttcatcacttgttttccagatgttccgcagttcacagaattacaaaattgtgcccctttttccttttccgttgatgaattttagctggtcaatgacttagagtggcctattttaccgtgaattgtaattagctaaaataaatgcagtattgaaacctccttacagcacatgcttgtctgacttctaattgatgtgcttgtttctaacttcctattatgatgctaaattgatatgacgagttgag

SEQ ID NO: 25297 - DNA, 317 bp, Oryza sativa
  Clone ID: uC-osflm202112f10b1
gaagctcagggccgccacagccctggtggcctataccattcccgaagccgccgtgtccccccggcgccgacgggtcgtcgtcggcggtcgacgacaagaacaactgatcacacatcatacctaaattatacatatgattaatttgagatcaaagaatttacagagtaaatacagccagggcgacgtctcattgctgcaaattaactattgtatagatggcatatgcacggtaattgtcaagtgatctatctgtaaacctggcatatcagcatatgcatgcctactcctatggatgaattctatacgtactttcgttc

SEQ ID NO: 25298 - DNA, 315 bp, Oryza sativa
  Clone ID: uC-osflm202112f11b1
ttccttactggccgtcgaagccaacccggcgattccggaaaaatccatgggcggcggcggcgatctcagcccctccagcgccccctcctccccgtcgtcgtcatcggagccccttccccatgagtttgccgaatacgcggccgtatccccggcaatcgatggcgagtccgacgggtgctgcgtctgcgatgaccccgagggggaggccttcctccatggcggccgactccaggatcggtctctgcgggaggcgaaagaactcatcaggaggtataaacctggggacttggttgaaggagtgtgtggcacaaaatc

SEQ ID NO: 25299 - DNA, 399 bp, Oryza sativa
  Clone ID: uC-osflm202112f12b1
gcgatgggatgctcacggaagatgaggtcaaggagggtattatactgagtgcgtcggcgaacaagctggcgaagctgaagggacacgcggcgacgtacgcgtcgctgatcatggaggagctggacccggacgaccgcgggtacatcgagatctggcagctggagacgctgctgcgcggcatggtgagcgcgcaggcggcgccggagaagatgaagcggacgacgtcgagcctcgcgaggacgatgatcccgtcgcggtaccggagcccgctgaagcggcacgtgtccaggacggtggacttcgtgcacgagaactggaagcggatctggctcgtcgcgctgtggctcgccgtcaacgtcggcctcttcgctacaagttcgagcagtacgagcggcgcgc

SEQ ID NO: 25300 - DNA, 118 bp, Oryza sativa
  Clone ID: uC-osflm202112g01b1
gtgaaaggtgtgctagcagaatagcaactccccccttgaatatcgtctaagcctgatattgtacagataagtgcatctgcatagaatgttctaatctgtcatcaaatttgggtgatgc

SEQ ID NO: 25301 - DNA, 452 bp, Oryza sativa
  Clone ID: uC-osflm202112g02b1
ggagtagattaacattaagaaggggggagaagtggaggaggaggtggcgcgcaagggagaggagaggaaggaggaagaggtggtggtggaggagaagagccatcagcagcagcagcagcaaggggaggaggagctcgtcggcctctcgctcgccggcggcaggcccaaagtatttccaatgtcgagccctccacctaatccttcgcaacttacaattttctatggtggatcagtatgtgtttatgactcagtgccgccagagaaggctcaagcaatcatgcttattgccgcagcagctgctgcagcggcgtctgccaccaaaagcaatgctgccattgctgttaagccccctgtgatgcctgcagccaatgctacccaagcagcagtctctcctgtgctcacaagatcgctctcattgcagagcacttctgtagcaactggacaacctcaag

SEQ ID NO: 25302 - DNA, 537 bp, Oryza sativa
  Clone ID: uC-osflm202112g03b1
cgcactcgttgtccatgggacgccgcgcgcgcgctctcctccacgcgccggcgccgctcctgctgctgctggcactggccgccgcggcggcggcggtcgccgtggcgtcgggcccgcccttctcctgcggcgcgccgtccagcgcggcgttctgcaacccgaggctgcccatcgagcagcgcgcggacgacctcgtgtcgaggctgacgctggaggagaagatctcgcagctcggggaccagtcgccggccgtcgaccggctcggcgtcccggcgtacaagtggtggtcggaggcgctccacggcgtctccaacgccggccgcggcatccacctcgacggcccgctccgcgccgtcaccagcttcccgcaggtcatcctcaccgccgcgtcattcaacccgcacctctggtaccgtatcggccaggtgatcggcacggaggcgagggcggtgtacaacaacgggcaggcggaagggctcacgttctgggcgcccaacatcaacgtgttcagggacccgaggtggggccgcgggcagg

SEQ ID NO: 25303 - DNA, 509 bp, Oryza sativa
  Clone ID: uC-osflm202112g04b1
cttttctattaaggactggtatgatatcaaggccccgtcggtgttcaatgtgcggaacatcggcaagaccctcgtgtccaggacacagggtacaaaggtatgagcaccgcttccttgttcttggccgttgtataattctctgttgtgtttgcgctaagtgtttgctgcctaacccttcctgtgaacgaagggatctatacgaccttgacattgtcaactcgccatgtgatggattttgcaaattttgtaactttgctatgtgtgtgtgtgcactgcgtatggtaggattgatctatatgctgtactaagggctaagatagcatgggaaatatatgatgtattattagcatgttagttccatttttgttcctgatgagaggttacagatgctggtttggatgagcttagttattccgaatagatttgtcttctggtttagcttgtctagttgtacctcccaattgtttatttcatcaaacgtcaaacagcgtggttcaattgttgagagc

SEQ ID NO: 25304 - DNA, 478 bp, Oryza sativa
  Clone ID: uC-osflm202112g08b1
ttcagttgctggtggagatggagatcccggaggtgtacatcgagtcgctgcccaagaagggcaagaccagcctcggcgacgccatctaccggagcatcaccgacgaggagttcgacccgatcgagttcctggaaggcgtggacctgtccacggagcacaaggtgctcgacctcaagaaccgcatcgaggcgtccaccatcatctggaagcgcaagatgcagaccaagcaggaggccaagtcgtcgtggggctccatcatcagcttcgagaagcgcgagcagttcgaggagcgcgccgagaccatcctccacctcctcaagctccagttccccggcacccctcagtcccagctcgacatctccaagatccaatacaaccgggacgtggggtacgcgatactggagagctactcgagggtgctggagagcctggcgtacagcgtgatgtcgaggatcgaggacctgctgggggctgacgc

SEQ ID NO: 25305 - DNA, 195 bp, Oryza sativa
  Clone ID: uC-osflm202112g09b1
ttcaatgccagagccttcccgtcgccgcccgtcctccgcactccagcggcagcggcagcggcagcggcggctcgcatcgcggcgccagcggcggagggagcggaggaggtggtggtggtggaggtggtggtaactctcttcggggtgggcctactcacgcatgcgctttgagcaccgaccagccgaccctgtgta

SEQ ID NO: 25306 - DNA, 477 bp, Oryza sativa
  Clone ID: uC-osflm202112g10b1
tctccttctccacgccgatccgtctctcctcgtcaccgccgtgcagagatcgaaacctatcaaccatggcgaactcagcgtcggggatggccgtgggcgacgagtgcaagctcaagttccaggagctcaagtcgaagaggagcttccgcttcatcacgttcaagatcgacgagcggacgcagcaggtggtcgtggacaggctgggccagccgggcgacacctacgacgacttcaccgcctccatgcccgccagcgagtgccgctacgccgtcttcgacttcgacttcgtcaccgacgagaactgccagaagaagcaagatcttcttcatcttctggtcggcggacacgtcgaaggtgaggagcaagatgctgtacgcgagctccaaggaccggttcaagaaggagctggacgggatccaggtggagctgcaggcgaccgatcccagcgagatgagcatggacatcgtcaaagcgaga

SEQ ID NO: 25307 - DNA, 463 bp, Oryza sativa
  Clone ID: uC-osflm202112g11b1
ttccgttcacgggcggatcgggaagcaccggaagcacgcgggagggcgcgggaacgccggcgggatgcaccaccaccgcatcctgttcgacaagtaccacccgggctacttcggcaaggtcgggatgcgctacttccacaggctcagcaacaggttccactgccccgccgtcaacgtcgagcgcctctggtccatggtgcccgccgaggccggcgccggcgccggcaaggcccccgtcatcgacgtcacgcagttcggctacaccaaggtgctcggcaaggggatgctccccccagagaggcccatcgtcgtcaaggccaagctcatctccaaggtcgccgagaagaagatcaaggccgccggcggcgccgtcctcctcaccgcctaggttataccattgtatttgggatcaacactagattagcatcacaaatctacaatggttcgaggaaatgtggatatt

SEQ ID NO: 25308 - DNA, 393 bp, Oryza sativa
  Clone ID: uC-osflm202112h01b1
ggtttgcgttcggcggcggcggggatgtcgacgccggcgaggaagcttctgatgcgggacttcaagcggctgcagcaggacccccccgcggggatcagcggtgcgccgcacgacaacaacataatgctctggaacgccggcatcttcgggccggatgatacgccgtgggacggaggcacgttcaagcttaccttgcagtttacagaagattatcccaacaagccgccgactgttcggtttgtttctaggatgttccacccaaatatttatgcagatggaagcatctgcttggatattctacagaaccagtggagccctatatatgatgttgctggcatattgacttcaaatcattctttgctgtgtgatccaaaccccaacttttcagcaaac

SEQ ID NO: 25309 - DNA, 333 bp, Oryza sativa
  Clone ID: uC-osflm202112h02b1
agagtggccgtcgacgccttgggtgcaggggtgcttgtaacaataatcctcgacctgtggcgcatattcttggggccaattgtacccatgcctgaatcaagacgctgctgccaaccggggcttgcatggttccaggtgcagaacgagagcgtctaacccagcaatgccgcgaattcgtcagctaaccatcatcagctacgcctaccattctccagccagtcctaccctctactggaagttctagtgtggcgtcagcatgtgcgcctcttgctgacagctcgatttgattctagtatgccatgtcccatgggtaacaactagcaaggatgctga

SEQ ID NO: 25310 - DNA, 306 bp, Oryza sativa
  Clone ID: uC-osflm202112h03b1
atcatgtcttcttaaggcgtcgtgggcggcctacatcgagtgggtcggtccggccatggtgccggataagaaggaggagatgaaggaggaggtctagaaggacgccggcggctggtttctgcgacggctagaaggaaggaggtgacggctagaatgaggagggcggtgacggcaagaaggatggcgaatgcaataaggaaggtgacggttgctgcgacaagaatgatggctaggtcaagatggatggcgtcggcggttgcggcgactagaaggactgctacggtgactgctagaaggaatgctact

SEQ ID NO: 25311 - DNA, 508 bp, Oryza sativa
  Clone ID: uC-osflm202112h04b1
ggactttttacgagtccaccagccagcgaatgaaaggtttgctccgatgttgcacgggttggctttgcgtctgcccaagactcgcctcctctaagagttgaatctggggatttgactggcaaaagtgaaagcacgggggaacaagggccagccgcaacacccgcattatcctttgccagcatcatttcctccactagagcgtcagacaatagcctggacacgcacaaaccaaatgtagtcgggaagaaaggcaagaaacccaccaaagtgctcttgtccactggcggtggccgccgatactgaaggaagagtgacactggaatggaagcagttgccagttggctgtttcctataagcagtgtgtatagtgcataacctggacttcacatctgtaacactcccaagtcccaagtagcagctatttctcccatgtggtttgatctaaatcgcctgactgttttagaaggttgttactgtgtatctacatcctgacccatgctaagggagt

SEQ ID NO: 25312 - DNA, 556 bp, Oryza sativa
  Clone ID: uC-osflm202112h05b1
cttatgatataatttcttgtccctcaattgggaatggaacgaaggactctgtcagcaagcttgtgactgaattgaatgctgctacacttgaacctgatgttgatgttgtggttgcaccaccattcatttatattgatcaggttaagaactcactaactgatcgtattgaggtatctgctcacaatgtttggattggaaaaggaggagcatacactggagagatcagtgcggagcaattggtggacattggctgccaatgggttattcttgggcattcagagcgtagacatgtcattggtgaagatgatcagtttattgggaagaaggctgcatatgccttgagtcaaaatgtaaaggttattgcctgcataggggagctgttggaagagagagaagcagggaaaacttttgacgtctgttttaagcagatgaaggcttttgcagacagtattacaaactgggcggatgtagtaattgcatatgagcctgtttgggctattggaaccgtaaagttgctacttctgagcaagctcaggaagttatgctgctgtcgtga

SEQ ID NO: 25313 - DNA, 275 bp, Oryza sativa
  Clone ID: uC-osflm202112h06b1
ctcgtactctcaaccccaccctttctccccaccatggtggcgatctccgagctcgggtgagcggaagagaaagaatgcggccgatttgaggagggggatggggttttcgggtggatttgtgaggggatcgatcatgagtatggaccaggttgggaactcactaactgatcgtattgaggtctctgctcacaatgtttggattggaaaaggaggcgcatacactggagagatcagcgcggagcaattggaggacattggctgccaatgggttattc

SEQ ID NO: 25314 - DNA, 348 bp, Oryza sativa
  Clone ID: uC-osflm202112h07b1
tccgtacgatcctagttcaggtagatacaatggcgtgcacgggctctttcatgctcgccgtcttgctggcggtggccgtcgcggcggcgccggcgagggcggtgcgatgcccgccgagcgacaagcaggcgctgatgagagtgaagcagtcgctgggaaacccggcgacgctgtcgacgtggtccctggcgtctgcggactgctgcgagtgggaccacgtccggtgcgacgaggccgggcgcgtgaacaacgtcttcatcgacggcgccaacgacgtccggggccagatcccgtccgccgtggcggggctgacggcgctcatgtcactgtcgctgttccgcctcccgg

SEQ ID NO: 25315 - DNA, 421 bp, Oryza sativa
  Clone ID: uC-osflm202112h10b1
tgcgttggggaaggaggaggaaaggtgcacaaggtcagactaagtttgcgttgaagaacaaaggagaggaaaaatgtcgcctgctgaggcatcgagtgaggagaatgtgtacatggcaaagcttgccgagcaggctgagcgttacgaggaaatggtcgaattcatggagaaggtggcaaagaccactgatgttggtgagctcaccgctgaggagcggaacctgctttctgtggcttacaagaacgtgattggtgctcggagggcatcgtggaggatcatctcttctattgagcacaaggaggagagccgagggaatgaggcatatgttgcatcaattaaggagtaccgtagcaggattgaaactgagctcagcaagatctgcgatggtgtccttaagcttctggattcccaccttggccca

SEQ ID NO: 25316 - DNA, 552 bp, Oryza sativa
  unsure (1)..(552): unsure at all n locations
  Clone ID: uC-osflm202112h11b1
tgttttatcgccgccgccgccgcttctccactctccggtgcccccgtcgccgtcgccaccgccgccgccatgtccgggaggaagaagacacgggagcccaaggaggagaacgtcaccctcggcccgaccgtgcgcgagggcgagtacgtcttcggcgtcgcccacatcttcgcctccttcaacgacaccttcatccatgtcaccgatctgtccgggagggagacgctcgtccgcatcactggtggcatgaaggttaaagctgatcgcgacgaatcttccccttatgctgctatgcttgcttcacaggatgttgctcaaagatgcaaggagcttggaataactgctttgcatatcaagctccgtgctactggtggtaacaagacaaaaacccctggtcctggtgctcagtccgcacttagagcacttgctcgatctggcatgaagattggtcgtattgaggatgttactccagtgccgactgatagcacactcanaaagggtggtagaaggggtaggaggctgtattcttcatgcgggctcaaaccgacacac

SEQ ID NO: 25317 - DNA, 518 bp, Oryza sativa
  Clone ID: uC-osflm202112h12b1
ttgattctctccgagaggtgtcaggtcatccttcgattgcatcgacgggtatgacacgccggtggagggcatgaagatcaactggatgaaggccggaatcctggaagccgacagggtgctcaccgtgagcccgtactacgccgaggagctcatctccggcatcgccaggggatgcgagctcgacaacatcatgcggctcaccggcatcaccggcatcgtcaacggcatggacgtcagcgagtgggatcctagcaaggacaagtacatcaccgccaagtacgacgcaaccacggcaatcgaggcgaaggcgctgaacaaggaggcgttgcaggcggaggcgggtcttccggtcgacaggaaaatcccactgatcgcgttcatcggcaggctggaggaacagaagggccctgacgtcatggccgccgtcatcccggagctcatgcaggaggacgtccagatcgttcttcttggtactggaaaagagaagttcgagaagctgctcaagagcatggaggaga

SEQ ID NO: 25318 - DNA, 389 bp, Oryza sativa
  Clone ID: uC-osflm202113a01b1
cattctctcattgagagaactcgcatcccctgggtgaactgcctgaaggatgcaggcgtatctgcaaaagacattgatgaggttctactggttggtggtatgacgagggtgccaaaggttcaggatattgtttctcagatattcaacaagacaccaagcaagggtgtcaatcctgatgaggctgttgccatgggagctgccattcagggtggcatcttgagggttgatgtgaaggagctccttttgctggatgtcactcccctttcccttggtatagagactcttggaggcatcttcacaaggctaattaatcggaacacaaccatgccaaccaagaagaggcaggtcttctccactgctcgcagacaaccagaccgaggtggggaatc

SEQ ID NO: 25319 - DNA, 305 bp, Oryza sativa
  Clone ID: uC-osflm202113a03b1
cttagccagcgcgagagagagagagagggagaccaaaccccatcccggatctctcgtcgtcggcggcgtctgcgatggcgctctccgaccgctcccgcgagtcgctcctcccgagcttcctctacacctcctccgccgcgagggccttcgccaccggcgccacccgcttcccctccccggtgtgcccagcttccccggctccgggtgccgtcgggggcggaccgcccaaattgccccaagctcccggggagaagattgatatgtcctaggacttgcattacgcacccagggctgtgccatccgag

SEQ ID NO: 25320 - DNA, 252 bp, Oryza sativa
  Clone ID: uC-osflm202113a06b1
cttactcttgggcgagggcccccgcgccccgcggggggccatatcgggagcccgcgttcctgacggtcacaccgacgacgatgccccggccgcgaacgaggaaggcgcagatgatgaccaaggaggagaatggacatggcaactggaggcatcagtgaagacccgcatggagaaaacggtatcctttatttttaaaccatgttgagatacatttgtccacgagggctcctaaatacaactccgtaatggcca

SEQ ID NO: 25321 - DNA, 218 bp, Oryza sativa
  Clone ID: uC-osflm202113a09b1
ttcgttgaatccccaaattccaacaagaacgcgtgggatttcgatccaccaatctaacacaacatccaatatccagtggccgattcaggcagcgacgccccgatcagcaaccggcccgaggaggaggtgacggtggagaagacgcctgagatggtggcggcggcggatgaagagaggctgtggcttctggtgttcatgcatcaggcagcggaggaggc

SEQ ID NO: 25322 - DNA, 164 bp, Oryza sativa
  Clone ID: uC-osflm202113a10b1
atcatccctgaacttgtgggactacattcacatggggatctacacagtcaggatacaaattaccttgtgacagcatgtgatgaggaatcaattcgcctatatgacattcaaaatgctgtgtgttcaaagactattaatggcaacagatatggggttgggctcgc

SEQ ID NO: 25323 - DNA, 241 bp, Oryza sativa
  Clone ID: uC-osflm202113a11b1
tcgtccgaaacctcgagaccctagatcgccgtgtggcctactccgccgccgccgccttttaccgtgacagggaggacgcggcgccgacgtcgtccggccccgggggaggcggcgccatggcggcgtacgacccgagctacgtgccggactcggtgaagacgttcgtgtcgaacctataccgccacattcgtgacacgaacgtgtactagtctcaccagatgtcctagggcggacttacccg

SEQ ID NO: 25324 - DNA, 518 bp, Oryza sativa
  Clone ID: uC-osflm202113b03b1
cctcaaatcgcgaaattttcttttcccccaaaagaccgaataaagagaaatctctccgagcgaattcgacgagatcggaggctcggatcgaggtattctccttctgatttgattggattcgggatctgctggcggggatccatctttaggtaggatttcataattttatggactttgattgcaaaacagcaagaggagactcttcatctgtgaatcgttcatgcattgtcactgaaggcactgtcgtccaggcaaagcccgtttctcacaacgggaaagctaaacactggaatagcctcagtacattgaataaccagaagtgcagttatgaattactttccgacccaaagaaaaatgttgaaacaagtgatggtgagaccgcctcaaagtgtgactcatggtgcttcactgatttgccatccgcattggtctgtgaagtgcttgaacacctcgatccaaggaacttggcattgtatcttgcgtctccaccctactgcataccctagccacagatcatc

SEQ ID NO: 25325 - DNA, 517 bp, Oryza sativa
  Clone ID: uC-osflm202113b05b1
gacccctcgtgatggacacccgcctccccctcctcctcctcctcgccggcgtcgtcgccgccgcggcgccactgctcgccaccgcccagctctccgccgacttctactcctccacctgccccaacgtcgagaaggtcgtctccaccgtcatcgagcgcaagttcaaggaggaccctaccacctccgccctcctcctccgcctcctcttccacgactgcttcgccaatggatgcgacgcgtcgatcttgatcgaccccgctgtcgaaccagagcgcgtagaaggaggcggggccgaacatctcggtgaagggctacgacatcatcgacgagatcaagacggagctggagaaggagtgcccgcaggtggttgtcgtgcgcggacatcgtggcgctcagcacgcgcgacagcgtgcgcctcgccgggggccccactataacgtgcccaccggccggcgcgactacgttgtattcaaccgcgaggaaggcgactcgctcccggcccggacatcgccgtccc

SEQ ID NO: 25326 - DNA, 176 bp, Oryza sativa
  Clone ID: uC-osflm202113b06b1
gcttccttgatgttcagcacatcaaaccatgcgtaaaccaagactgttttaaattattactgttttctactagtattatatatgcatgggcagttggcactgctatcaaattcagatctcatagctagcttaattgagcagtttggcacatatattctcccaaattttcagcctct

SEQ ID NO: 25327 - DNA, 491 bp, Oryza sativa
  Clone ID: uC-osflm202113b08b1
tcgttaaaatttctccccaatctcgcgaggggctcgttgtcgaatcgaatcctctcgcgtcctcaagatgcagatctttgtgaagacattgaccggcaagactatcaccctcgaggtggagtcctctgacaccatcgataatgtcaaggctgagatccaagataaggagggcatccccccggaccagcagcgtctgatcttcgctggcaagcagctggaggatggcaggacccttgctgactacaacatccagaaggagtcgacccttcaccttgtcctccgcctccgtggtggcatgcagatctttgtcaagactctgaccggcaagactatcacccttgaggtggagtcttctgacaccatcgacgacgttaaggccaagatccaggacaaagagggcatcctcccagaccagcagcgtctcatcttctccggcaagcatctggaggatggcacgacccttgctgactacaacattcagaaggagtcca

SEQ ID NO: 25328 - DNA, 400 bp, Oryza sativa
  Clone ID: uC-osflm202113b09b1
tcgtcacgcgtccgcccacgcgtccgcccacgcgtccggttcagcttcccgttcaggttcaggcaatcacgcctcctctcctctcctctcctctccttcttcactccactccaacgccccacgccctcccccgctttataagggggagctccacatcaccacccttcccacaccatcgcggcagccaccgcatctttcctcctctttccctggagccatttcctcccctaaagggcctttccttttcttgatctctcttctatcttcgatccatccatccatccggccatccttcctaggtgaatttcaacgatgcagttcagcagtgtgtttcccttagagggtaaagcatgcgtgagcccaataaggagaggtgttgagggctcagctagtgatagat

SEQ ID NO: 25329 - DNA, 472 bp, Oryza sativa
  Clone ID: uC-osflm202113b10b1
tcgtttgagaagccacaccggcggacgaagaatagggcagatagaaatggcggcggagacgttcctcttcacctccgagtccgtgaacgagggtcacccggacaagctgtgcgaccaggtgtcggacgcggtgctcgacgcgtgcctcgcccaggaccccgacagcaaggtggcgtgcgagacgtgcaccaagaccaacatggtgatggtgttcggcgagatcaccaccaaggccaccgtcgactacgagaagatcgtccgcgacacctgccgcggcatcggcttcgtgtcgaacgacgtcggcatcgacgccgaccgctgcaaggtgctcgtcaacatcgagcagcagtcgcccgacatcgcgcatgggggtgcacggccacttcaccaagcgctccgaggagatcggtgccggcgaccagggccacatgtttcggattcgcccccgacgagacccccgagctgatgcccc

SEQ ID NO: 25330 - DNA, 380 bp, Oryza sativa
  Clone ID: uC-osflm202113b11b1
ttgctgttgatggtcatctctctcagctatgacagctcactgcatcaatggccgcggccaccatggcgctctcctccccggtgatggcccgcgcggcgcctgctacctcctccgcgctcttcggcgaggcgcggatcaccatgcgcaagaccgtcgcgaagcccaagccggcggtgtcgtcggggagcccgtggtacggcgccgaccgcgtcctctacctaggaccgctctctcggcgagccgccgagctacctcaccgacgagttcccgggcgactactgagtgggactccgtggcgctctctgtccacccgcagacctgggacaacaacggggagacgcaggtgaatcgccttggagcacatacccttttcgccagct

SEQ ID NO: 25331 - DNA, 521 bp, Oryza sativa
  unsure (1)..(521): unsure at all n locations
  Clone ID: uC-osflm202113b12b1
tcggtattcaggggagagggtacgtgcaggagccagggtccaacaaagcgatacctccttctcctcctcctcctgatcctcgtcatcagattcgccgcacgcgcacgatgcaggaagaattcgattggccaaccttagtgtgatcaacatcaccagaaacagaaaatgttacctccagctctgtgagaagcacaaccaagaatgacgtggttattcagcaaggttccatctcttcatactggccatgggatgtcatgaaacttgaaaacgacacccattttctgtctcattcttcaggagatgggatgaaatgcacanaggctgaccatttttctatctcatgcaaccaggggttcattgaacttggattatcaagaacaaccttcaaagtccaattttgctactgaccttggatcacatgcatattctagggaagccaggacacttggaagagtatatcatgggcagcagccttacttttccncttcaagctgttctggggaaaaatcttctgcattaaa

SEQ ID NO: 25332 - DNA, 149 bp, Oryza sativa
  Clone ID: uC-osflm202113c02b1
tttggtgtttgctcgcgactcctccccactagggggagctcatttccacagcgggaccccggctaatggcctacagcattggctctcgccatctacatcgatgcaacacgactgtaggtctcatcaggagttaatcacatggcatgaac

SEQ ID NO: 25333 - DNA, 267 bp, Oryza sativa
  Clone ID: uC-osflm202113c04b1
ctccttcccagctccaaccatttctcccgtcctcctcctcctccgccccgacctcgctggcccgcccgcccgcctccgcctccgccaatggcgacctccacgcgggcgttgctcctcctccccctcctcctgctcttcctcctctcccgctccctctccctccgcgccgatcccggcgccgccgtgtccaggatcgccttcggctcctgcgccaaccagagcgcgccccagaccgtgtgggaggccgtactcaggcccgacccgacg

SEQ ID NO: 25334 - DNA, 182 bp, Oryza sativa
  Clone ID: uC-osflm202113c06b1
cttgattttgataaagagattgttcattgtacaatatcttcccccataggggatcaggaaaatctgcaaggtaacattgatggcacgatggacgatgccctggcggcttgccagaccgagtcagattctgtacagtggaaatgcccctccaagggcgactgaacctgcattcaatgagcccc

SEQ ID NO: 25335 - DNA, 149 bp, Oryza sativa
  Clone ID: uC-osflm202113c10b1
atcgtatcgcttggcttgacgccgcacgcctccgctccgctccgccgccgcggccgatctctctagggcttccaacctcgccggcgacgcgacgccacgccatggccgccccggtcgtggacgcctagtaccgccgccaggaccacagc

SEQ ID NO: 25336 - DNA, 283 bp, Oryza sativa
  Clone ID: uC-osflm202113c12b1
tcgttttttttctaaaatacccccactctacctgggattgtgcaattgaattacaatggttaactatcacacgaatcagagctacaaatcaagaaactaggatgtctggaaatctctctactcagcctatactctaaaattgctcccagaaggcggtctcaaccttgattcgatggaccgggcatgtcagggttgtcgaacatgacattgggcgctgccgaggttgagggagcgttcatcgctgacagaggcaaccgacccccgaaagagagcatttgcaggt

SEQ ID NO: 25337 - DNA, 464 bp, Oryza sativa
  Clone ID: uC-osflm202113d04b1
ttcgtttgctacagaaaaaatcccctttctcgacccctctttttcctcgattccggcggactcttcaccggcggcgggaggaagaggggtcgtccccctcccctaggttagtacagtagtcgggctaatctcgttaggtcgggttcttcccgttcttttctcgttggtgcggtatggaagctggagacggtggctgcgacgtggatgcagcttgtgacggtgatggctacgcggaaacgacccgagacgatggcgacagcgcggatccggtccgcggcggtggcggcggcttggaggcggtccacggaggcggtagctgctcggatgcggatcacggcggcgacttggatgcggtccacggaggcggcggctgtgcagttgcgacccgcggtcgaggcggcggctgcggctgcgcggctgctgccctgggcggcggcggctgcacggatgctgctcgcggcggc

SEQ ID NO: 25338 - DNA, 523 bp, Oryza sativa
  Clone ID: uC-osflm202113d07b1
tcgtttgcctccatttggtgttttcatacgggcgagggcaatgccagatcgtgagatttagctataatttatcaccctctttcttggctttcttgatcatcaccgtgttcccaaatattacagacataagttggtggtatcgattgcatcatgggatagaattgatgtctacaattttggctcgataattccatcctacgcaatggcttccaagagtcgtttcgttgtgggatctcatgtctgggtcgaggacccatatgaggcttggatggatggcctggtagaggagatcaatgaaaatgatctcgtagtaaactgcactcctggcaagaaggtcaccattaatgtgggaagtgcctatcctaaggatacagaatctccccgaggtggtgtggaggatatgacaaggctagcttatttgcatgagccaggagtactccaaaatctaaagtccagatatgcactcaatgaaatatatacttatactgggaatattttaatagctgtcaatccatttaaaggc

SEQ ID NO: 25339 - DNA, 523 bp, Oryza sativa
  Clone ID: uC-osflm202113d08b1
tcgtttaagaaagaaattaaaaagaaaatcacggcgcgtgagcttgcagagacagcaatggtgagagttggtgccgccgcggcggtgctcgtgctggcggcggcggcggcggccatggccgccgagccgcccaccgatgacggcgcggtccgggtggcggcggggctgacgaagtgcgtgtccgggtgcggtagcaaggtgacctcctgcttgctcggctgctacggcggcggacgacgcgccgccgccgccgcgacggcgatgccgttctgcgtcatcggctgcaccagcgacgtcttgtcctgcgccaccggctgctccacctcgctctgattaagtactaatgaagtaattaaccgcgctaattaataataaatcgcacctacgtatgccacatgtggactcgcttgactaattaaatactgccatgcgaatgcgattagtggattatgaaaagaggaaatgtaagaactcatggctctctctgtgccatgcctgtactgcattgaaatgaatctgcttg

SEQ ID NO: 25340 - DNA, 355 bp, Oryza sativa
  Clone ID: uC-osflm202113d10b1
ttcattacacctgggttagaatacacagaagaacagatacttttgactcttctcatcacacacgcactgtccttgcaattgcggcggagcctggtgtgatccagccgtacccgtaggcgcacatggagctgcatgatgggaggcctggaccagccaagagatcggctgagatataaccgccatatgcaaggaggaacgtgggagctcgctcactaaggagctgccatctgcaccaggatgttggctaaactcgcgctcaacagcagcggctcgctctgggcgtagaacagcgttgttaataccgcttacgctacttcacaggtggtcactgcgaacgctctattgaagacaaaga

SEQ ID NO: 25341 - DNA, 474 bp, Oryza sativa
  Clone ID: uC-osflm202113d12b1
tcgctcctcctctccttatcccttcccttcaccagggcccccccgacaccgagcgcgtcctcctcgacctcgccgcaaatcctccgccgctcctccgccgctagggcataaccgcccgcctctcgccggcatccgcatctcccggggaagggaagggaagggaagggaaggaaggaaggtgagggcggatatgtcggcggcgcccataccccgcgagtgggtggggctgcagcagtttccggcggctacccagaccaagctgcacgagctcctcggcaagctcaaggaggagaatgtgagcacattgacaattctggtgatggggaagggcgggggtgggaagtcatccaccgtcaactccatcgttggcgagagggtcgctactgtcagcgccttccagtccgagggtctcaggccgatgatgtggtctcgcaccagggcaggcttcaccttgaacaatattgacactcctgg

SEQ ID NO: 25342 - DNA, 525 bp, Oryza sativa
  Clone ID: uC-osflm202113e02b1
tttcgtatcaccgcatcagcagcagcaagcagctaatcgtgcacgtacgcacaccgcggcccggtgcgagatggcgcagttgatgctggtgtcgggagccaatggcacggtggccgccgcgagcaccagcaggctgcagcccgtgcggccgacgccgttctcgcggctcgtgctgtcgcagccgccttcttctgtggaacgcgcggagtacgtcatgactgctcctgaccggggctaccataagacgtttgctcttttatgatggtggggctcttggggcacagactacgagaccgaagggccaattttaagggagttgaaccgacttggatttagtttgatgaacccacacttgttcttgaccttgactctcaccaattggctgcattctctgctgcatacacagaacttgagtcggcactttctggattgaatgtgcttattgagacatacttcgctgacattcctgctgaatcatacaagaccctcacattccttgacagcgtgactgcttatgttttgacc

SEQ ID NO: 25343 - DNA, 523 bp, Oryza sativa
  Clone ID: uC-osflm202113e03b1
ctcgatatcgccatgggcgcggccgacgacgccaaccaccgccacgaggaggccagccccctcctgccaccgggcggcggcggcgccggcgccggcggcaagaagctccaccagtctccgcctccatcgcctccggaggcagccaagtgctgcgccgatggagtccccgtcgttatgggcgagccgctcggggcacccgcaccgccgcgggagagctggaactcgggggtgctctcctgcctcggccgcaacgacgagttctgcagcagcgacgtcgaagtgtgtcttcttggaagcatagcaccatgtgtgctgtatggtagtaatgtcgagaggtttgcagccagaccaggaacttttgcaaacagctgcttgccttacactggcctctatatgcttgggaatgctctcttcgggtggaactgcatagccccatggttctctcatcacactcgtacagctattcgtcgacgatacaatcttgagggtagctttgaggctttcactaagcaatgtgggtgct

SEQ ID NO: 25344 - DNA, 514 bp, Oryza sativa
  Clone ID: uC-osflm202113e06b1
ttctttccccgcattccgcgccggagctgaggagggacagcgtgccagcgagggaggtggggcaatccagcgagcgccagatcgtgccgccagccccgctccgtcctctctccggcgaccctccgccccgcctgatcccgtggtggatcaactacaactcatctttaggaaagcctcttgaacattagccttgtgtgcctttcaacagtatggcctcggtaggtgtggtgcgttcttccttggggtttcagaacgaaacaagtacaagtggcgatgccgaccgacttccgaatgagatgagcaatatgagtataagggatgataataaggacattgacgacatagttgtcaatggcaatgggacagaacctggtcatgttattgtgacaagcattgatggaagaaatggacaggctaaacagaccattagctacatggccgagcgtgtcgtaagtcatggatcctttggaactgttttccaggccaagtgcctggaaaccggtgagactgtggc

SEQ ID NO: 25345 - DNA, 493 bp, Oryza sativa
  Clone ID: uC-osflm202113e08b1
ttctttcttctcgatggctaggggcaatgccactgtccctgccatggagatgaccaagtggtttgacaccaactaccactttatcgtccctgaacttggtcccaacaccaagttctcctactcttcccacaaggctgtgaatgaatacaaggaggctaaggcgctcggcgttgacaccgtgccagtacttgttggaccagtttcatacttgttgctctccaaacctgccaagggtgtagagaagtcgttcgctcttctttcccttctgagcagcatccttcctgtctacaaggaggttattgctgagttgaaggcagctggtgctacttggattcagtttgatgaacccacacttgttcttgaccttgactctcaccaattggctgcattctctgctgcatacacagaacttgagtcggcactttctggattgaatgtgcttattgagacatacttcgctgacattcctgctgaatcatacaagaccctcaca

SEQ ID NO: 25346 - DNA, 530 bp, Oryza sativa
  Clone ID: uC-osflm202113e09b1
tcgtttttcgtgtggggtttccgtattattgcattataatattgctcaaattgcaccttctgatcccactacaatattgcaatcgattctcactttctcatcacctgcgattgtgattgttgttgtaagcagcaagatgggtgccggcggcaggatgacggagaaggagcgggaggagcagcagaagctgctcggccgcgccggcaatggcgcggccgtgcagcggtcgccgacggacaagccgccgttcacgctggggcagatcaagaaggccatcccgcctcactgcttccagcgctcggtgatcaagtccttctcctacgtggtccatgacctcgtgatcgtcgccgcgctgctctacttcgcgctggtcatgatccccgtgctgccgagcgggatggagttcgcggcatggccgctctactggatcgcgcagggctgcgtgctcaccggcgtgtgggtcatcgcgcacgagtgcggccaccatgcctttttcgactactcggtgctcgacgacatcgtcggcctcg

SEQ ID NO: 25347 - DNA, 444 bp, Oryza sativa
  Clone ID: uC-osflm202113e11b1
tcgttagctctagcactcctccgaatctcgcgatggccctccgcccccgcgcgccgactatgtccggcgaacccctcaccggcggcggtggcggtggtgcaagtgggacgtccgatggagcaataggggacggagcggaggctgcgtgaggtgaacgacgggcgcggaggcgatggcgaactacctggcgcagatccagaccatcaagtgctcctgcgaccgcatcgtcgtcggcgctgaagatgggagagacctgtggatgaatgagaaagaaagctctcacgcaacccttaccaggcgaagaaggcctaggatcaataacaaggcgaggaatcatgtggatgtggaaaacgtaccagttgagtttatacagaccagtgattcgaggctacggagacggtttccacaagatcaatactcggtctggtcgcgggaaccatatgc

SEQ ID NO: 25348 - DNA, 518 bp, Oryza sativa
  Clone ID: uC-osflm202113f01b1
ttcatgttcagggtgtggaaggtgtcgcccaggaacggtctgcacaagcgcgtcggcagcctgccccggctgcgcgacttcctccgcggctggctcaacccgtccaactacgtcgaggtccgcaagaaccggacggcgctctggatccgccacagcgacgccgtgtcgtgcctgagcccgacggactcggcgcagggcctgctctactccggctcgtgggaccggaccttcaaggtgtggtggatcaacgactccaagtgcctcgagtccgtggtggcgcacgacgacaacgtgaacgccatcgtggcagcgttcgacgggctggtgttcaccgggtcggcggacgggactgtgacagtgtggaagagggagctgcatgggaaagggaccaagcacgctccggtgcagacgctgctgaagcaggagcacgcggtgaacgcgctcgccgtgagcgccgtcgcgcccgagctctactgcggctcctccgacgggctcgtcaacttctgggaaggggagcg

SEQ ID NO: 25349 - DNA, 527 bp, Oryza sativa
  Clone ID: uC-osflm202113f02b1
gtgagcttggtgagctgcagagatggccccctccgtgatggcgtcgtcggccaccaccgtcgctcccttccaggggctcaagtccaccgccggcatgcccgtcgcccgccgctccggcaactccagcttcggcaacgtcagcaatggcggcaggatcaggtgcatgcaggtgtggccgattgagggcatcaagaagttcgagaccctctcctacctgccaccgctcaccgtggaggacctcctgaagcagatcgagtacctgctccgttccaagtgggtgccctgcctcgagttcagcaaggtcggatttgtctaccgtgagaaccacaggtcccctggatactacgacggcaggtactggaccatgtggaagctgcccatgttcgggtgcaccgacgccacccaggtgctcaaggagctcgaggaggccaagaaggcgtaccctgatgcattcgtccgtatcatcggcttcgacaacgttaggcaggtgcagctcatcagcttcatcgcctacaagcccccgggct

SEQ ID NO: 25350 - DNA, 287 bp, Oryza sativa
  Clone ID: uC-osflm202113f04b1
gtccattcacacgaccagagctgtgcgagggctagcttaagctagccttcgccttcggggtcctcctcgcggtctccggcgatcccgccctccgccgccgccgacatgtcggagcacctcgcgctgcggagctccgtcgggagccacagctgcgcgctgccgccgtcctaccaccaccaccgtcgtctcccgccgccgcagcagcagcaccccgacccgctcaactccgtctggatccgccgcctccctttctaccccaccagccgctccctcccccgcccccgcct

SEQ ID NO: 25351 - DNA, 524 bp, Oryza sativa
  Clone ID: uC-osflm202113f05b1
ttttactcggaagagagagcccccctacgacgacgacgaccatggcgctcgcctccacctccgccaccgcgtccgcggccgtgctcaagacgcccttcctcggggcgaagcgcgcgctcgccaatgccgtcggcgtcgcgggcgccaagcccgcgccgcgccgcgcgctcgtcgtgtcggccaagaagtcgtggatcccggccttcaagagcgacgccgagttcatcaacccgccgtggctcgatggctcgctccccggtgacttcggcttcgacccgctggggctgggcaaggacccggcgttcctcaagtggtacagggaggcggagctgatccacgggcggtgggcgatggcggcggtgctggggatcttcgtcggccaggcgtggagcggcgtgccgtggttcgaggccggcgcgcagccggaggccatcgcgcccttctccttcggctccctcctcgggacgcagctgctgctcatgggctgggtagagtccaagcggtgggtcgacttcttcaacccg

SEQ ID NO: 25352 - DNA, 470 bp, Oryza sativa
  Clone ID: uC-osflm202113f07b1
tcgctatcattgcttgcaaagctggtcgtgtgactcctcccgttaagcttcccgcggcggcgagagcaagctaagctaggtcgggcatggggaaggacgaggtgatggagagcggcggcgccgccggcgagttcgcggccaaggactacacggacccgccgccggcgccgctgatcgacgcggcggatctggggtcgtggtcgctgtaccgagccgtcatcgccgagttcatcgccacgctgctgttcctgtacatcaccgtggccacggtgatcgggtacaagcaccagacggacgcgtcggcctgcggcgcccacgcggcgtgcggcggcctgggcgtgctcggcatcgcgtggccgttcggcggcatgatcttcatcctggtctactgcaccgccggcattctgcggcgggcacatcaacccggcggcgacgttggggctcttcctggcgcgccaggtgtccctggt

SEQ ID NO: 25353 - DNA, 518 bp, Oryza sativa
  Clone ID: uC-osflm202113f08b1
tcggttgctctccttcgactaccgcctcgcgccggagcaccgcctgcccgccgcgcacgaggacgcggcggcggcgctcatctggctccgcgaccagctcctctccgacccgtggctcgccgacgcggccgacgcgcgcaaggtgttcgtctcgggggaatccgccggcggcaacttcgcgcaccacctcgccgtgcggttcggcgcggcggggctggacccggtgagggtcgccgggtacgtcctcctcatgccggcgttcatctcggagaggccgacgccgtcggagctggcggcgccggccaccgtgttcctgacgcgcgacatgtgcgaccgctactgccgcctcgcgctgcccgtcggcgccgacaaggaccacccgctcgtgaacccgttcgggccggcgagccggaacctgcaggcggtggacatcagccgcgtgctggtggtcgccgccgacggcgacctcctcagggacaagaacgtcgagtactcggagcggatgaaggcgatgggga

SEQ ID NO: 25354 - DNA, 520 bp, Oryza sativa
  Clone ID: uC-osflm202113f09b1
ttcgtcctctcctctcatggagttcgcctagttgtgtgctctgctcctccttgaagaagccttcagatctgtggttcctagcctttctcagcttcctcaacacagccgtccagatggcgtccctgacacccgaagctgaagctcccggaggaggagccctgctcgccgccggcgacgacgtcgccgccgcgaatctgctcgccgccgccgtagccaccgagggtcctgtatttgatatgcctgacttcaagatgggtgggaagaagagtgatgatgctgctcccactgatgccggggatgaagatggtggtgatgatgacggggacgaggatggtgactttggggaaggcgaagaggacgtttcagaaggtgagggatatgataatccaaaaggcatcgataacaacaagaaaagaggtgagcctgaggaaaatggtgaggaggatgaggaagagcctgaaagccaggagggtggtggaggtgatgaccacgatgacgatgatgatgacaatgaggatga

SEQ ID NO: 25355 - DNA, 518 bp, Oryza sativa
  Clone ID: uC-osflm202113f10b1
ttgttcgagccctagccgccagccgactcgaccagcgcccggaggcggagcacccgccgccgccgccctcgccatcgtcggcttcacccctcatcggcaacctagtgcaggttgttttctgaagatggctgacgatttgggccctcccactgtgctccagaagatacatgggcagtccatgatgttcagcaggatctcaccttattctttgatgaagaatcccgcactctacaatgccaacacttgttacagtgtgcctgtgaagtcatacaatgggatggatgggaacaatgggttctcatctgtcacatctgtatccccagtctttgcttctgcacccaaaggagaaaggtctttctgggtttatgattgacttcatgatgggtggagtttcagctgctgtctccaagactgctgctgctcccattgagcgaatcaagcttctcattcaaaaccatgatgaaatgatcaagagtggtaggctctctcacccatacaaaggtattgcggactgcttt

SEQ ID NO: 25356 - DNA, 340 bp, Oryza sativa
  Clone ID: uC-osflm202113f11b1
tctgataagcttcccagctcgcgctgccaaggaggggagggagaaacgcatcaccgcgactatttttctactctgctctctgctcgtgaaaattggattgcgccatatatacacggctcttgggggcccggagcgtccgcatcgatcagcattgggctctctgaggaggagaagttgctgtggagatggtgctgatgctttcttgatctgatgacggcgagcacaacatcagtaacagacgccgggggcgcgttcgcggccgctaagacttctactagagtcgactgcacagggagggggggcatgagctagggttcactacggcggaccatagccatcc

SEQ ID NO: 25357 - DNA, 518 bp, Oryza sativa
  Clone ID: uC-osflm202113f12b1
tcgttcacgcgaaatccggccgacgacgacgacgggacgtcacgcgccgcaggcgaagcatcacggtccaccaccaccagatatgccgccgcccaccgcccttctccccggccgctccgccgccccgcgccctcctcctcctcctcctccgccgccgcagcttgcgtccgccgcgagactctctaggaggcccctcttcaatgccgccaccgccgtcgtcgtccggtccaggagcaaggacgaggccagcttcaccgaccgcatcctcgactacatcgaagggggtccaaagttgaggcggtggtatggagcgcccgatttgcttcccaaggatgggagtgctgaggatggggaggatgagccttcagatatcgaggagcctcgagatgctgtgctagtcaccaatggcgatagcgagattggacagatggtgatattatcattaatcctgaaaagggccagaataaaagcattagtgaaggacaggcgatccactgaagaagcatttggaacttacg

SEQ ID NO: 25358 - DNA, 332 bp, Oryza sativa
  Clone ID: uC-osflm202113g01b1
cggaacgcccggcccggcccaacccacccgtttcgttgtaacccacactcccacacgggaagggagggctcattttggttgagagaggtggacgcccacacaagcgcctgcaggtggaggcgttgcccaccaaagaaagggttcgcggatgcgcgtaactgctacgcgtcgcacgtgcgccatcacctactctacattgtctacgaacgggggcgaacaaacagccccactcttcggtggattctgagattagtgcaacctactcaggtgaaaattcgttcactagcagtcgtcatggcagtatggccaaagaccgcggtaaccgtttgaca

SEQ ID NO: 25359 - DNA, 431 bp, Oryza sativa
  Clone ID: uC-osflm202113g03b1
atgcgttttcttgtggccttccagggaacgaggaaccgcggtccggccgaatccttggacatgattcgtcagcataaaggaacattttgtagatgtgtctaatggagtccacaggcggcacagagaagtctagcagtcagaccttccatgtacaaagctctcctaggctacaagattgaggaccttcgaccaaccggaggaataaagaagtggaagaaagatgtgtactccagatgcgctcgcaggctatactgatattccttgacatccctggcctgcggcaggacgaacgtgctgcaatgaggacttggctatggcgcactcaacattcttaggctgggtgcattgtaaatatatctgctagacatctacgacctgaaactgcctgtgttgtgcactgctccacacaacacttgagcaaatgaccatgt

SEQ ID NO: 25360 - DNA, 450 bp, Oryza sativa
  Clone ID: uC-osflm202113g04b1
gtcatgacatggtgcaacagcttcaacgacgtgcgcgccgtggagaacaacctggccaccgccgccgccgtggccgcggccaagaagcagcagcagcagcagcaggtctcccagcacgtcaacctcatcaagacctgcccctcctgcggccaccgcgcgcagtatgagcagagtcagttgcaggcagcggcggcggcgacgatccaggacctgccggggctgccggccggggtgaagttcgacccgacggaccaggagctgctggagcacctggaagggaaggcgaggcctgacgcgcggaagctccaccccctcatcgacgagttcatccccaccatcgagggcgagaacggcatctgctacacccatcccgagaggctttcaggagtcggcaaggacggcctgatccggcacttcttccaccgcccgtcgaagcgtacacgacgggga

SEQ ID NO: 25361 - DNA, 286 bp, Oryza sativa
  Clone ID: uC-osflm202113g05b1
acaagttccctttttgaggggccggggccaccatgaacctctcctgccgggggatgcccctcgcggcgcctttgacctcctaaatgctcttcggtaagtcctggatcatcatgcgcaaaaccgacgggaagccaaagccggcggcgtaaatcgggaagcccgtggtacggcgccgaccgcgtcctttacctcggcccgctctccggcgagccgccgagctacctaaccggcaagttcccgggcaattacggtgggaacaccgggggcttttccgccaacccgaaaa

SEQ ID NO: 25362 - DNA, 525 bp, Oryza sativa
  Clone ID: uC-osflm202113g06b1
gtttcttggatccggttagagtaggttgtggtttgtgtcggccgtcacgccatccgtcctcatggtcgcgcaaaccagcagcagttgttgtcatttttccgctgagtgtgatgcctcttctcacggccaaaccagtcacgaatgctatacagatagaaccaagggcaaatcggtctttctccgtacgaactcacggctaaacacttgatctgagcagcagcagtgacggaagtgctaccgatcgaagaaaaacaagtggccaatgcttctagtcgaaagcgggaagtttccatgctattttttggttaccgacttgttttctatgctatagatcgaattttctcaaaaagaaacctctcgttgtctcctccgctccttgcctacttgcgccgccgccaagacgagtggcggctgaacaagggagggcacggcggcgatctccatcgcagcggaggggaggggatcctggtgcgtcttctttctgattcatctctctctctctctcccaccccacccggactggaa

SEQ ID NO: 25363 - DNA, 494 bp, Oryza sativa
  unsure (1)..(494): unsure at all n locations
  Clone ID: uC-osflm202113g07b1
tcgttcgcaacccaaactcgcacaagggagaagagaagagaagcttcgagagagaggtggaggaggagactagcgcgtggtggtggtggtgttggcggcgatggatcgggttcgcggatgcgcgttcctgctcggcgtcctgctcgcaggatccctgtttgcattttctgttgcgaaggaggagaccaagaagctcggtaccgtgatcggtattgatcttggtacaacctactcgtgtgtcggtgtgtacaagaatggtcatgtcgagattatcgccaatgaccagggtaaccgtatcacaccctcatgggttgcattcaccgatagcgagaggctcatcggtgaggctgccaagaaccaggcagctgtgaacccagagaggaccatcttcgatgtcaaacgtctcattggaagaaagtttgaagacaaggaagttcaaagggacatgaaacttgtcccctancagattgtgaacaaggacggtaagccctaca

SEQ ID NO: 25364 - DNA, 535 bp, Oryza sativa
  Clone ID: uC-osflm202113g08b1
ttggtagaaggagaaggtaggctccagccatggcttcccagttctgcgccgccacatccgtgccgcagttccatggcctgcggacctactcctctcctaggtccatggtgacgctgccatcgttgaggatgagcaagaagaggtcccagggcatccggtgcgactacatcggctcagccaccaacgttatcatggtgacgacgacgacgctgatgctgttcgcggggaggttcgggctggcgccgtcggtgaacaggaagtcgacggcggggctgaagctggaggcgcgcgactccggcctgcagaccggcgaccccgccgggttcacgctcgccgacacgctggcctgcggcgccgtcggccacatcatgggcgtcggcgtcgtcctcggcctcaagaacatcggcgtcctggaccagatcatcggctaatcaaattcattaagctagtcacacgaatcaatactcctatgtgtaatcgatgcatgagtgcctgtgtgatggacgatgtaatgatcatgtcaaatgtgcgtgga

SEQ ID NO: 25365 - DNA, 499 bp, Oryza sativa
  Clone ID: uC-osflm202113g09b1
gtcgttgaggccggcgagcgagccgccaccgggggtgggcgacagccagtactgcttgtccctcaccaccttcagcccgtcggggaagctggtgcagatcgagcacgcgctgacgggggtcgggtcccgccagacctccctcgggatcaaagctgctaatggagtagttattgccaccgagaagaagttgccttctatcttagtggatgaaacatctgtgcaaaagattcagtcgtggactccaaatattggtgttgtctacagtggcatggggccagacttccgtgctttagtgaggaaaagtcgaaagcaagcacaacagtattatcgtctgtacaaggaaactatacctgttacacagctagtccgagaaactgctgctgtcatgcacgagtttacacaatctggtggtgtaagaccatttggtgtatctttgttgattgctgggtatgatgacaatggtccccaattgtaccaggttgatccatcagggtcatac

SEQ ID NO: 25366 - DNA, 463 bp, Oryza sativa
  Clone ID: uC-osflm202113g11b1
tcgttctctcagctctcacagctcactgcatcaatggccgcggccaccatggcgctctcctccccggtgatggcccgcgcggcgccgtcgacctcctccgcgctcttcggcgaggcgcggatcaccatgcgcaagaccgccgcgaagcccaagccggcggcgtcgtcggggagcccgtggtacggcgccgaccgcgtcctctacctcggcccgctctccggcgagccgccgagctacctcaccggcgagttcccgggcgactacgggtgggacaccgcggggctctccgccgacccggagacgttcgccaagaaccgggagctggaaggtgatccactcccggtgggcgatgctgggcgcgctcggctgcgtcttccggagctcctcgccccgaacggcgtcaagttccgcgaggccgtgtggttcaaggcgggctcgcagatcttcagcgagggcgggcttg

SEQ ID NO: 25367 - DNA, 516 bp, Oryza sativa
  Clone ID: uC-osflm202113g12b1
tcttttttcccatttttcacctgccttaattcgggctccttcataaccgtagtagtaatcgtactcctccattctcgccggaatccagagcgaagctgtaggaaattgttgggaggaggagcaatgccttactgcgaggtggacaggtaccagaacggcgacgagtgggacggcgtccgcctcttctaccgccgcttcggccgcggcgccaccaaggtgctcctcgtcatcggattggcggggacgcacgactcgtggggcccgcagatcaaggggctgaccgggtcgctggagccggccgccgacgacgaggagtccggcgacgccgcggcggcggagggggacgacggcgatggcatcgaggtctgctgcttcgacaaccgcggcgtcggccggagctccgtgctcccgcacaaatgctactactcgacggtgatcatggcgagggacgctctggccttgaaggaccatctggggtggaagaaagctcatgtatccgggcattccatgggcgcg

SEQ ID NO: 25368 - DNA, 167 bp, Oryza sativa
  Clone ID: uC-osflm202113h02b1
caccgttttgttttggctcacccctgtcgggttgagaggcagggccaattctagcctgaatctattgtgagagtgtcagtgtgagaagtgctcatccaattcgagctgttaacatgttgctcgctgcatgatcagagagaagggtacagagagatcgactgggagga

SEQ ID NO: 25369 - DNA, 506 bp, Oryza sativa
  Clone ID: uC-osflm202113h04b1
gtgcctggcgccaccgggaagctctgcttcttcgccagcgtgcgccacctgctgaagctggacagggggtactacggcaactccatcttcccggtgaagatgtcggcgccgagcgagacggtgctgtcgtcgtcggtgatggaggtggtggacatgatccggcaggcgaaggagaggatggcggtggagttcttccagttcgccaaggaggagacggagcaggacccgttccagatgacgttcaactacgagtccatctacgtctccgactggagcaagctcgggttcgccgaggtggactacggcttcggcccgcccaagttcgccggcccgctcgtcaacaacgacttcatcgcctccgtcgtcattctcaaggcgccgatgtcgctcgacggcacgcggatgctcgccagctgcgtcaccaaggaacactcggaggagttcgttcgcggcatgaaagatgacctgccatgaactgagcatatgaggtgatgagctttttttct

SEQ ID NO: 25370 - DNA, 533 bp, Oryza sativa
  Clone ID: uC-osflm202113h08b1
tcgtttccattgacgatgaagacggaaagagagagggcgagagctagaggggatggggtgaggaaggcacgcagcgagttcccctccttccttcgtagcaattggtgcttccaccagcaagctttctataacgtggagtgtcgccgaccacggccgcagcctccttcctctggattggactccactgggaactcctccgacatatcaagtgtgcctgtccaccttctacctctgaggcaaagattggatcaagcaagctggatctgactcagcaccttgatctgctcaacaaccggagcccccacctccttatacatcccaaagatggatatgcatcttctgtattcagttaggataaggcttccaaggtctgcataaagcaaccgtgagactcacatgctacaaaattttggtttcacatgatgtttatgactgaaagtaatgcagtatcaggcatgcaaaaatagaagtttagttgatctactggtgcttcatctgcaaacaccatggatcagttcatgacagcatgacca

SEQ ID NO: 25371 - DNA, 311 bp, Oryza sativa
  Clone ID: uC-osflm202113h09b1
ttgctactcatcatggattagttgagttgagcaccgccaccaccaccacaccacgacagacgggccaatccacccaaccggctgcacttgcgtccccaccgcgccaaattcccaccccctgctccgccgccgccgccgccgcacgtgcgcctacacctcctatacattgccggcgacggggcacggtcaaccaccctcacccttcggcggagtcgcggaggaatgcggggggggcaatagaaaattcgctcgctagcagttggcatggcggattagtttaatcttgaagtccttggtggtggtggagagga

SEQ ID NO: 25372 - DNA, 366 bp, Oryza sativa
  Clone ID: uC-osflm202113h11b1
ttctttttcctgctgcagcagctcgtctaaggggaggcacgacagctgctgccatatctaacgcaccaggaaggatcctcccgaggaggaaaggcaaacggtgggacgcttgagccaacacacaccatcgacaaaaacattaattagatcgtgatagaggaatataacacacacataagcgatggcaagcacagactaggagcaccggggaggagattcacgctcaccgccgacggagctctagatacagagggaccaaggagaggttattacagctggtcaggcgctcgagacgactaggatgctccagcaggtcaccaccaggatcaaaggcgagaggaggatactgtacgggcagctgtacat

SEQ ID NO: 25373 - DNA, 512 bp, Oryza sativa
  Clone ID: uC-osflm202113h12b1
ttgtttacgcgtgggttcgtctccaccccgcgcagcatcgctcgcctccgccgcccgtgcccgtccgtcgagttcgtcgagctgccgctcccgcgcgtcgacggcctccccgacggcgccgaggccaccaccgacgtccccgatcacatgtcatccgctctctggaaggcctccgatgggctcaccgcgcccttctccgccttcctcgacgccgccgccgccgcggggaacaaggtcgactggctcatcctcgacggcatgctttcctgggccgccgcctccgccgccgaccgcaaggttccctgcgtcctcatgatgccgtacacggcgacggcgtgcgcgcatttcggcgtgccggatgaggcgcgggacgccgaccgtttcccctccgccatagcccggcggttcgtctcggccttccggagcagcgagcttctcgccgtgcggagctgcgtggagttcgagcccgagtcggtgcctctcctgtcgaacatcttcggcaagccggtcgt

SEQ ID NO: 25374 - DNA, 428 bp, Oryza sativa
  Clone ID: uC-osflm202120a02b1
tttgtttcctctctgtttctctcttcttctcggactccaccttgtcacttccagaccaagggagaaattaaaaaaaatatatacagtgagagatttttctctctccggtctggagcacaaatgggcatcttcagtggagcgggagcacatcgccctagctgcccgtcggccgcgaattgcgcaaaatgggctcaaacctacctgaagtactgcctttgtagcacgagggatggcatggcactgacgcttggactgttaagcgtcatcagctggggagttgctgaggtgccacagatcataactaattacaagcataagtcaacagaaggcctttcccttgcttttctaatgacatggattgttggggactttattaaccttattggctgcttcttggaacctgagacgctgccacacaattttacatg

SEQ ID NO: 25375 - DNA, 462 bp, Oryza sativa
  Clone ID: uC-osflm202120a03b1
ctcctactgagagctgagcaggcgagcgagcgggggtggcagcatcgctccaaggggcggccaccctgatgcagccggccaagctcggcggccgggcctcctccgccgcgctgccatcgcgcccgtcttcgcacgtcgccagggcgttcggcgtcgacaccggtgccgccggcaggatcacgtgctccctgcagtccgacatccgggaggtcgccaacaagtgcgccgatgccgacaagctcgccggcttcgccctcgccacctcagctctgctcgtctcgggcgccagcgcggagggcgtgccgaggaggcttaccttcgacgagattcagagtaagacgtacatggaggtgaagggaaccggcacggcgaaccaatgcccgacggtggagggcggagtcgactccttcgccttcaaggccgggcagtacaacatgaagaaagtctgcctggagccgacgt

SEQ ID NO: 25376 - DNA, 363 bp, Oryza sativa
  Clone ID: uC-osflm202120a04b1
gtttgatctcgtccatggtgctgatcaagatgagggagatcgcggaggcctacctggggtcgtccatcaagaacgccgtggtcaccgtcccggcctacttcaacgactcgcagaggcaggccaccaaggacgccggcgtcatcgccgggctcaacgtgatgcgcatcatcaacgagcccaccgccgccgccatcgcgtacggcctcgacaagaaggcgacgagcagcggcgagaagaacgtgctcatctttgacctcggcggcggcacgttcgacgtgtcgctgctcaccatcgaggagggcatcttcgaggtcaaggccaccgacggcgacacccacctcggcggcgaggacttcgacaacc

SEQ ID NO: 25377 - DNA, 463 bp, Oryza sativa
  Clone ID: uC-osflm202120a05b1
tttccttacccccaaaatcgaaatccctaatgggacgccatggccgcgactgggggggccgccggggagaagacggccagcagcctcctgctcggcgtccggggctacacgtccaccctcaagaacgcctccaccgccagctgcaggttgagcgccggccatcccatcgaggtgactttgtgggaggcgtccccgcctgccctctcccacttctccgtccactgccccgatctcccatccttcaatggcaatctgcttggcgcgcctcaagccatcgccggcgccgtcgacgacgccgacggacagctcctcctcctgctccgagtccccatcgatcagcttggtgccccgcatgacaacgactacttggtctaccatccggatcccccgtctccgaaactggatctggtccccaacccgtctacccctaccctcggtgaccaccagctcgccatactcagct

SEQ ID NO: 25378 - DNA, 435 bp, Oryza sativa
  Clone ID: uC-osflm202120a06b1
cttaatcacccatgtctgctgaagtcagcgaggaatatccttatttcctctcctgctacttctggttcatatattgcataaaattccgagatttcacttgatacaagtggatcacctggagttttgtgctaatacttcctatcatgtgaatcagttgtagttagcataattggcaagactcaagttttctctcatctgggttcagaaacatttgtcggttgagtgctcgatctaaactctgcttgagtcttgccgaagattgtttctcaacaatcacgtcttctgttctctctgaggttggaccaatctcccttttggtctgatcaacctcctgatctcccttaagtgaaccgtcctgctgtgttcacgcaatacaatcttctgaagtcctctcttgttccttctgtgctcaaacatcaaaagcagctctctcct

SEQ ID NO: 25379 - DNA, 552 bp, Oryza sativa
  unsure (1)..(552): unsure at all n locations
  Clone ID: uC-osflm202120a10b1
tctattgaagccccaataactgaaaacattgggaggaccacaatttcctttgggatgagtgtcttctggatctcaaccatggctggagagctcctgaactgccttgcagcaatcggagtcattatggatttccctccagctatacttggcatgacggtcttggcttgggggaattcggtgggtgacctcgttgctgatgtagctttggcaaagtctggccagccgacaatagccattgctggctgctttgctggtccaatgttcaatatgctggttggactgggaactgcacttgtaatacaaacagccagggtgtaccccaaagcttatgtactcgaattccatgttggaattgctgttgcatttgtatttcttcttttgagcctgatgggcaccctgttgatggtcacctggactaggtttcgggttcccaggttttggggttactgccttattgggctttacatctctgttacagtagtgagtatagctatagcgagctcttctggatgatacatanttttatacataatagcaactagtccgttgcag

SEQ ID NO: 25380 - DNA, 349 bp, Oryza sativa
  Clone ID: uC-osflm202120a11b1
ttgtttaagggcattgtcgtatgggctttgggggggagttggataacccggggggggcatcacccataagctggaacccatactgtatgctcaaggaattgctccaccatgatggccctagttgctcaagtatcccacggagggagaagctcgcggagatcgtgtggagtttctgccaattcgcactgggatcagtaaaggcaccaaatccacacggcgaatccatcctcgacagtgcaaacattgtactcagtgttgctcgccaacgagcttctcggcatctagtctcggtggggtgagcagcgtgacacccttgaactcattctaagggtgtgggtggagatgttgc

SEQ ID NO: 25381 - DNA, 465 bp, Oryza sativa
  Clone ID: uC-osflm202120a12b1
cctaatcacccatgtctgctgaagtcagcgaggaatatccttatttcctctcctgctacttctggttcatatattgcataaaattccgagatttcacttgatacaagcggatcacctggaggttcatgctaatggtgtacatgatcgtgtcgatgcaactgctggtgaccgtcgccgtctcctgctcggtgaacctcgtcgagcccatcaagaccttcttccaggctcgcacgccggatgtcctcgtcgcctacctcatcatcatcatctcccccctcatcatgatgctgccgatgatctacttccgtaacaagcatacgatcaacctcttattactgctgctcttcaccgtctgtattagcttctccgtcggccctgagttgccctctcaagatgggacagtgatatttcaagccgcgggaatgaccgcggcgatagtgatcggactgacctgctacacgttct

SEQ ID NO: 25382 - DNA, 524 bp, Oryza sativa
  Clone ID: uC-osflm202120b01b1
gttgtgcaagagcaagcgcgtgacgctgcgggagaagcacaaggtgctccgcagggtgaaggagcaccaccgcaagaagcgcatggaggccaagaaggaagggaagagccacaggaagaaggtcgagaaggaccccgggatccccaacgagtggcccttcaaggagcaggagctcaaggccctcgaggcccgccgcgcgcaggcgctccaggagctcgagctcaagaaggaggcgcgcaaggaaagggctaggaagagaaagcttggattgcttgaggacgaggacattgctaatttggcctctgcagcttctgctcagggcagcgagtttgcagagaaggatgcagcaaaggagaatgcctcttagacgtggttaagagccaagatcattcagagagagccttctacaaggagcttgttaaagttattgaagcgtctgatgtcattcttgaggttctcgatgccagagatccactgggcactcgttgcattgacatggaaaagatggtcaggaaggctgatcc

SEQ ID NO: 25383 - DNA, 542 bp, Oryza sativa
  Clone ID: uC-osflm202120b03b1
gtgttatgcatatagagattttttttctgtggccaatcaatggactagtcatgaaaaagaaaaaaataatcagtgggtggaaataccttgtaattttttcctgaaccaaaggggtccaatacctgcttgtattgaaagccagagtttttcaggagataatatgaaagagaatagagttgggagcatctctggcactaaaagcaacatatagtacatattaggagacaccaccagattcaaagagaaattaccaaaagacaacagcagccagcatttagttcatgcaggttagttaggcatacagagcaggtcatagagcgctgaaaaattcaaatgatcttgaacctcaagtataccacaaaagctatatatttttattcaaggtcactaccctccacatcagtaggaagctcactaagaaataattttcatgcaaagatcttaatcttgagaggtattttgcctttccatattttgtttaccgatcgctccaccacaagatataagattgtagagggacttttgcatgtacatgttatttt

SEQ ID NO: 25384 - DNA, 425 bp, Oryza sativa
  unsure (1)..(425): unsure at all n locations
  Clone ID: uC-osflm202120b05b1
cttccatccatccattcccctttgcacggttgggctcgtctcacagttgttaattaacagcaagaacatttttttccttaaatttctatttaatttatactacttgcgagcgagagccacctaatcttggtgcccaccaagcataagcttcatcatcttcttcttctttgaagtcgtcttcttccctcctcctctcgtcgcctcttggaaagagagagagagagagagagagagagagagaggtgatcgagttgcagcaatggcgaggagggcgccatggctcgccgggattggggccgtgccgttcttgatcgtcgtcntggtggcggtggtgggcgccgccgtgccggcgatggggaggttcgtggtggagaagagcagcgtgagggtgctctcgccggagcacatccgggggcaccacgacg

SEQ ID NO: 25385 - DNA, 483 bp, Oryza sativa
  Clone ID: uC-osflm202120b08b1
tcttctgctattctgccatagatttatagctgggggtgggttctatttctagagagtcaactctcctgaaaatcgattcatattccaaaggcaaggcatcaggtatacctaacctctctttctatctaaattgatttgctttcttcccaggatataatcaaatacaaacaattacaaataacaaaatacggagtaacacataggcagttactaaagactccctatagtgttgtcactcgcattttagcataccgatctcccacggacaaagttgtgctgaaacacggtctacatctatcatatagtgctgcagcatatgacctgataaaattttcagccctaccacccaccaacaacagaagatattcactaagccgcttcaatgctacacgttctagcaatgcctacgaacatctatagacattgttattcatctacatcatctgcatctgcccatccaatgaaaactcacatacaaatata

SEQ ID NO: 25386 - DNA, 515 bp, Oryza sativa
  Clone ID: uC-osflm202120b09b1
agatccaattgaaatcttatgcatgggggcgctgttatctctaacgggatttaccaaacataaaagagcaatagctccctgtaatcactaagatatggcatgaaaatctctcagatgtggaagctttttcttgattgtcacaaaaggtgctcttgcttagatgcgtaccaatgtcatatctccaatcaccctgctaaggtaagtatgatttgcttgccacataggaaagtcatcagtgcggtccgaagaaataaaatggcatgccatttttaatctaaaatgcaaaaacaatacttttagtgtgtataaagggagatagattgagctaagactacatgttgtactataccttcagatctcagttctttgctgcagataatagtggcacatggttcctggtttgaaaatttgttgtgactgcaaaaatagtcaataaaacttcgctattgattgtgttgcttatttccattaaatgacttctcagaagctatgctccttctctgtcttgctagctt

SEQ ID NO: 25387 - DNA, 343 bp, Oryza sativa
  Clone ID: uC-osflm202120b10b1
ttcgttcctcctcctccccctccgctccctgggagaggcggcgaccgcgccgcgccgaggccgcctctcggctgggctagggggttcccccccaacctcccgccctaactaccccgcgccaccatggcgggggcgacggcctccgcgtccgcgtccgcgtctgcggcggcgttcctcctcctccccctcctcgccgccgccgccaccgctggccacggggtctgcccgaggcagcccgccgccgccgccgtcctgccgcgccaggcagcccgccgttcctactcctcctcctactactcctggccctcggcggggtggtcgggccaccgggcgcaccacgtgg

SEQ ID NO: 25388 - DNA, 488 bp, Oryza sativa
  Clone ID: uC-osflm202120b12b1
tcgctatgctgctctggttatctatctatctgtctgtctctgtcctggtgaaatatggatagcaattagccgcttgtttgcatgggtacttctgtagatatattgactctgcagcaaacacagtgtttcttggttctttacggtggtcttctgtagatatattgactctgtatgctttgttctctgttcaagatagatttaggaagttttcatggttttgtacttcaatatgcatgtgcgtttgtgcatttgctatggtttttcagttgattaattattcacttctttttaccgtgtttacacatttttctattccaaattagcttgaacaacacacatgtacatgtggcaactcagtcaatttgataaggtcaaaatggtcaaataggactataacattttttgtaattactattatgtactacctccgtcttgaaatgtaactacttttggctgtgaatgtggacaagtacttgtccagagtcata

SEQ ID NO: 25389 - DNA, 526 bp, Oryza sativa
  unsure (1)..(526): unsure at all n locations
  Clone ID: uC-osflm202120c01b1
cccgtatctctcgcgtttctggtctaagttccaggccacttgttgccgcattccttctccctccctgcaaatccaatccaatccaatcccaccccaagctcgcggaggaggagatggggagaggagggatcggcggcgcggggctggtggcggcggtcgcgaaggcggacgtggagaacaccgactccacccgcggcttcgtcaaggacgtgaagcgcatcatcatcaaggtcggcaccgctgttgtgactgggccgaatggccggttggctatgggcaggctcggtgctctgtgtgaacaggtgaagcagctaaattttgaggggtacgaggtgattctggtcacctctggtgctgttggtgttgggaggcagaggctcaagtaccggaagctcgtcaatagcagtttcgctgatctgcagaacccacagatggacatggacgggaaggcctgcgctgccgtcggtcaaagtgtgctgatggcgatctatgacacgttatttagccagctngacgtaacatcatc

SEQ ID NO: 25390 - DNA, 528 bp, Oryza sativa
  Clone ID: uC-osflm202120c02b1
ttttctcgcgggcgctctcgctttgccgggaagaaggaccgactaccacgatggggtccccaatgagggtccataccgtttgcttgcttcatttacatcgagctggatgtcaaatcacatttctccctgagacataccaaagcctgcctctgttgatgaattcatcaagaatggcaagaacaagaagtcattcatgtcgagcatctttcggacgaaagggaggagcatcacagggagctcagacaagaagctgctatcgcggatggatatcgtattcggcttggatgataaatgcgacgataggtcggagctcttggattcttcccctgccgtccgcaagagcttttcatatcggcattgcgccacaaaaattgagagcttgactctaagctgcttggatcacccccaggcagttcgatacccgagaataccgggtgttcataggcacatggaatgtggctgggaagccttctaacagcagccttaaccctgaggattctctacagatagaaggattaccctgattat

SEQ ID NO: 25391 - DNA, 539 bp, Oryza sativa
  Clone ID: uC-osflm202120c03b1
cttcactaaagagaaccgggctgaggagctgtgaaaccttctaacccagctcaggccttttttctcgttgattcccaaggcaaagactgcaaaaattgtgcgtggaatcatcgatgctgctgccaagataccaggaacatctgaacttcagatctcactctgcaaggagatggctgaatggacccgtgctgagaagcggacattcctcaggcagcgtgtggaggcaaggctagcagcccttctgttagagaatcaggagtacactgaagcgcttactctccttactggtcttatcaaggaagtcaggaggcttgatgacaagttgcttcttgtggacattgaccttctggagagtaaactccacttttctctgagaaacctgccaaaggccaaagcttcattgactgctgctagaacagcagcgaatgccatttatgttccaccagcacagcagggtactattgatctgcagagtggaatccttcatgctgaagaaaaggactacaagactgcatacagctacttttttgaagcatttg

SEQ ID NO: 25392 - DNA, 504 bp, Oryza sativa
  Clone ID: uC-osflm202120c04b1
ttctttcctacatcgccctggactatgaccaggaagtggagactgccaagaccaggtcctccgtggagaagagctacgagcttcctgatggacaggttatcaccattggtgctgagcgtttccgctgccctgaggtcctcttccagccttccttcataggaatggaagctgcgggtatccatgagactacatacaactccatcatgaagtgcgacgtggatattaggaaggatctatatggcaacatcgttctcagtggtggtaccactatgttccctggcattgctgacaggatgagcaaggagatcactgccttggctcctagcagcatgaagatcaaggtggtcgcccctcctgaaaggaagtacagtgtctggattggaggatccatcttggcatctctcagcacattccagcagatgtggattgccaaggctgagtacgacgagtcttgcccatccattgtgcacaggaaatgcttctaattttcggacccaagaatgc

SEQ ID NO: 25393 - DNA, 411 bp, Oryza sativa
  Clone ID: uC-osflm202120c05b1
gtcgcagctccgcgggccctcggcggcggcggggaggaggtggccggccccctccggcggcgtcctccgcttcgcgccgctcgctacgtcgacggtcccggcgtcgatcgcccggggatcgctccgcggggttcccgctggcgtcgtgctgcccaagccattgatagcaatgtgcatgaaggcggagtataccagcagtcctgttgatcctaatgctgtcgcggagcatacagaagatgaaaatcaacagccaaccactgtatcgcctactaatgcagaaatagacatagaccaagaggctgttcctcaacacaagggtgcaataatacatgacttttgcctagggatcccttttggtggaattttattttccatgggccttggtggatttctgttttggaggagtaccga

SEQ ID NO: 25394 - DNA, 503 bp, Oryza sativa
  Clone ID: uC-osflm202120c06b1
ttttctccaagctgttcagccggctcttcgcggaggaggagatgcggatcctgatggtgggtcttgacgcggccggaaagaccacaatcctctacaagctcaagctcggcgagatcgtcaccaccatccccaccatcggattcaatgttgaaaccgtggagtacaagaacatcagcttcaccgtctgggatgtggggggtcaggacaagatcaggcctctgtggaggcattatttccagaacacccagggtctcatctttgttgtggacagcaatgatagggaccgtgttgtcgaagccagggatgagctccacaggatgctgaacgaggatgagctacgtgatgctgtgctgcttgtctttgctaacaagcaagatctgccaaacgctatgaatgctgctgagatcactgataagcttggactgcactcccttcgccagcgacactggtatatccagagcacttgtgctacaacaggtgagggattgtacgagggcctggac

SEQ ID NO: 25395 - DNA, 374 bp, Oryza sativa
  Clone ID: uC-osflm202120c07b1
tttccgacccaacgccccggattgaaatcgggcaggcttccacgcacccggcggcgtcagcctccaccgccgctccccctcacacgcgcgccgccaccacgtgcccctccgccgcggcatctgtaaagccccccttgtcgcctccctcaactcaaccgccgcttttattcccccacctccacctccattccacgcgatgccgtcgcgcctctcctctcctcctcctcctcctcctcctcctcttctcccgcgaccccgactcccccacgcctactacttcttcttctcccccttctcctccatccatggcgccctctcccgccgccgcgatgccactcgcggccgagcccgatgaagtggtggttgaggtggag

SEQ ID NO: 25396 - DNA, 525 bp, Oryza sativa
  Clone ID: uC-osflm202120c11b1
tctgtcactttattagcaccaaccccgtctgggtggtccattcctacgccgcgggagccttctagaagctctcctcctcctcccatggcggcgacgatcgtgtccgtcaaggcgcgccagatcttcgacagcaggggcaaccccaccgtcgaggtcgatgtgtgctgctcagatggaacctttgcaagggctgcagttcccagtggtgcatcaactggtgtctatgaagctctcgaattgagggacggtggatctgattacttgggaaagggtgtttccaaggctgtcgacaatgtgaactcggttattgccccagctctgattggcaaggaccctacgtcacaggctgagcttgataacttcatggttcagcagcttgatggaaccaaaaatgagtgggggtggtgcatgcagaagcttggtgctaatgcaatcctggctgtgtcactggccatttgcaaagctggagctatcatcaagaagatttctctgtaccagcacattgccctccttgctggaaacaag

SEQ ID NO: 25397 - DNA, 515 bp, Oryza sativa
  Clone ID: uC-osflm202120c12b1
ttggtttaatacagatttactttcacattccgaagggtgctacacttcccaggagtggagaatatccgagacacctctcatctatgcttatcagagtctcatctatttcctgtctttgtcatagacagatattctcatggctagaacctctccttttccacctctaactagacggaaaatcgcttccctcaagttgctgataccatgtgttctagttctttcagtggctgttattgttgttacgcagtatttccataatatctcttaccttctgcggccactgtgggacacaccacctaagccatttatccgcatcccacactactatgcccccaacatctccatgccgcagctctgtcagctccatggttggggtatcctccccacccctcgccgtgtctttgacgcccgcctcttcagtaatgaacttgatattctagaaattcgctacggtgagctccttccgtatgttgacaggtttgtcatccttgaagctaatgccacattcactggca

SEQ ID NO: 25398 - DNA, 529 bp, Oryza sativa
  unsure (1)..(529): unsure at all n locations
  Clone ID: uC-osflm202120d02b1
ctcctttgcttcccaagttgccatccatgggcgccaaggtgtacaagccggccgccgaggtcaatctcggcccggacagcgacgagttctacatcagccctaacgtcaaagctcctcgggtagcagggctgctggtgaagatcttcgtgtggattcttgagatgccgatcatcggctcaatggtgctttacatcctcaagaaggataatctcatcaacaagcttgtccaagatgctgaaatcccagagcctccactgttcacttccacacacagctgggaagacattccagagcagaatgtgtgcctgacgaagccggacctgtcgccgccggagcgtgtccaggaagccgtcagctgcctccctgcgagcctcgaatcgaccctcgccggctcgccgccgtcgagcccgaaacgctggacgatcagggatttcaacagggcgtacagctcaagggaggtcactcctgttcaggttgcaaagaggttcttggctgcagtgaaggaatgctcangcccaggcctcaacat

SEQ ID NO: 25399 - DNA, 535 bp, Oryza sativa
  Clone ID: uC-osflm202120d05b1
tttgtatctcttgaagtctgcggtgggttaatgactgatgctggagtgaagaatatcaaggatctcaaagctctgaagcaactcaatctttctcagaacgttaacctgacagacaaaaccctggagctgatttctggtattattcctccgtgtcaaatatgacgtccctatgtgcccactctattgttgtctatctgtgctgttatcacatgacaatatgacatgattgcccggtttgcaggcttaactgctttagtctcgctgaacgtctccaacactcgtgtatccaatgccggcctccgccacctgaaggatctgcagaacctgcgctcgctgtcgcttgattcctgcagggtcacgacaagtgaggtgaagaagctgcaggcgacggtgctccccaacctgataagcgttcgacccgagtagctggacactacatgatcacctgtaaataatcatctggatggcttcatgtagatagctttgcaagggcctggattgaagccagattaataagtaaagtctatggtagcat

SEQ ID NO: 25400 - DNA, 500 bp, Oryza sativa
  Clone ID: uC-osflm202120d06b1
cttgctccatccatctatccatccaaggagtgtggaacgccacacgtattttttttttatctatgctaatctgatcattagcagaggagagttttagcagtaggattggattaaattggagtagtttcatagtttgtgtgtagtgatcttaattagctttgattagacagacagtacagtagagtagaggatgttggctgtgttcagcggcgcggtggtggaggtgccggcggagctggtggccgccgtgagccggacgccgtcgcccaagacgcgggcgtcggagctggtcggccgcttcctcgccgccgccgagcctgccgtgtccctgcagctcggcgaccttggccacctcgcctactcccacgccaaccaatccctcctggcgccaagatcctttgcatcaaaagatgacattttctgcctgtttgagggagtcctggacaatctgggcaggctgagccagcagtatggcctgtccaagggcgccaatgaggtgc

SEQ ID NO: 25401 - DNA, 483 bp, Oryza sativa
  Clone ID: uC-osflm202120d07b1
cgcaatcccagccatggccgccgctcctatcacgctgctcgtgctgtcactcctcctcctcgccgtcgccgccgccaccgccgccacattccccaccaccgtgaacgcctacacccccgccaccggcgtcgcggacgccggcgcggcggccggcgaggcggccggcgccaacgccgcctcgaacatcgccgccggcgccgcggcgggcatggccgcggacgccgcggactcggcggcggcgaacatcggcgcctatataccggaggccgggtacaacccggggaagctgtgcgacaacgcggtggtgatggactcgtgcgtggaggtgctcccgaggatccccggcgcgctgacggcgccggactaccgcgcgctcgccgtgatcctggacgcgtacgcgtggaagctggtgaggggtcgcggcagatcgccgactccatgcgcgccgccgagaagctgggccacaccatggacaagtgcatc

SEQ ID NO: 25402 - DNA, 467 bp, Oryza sativa
  Clone ID: uC-osflm202120d08b1
tctcagccgttcctcctcgcgctcgcgtcgagctccaacatcgggtcggcggcgacgcccatcggcaacccgcagaacctcgtcatcgccgtcgagagcggcatcacgttcggccagttcctcctcggcgtgttcccggcgatggtcgtcggcatcctcgccaacacctgcatcctcctctgctacttctggaggtacctctccgccgaccgcgaccagctcgagggcggcggcggcgcgcatggtcccgaggtcgtcgccgacgaggaggtcacctcgcaccggttcaccccggcgaggatgtcccacgcgtcgtccgtcaacgacagcgactgcatcagcgagcccatccgccggagcgagagcatgaaccgcgccgacgcgctccgcagccggagctacaactccgagggcgacatccaggtcgccatccgctcgctccgggcgtcgagcctgtcgcgcgagat

SEQ ID NO: 25403 - DNA, 486 bp, Oryza sativa
  unsure (1)..(486): unsure at all n locations
  Clone ID: uC-osflm202120d09b1
ttttcactctcagatggccacagcctgatttgggaacaaaagatgacaccactgaggagtcagagtcatctgcagctcctgaatcatcacaagctggtggacatggtgcatcgacaccctcagatacagagaaggatgatcttcctgtttcaagccagcttttagataacaatacagctactatgaaggagagctcttcgactgatatctccaaatcggtggagaattataacaagttcaaggaagaacaagaactcaaactacaagaatggcttagacagtctgaagaagctgatgataataaagagtgagngtggttctagctggtgcaacctagtacatttgctagagcacataccatgccatgttgtatcctatacatgcttacttgatgcacttccagaacttcagatggtaactgtttatgaagcagagcttgtaatcatgatgaggtacataatttatctgcctattagggaacgctgt

SEQ ID NO: 25404 - DNA, 479 bp, Oryza sativa
  unsure (1)..(479): unsure at all n locations
  Clone ID: uC-osflm202120d10b1
ttgtttttccatataaactatctggggacagagcagccgacgttcactctgaacttctccaaaggttccagccagataatcgcacagtactatcaactaatacgcctgggattcgagggatacaagaacatcatgcagaattgcatggagaacacagcaatactaagggaaggcatagaggcgactggtcgattcgaaatcctctccaaggaggccggtgtgcccttggtggcgttctcgctcaaggacagcggcaggtacaccgtgttcgacatctccgagcacctgaggaggttcggctggatcgtgccggcgtacaccatgccggccaacgccgagcacgtcgccgtcctccgcgtcgtcatcagggaggacttcagccggagcctcgccgagcggctcgtctcggacatcgtcaagatcctgcacgagcctgacgcccattcggcccangtgctgaagatcttcagcgccatcgc

SEQ ID NO: 25405 - DNA, 511 bp, Oryza sativa
  unsure (1)..(511): unsure at all n locations
  Clone ID: uC-osflm202120d12b1
tcgttttgtctatagaccctcgtgccctaatgcggggacgagattcatccctgggggaccaaagaaaccgaattaacctccgagtcctctgctccctctttgcttcttggaccaggatctgatctgcgcggcgctcgaccggaatcgcgcggagatggacggcggcgacctgaggagcagcatcaagaagtggaacgtcatctacccggtgtacctcaactccaagaagacggtcgccgagggccgccgcatcgcctccggcaagggctgccccgaccccacctgcgtcgagatcgccgattgctgctcccacctcaagatccctcacgccatcgaattggataaggcgtatccacgagatttcttccangtgggaagggtgagagtgcagctcaagaaggatgacggctccccagtcaatcctgcaatcaaaacaaagaagcagctgatgatccaaatcgcggagcttgtccccaagcatcatggcatgactaagaagcangaaccagca

SEQ ID NO: 25406 - DNA, 324 bp, Oryza sativa
  Clone ID: uC-osflm202120e02b1
gcagttggatgattgggtgttgtgccgaatctacaacaagaagggagtgatcgagaggtacgacacggtggacgccggcgaggacgtgaagccggctgcggcggcggcggcggcgaagggtggtcgcatcggcggcggcggcggcgcggcggcgatgaaggtggagctctccgactatgggttctacgaccaggagccggagtcggagatgctgtgcttcgaccggtcggggtcggcggaccgcgactcgatgccgcggctgcacaccgactccagcgggtcggagcacgtgctgtcgccgtcgccgtcgccggacgatcttcc

SEQ ID NO: 25407 - DNA, 512 bp, Oryza sativa
  unsure (1)..(512): unsure at all n locations
  Clone ID: uC-osflm202120e04b1
ctcccgccccggccaggtgtttgacgaaatgggcgtgctccgccatggagctctggctcctcaacccggcgggaatgcgcggcctctccgccgccaagccccgcgtcgtgtcttccaggcgcatcgtgcggttccgcgtggcgtcgtcagccgcggcgccgcccgcggcgaagcccgggacgcccaagaagcgcgggaagacggagatccaggagacgctgctgacgccgcggttctacaccacggacttcgacgagatggagcggctgttcaacgccgagatcaacaagcagctcaaccaggaggagttcgacgcgctgctgcaggagttcaagacggactataaccagacccacttcgtccgcaacccggagttcaaggccgccgccgacaagatggaggggcctctcaggcagatcttcgtcgagttcctcgagcgctcctgcaccgcggagttctccgggttcctcctctacaaggagctncgccgcaggctcaagaaaacaaaccca

SEQ ID NO: 25408 - DNA, 460 bp, Oryza sativa
  Clone ID: uC-osflm202120e07b1
tttaaaataatactttattcctctctcttagttttatttttttactttgtttgagagagagaggatcaataatttcttgttgaaaaatggagattattagtcctagtagtagcagcaataacaattcacctgttcttgcaacatttcttgtggttcttgtagtgctcctagcatcatcacggccagcctcgtcgcagaaccagcaatccttcaccatcaaccccggcggcgccgcggcggcgaggcccggcggcggtaaaggcggcggcggcggcggctggccgggcagcttcagcgacttcctgacccagaacgtgcagcactacgtgctgagcgagcagaagtacgccgggaaggtgaaggcgctggacgcggagctgtcggcagcggatgccggcgcggcgaggtacgtggtgagcggcgacgggaaggggaagttcaggaccatcaccgaggccat

SEQ ID NO: 25409 - DNA, 404 bp, Oryza sativa
  Clone ID: uC-osflm202120e08b1
tttttgttccatatgctggcgaccgtcggcggggggatcgtggtgagccaggggcttttccgttcggtgaagcacggggacagtacgatcgaggcgatcaacctgtacacgggggggacggagaacgttgcgcaccactaatgtaccccatacttcgagatgagccgacacgacgtgatcaagcccatcctgctagaggacgaccagatataccacctggtctgccccgtttaccccgtacactacaagtacaaccctgttcagacactctagaccaatgtggttggtactctcaacatgctcggatttgcctataggatcaatgcccggtccctacttaccaacaccagtcaggtctacagagataccctgcaccatcctgaagtggatacttaccgtggcaa

SEQ ID NO: 25410 - DNA, 397 bp, Oryza sativa
  unsure (1)..(397): unsure at all n locations
  Clone ID: uC-osflm202120e12b1
tcgtttagtttactcgtctcgagggtaaatggagcttcacgtgcaggtctgaggggagtacatcgacatgaggatccagtgcgacgcgtgcgaggccgctgcggccacggtggtgtgctgcgcggactaggcggcgctgtgcgcgcgctgcgacgtctagatccactccgccaacaagctcgccagcaagcaccagcgcctcccgctcgacgccgagctcccctccgncctcccgcgctgcgacgtctgccaggagaaggcggcgttcatcttctgcgtggaggacagggcgctcttctgccgggactgcgacgagcccatccacgtcccggggacgctctccggcaaccaccagcgctacctcaccaccggcatccgcgtcgggttcagctccgtc

SEQ ID NO: 25411 - DNA, 505 bp, Oryza sativa
  unsure (1)..(505): unsure at all n locations
  Clone ID: uC-osflm202120f02b1
gtgttctcacctcagccacaaacaatctattgtggaggatacctgaaccatttgggccaatgggaagaatacccccattatgtcaatatggaaggactccattctgtatcacctggaatttacaacgacaaccagtcaatcatgttatctcctggatatgcaaacaaccctcaaatgatgtatggagcttattctcctggcgttggagatggccagccatacctcccattgcactttcccttctcaagtccttactaccagccaccagcctctcctagcatgggatactctaattccgccactggaatgtctcaaggagatcctatgctgcagcaggagtacttccttcctgacggncttctctactcgccaacaccaggttatcatcaaccattcgggtcttttgacagagcatccacccaaccaagcagcactcctggtttgtttggtcaaaggaacacaccgctggctcttggaatgcatcatgggtcaatgtatgcccctg

SEQ ID NO: 25412 - DNA, 527 bp, Oryza sativa
  Clone ID: uC-osflm202120f04b1
ttctcccctcctctcctcctcccgccgccgccgccgccgcaaaaacccgaggccgagaggaggagacgggcgcgggggctgatctcgtcagcgaggcgaggcgaacgggcgatccggtgcggtgcgggccgggtggacatggcatcggaggacgtggtggggaagagcaggggggacaccgcggtcaccaccatcgtcaacctggcggaggaggccaagctcgcgcgggagggggtcaaggggcctggttaccaggtgctctccatctgcaagtctctcttcgccggtggcgtcgccggtggagtatcacgtactgctgttgctccgctcgaacgaatgaagattctgcttcaggtccaaaaccctcacagtatcaagtacaacggtacaattcaaggtcttaagtacatatggagaacagagggtctccgtggactttttaagggcaatggtaccaattgtgccagaattgttccaaattctgccgtgaagtttttagctatgagcaagcatcaagtggaatttta

SEQ ID NO: 25413 - DNA, 462 bp, Oryza sativa
  Clone ID: uC-osflm202120f05b1
atctcttctcttcccctctcgttagggttaggtttgtattttctctctctcgatttctctcttcgcttccacttcccaaaattctcgagtcaaacctcgtggcgttcggccatggcgacggcggcggtgctcggatcccacgacgccctcgacaaccggatgcatctgggggccttcgccgtgtccccggcgtcgaagccgaggcggaggcggcacagcaaggcggcgtcgccgccccccaaggtggcggcggtgagctcgccgccggtggttaagtcggcggcgagggtggcgtcgcctcctcccaaggctgcggcggcggcggcggtgcctcaggggcgtcgctcgccggtggcgaggaagcaagggtcgccgacgaaggagttgccgaagcagaggctcgtgatgggggagatccggatcctcaagcgcggcgaggagccgccggtttcctcgccgtcg

SEQ ID NO: 25414 - DNA, 365 bp, Oryza sativa
  unsure (1)..(365): unsure at all n locations
  Clone ID: uC-osflm202120f06b1
atccaagtccaacccaccaccgtccagtccgcctggatcccgaggatctccttcccaaagcatccctgattccttcccaaacgcctaaaccccaccaccgccaccgcccatggccgacggcgccagcgcgaaccccggcgacccgccctcgccggcctcggcgaggtcggggcagcggaagcacgtccccgactggctcaacagcccgatctggtccgcgcctccccctcccgcgcgccacccgcccccgtnncccttncccgnccgncccctgctccccctcctnccacgcagccctgacctcccccgccgccgtcctgccggtgcggcggaggcggaggctcctaccacggctgcgacggcga

SEQ ID NO: 25415 - DNA, 491 bp, Oryza sativa
  unsure (1)..(491): unsure at all n locations
  Clone ID: uC-osflm202120f07b1
gtaaggttggaggcaaggaagagagacagaggagaaggaagagcaggaggggagggaaaaggaaaaccctttctctctctctctctcagcctctctctccctctctcttcttctccttccttgcaccaccgtcctactcaccgtcgcatcatccactgatccggccggcgatatcacctccatccatccatctcattacggtcggcgtcggcggcggcgacgacgaaggcgggtgagatctcaccggagaagtgcaggcgggcaggatgcaaggaggagggccactcagccccgacgagcaccgggccacctcgccgccggggataatgcaccaccagccggcgatgacgatcgtcgtcgccgtggaccgtgaccggaacagccagctcgccgtgaagtgggtcgtcgaccacctnctcaccggcgcctccaacatcatcctnctncacatngncgtccacccccctgccgccaaccatggatttgccatg

SEQ ID NO: 25416 - DNA, 476 bp, Oryza sativa
  Clone ID: uC-osflm202120f08b1
tttgttattaccacacccacctccatctccgcctgcgccgccgccgccgccgaccaagtcgagggggagatccagcgagagcgaggaggaggaggaggatggcggtgatggaggagcagcaggagggagccgcggtggtgatgcggcggaggcccaagacgaagatcgtgtgcacgctggggccggcgtcgaggtcggtggagatgatcgggcggctgctccgcgccgggatgtgcgtcgcgcgcttcaacttctcccacggatcccacgagtaccaccaggagacgctcgacaaccttcgcgccgtcatggagagcaccggcatcctctgtgccgtcatgctcgacaccaaggggccagagatccgaactggatttctgaaagatggaaaacccgtacagttgaagaagggtcaagaaatcacaggtccaactgattatagcatatagggtgatgacaacatgatatcaatgagc

SEQ ID NO: 25417 - DNA, 513 bp, Oryza sativa
  Clone ID: uC-osflm202120f09b1
tctcaagacaattaacacgacaaatcatggagagatcagccaccgtctttgtggcgctcaccttgctcgtcgccggcagcgtcgtcgtcgtcgtcgtcgacgcctgcgacggcgtgccgaggatgtcggccgtggaggcgtgcaagcaggcgagcgtgggcccggccatgtcgcggacgtgcgccgagacgctgggaacctcggcggacgagcaggaggcgacggacttcatggtggccgccgcgaacgccgcgacggagtcgtacaaggctggcaaggaggccgtcggcaaggtgctctccaacccgctggcgcccgacggcgagcggctgccgtgcctcgtgtgcgcgaacaagtacgacgacgcgtcgatgctcgtcgccagcaccgccgacgacgccaagcgctgcaagctgagcgccgacagcctccccgacctcgtcaccgccgtctccgccgtcgacgagtgcgccacgaagatgttcgaggagagccggaacacgacgtcggtgt

SEQ ID NO: 25418 - DNA, 510 bp, Oryza sativa
  Clone ID: uC-osflm202120f10b1
tcagctccagccacacgagcctagttcaggtagatacaatggcgtccaccgcctctttcatgctcgccgtcttgctggcggtggccgtcgcggcggcgccggcgagggcggtgcgatgcccgccgagcgacaagcaggcgctgatgagagtgaagcagtcgctgggaaacccggcgacgctgtcgacgtggtccctggcgtcggcggactgctgcgagtgggaccacgtccggtgcgacgaggccgggcgcgtgaacaacgtcttcatcgacggcgccaacgacgtccgcggccagatcccgtccgccgtggcggggctgacggcgctcatgtcgctgtcgctgttccgcctcccgggcctctccggccccatcccggcgtgcctcaccgcgctctccaacctccagttcctcaccatctcccacaccaacgtctccggcgtcatcccggactcgctcgcgcggatccgcagcctcgactccgtcgacctctcccacaacagcctgaccg

SEQ ID NO: 25419 - DNA, 482 bp, Oryza sativa
  unsure (1)..(482): unsure at all n locations
  Clone ID: uC-osflm202120f11b1
tgtgtctcggcgtagattccggccggagggcgggggcgcggagggtggagccagcggcggcgcccctacctccacccgccgctgccgacgtggtccgtccttgtgtaccccgcgtcgtcggaaaggggagagtgtaggggcaaggaaggcggcgtacagatccgccgccccccgttctcggaagagacggcggcgcgcggatccggtggcctctgtcctctggagcggccaggcgcggctgggaaggacggtggcgtgcggatccatcgcctcccgtgctcgggagcgacggcagcgcgcggatctgcccgattccgcccggcttaggcgggcgggttcgagcggccacggcggcggcagctgcgataacgacgacggccatggtggctgcgacgacgacaacgatgggcgtttggggtggagcggcctctccgcgcgtntgctcctctcctctcctccgacgtcgcgccacgtcccgcaca

SEQ ID NO: 25420 - DNA, 492 bp, Oryza sativa
  Clone ID: uC-osflm202120f12b1
tcttttcacattcagatgcatgacctaatggggtgctccagctagagactatgggagagagagagatcatggcgtccaaggctgtgctggtggtggaggtgaagtctcctgcggacaagctgtggacggctctgcgcgactcgacggagctgttccccaagatcttccccgagcagtacaagagcatcgagaccgtcgagggcgactgcaagtccgccggcaccgtccgtctcctcaagtacaccgtatgggtgccgatggtgacgttcgcgaaggagaaggtggaggtggcggacgacgagaagaaggtggtgtcgtacagcgtggtggacggcgagctggtcagcttctacaagaacttcaaggtgacgctgcatgtgacccccaagggcggtgccgtcgtccccgccgccgactgcgcggtggtgagctggaccatggacttcgacaaggccagcgaggaggtgcccgacccggacgttatcaatgaga

SEQ ID NO: 25421 - DNA, 460 bp, Oryza sativa
  Clone ID: uC-osflm202120g01b1
accgtatccttccccaaaatccccaatccccgagctgtttcacctccagcgagcgagcgcggcggccatgtcggggcgcggcaagggcggcaaggggctcggcaagggcggcgcgaagaggcatcgcaaggggctgcgcgacaacatccagggcatcaccaagccggccatccagaggctggcgaggaggggcggcgtgaagcgcatctccgggctgatctacgaggagacccgcggcgtgcttaagatcttcctcgagaacgtcatccgggactccgtcacctacacggagcacgcccgccgcatgaccgtgaccgccatggacgtcgtctacgcgctcaagcgccagggccgcaccctctacaggttctggggctgaggtccgccgctgcatccggctggccgtggggacatgtctcggctcgcggtcaagaaatccgggaggatatctgcaattgat

SEQ ID NO: 25422 - DNA, 479 bp, Oryza sativa
  Clone ID: uC-osflm202120g05b1
ttctcttctcttcccctctcgttagggttaggtttttattttctctgtctcgatttctctcttcgcttccacttcccaaaattctcgagtcaaacctcgtggcgttcggccatggcgacggcggcggtgctcggatcccacgacgccctcgacaaccggatgcatctgggggccttcgccgtgtccccggcgtcgaagccgaggcggaggcggcacagcaaggcggcgtcgccgccccccaaggtggcggcggtgagctcgccgccggtggttaagtcggcggcgagggcggcgtcgcctcctcccaaggctgcggcggcggcggcggtgcctcaggggcgtcgctcgccggtggcgaggcagcaagggtcgccgacgatggagttgccgaagcagaggctcgtgatgggggagatccggatcctcaagcgcggcgaggagccgccggttttctcgccgtcgcctgctccggttgcggc

SEQ ID NO: 25423 - DNA, 459 bp, Oryza sativa
  Clone ID: uC-osflm202120g06b1
agaagagcccagattccaaatgaagaaatggaaactcgaaaaggatccttctgattctcaaagaatgaggggcaaggggattgataccgagaaagatttcttcttattataagacgtgatttgatccgcatatgtttggtaaaagaacaatcttctcctttaatcataaatggaaagcgttcaattagaacatgaaaacgtgactcaattggtcttagttagtcttcgggacggagtggaagaagggcggagactctcgaacgaggaaaaggatcccttcgtatgaattgaacgaggagccgtatgaggtgaaaatctcatgtacggctctgcaaagggacaggaagggtgacttatctgtcgacttttccactattaaccccaaaaaacccaactgtgacctacgtaaagttgccagagtacgattaacctctggatttgaaatcactgcttatatac

SEQ ID NO: 25424 - DNA, 476 bp, Oryza sativa
  Clone ID: uC-osflm202120g07b1
tcgttatcagaggccactacccgtgcaccacgcgccctctcccacaatctcgctaaaaagttgattttctttttcagcttcctcctcccctcctccgcttctcaatccactagcatacatatcagatcagattcctgtacacttcccttttctcgcatccaatcccgactatcgcagcacccatcaaatcatcatccttttgcaaaacctaaaaaaaaaaagggtagataagagaaggttcttgcatccagagaggacactgtccgtcgtgcagcgtttcttgcttggttgcttggttgaatcgggtggttttgggcggatggcggggaagtgaaaaaagatggcttccatcgacgcgcagctgcggatgctggcgccggcgaagctgtcggaggacgacaagctggtggagtacgacgccctcctcctcgaccgcttcctcgacatccttcaggacctccatggcgacgacctcc

SEQ ID NO: 25425 - DNA, 471 bp, Oryza sativa
  Clone ID: uC-osflm202120g08b1
ttataaaaaagaaagactgcgaaaaccctggtaggagaaaacccaccggcgggcgatggcgtcgccggcgaaggcgtagcggcggccggagggggcctcggtgctggagaccctccccgcgctcccgctcgcgatcatcatcgccaaggccggcccccgctgcgccgccgcgctcgcctgcgccagctccaccctccgcgccgccgcctccggcgagggcctctggcgccacttctgctccgacgacttcgccctcgacgcccccctcgctcccggcgacctccctctcccttccttcaaggatgcttacaaagcttgggtccaatcttttgggatgtaccctttgccacttgttaagaggggtgaagatcttctggagctcattcagggcatggctatgcgagtattttcccgaagggctgaggactctaggggaaggcgtttcggaagccgagatagccgtcgcggaat

SEQ ID NO: 25426 - DNA, 363 bp, Oryza sativa
  Clone ID: uC-osflm202120g09b1
tttctttatctaacaaacttaaaaaccaacttgtggactttcaatcaaccaaggtgtcactaaaaacatattcaactgttataatagtacagaaatgtcttattcatgacacaatacatatggtttgacaaaattctagcatttgaatacagagatgtacatttgggactggggtatttttcaaagactccaacatgtactctcattactattttaaaaaaaactctaccttttatgattctattatatctaaaaccatagcctaaactttttgcatgacaaacatcattagttacactcatgagagtactagttaactagttatgagtacacacgttataacttacacgattcccaggtttc

SEQ ID NO: 25427 - DNA, 193 bp, Oryza sativa
  Clone ID: uC-osflm202120g10b1
tgcagcatagtgtatgctcggtcgtccggtggtagacttgtcaagaatgaaggtggaaatcattcatcggccatcaccatacatgaagattcaaccaccgacaccattgatacctgatgctgccttctctgccgcacgctcacctcagtgtctgagatggttttgatgaccctcaactttcaaataaatagtg

SEQ ID NO: 25428 - DNA, 364 bp, Oryza sativa
  Clone ID: uC-osflm202120h02b1
gttctctctgctgcgctgctccgcactcgtggggggggttgttcatttcggcggctatggctgccccgctgtcaacactgaaggggcggcgctgctcaagtttcagtccagggtggtggaggctccgcatggcgccatggcacgttggagccagcggcatggcgatccttgccattggcaccgcgttccttgcgtggatggcagggcggagatgtctgaatctaaaggatctctcactaagagggaccttgactacagaactaggaagtcctaggcatctgagggctctagcactctccaacaacttgttcgatggaccaataccgaaggaaacgagtgatcttgcaatgctggaaatactgga

SEQ ID NO: 25429 - DNA, 294 bp, Oryza sativa
  Clone ID: uC-osflm202120h03b1
gctcctccctttttttttttttgcccacggccatggctctcgtttcatggaccggtaatatctgctcgcaatgtgcactatgtcagtcgtttaatactcgtttatttctgttcggttaaaactgatgctctgagtccgattattgtccatcggctgttttggaatgcgagtatttacattgctacttcctgtgtcgttattttcgtttgtgctattccctgcttttgctgctaaaaaaaaaaaataaaaacggaaaacaaaaactaaaagatgaacataacaaccaaaaacacg

SEQ ID NO: 25430 - DNA, 462 bp, Oryza sativa
  Clone ID: uC-osflm202120h04b1
ttctttagctgctggaggcggcggggcccgagggcgggcccgtggagttcaaggcggacgtgacggtggcggcggactggagcggcgacgtgatgacgatcggcgaggcggtggcgaaggtgccccctatgaacaaggagcggtacaccatctacgtgaaggccgggacgtacaatgagtacgtgtcggtggggcggccggcgacgaacgtgaacatgataggcgacggcatcgggatgaccatcatcacggggaacaagaacttcaagatgaacctgacgaccaaggacacggcgacgatggaggcgatcgggaacggcttcttcatgagggggatcacggtggagaacacggcggggccggagaaccaccaggcggtggctctccgcgcgcagagcgacatggcggtgttctaccagtgcgagttcgacgggtaccaggacacgctgtacccgcacgcgc

SEQ ID NO: 25431 - DNA, 500 bp, Oryza sativa
  Clone ID: uC-osflm202120h05b1
gtccatactctctcagtttcactaaataaaaggggagatctttgctattatgatggggacctccactcagcaagaagctattatgcgcgttcgttggacgttcgcagaagtgcagtaaaagaacactcagctgtggcttcccaggtcattgatgtagcaacttctcttgccaaagttgcggatgtcgatagaaatcttgggaacgaaagcatggcagttgagggttttgaggaagcaattaaatgccttgagaatttgaagctggaatctggagaggccagtcttgagcagcggcgtctctcggttctcgactttctacaaaaacaactggatgacaagtgatatgcacggttctttgaagagcacactcacaggatatatgtactatccataacgaggatcagctccagtagtctctgtgatgcatatggaaggggagttgctccagaatgaatggtaactggggtgtatttgaggtttgctgcgacacagaataaata

SEQ ID NO: 25432 - DNA, 500 bp, Oryza sativa
  Clone ID: uC-osflm202120h06b1
cttatgatgcatctgtgataaaagagacacctggtgagccatgggattcaaggggggactcatccctcacaagggaagaaagggaacagaaacggacgcaagcgagtgtcagagcaacatttgtgcaagacctgctgctcactactttatttggagattaataaatcaagatgagcctaagtagtcgatagatgcatgggtaaatcctggtgcatatttgcatagataagtgcccggtcaaattgctgaaggtaatatccatggcagataggcacgcttctgcggcaccaggcgtcgtttcctcccgtaaggtgcagagttgatgtgggcacgggggcatcttaagtgttattgtagccggtctgtaatctgtatctccagttccataacaatccgcgatcagcatacgatacacgtagcagatcgcggttgtgtttgtagcgcttctatgtttagaagcattggtttcttgtaccaacgtaataattatgttacgggac

SEQ ID NO: 25433 - DNA, 408 bp, Oryza sativa
  Clone ID: uC-osflm202120h07b1
gctttctggtttgcgcgccttttcacagctgggcgggcaggaaggctgctggggctgggatgtacactcttccaagcagggagcagctgatcgtgaggctcaacgaaactgattgctccgtgcacaaggagatgaggagatacatcgatgcctctagccctatcatagactacatcgacaaccttttcctctcgaggagcattagcctagactggtgaaactgaactggagttcatatttgcagctgctgacaaagctgtcgttgatgccattgttttgttcttttcatagctattatgtagccttgggtgtggttgtctggtggatgctcaccctgactcccttcgcagagtcatgtgtaatgtataactgtatggtgattcagtacgatcatggataacctgtttt

SEQ ID NO: 25434 - DNA, 84 bp, Oryza sativa
  Clone ID: uC-osflm202120h08b1
tactatagttaaagctccccgggctgagtacctatccttaattccctgatccacccacacattttttttacacacacacctaca

SEQ ID NO: 25435 - DNA, 394 bp, Oryza sativa
  Clone ID: uC-osflm202120h10b1
gctcttagcctgaacacattcatagcgtacttgggggctgattctctcctacctgaggggatcgccatactagtgagggtattatggattcttcttcaccatcgtcgcgcacctaggctcagagacagacgaactttgattacctctttaaggtgctcctaacaagtacatctggcgacggcaagatcagtaccctcctccgatggacttcaaactgttcggaggatatgtccgccaccatgaagcatcagactgcaaggtcaagatggttaacaccgccagcacaagactagaaactggcgatctgagacacagctagacaggagccattcagaacctagaccagctcatactacagcggtgcacatggctttagcatggcgcacgacttcac

SEQ ID NO: 25436 - DNA, 502 bp, Oryza sativa
  Clone ID: uC-osflm202120h11b1
ttcttttaggagctcgtccgcgtgctccagtcggggggcatgatggagaaggccagggggcacatgacggcggaggacgccgccgactgccgcgacgaccgggccaaggccatcgtcggcgacatggagccctacgaggtggattccgtcgttatgggcttgctcaaggtgtggatggacgacaggttcaagatcaccatggactgcctcgccagagccaaagaaaccgagagctggataccaaaatccaaagatgaaccttttgccgggtcagcgatggagatgatgaagctggctaagtataccgtcgaagagttctccgagatcccggcgagcgcgaaagacgaggtggtgcaagacctcgtcgacggcctcgaggcgatcttccaagagtacatctccttcgtcgcctcgtgcggggccaagcagaattacctcccaccgttgccaccattgacgaggtgcaaccaggactcgggcttctcaagctgtggaggaagac

SEQ ID NO: 25437 - DNA, 387 bp, Oryza sativa
  Clone ID: uC-osflm202120h12b1
tcggttcgaggccccgaccgcagaggaagcatgggggcccgcggcggacggcccggcggagccggaagcagactcgccggcagcagactcgcctggccccggcacagccgacgaggcgggcagcgcgggcatgagctccggcgtcacggcggccgtggtggccgccgccgccgccgcgctctcgctttagatggcgttggtgtttcggtggcttatatattagggaggagctcggagggccggcgattcttgaggagttcggcgatttaattaggccgcttgctgcttaatttctccttagaaaaaattaggcaccttgggtctcggctgatcgctcggccgtttgtaatttgaacaacgatgtactaatacacagttgggtctctg

SEQ ID NO: 25438 - DNA, 396 bp, Oryza sativa
  unsure (1)..(396): unsure at all n locations
  Clone ID: uC-osflM2020114a01a1
aaatangcacatgtccgtttattatattttactgggtgatagttcacagtcacaaccatgatgaaacatatcaagttaatagaggcagaaactgattagaaagagtatttctaacgccagttgaaacagcgatctcagcagtttctactactttgcagggggtgacggtgcagttgctgtgtagagggacttcaactgcctgtatataagcttgctgtcatacactgctagctgcagctccatgccatccgaccaccattgctccagcccatgcgcttcaagaaacttctgtgggcctttcgatgtcacaaaaagcttcgcgaccacatcaccagcgatctcacttgcctttcgttgctgctgctgctcatctgaagcaccatcagtggtggtagt

SEQ ID NO: 25439 - DNA, 545 bp, Oryza sativa
  unsure (1)..(545): unsure at all n locations
  Clone ID: uC-osflM2020114a02a1
aaatanaatgcattctacttcaataattcaagacggggttatacttagttggcacacatgtactccaccccctatcactagagttgttttcttttttgtacaagatcatcctaacattcccacaaggacataaagaaacagcagaaccttcccgggaaaatttcactgagacaggtgcattccgtgcacgtacaataatcatcaccatcatcgtatcatccaacctacaggaaaacgcaaattcaaggtactcttgtccaaacctgtaggtggccagtgatttgctcccatcggctacaactaccagactcaaaaaaactagacacaggtatgatgctaataagcttagcatgatcgactgatggacagacagtaataacaaataggaaacggagggaactatatgtgtcaactcgatgaactctataattatggatgatttccagcgccctcctggcaaaattaacgtccttgtaaatttatcgtcaccatctaaaaccacttgaagaggatgccctcatgggtggcgaagaacggggaaaaca

SEQ ID NO: 25440 - DNA, 330 bp, Oryza sativa
  Clone ID: uC-osflM2020114a03a1
tttttaaataaattccgcgccattgaaaagagtactggggtggattcacttattgctacccccatgttcttcaattctcgtacatcaccatgacagatttgattcaccgatgtgttaccctaccataccatgcacatgcatacacctccttccttctcatagccgatcgaaactcaacattacagacaaagaagcggaaaaatgaaaaagagaacgatttttttaacacgagaattgaatgcacgacgacgcgcgcgcgcgagaaatctagttccacatccaccagcagctgatctgctggccgtcctcctcgtcgtcgtccgcgtgttg

SEQ ID NO: 25441 - DNA, 419 bp, Oryza sativa
  Clone ID: uC-osflM2020114a04a1
ttttaataaatttccccttttttttttttttttcttgttgtttttttttttgggactggggggcccccccccccggcattttcagaggggatgcattcatatccggttacattcaggggaacatcaagaaacggggtccacctgcccggagaagggacaaaaagcaagtactatgcaaaagaggctatatttggctattggccattgcttatgggctctatttcggttgttgcagggcaggcgccttcaaaccttggcccttgcaggtgccttttcaccaaggccacgaaaatgccggcgcgggtgaagagcttgttgggcgggccgttttccaatatttgggcgagggaaatgacgggaaccgtgtcggcgctcttgaccggggatagccagtgagacattaaaagcacgggcctccc

SEQ ID NO: 25442 - DNA, 428 bp, Oryza sativa
  Clone ID: uC-osflM2020114a05a1
cccccccaaaaggtttggcctaataattaaaaaattattttggttttccccggcactttattacaagaaatttttttattcctacaaaatttgggatgtggtttttacaaaaaaaagggtaataaaaaggggttttttttatgggcaggcccatatgggttttttttaaaaaaaaaacaaattatttaaaattttaagataagttggaaacctaaaatttttccaaggtttccctcggctaaaaattttatatggtttaggttttttggggggaaaactgggccttaatcttggccacccccttgtcgtaaatctggaaggccttgggaaggacggctttagccaccgtcggaaagggggaaaaaagggtgggggaaatggactgttggccgggaagcttctttttgaagggggaaaccacggggggg

SEQ ID NO: 25443 - DNA, 476 bp, Oryza sativa
  Clone ID: uC-osflM2020114a06a1
aaataaattgaaaacgaaatctttattccttgggggaaggtaaaatggtggatacaaggtaaataaaagaaaagatttcatccacaattctacataattttgggatgagcctaaatatgatcaaggttacaaggaaacatggtgtatatgttctattacagtaacaactctaagttacctactgatgcctcctccttgtcctccttgcaggggtggattcagaaactcttgacctcctaccttgtgctggccctcccgctataacacccacggtgctagaagtcgacgcttgctccacagatgatgactgttggggagcgacagcagcagccggtgcagcaccattagcatcaggaggtggcaaaggagcctgattgccactcccagcatcagcattgaccacctgctgctgtgttgctggtgcaaaaggcgcatcttgtcttgcctgccttcgacccctaccccttggccggggt

SEQ ID NO: 25444 - DNA, 363 bp, Oryza sativa
  unsure (1)..(363): unsure at all n locations
  Clone ID: uC-osflM2020114a07a1
tttaaataattttttcntttttttgctaacaggaacggggggctgtactatctggcaaattattctcttccattttatcaatagacatggaaaattggaaccaacaccaaaccccattatacgattctcccactgctccaaggctaacagaaacgggagaagcaaataaagcaatcagtcacggctataattctgtatacatgcccctaccaaaatctttttcttatgtaccagctttgctctacacaaataaagcaacatctaccttatcctagcggggccatcacactcgacacaattgttttgcccggaaacaagatggaaagccttgaaaaaaaatccctgacgcccactacatcacga

SEQ ID NO: 25445 - DNA, 592 bp, Oryza sativa
  unsure (1)..(592): unsure at all n locations
  Clone ID: uC-osflM2020114a08a1
ttnaatgacatcttcagagattattattcatttgggacgaacaacacatgacatcttcagagattattattctggacagaccgtcttgcggcaaaagttagaagacgtcaggattgaagtgcccggggatggagttgttctgctgagcctgcttcagatgcatcgtcagcgcatagttgtttatctctagggtcctcagttgctcctggtactgcacaacaagttgcttcaaactctgaacctcctggctcctctcgtcgaactccttttggcgctcatgttgaatggcgaccgctcgcttgaggacagcgttctctcgcagcacgacggtcaattgctccttaagcatcatattttccttttgcaagttttgtgctgcatcagctcctgtacgctccacgattgacttctccaaaacttctaaagctcttgaggcgcgagcacgcgcatcgcccatgtcagatgcatttgtcatctctctgacaaatagctcaacccattcagaaccattattacctgtctggaactatctgcagcagctgggtgttcattagctgtactcacaccaccatattaacaatcccttaacaga

SEQ ID NO: 25446 - DNA, 453 bp, Oryza sativa
  Clone ID: uC-osflM2020114a09a1
ttaaataaatttttttttttttttttttttttttttgtggttttttttaaaatttttttttttttccccccttttttttttttttttaaaaatccccaacccttaaaaaaaacccccccaaaaaaacggaccccagaaaaatttcttccccccaaaaagcaaacaaaaccccccccccccggggcaaggaaaaggcttaaaaaaaaaccctaaaaaaaaaccaaagctaaaacaaaaaaggggaacaaaccaaacccccaaaaaaaaaacacaagggaaaatccacatttttttttttcccccaacccccccctgaaacccccacattttgggaaatttttttaaccccgttataatcctcaaagggtccccaaaccccccctttttccttaaccccaaaaacaactcccggtggcccccccccctctacatttttttaaaactcccccaaaa

SEQ ID NO: 25447 - DNA, 448 bp, Oryza sativa
  unsure (1)..(448): unsure at all n locations
  Clone ID: uC-osflM2020114a10a1
tntaaataatattcacaacaccatatttcattgatgggggtcagaacctgcacagaaatacacactaccggtacagatctcaccttctctccaatactcgtacatccatccacgcggtccacacgaatacgtacatctatacggtacacgtacgtacatctactgcaccgngtacacacacgcacactctcctgcagagacgcgcatcgtcgtcaacctagctagcttagctgaaggcgatgcgtcgccatggcagcacggcggcggcggcgctcacttgccggggacgaagttggtggcgtaggcccaggcgttgttgttgacggggtcggcgaggtggtcggcgaggttctcgagggggcccttgccggtgacgattgcctggacgaagaagccgaacatggagaacatggcgaggcggcccgtcttgatctccttcaccttgagc

SEQ ID NO: 25448 - DNA, 444 bp, Oryza sativa
  unsure (1)..(444): unsure at all n locations
  Clone ID: uC-osflM2020114a11a1
ttaaatanatttttttttttttttttttttttttgggttggacgtaacaaaacgctttgcccaagacaagtcaatactacaacatttggggggagtacagaggtacaaaagtcaggcaccgtaagcctttcgattaaaaaccaaactgaaacacgcacgattttttaacaccccacgaaaaacaatttgatagctagctcctttggggggggaacctaaagagctttatttttccaaaacatccacattattatttggcatgactatatagtttcgatacctaaaaagggagcgttcactcagggatatccgccatggcttcctttcatttaagcccggccaagatgcttcaagccttgttggcaatgttgttggaaaggcagtcaagccccttatacaaccccttaccagagggagcacatgtgctttggatgtaccaatgcc

SEQ ID NO: 25449 - DNA, 473 bp, Oryza sativa
  Clone ID: uC-osflM2020114b01a1
tttttaaataaatttagacacttgtacaaaatttgatgcggggatatcaagaatcgcttggaaaatgacctctgtcaatttgataactgcatgtgcatgatacaacaaagaattgcctacctaaaacaaatggtcaatgtggtacttacagatttcacattcaatgtggtacttacagatttcacattcaatgtggtacttacagatttcacatactttcagccagcaagctcacttatcggtacccggtccatgatgttgcaagcaatttgtgcgttcttttggagaaccggatctatatctggcaattttggaatctgggctagtaaatcaatcgtgcgtctgagcagacgggctaaatctccatcatccattgccgagtccatcattatctccctccaggtcaaccctgatgcccaggctttaaccattccagcaaactgggcatctatttcgcaaggaatctttacact

SEQ ID NO: 25450 - DNA, 445 bp, Oryza sativa
  Clone ID: uC-osflM2020114b02a1
aaatgacaagcaagaagtatatatattcatccgtttgtcaaactactacaagaggtcgagaggaacacataatcaggagggattgcgacaatttacagcaacaggagtctggagatcgaggcaagaacaagacaggcagcagcagagctaccctcttcatttccactgaatttttacacatttggaatccatggaaaccgagccttccctcccgtcgtcgtggtgtcaccggagtccgatgagaaaaatggtcatggcgtgctcataatccggatcgctcgccggcgtcggtgaaggaggcggggcgattgttcgggcggctgttgaggagtgggttcagagccttgacgacgatgctcatgttgggcctgaagtccgcctcgtactgcacgcacagcgcagctacggcagccatcttggcaacagccttgggaggataatcccc

SEQ ID NO: 25451 - DNA, 479 bp, Oryza sativa
  Clone ID: uC-osflM2020114b03a1
aaatcaatgaaaaaaaatcaagctctaataactgttggtcccccatgataatgttttggggccgtggcaatacaacacttgggtgatttaggctgtatgctatatgaacagttgacaaaaggctaacttgcttaaaatctatacgtatggacgcttgcgccggagttgatggtcactctatgatcctgtacatgtgtgcgatctcaaagcagttcgccaattccatcctacggatgcggcgatatgcaaactggaccaaatttgatgcggtctgcgagcaaatttaattcagcctggagttcagatcttcccgttgtttttccgtactctgaaatgatccatgtagttgtagaagtaaagaattgctgacaacaaaaatcgagctcagggccatcaatccccctacatgataccatcaacaaagacaatattaaagctcataattttaagataatggggggatgcaaacaaaccatacg

SEQ ID NO: 25452 - DNA, 435 bp, Oryza sativa
  Clone ID: uC-osflM2020114b04a1
tttttgaataagaaaacttctttattcaaatctcagcaggtatagcaagtgcccatatttaagaggagtacagagtacagacgcatcacaatcagaaaaccaatagggggagtaccatgtggaaatgtacatcaaaactacaaaaatctcatattttgctggcgaactggaggccttccttcttgagctcctctatgttggcaacgggcggctgagttttcgcgaccttggcaatggccttgttctcatcaggtgacccaccctccaggaaggcacccaacaccttgccgtccttgatccagtaggacccgaacttgggcttggcagaggtcgggtcactgtctccgaacggatggtgtcgcaacgttgtcgccgtagaattgccatcccaggtcgaatgaccgggagtagaaatatggcagatagtcatacttc

SEQ ID NO: 25453 - DNA, 431 bp, Oryza sativa
  Clone ID: uC-osflM2020114b05a1
aagtaacttacaacgcacatctcgcaaccaaaggagagatcactcttacagttacagaggaacttactatacatcttcctaggattagatacgtagaacaagtgacaacaacttattgcactatagaccccagctaaagtactagtagtagcttattcgggcacaatcacaaaggtggcaagctaaggttcttacaataaccatacaaggccatgcttatgccccagggatagataggaaggtatacacagcttgacatatttacaatcacgcaggatgcaaggggatcacccactgagggcagtcagacctccttccagcaagggaatagtaggcaagaacctgagcatggctatccacacagggttctccatcttctgtcatatgattaaaactctcaaggctcggaggtgtaaactcgatgttccaga

SEQ ID NO: 25454 - DNA, 427 bp, Oryza sativa
  Clone ID: uC-osflM2020114b06a1
ccccccccggaaacagcctccaggatgctttaattaatagaccacaccatacagcaaacatagtataaacattgtcatagagagtacagctgatagcagcttggaatattctagcattactttggtagcatccctctacaaaacatagcagacatcaccagcttttcatcttggccatacacattcaacatggtttgctagtgacagaccacactgaccagaacatttcgtctcctcagtaggcaccagctgccatgagcagctcatcaaggctccagatgccctcgttgcttgccccgtcttgtgtagcatcattttgcagaaggttgtccattgattcatctgagctgctctcaacataaggtaatggcaaatacttcatctcgggatcgaaggtgggcatgttttgtgcgagattaggcatgcc

SEQ ID NO: 25455 - DNA, 515 bp, Oryza sativa
  Clone ID: uC-osflM2020114b07a1
ttaaattagatacgcaatatgagcacaactatatagcttaataagcacattacagcacacacatggccaaggcagttatttgaatcagtctccaacatacttcaaatcatagaccacaccatacagcaaacatagtataaacattgtcatagagagtacagctgatagcagcttgtaatattctagcattactttggtagcatccctctacaaaacatagcagacatcaccagctcttcatcttggccatacacattcaacatggtttgctagtgacagaccacactgaccagaacatttcgtctcctcagtaggcaccagctgccatgagcagctcatcaaggctccagatgccctcgttgcttgccccgtcttgtgtagcatcattttgcagaaggttgtccattgattcatctgagctgctctcaacataaggtaatggcaaatacttcatctcgggatcgaaggtgggcatgttttgtgcgaagataggcatgccattttcctggggcacg

SEQ ID NO: 25456 - DNA, 363 bp, Oryza sativa
  unsure (1)..(363): unsure at all n locations
  Clone ID: uC-osflM2020114b08a1
ttnaatanagtatataaaccggttccgtaaatatgttaaggcgagatatacagatgccaaataggtgtacagtactcgaaattacaaagattataccagtataattaatcgttgggattaagagcatgaacgacccagttacgaggggtgcacggagtacgtgtgttgcttgcgcgcgtgtggatcgacgagattcttttgcaaaaattacctaattaattaatcggcgtgctctctggcgtcgncgatattgtttattgtttggctagagttcgccggcggcggcggcgcccaggtcctcacaacctggggaaggggcgggcgaggcggtcggcgtccgtgtagaatgtggcgcggttgatg

SEQ ID NO: 25457 - DNA, 483 bp, Oryza sativa
  unsure (1)..(483): unsure at all n locations
  Clone ID: uC-osflM2020114b09a1
ttaaaataattttccccncntcttccccggcatacggcggattaaattaaagtatcgaaccaagagcaccaattcgatatacaactaattttcattgaccgctaaaatgtatagggaaggaatctacaagaaaaacgaactagagccatgctgttgttggcctctccaaggatcttactacagctacaccacaaaatgggtttagcaaatagggatttgggtttgagactgaaactacgatttcacctctggcctgctctggttgggtcgcatgcgacaggataagtagctggtgcttgtcctgcattggcagctccactgcttgactgaacaactccagcaggatatccagcactactgatcgcgccatacatgcttgcaacatttgtagctacaccactgtttattggttgctgcggngcaacatacgcactaggataaccgggcaaagcggcctgtgtgtaccctgcaactggataacca

SEQ ID NO: 25458 - DNA, 539 bp, Oryza sativa
  unsure (1)..(539): unsure at all n locations
  Clone ID: uC-osflM2020114b10a1
ttaaatagggcaaaccgaaaggtctcgtcacaagggctgtggttattttacatggaatctcggcaaataacagtcgcccaacaacagtcttatatgtgtgcatatatcgaagcgttgatgaacgcaagctggtccggattatgttatttcttacataagacatttttactccatacttttgtttaaagaatcattcaaaggatttcatggaaaaaaaaagttccgccaagtgccaaggatcgacattttgaactagaaatgttagatggcaccggattatttttttcccccctggtgctcttacaaatggagagaatggaatgagttgcacgacatttattacataaataaccgttgatactcggtacgtgtccagtcgtctaccaatgtcggcgatgtagtagtagacctttattgatggttggcgtgtggctcatgatgcgattacctgcataacagccactttgaaggattcatncatcaacttaaacttgtcagctggggcggcatcgaggacagctttagctgctttcttggag

SEQ ID NO: 25459 - DNA, 359 bp, Oryza sativa
  Clone ID: uC-osflM2020114b11a1
ttaaataaattttatcaacttctgttgaataagcaggtgcagagttgaataagaagggggggatacaccaatacttgtctctcaggaaaagttgccaagtccagggggggtaaggtaaagaaacataaatatgttgaatcttgaccacctctaaattaatcatcacaaagctaggacttggccctaacgcaacagcgaacacacacaacaaaaacaaattattgctatctatgaagcaatgatacaacagggccggagcaccatgaaattatgggatgctcctggtgaactgttgacaaaaaaggggataatctgtcatttacagagtcgcaaacagcgtttcttccctttttttttcc

SEQ ID NO: 25460 - DNA, 540 bp, Oryza sativa
  unsure (1)..(540): unsure at all n locations
  Clone ID: uC-osflM2020114b12a1
ttaaatgatatccaggatccagcttccatttcctgggtgcagattgcactgtatattacaacatacataatacagctaccaataaaaaaacagtcttctacagaagacatacgagtatgaagcgctgccacattagcaaaacatcaggaaaaaaaataaacataatacccaccagattaaccagacatggttcctattgtagtttgtgcagatgtaagatatacattacaagatgtgtttattttgcttcagttctccttccgctttgtggtgcttcgggaccgagatgatctgtcggttcttgacaaccgcctaccctcctgatcttgtttggaatctactaattcagccgaaagctcagcggtagtttcaggccatggggtgcgcttggcgggaacaactatgtccaaaggtggctcaattacccacccctgaggaaatttgctgtcagctcgcgcttaacacggggccaccacagaggattttttcccacagttncccaatggctcaacgaggatggatcatccaacaaaatagggg

SEQ ID NO: 25461 - DNA, 522 bp, Oryza sativa
  Clone ID: uC-osflM2020114c01a1
tttttaaatcggagcaatagctcgctgagaaaaacatggttagaacatcagaagataatgcccaaattatgttctacaggcagatgattcctatcctacaacataatcggtcaacagaacctagctaaagttctttttcacatgctattgtgcatgtatgggtgctttcaaattatctaggggatacaaaaagacttgttttcttggataatgctacgcaaagatctgagcggctgagcatcattgcattaatgaatgctccaaaacagactaaataattctattatacttacacaaggtgcaagtacaaaatttgatcatttctatgggaaagacaaataaatagctaaaaataaacaagtctctggccatatcaataaattaattcctaataaacaccttccacatgaatcatgatcaagttaaattgaatttagtcagtatattgtgtgctcaattgacaagtggcatgcagctaaaatgtccattatgtagaggttataaattgttttatactttaat

SEQ ID NO: 25462 - DNA, 480 bp, Oryza sativa
  Clone ID: uC-osflM2020114c02a1
aaataatagcatagcaaccatccaaccactctgagggcagcctttcatttctggggttaaaccttgccggttttggcagagcaaacacagtcaacaacacataagaccactgtgaaaattagagggccttacaagcaccaccatgcagagcaaatttacaggttgaaaactggggagaaagccaaaaaaaaagaagaaaaaacccaaaagcacacagcgcaggtgtgcacactcacgcaccatccacggtttagacttgcaatgtacaactgaacctattccaggagcaactgaaacagcacactctcatctcaccctgcatgctgggacagcaggggagcacttggggttcggaatcgccctacagtggacgctgttcgtcgttagtctgcggtttactctgtagctcggaaggccactgccaagaacagattgaacagctccatcacttccaccactgccctgcaatggttcaagagt

SEQ ID NO: 25463 - DNA, 514 bp, Oryza sativa
  Clone ID: uC-osflM2020114c03a1
aaatacagtccaaaggcatacttttacaggttacatgacaacggcttatcagtactacaaatcactgtgtagctgagcaaactgcaacatctgtaacttctgtagctgtcacaaaaaactactgacaaaaacatgcaagcatttttttttctttttcaccctagaatgtgtagtcaccggagttgtcgtatcgtcgcgaaatgctctcgccaccactgaggactgaccccatgcttgacctctgcacgagccggactaaggactggacgacctccgacatcggtggcctgaattccggctcaggctggacacagagcgcgattgcgtcggcgaatcgagagagggattttgcagggtacagtccttccagtgctggatctaccatctgatctaacgcatcgatgtcatgaagctgtggagaagcccatcggactagcgactgctgtggccatggttgggatctgtcaaatgatttcctgccagtcaggagctttagcatgaccactccaaaact

SEQ ID NO: 25464 - DNA, 465 bp, Oryza sativa
  Clone ID: uC-osflM2020114c04a1
tttttaaataaatttttttttttttttttttttttttggtggtttttttttaaatttttggggggttccccccctttttttttttttttttttttttttttttttaaaaaaaaaggggtatccccccacaagggggcccccccccaaaaatttaaaaaaaaacggggccccaacaacaggaaattcttggaacaggcccacccaaaaaaaaagggggggttaaaaaaggcccaaaccggggggaaaaaaaaaaaaaagggaaaaaaaagtttatatggggggcaagggggggaaccaaaaagggaaacaaaccaagggggggaaaaaaacattctctttggcacaaaaaagggaaaccaaaagggccctcgaataaaaaaggggaaccaaaagccccccctaatgggggggggaggggaagagaaacataccataaataaaatacccccggtataatactaactc

SEQ ID NO: 25465 - DNA, 444 bp, Oryza sativa
  Clone ID: uC-osflM2020114c05a1
agatgagaaagacaatcggaatcacataaaaagaggggccaatgcacactaatttttattacaaccgccacgacagtcttgatcgtactgactctaaggcgcaaaatacaaatcggcattaatcttttgcggatatcccgctctctaaaggcttcttattcctcagcaaatcccagttcagagagcttgaggtgggcctcggcgtaatccgcaaagaaggcgtcctcatccgcagcatatttctccaccagtggacggaaggctgggtcagccatgagggctttgtcacttggcagctgaagaaggccttccttctcgccactcacaagctcggtgaagtaagagttgtcaaagatcaaagggttggacgtccaggctccctcaaagccagatctctccttgtggcatcttcccaggggtgtgaccaccagaaagagcaactat

SEQ ID NO: 25466 - DNA, 411 bp, Oryza sativa
  Clone ID: uC-osflM2020114c06a1
cttcttaaataactctccttttttttttttttttttttggttgtttttttttaaattggagaaaggataaaccccggcacccataaaaagggctgaaacccccaacctttgaagaacaagctgcaaggccaaacgccttcgaaaaagttaacggaaacgacacctttcctttcacccccattttggcacaaaagcaggactcgggaaaacgactaaaagcattacccacgggcccagacccaagaccattaccactgatcattggacacgaattttattttaacaacaaaggcagagggcagcaggccacgggggcaaacttttccaactccacaaaaaacggggacaaccaatggagttccagcacaccgcatttaccaggggacgaacttccagcgctgggtggggccc

SEQ ID NO: 25467 - DNA, 464 bp, Oryza sativa
  Clone ID: uC-osflM2020114c08a1
ttaaaataaattatcttttttttttttttttttttggtggtttttttttaatttttttttttttttttcccttttttttttttttaaacgggaatcaaaaggaaaggaaaaaaaaaagggaaaaaaaaacattttaaaatccaaaaaaggcatgttttggaaaaaaaaaaaaccaaaccccttgaaaaaaaaaaaaaaaaaaaacccggccggggggggcaacccggaaaatccggaccggaccccggaggggaaccaattttcccaaaaggggggccaataaaagctgggggaaaaaaaggaaaaaggggtttcctggggaaaaatgttatccgctaaaaattccaaaaaaaaaacgggccggaaaaaaaaaaggaaaaaccgggggggccaaaagggggagccaacccaaaaaaaatgggtaagccaaaatggccgttttaaaaaggaaaaactctctggcc

SEQ ID NO: 25468 - DNA, 448 bp, Oryza sativa
  Clone ID: uC-osflM2020114c09a1
accaccggcatcgactaagactccggcgacggcgtcagccacacggtgggcatctacgagggctacgccctcccccacgccatcctccgcctcgacctcgccggccgcgacctcaccgactacctcatgaagatcctcaccgagcgcggctactccttcaccaccaccgccgagcgcgagatcgtccgcgacgtcaaggagaagctctcctacatcgccctcgacttcgaccaggagatggccaccgccgccacggggtcgtccgtcgagaagagctacgagctgcccgacggccaggtcatcaccatcggcgccgagaggttccgctgccccgaggtgctgttccagccctccttcgtggggatggaggctgcgggggatccacgagaccacctacaactccatcatgaagtgcgacgtcgacatccgcaaggacctttacggcaac

SEQ ID NO: 25469 - DNA, 495 bp, Oryza sativa
  Clone ID: uC-osflM2020114c10a1
ttaaataaatagagcgaaaatgcaaggtgatcctaaacgggcacattgtacatgactgcatctgacaggtcacaactaattgctagagttccagttaaaactgacgctagcctacaaaggatgggtgcagatggattacagacgatttgcagcaataatatcaaatacatgcccccacaaaatatggaacaaaaggtggtgtacagaggccaccaagttaccaagtgcggcatcaacacaacagagtttaaccataatttaactgtctatgcagttcaaatcgacggtaatttactgtctcttcacagttcatgttgaaacccatcgtcattctcagggaataataccagagctcgaatctgggggtacaggcaggaagttctggcaaaaggtttgtgtgttgatccaacacaatgaagatacattcattaattaaaaaactcccggcagtttgatgatccacaaagcagttcttagtctacgagaccctgagac

SEQ ID NO: 25470 - DNA, 507 bp, Oryza sativa
  unsure (1)..(507): unsure at all n locations
  Clone ID: uC-osflM2020114c11a1
ttnaatagattttttttttaaaaattattttacacaatggggtccattgtacttctttcatcaaccaaccagataacattgttttacacaatctgaacgaacgaagcaaatattcgggtacgcggaaagaggagaacgtcgcgcgtctcaccgcagcctgcatgaaagcaatggacctcaccgccgttgctcgccggagatccacactcacttgccggggacgaagttggtggcgtaggcccatgcgttgttgttgacggggtcggcgaggtggtcggccaggttctccagtggccccttgccggtgacgatggcctggacgaagaacccgaacatggagaacatggcgaggcggccgttcttgatctccttcaccttgagctcggcgaacgcttcggggtcgtcggcgaggccgagcgggtcgaagctgccgccggggtagagcgggtcgacgacctcgcgagcgggccgccggcgacccggtaacccctgaggcgcccatgagca

SEQ ID NO: 25471 - DNA, 327 bp, Oryza sativa
  Clone ID: uC-osflM2020114c12a1
ttaaatagaaaggaacttaaactgatttattacttgttggattaaaaccatcacactcgggtacgtggtgaaaccgtgaaagttaaaaaacaaaaacagtagtagtagagtgaggccctgctcgctgttacatgagaggtgcacgaagaaccagcacacgagcagagcatccagcccacacgcagcaaggaaacggtagggatgccgccgccgccgccggccgatccgccgcccggcgatgatgcgtcgtcgtcgtcgttcaggtgcacgcggaggcggagcggcgtgcggcgcggcgcggtcgagaggtgatgagtagttgacgcg

SEQ ID NO: 25472 - DNA, 219 bp, Oryza sativa
  Clone ID: uC-osflM2020114d04a1
ctttttaaataaattctccttttttttttttttttttttgttggttttttttaaaattttttttggttcccctcccaaaaaaaaaaacccctcttattttttgcccccaccagggcacccaaacgcacaaaaaaaaaaaagggaccgtaactcttgaattctacaacacacacaaacaaactaccaactggggcgcaccaataaacccgcaacaacaga

SEQ ID NO: 25473 - DNA, 508 bp, Oryza sativa
  Clone ID: uC-osflM2020114d05a1
tttttaaataaaataggcgctgcaagcaccacaataatgaagtttctcacgcaattcatagttgtcatagagctcccaacgcagttcttcaattcaaaaagactgcccaaacagaccaagggtatcatcatagcagcaaagttttttaacacgcaacatcaaagagacactaatgcaataagataacttgaagcgcggatcactagcaaatttcgcgcttagtcgacctcctcgatcttggggccagcaccgctgccgcctgccgggggagcatcgtcctcgtccatgccgccggccatgtccgcgccagcgccctggtacatcttggcgatgaggggtttgcagatgccctccagctccttcatcttgtcatcgaactcatcagcctcggcgagctggttgccgtccagccactggatggcctgatcgatggcatcctcgatctttttcttgttcgctgtcgggagcttcggggcgatcttctcatcttgatggggttgcgcatgtt

SEQ ID NO: 25474 - DNA, 358 bp, Oryza sativa
  unsure (1)..(358): unsure at all n locations
  Clone ID: uC-osflM2020114d06a1
ccttcccaccttttagtaaccgccccaagggcagcaaagcacagggggagcaagtgacaanaaagagggggaggccccccagcaacccgaacaggaacagaagcgcggcaaccagcccaagaacacccaccccccagccggcacanaaacaaacacgacaaaaacaagacaaccaaaacacccacaagaccaggccacaacacagcagccaagcggccgcccagcagaagaacaaggagccccggacccngcaacgcaggcaaggcagcccgggcaccggagcgctccccgcccaggcagggacaccacggccagacgacgccaccgacaccgcggcgaacccgacgaacgggccgac

SEQ ID NO: 25475 - DNA, 169 bp, Oryza sativa
  Clone ID: uC-osflM2020114d07a1
aaaattaactggcttctaccccaggaaaactaactagggccgcctgtctcttcgatgtagctaggattaattgaagttacaagtaatcgatgatgtatacaatatagtacgatcgagtatatatacatatacatagggaattaatatatggaagaaatcattacccttc

SEQ ID NO: 25476 - DNA, 473 bp, Oryza sativa
  unsure (1)..(473): unsure at all n locations
  Clone ID: uC-osflM2020114d08a1
tttaaatanttttttttttttttttttttatttcccagggttacattctagctcagcggggtatataaaggggaaagcacaaataattacactcagcgtttgagtcatcaaaaacatgcaccctatatagcctaaaggtctggttatttgggacaattttcaagcaacaatcactatgaacttcgatagcatttccggctttccttggagcaattctctggtttgccaagctttccaattcatcacataaatcatttattaggatgtttgggcacaataaattggcagatgtggccaaaactcatagcaaaagcaaagaacgggggcctcgatgtgatacaaacctatgtcttctggaacgttcacgagcctatccagggtcaggtattcactctttccagtctgatatgtttgtcagatgattgagcctgcatttggcgcaagtggaccacgttatgtccgttgggcagctg

SEQ ID NO: 25477 - DNA, 387 bp, Oryza sativa
  Clone ID: uC-osflM2020114d09a1
taaataattttccttttggagcatcactgatcagttgactgctacacacccaacgtaaaatgcatgatcccgtgttcgacttatacaggcaatgcttcgtattgagtcggaactattccgtcctctaagaattaattaacttggtacataattaagcagcatcaatccgaaaatcggatgagagcagacttgagacggtaaaccgatcgacacggtaaaaattaagaagtcgcaattacgaagtggaccataataatagtatacgatccccgctgcgcagctgacttgctttagcagacgccgttggtcttcttcttggccagcacggccctcttccagaggggagatcacctcgcgctgcttctccatctccctcttgctcgccga

SEQ ID NO: 25478 - DNA, 499 bp, Oryza sativa
  unsure (1)..(499): unsure at all n locations
  Clone ID: uC-osflM2020114d10a1
ttaaatagngcaaaagaggaacacatctgtgtttatttgtctgcaaacaataacacagttccataccaaatacgcacgataatacatactttaaacagactgagtttaacgtacatcacgtcacatggaacattggccgtcctctaaaactggaatactacatcacacacaaacaaactaccaattggggcgcacaaataaatctgcaacaacagatctagtaggagtactagttaacacagccaacaacagcagcacccgttttattctgaaccctctctgcttctgaatcatttggttgcaatgaacagcccccacctctgctcaccggcagagctccgcttcagcttcgcgttccagccgttcacaatgtcatcgtagtcctcctgggtgaagtctgccatgaaggcttctttgttcttctcaacttcagcaagctccctttggagaacacgcangaactggtccgtggggtcttcagcaatgacatgatggaaac

SEQ ID NO: 25479 - DNA, 691 bp, Oryza sativa
  Clone ID: uC-osflM2020114d11a1
accacctcaaataaatcaccccctttttttaaaataacaagggggtgaaaaaaaaaaaaaaaaggggggaccccccccacaacaaaaaaaaaaaaaaaaaaaacacaaaaaaaacaaaaccacaaatacaaaacaaaaaacacaatcacaaaacacccaaaaaaaaaccaacaaaagcacaaacacaaaaaagaaagaaacaaaaaaccaaaaaaagaacaaataaaatagcaccaaaaaaaaaacagaacacacacacaacacaaaaaaaaaacaaaaaacaaacacaaaagaacaacaaccaacaaaaaaaaacacacaaaaaagacacaaaaaaacaaaacaaaaaaaacaaaaaacacatacaaaaaaaaaaaaaaagaaaaaaaaacaaaactgaaaaacaaaaaccaaaaaaacaaaaaacaaaacaaacaaacaaccaaaaacaaaaaacacacaacaaaaaaaatctaacaaaaaaaaaacataaacaacccccaaaaacaaacccacaaaagaccccaaaccacaaaacaaaaaaacaaaaaaaaacacaaaacaaaaatcacacaaaaaaaaaaaaacaactacaaaacaaaaccaaaacaaaaaaaaaacaacccaaaaaaaaaaaaaaaaaaaaaaaaactccacaaaagaaaaacgaaacacaaaacaaaaataaaaa

SEQ ID NO: 25480 - DNA, 530 bp, Oryza sativa
  Clone ID: uC-osflM2020114d12a1
ttaaataactcaaaacagagctgtgtgtggctacagtagtcacacttaccacaaacagctgatttcaacttgtattgaaattgttgtgtatcagaggcatgctacccacaccaccttctgtctttacaagcagcaaaattatggagtagaaagaattcgagatctttacatacaagggtcgcattcttcctgtactcagaccgactagctggtaacttcacaaaccagtatattccaggccgattttagatggcgagcattctgtcaagtatagtttgctatgtccacatggaaaagaatcacccagtgagaagatatgttacagtttagggtttctttgtctgtacttttttcaggtatttcttatgaagcttcaaagcaccagcacaagcttttttggcatctaaatttccatttacatcattcagaatcctaataagatcatccagtcctctagcttcctgtaatagcttttctcttttttcttgagaacacttgcaaccatgaaaactgaaaatggaactggacca

SEQ ID NO: 25481 - DNA, 490 bp, Oryza sativa
  Clone ID: uC-osflM2020114e01a1
tttttaaaataagtaaaacaggtctcgcacctctcataggggggagcacacgcctcagcgtaatagcagtaacacacatattaagcctcggtggcaaatatactggtctaatctaataacccgctggtcactggctagtgttaggagtcgtctgcctgctatcccactgagcatgcaccgtgtcgggagataatggcgggtcaggtcccttcttgtctttgcctccatctttctccatcacgcataggtcctgtacccccttgagcccctcgagcacctccttgatcggcggcctcatctcgccgttctgctgcaggcaccggaaagccagctcggcgaccatggtcatcatcttcttcgtcgccgggtcggactcgtagccgagctcgaggtccacgagctcctcgagctggctcttctggatcccgttgatggccatgccggccaggttgatcttgattccctgccgggtgatgtccaccgccggctt

SEQ ID NO: 25482 - DNA, 497 bp, Oryza sativa
  Clone ID: uC-osflM2020114e02a1
cttttaaaataaattttccttttttttttttttttttgggggtttttttttattttttttggtggttttccccttttaacccacacaccaaaaggtttaattggaaataccttggtaaaaaaaaaaacctgaaccaaaaaccccgcaaaatgggggcatggaaaccaaaaaaaaagggggccccccgggacaaaccccaaatggggggaaaaatttttgaaaaaaataacccttgggttgacgggcccggggtttttggcgttggacctgaacccaccctttatggccccgaagggggggccaaacccctgaaaaaaaacctgggggacgttggtaaaccaaaaacaaaaggcccttttaaaagaaaacggggggtcctggccccccctggtcggggtccttaaaccgataaacaccatattttgccccccaggcccctaattggagttccaaaaaaaattgaggggcccccgcccccaaaaaattttttccccggg

SEQ ID NO: 25483 - DNA, 343 bp, Oryza sativa
  Clone ID: uC-osflM2020114e03a1
tttttaaaataaatttttttttttttttttttttttagggggggttttttaaaaaaaaaaaaaggggaccacccaaaaaaaaaaaaaaatataaaaatcttaaattttaaaaatattaaaacaaattcattttaaaatagaaaaaaataataaatgtaaaaactacaaaaaaataaatattttataaacctccaaacgaaacaatttttgtatttctccatgggaccctttttaacaaaaaaaaataaataatattaaaaaaccatatataaataatattctatataattccaaaaaacatctaataaaaaattaaaaaaaaatgaaaaaaattcacatataa

SEQ ID NO: 25484 - DNA, 287 bp, Oryza sativa
  Clone ID: uC-osflM2020114e04a1
ctttttaaataaattcctccccaaaaaggccctttcctggtggcacaagttagtagggttcatcattaacacacgctagtagggttcaacatcacaactaaacgcagcaggcaaaattgtttgttcctcacaccaagatctccaggtgtggctccttgtctcctgcggctttattttcggtttttttttatttatatggtgaacaaagggaggctgattgtcccaggcgaactctcgatgtcggtgcaggctgatcacaacagaggggaggggaaggacgaggagcc

SEQ ID NO: 25485 - DNA, 350 bp, Oryza sativa
  Clone ID: uC-osflM2020114e06a1
ccccctaaactaagcaacaccccaagccaatctcattggtatgactaactataaactcaaaatgcatgccccccgaatccaggcaagcattccatcaaacccaaccaatttccatccttttttttgttcttgctggtaaagactggagtttctagccattcccagcatttcttttgctctacttcttctacatctacctctctactcttagtttcactatggagaacacaaccacaattacaaccatggtggggatggctagattcactcaatggccggcttccattcctaatgctttagctctccttgcctccaagagcttgtctttaagatggagggaagaaccggtt

SEQ ID NO: 25486 - DNA, 439 bp, Oryza sativa
  Clone ID: uC-osflM2020114e07a1
ttaaataaatttttcctttttttttttttttttttggggggggacctggacctctatataaaaaggggcaatttaatacacttttatttgccagccaaattgagttggcaacgaattcttaacaagaatgacaaaaaaaaaagggaaaatgaaaagagaaaatatcatcgagcttttggtcgctgttaaaaaaaactcgacacgacattacttgcaaaattaagcctagtaattagcggtaggagtatgctcgtcccttttacaaacaggcgaaagagagagtgagaaaatcaaaaacgataaatggcaatgcgcgctcgatcaggccgccgtgcgaacggctcaactagcaacgcgggaacttcttcttcttcttcttcttcttcttcttcttcggctactggtgcggctggccccccatgcttaaagaatgggtttt

SEQ ID NO: 25487 - DNA, 473 bp, Oryza sativa
  Clone ID: uC-osflM2020114e08a1
gctgtgagcaccagctaaagcagcacgccgagggagtagatgtcggaggtgacgcccagcttccccgtctgctggtactccgggtcgatgtagcagaaggtccccgccgtcgccgtcagccggtactgcgtcacgctgtccgccaccgccggcggcacgaggcgcgccagcccgacgtcgctgatcttgctgacgtagttgcggtcgagcaggatgttggccggcttcaggtcgcggtgcaccagcggctccggcttggtctggtggaggaacagcagcgcggtggcgatctccgccgagatcctgaaccgctggctccacgggatccgcggcgggccgccgcggcggaacaggcggtcctcgaggctgccgttgtccatgtactcgtagacgaggcaatccgtagtccgggcaggcgccgaggaggagcaccatgcttgggtggcgggatgcagttgacaccttcacctcct

SEQ ID NO: 25488 - DNA, 491 bp, Oryza sativa
  Clone ID: uC-osflM2020114e09a1
cttaaataaagtgaaccacattttctttgccttttgttgggactcctattggagaacaataataaccctccttgacttattcccaatctgaatacacttcaatttctctcttcccccctaatttcctctctctctctctctctctctctctttctcagaatatatgcacacaaaagaatatcaaacatttgatggtgaagaagaagaagaaagaaagaaagaaagaaaaaacaaaattaaaaaaaaattactctcacatgatgaactgaactcatctagaagtggtagtagtaccatgtaatgtggccaaccaaattgctagagcagcagcaaataatccagggcaattcaatcatcatcttcatcatcatctcatcagggacaggacacctcggattttccggacatgggtgcaattcttgcccaccaagcaccaccattgcatttgccgattctgtgatgtgtgtgctcagaatagcatccagtcgagc

SEQ ID NO: 25489 - DNA, 540 bp, Oryza sativa
  Clone ID: uC-osflM2020114e10a1
ttaaataaacatcattggcagtatcttatatatcatatgagaattacatgaagatatatatatttttgtcgtaacacaacacgatgtttgcagtaatgtacacccctccaggagtcatctcttcttatacgtgcttcttgagatgaatgctccatgaaaaccatagggtactctgtgtttcaatactatcttagcaactggtccattctcaaatctttgtgcatcgatgatatgtgcctgtgaattgttgatttcctcgtcatgtacaaaagagattatccatccgtcatcctcatttgctccattgaccttcggaacaaaagttgctcctgagcaaaatttgtttctaccaagatgatggtactctacatttattagatcttgacagggcttaattttgtcttcaagatatagttttgcaaaaccttccaaatttggtcgcactattccacaaccacctgcccagcttccttggaaatccaccccttgtgcatatgctacttgtgattcaagccacatatttgccattgatgactggga

SEQ ID NO: 25490 - DNA, 337 bp, Oryza sativa
  Clone ID: uC-osflM2020114e11a1
ttaaataaattttctttttttttttttttttttttgttggttttttttaaatttttttttgttttcttcccctttttttaaaaaaaaaaaaagcccttcccgtttaacaaaaaaaagcaaaattgcaaaagcatttcaacttcacttgaaattaacgcctcaaggaggggggtcaaccaacccataacccccaagaacaaggaaaaaaggggaaaacctaccataccatgcgaccatgcccaaaaactacccactactacttaacccgttaaccaaaaagacccccttgccccccaataaaaaccggtttacttaaacttttcaaaaaggggggggc

SEQ ID NO: 25491 - DNA, 424 bp, Oryza sativa
  Clone ID: uC-osflM2020114e12a1
cttcttaataaaataatagattatctctatttattgatggaattattgaaaagaattatggtagtatcaacctgcacgtatcaaccccctaggatatacacacacaccccaagtgtacaaaaaaaataaaattttgaaattcttcatattctgttcttcctcaatgaccgaaaagggcctgaaatcaaatgaattcccttctgttggccagatctgttagtgattcaccttcaccatttcctttgggaaaccaaaataatcttaatttttcataaccgcgaatttttagcctttttgggcctgacaacgctggcggtcagcttgatcctaggaatggaaaattcgccacttatcactttagaagcaacgatctcgtttgcagcatctgtgaagtggaccccatcccagctgatgaacttcttac

SEQ ID NO: 25492 - DNA, 655 bp, Oryza sativa
  unsure (1)..(655): unsure at all n locations
  Clone ID: uC-osflM2020114f01a1
ttttttaataaattttttttttttttttttttttttttggtgttttttttttttttttttttttttttttttctttttttttttttttttttttttttttttttttttttttttttttttnaaagatagagtgggatatattaaaaaaaaaaaaaaagttaaaaaaaaaataaaaaaaaaaataaaaaaaaaataaaaaaaattttttaaaaaaaaaaaaaaaattttttttggggaaaaaaaaaaaaaaaaacaaaaaaaaatataatatatgtgggggattttaaaaaaaagaaaccactttattttaaaaaaaaaaaaaaaatattaaaaaaaaaaattttttaaggtgtaaaaaaaaaaaaaaaaacttccccccaaaaaaaaagtggttttatgggttaaatttatataaaaaaaaccaaattatttgttatttttataaaaattttatgataaaaaaaaaagaaaatacccctcctcttctttttaaaaaaaaaattaaaatgtttttttttctacccaccaatttttaaaacacccaccaaaaaatatttttaaaaaaaaaaatttctgggtccggggtaatattaaaaaaatctttattttttatttggggggaaaaaaaaaaaatataaaaacgtttttttttctt

SEQ ID NO: 25493 - DNA, 478 bp, Oryza sativa
  Clone ID: uC-osflM2020114f02a1
aataagtgaagctaatttcattcaacaaaatggcggagcaccgggcaaatcagacagttacaaagtgattgataaaaacaaaaactccgggccagctgatgttcatcagcaaatattttacaagaaaaaaacaaggttctggattattaagacaaggcttttagataaccacagatatattgtgccccagggttcgatctatcggaaagggaaaaaattctgaaattccgatccgaaattgtgaatcctgttagagcctctagatatcaaaaccgaattaagtaacggccccagaatgggcaatcgatcaggtagccaagccatagcaggccagcgcctgatgcagaacagtacttgtagtccttgacgtgcaggctttcagcagcgccctcgccgaggacagcatcacccttgtaaggacccagggtaggcttggagttggccttgcacctgacgaggaagggccgcctggcctttt

SEQ ID NO: 25494 - DNA, 388 bp, Oryza sativa
  Clone ID: uC-osflM2020114f03a1
aaggccaggaaggtggatgccgatttcccggccacgcccaaggccgagcacgtcgttgacatggagaaggaggtgtgggcgagcttctacggcggcggcttctggaggagcccctcacaacgagaggacaggaggtgatcgccgccggcgacggcgccgccgccgccgccctcttcttcttctccttcaccacggttgttggtttcttggcttttctcctcccttttcttgggaaaagagaagacagataactcgatcttgtgattaatttagccgcaattgaccaattttttttggcaattggctgtgttcttctctctttccaaaaattttgtcgattgggaggaaagaaaagaaattgatagggaaaaaacaaaattgtggagtc

SEQ ID NO: 25495 - DNA, 446 bp, Oryza sativa
  Clone ID: uC-osflM2020114f04a1
tttttaaataaatttttttttttttttttttttggaaaggggtgcatttttttattatcattaacattctcatatacaaccactacaacttattgggacctcaggtttctgactgtagatatacacaaaaatttgtacttatcataggtttgggatccttattttgactgcagaaactaggcaagagcgctctttgattcaaatagaacacaagtatgcgcttccacatgataagaggataatcctggcacttgttgcaccttgggattagattcggttgcaaagaaacctggaaatgcaagggatgtgtcaaccaagcgcaaccacacggatccttctgcaagagcaggcaaggcagcactcactgattcctcgtttgcattgaaacagatgtacaggtcgcctttgaccgaatctgccgccatttcatctacctttgcatttat

SEQ ID NO: 25496 - DNA, 525 bp, Oryza sativa
  Clone ID: uC-osflM2020114f06a1
aattagctcataaggcggcgagcaggaacctggtggtttcacacgattagataggagttcaatcatatcggacaggtgtacacatctgacaacgccttgcactacaattaacagtacactacatgaacgattacacgaactacaaaaacatttactactgtacaagctcttctataattaagaacgatagccattaaatatcttcacgacagcacgatagtcagggtacgctaagtcgcattcagaacttgccagcatcacataagccgctgcactctgagcagagaccaatgctagaagcctagaactcgaaatggcttcaactagatggccagatttctaggatacagtacgtccatagcatactgatgcaaggtagagattcttggaccatttctccttgacatgttgactagggaaagcagatgttctcagcgtctctttgagtttcatctgtaggcttcctttttgggacgcttaaacgaatgcagcctgatcccaggttgcagcagttgcagttatccg

SEQ ID NO: 25497 - DNA, 104 bp, Oryza sativa
  unsure (1)..(104): unsure at all n locations
  Clone ID: uC-osflM2020114f07a1
tttctcctaaataacctaccctccccattttattttgnttgtttttttttaaagggaatgggcaacccaccccatttaaaaaaaaaaaactgatggaatctcca

SEQ ID NO: 25498 - DNA, 389 bp, Oryza sativa
  unsure (1)..(389): unsure at all n locations
  Clone ID: uC-osflM2020114f08a1
ttaaataatcgatgcgcattgtttgatatttctgcgtgggaaaattgaaatgctcctgtgtgtgcgatactggacgcagaaacagtttcttttcttcctgaaggctttagctattgctgacatagataaacaagagaaaattttgaccctcgcttgcctcgccgacttaccaaaaaaaaaaaaaagtctccggccagccacctcgccgccggccgtttcacgacgagtagtcgttgctacctcgccgggacgaccgctcgccgacgcttgtgatccgttgcatggacccgtctcgcacgtactgggcgtgcgacgagcttctgctgctctcgccaccggccgcttgatgcctctccctcaccgtcgccatggcccgggngaccaccttc

SEQ ID NO: 25499 - DNA, 445 bp, Oryza sativa
  Clone ID: uC-osflM2020114f11a1
ttttaatattttttctcgataactttacgagattgatggattcgttcattcacaaggcaattaacacctcaaattttacaacaacaacatcatgagcaatagctgaaactttgaaagcagaactccagtctgtctgtataaccagcagcagcaggcagcaaagcaaactgttcgatcacatctcgacagggaacctcttgtacaggtccgggttgtcgagcctgggcttggcgatgacctgcagcgacgtgctcatgaacgtgacgacgccgttggactccatcatgttgacgtcctccggcctggtgccctcggggagagaccactcgaactggtggagggaggtgcccgatcatggaggcgaccaggttgatgccgagctgggcgccggggcacacgcggcggccggcgccgaaggggagcaccctgaagtcgctgcccttga

SEQ ID NO: 25500 - DNA, 430 bp, Oryza sativa
  Clone ID: uC-osflM2020114f12a1
ttaaataaattttttttttttttttttttttttttgttgtttttttttttggggaagaaaacaaatgaccagggatatctttgaactttcgcttacacatagatagcaagcagtctagtaggggaccaatccggccttttgcacgcatacaggcactcacacgctactacgctatttttacatggggaacatatacctttattgggacataaaagggcatatgacatataattagggggcacatgggggcatgctgctgctgcatgcaacgctagattattctttcgcagcaggtagcgaagttgggtgatcagttttggcaggcgtggtccggctcaccaggaagagcagcgagaacatcagggggggcagcgaatacatgggggtctatgtcgtcagggggactagcgaacacttggtccggatcatg

SEQ ID NO: 25501 - DNA, 455 bp, Oryza sativa
  Clone ID: uC-osflM2020114g01a1
gatgagaatgagggggtcctaactgccctgaaggaacagtaatctggcccttcgagcaccagagaggggcaaagttcatagatcatcagaaggaatggaagtttcttacaaactagacacaagacttgcacggacaattgcaacttgcaagcaccaagtaaaataccaaaaatagtttgcatcatacagcacaacaatttacagaagaaactacaagcaaggttaagtagacaacttacaggaacttacacaacttacgcttaaaatctaacataattggtacaaataaaaacaaaaaaaaaaagagggtgacacataggtataagtaatccccttctcgcaacttagaccattacccttgtggtttagagaatgggaccttacaagtaaaagtgatgtgattgtaggggtcggatattcatattgggttcatcttttgctcagttccgattttt

SEQ ID NO: 25502 - DNA, 477 bp, Oryza sativa
  Clone ID: uC-osflM2020114g02a1
aactagtaacaaacaatagcactatattttatggggcctcaaatttgagcgttaatacattgtacaccatacaaccggttttttggtctcaaaatcccagcttagctagttctaatcctcagaaactgcagtaacagcagtatgcccctagtctgctaaacgaacactcctttttgtctcgaactagatcttttcatgaactgatctaacatggacaaaccaacccagaatatgcaacaatggcactatctgaactgcaaaaaaaggcttgatctgcatcatctgctgtattggactattggtacgatgacagctttgcgggcgaccttttgtaccttctgttgaaaaatgataagcgaagaattgttcattaggacttaacttcatctccttcctggtcctgcaaaccttctggccgtaccaaatatgagagcctttgttaacagtccatggtcaaacgtgcatgccagggcaact

SEQ ID NO: 25503 - DNA, 456 bp, Oryza sativa
  unsure (1)..(456): unsure at all n locations
  Clone ID: uC-osflM2020114g03a1
aaatagaagatcagnactactttattcatgccgggaggatgcatacatatgggctttcacagatccatgaagaattcctcgcccgaaaccgaaaaatacataaagcaaactcactcactctggctgcagagcgaccgtgcgaagtgcgtactcacacgcaattttattcgatcgatcggggccggcacggcggcgcacacgtctacttcgccgcagacgccgacatgatgtcgccgtcgaacggcgcctggccgaagcagtccaggttgggcccgtagccgacgccgagcacgtcgcagtagcgcttgtagaacgcgaccgggtcggcgccgccgttgccgccggcgcactggagcccgccgggagggatgttcgtggtgagcccgtaacctggcgcgcggccggccgcgctgtccgcgggagtcggagtccactgccccgtgacgaccgcttgcg

SEQ ID NO: 25504 - DNA, 453 bp, Oryza sativa
  Clone ID: uC-osflM2020114g04a1
tttttaagtaccataaaactttttgttatttattaccacataggttttgcttgactctgtttgggcgagcgatacttcttattctctatcggtaacttttttttttccaatccctgtattacaatacaacaaccaaaacacaaaccaaccctccaagcattattagccacagcctcgataccatagcaacgaagcatagtgactcaatacagaaagtaccataagagatacttcctccgttttacaggtcattctagcatttctcacgttcatgagaaatgctagaataacttacattgtgaaacggagggagtactacttatcttctcctaggcactaaacctctctctgtcgtgtggagcgttgtaatcgatgttagggcctgcgggatgatcccgagggatctatggaccgatggcttccatagcagtgcttccctatgtgctccatgtt

SEQ ID NO: 25505 - DNA, 524 bp, Oryza sativa
  unsure (1)..(524): unsure at all n locations
  Clone ID: uC-osflM2020114g05a1
tttttaaaataaattgagaggaaaccaattatacttttggcggtctggttgtaccgctgctgcagcaatttcttatttactttacatgttgaggtaccaccatgccaggagattatcatacaatccgtgcagaatactggacagattcaagcagtggcacatgaacaaaatgcaagacgatcatcacaaattcacaagtagttcatccgattgggtaggttgatgccagctcgcgcaagaaggncgcttgctattttttcagctgaagcaattacctcctcctcattcaaattcacgatcttcttttccctcataatccatcgaccgttgcacattacagattcaatattttttgttctcatgcagtaaactatgttggcaatgctgcataacgggaaggtgagtcaagtattatggcatgaccaaaagtgtgtcccaagtcactacttgacaagctagaatcatcaatgaacaatcagatcccagtatcatggccatagaaagctgctaattggttggctgat

SEQ ID NO: 25506 - DNA, 257 bp, Oryza sativa
  unsure (1)..(257): unsure at all n locations
  Clone ID: uC-osflM2020114g06a1
cacaattaaccaacaatagtttgtatgcaatgtacgttgatgcatcacaagttacagttttcacacacacacagacgtgatacgtttatattcgtaccgggaccaaatnanatggatcaacaacaaacattccaaacaatgatatttctggattattacagagctggaccaaacaaaacaaaacatttagttagggccagctgagcgaacacacctgtcgtccccttcattgatcaaaggcttcttttattattcca

SEQ ID NO: 25507 - DNA, 125 bp, Oryza sativa
  unsure (1)..(125): unsure at all n locations
  Clone ID: uC-osflM2020114g07a1
tcgtaatccccccctcaaataagctcgccattccggcgggtttgactnntggttgtttagttcacaaggggggtcgtgccccccccccttcgagcaccaaagaggggcaaagttcatagatcatc

SEQ ID NO: 25508 - DNA, 473 bp, Oryza sativa
  unsure (1)..(473): unsure at all n locations
  Clone ID: uC-osflM2020114g08a1
cctaaataaaatcactcactttcaatncactttaaggtggcatcattttacagttagcgaaaagagccccccagagaggccgtaagacaggtgctgacatgaatagctcccttcaatgggaagtaatacacacatttttacagcgttatctatgatcaaacggaaaacacgatttccccgattgccacccgccaaaggccatcacaatgtcattgttttcttacatcagagattgcaggaaccttggctgggtagttagacaaatccacatcaagcaagtctgtcaggtcgtaaagccctacattatcaactctgtccttgattggggtgctcattgtttctttcctgatctgcctggcttgacaatacgcttgatgtcaccgcactgttcgcaggcattacagagatgccagacaattttacttccgcccggatggcacggtccttactgaaggatactttctttgagtgct

SEQ ID NO: 25509 - DNA, 498 bp, Oryza sativa
  Clone ID: uC-osflM2020114g09a1
ttaaataatgcgactctgtctaaaaagactgaatgcatgcgaatgtttacagtaaggtaaagcactgaccaagaagtgcttagtacagagtagaaaaaaataaaacatagagaagggagaacatcagggcaaaacagatgttccgtccacaaaagagcatagttcatgtgaaacaaatgtctgtttgacatgtccaattattagccaagatttcatcaacacaacaaatgcacagcgagtgctttaagagtgagttcctcgtagcaattttttttgggtattctggttcaaaagccttatgcatgcccaaaagacatgatggcatctttggtaggctgcggcaagccccttggatttcatcaatcttcacgacgcaattcgccggtggcaggaggcatccatttcccggaattatagacactttggccgaacttccattcagggacatttttcataattattttctcccacataagagactttgtccactctttgaca

SEQ ID NO: 25510 - DNA, 540 bp, Oryza sativa
  Clone ID: uC-osflM2020114g10a1
ttttaataccaaaaatttgaatcgttttattttgtgacggaagattccatccagtacatctcacaagtaccttgttccagaccaaatacatatatattagcataaagcaaaagagggttgcgttttccagcgcacttcaaagtgccagcttcactcgttgctgggttctccgcgctccagcttacaacggaagcaagtgttattcaccgtggatcgttatctaatccttattattgcataatatagcgtccatcttgatgagcttcgtcttggtgcatatcgtatttaggagacagggctagcagtaatgccccatatttcctttgcatactgagcgatagtacggtcgctgctgaatttgccacttccagctgtgttcagtatagacatcttgatccattttttcttatccttgtaggcttcatcaacctgggcctgtgcatcaatatagcttgggaaatcatagccaacgaggaaataatcaccacgaccaaatccagaatttccttcaagagaatccaagaggggagcatagtcata

SEQ ID NO: 25511 - DNA, 424 bp, Oryza sativa
  Clone ID: uC-osflM2020114g11a1
tttaataaattttttttttttttttttttacatcacggtgacaccttaatttgatctaaaacttaacaacaaagcacaaatgctaaataattaccctgagctcaaaaattcaaactacaaactaataatgctctcaggagcagattcggacatagatacaggaacatacaagcaggctcactcacaacatgcgaagattactcctgaagaaaagatcaaatctgcagagacgaagtcgatcaccgtgtgtccctggagcggctggcaacatgcctgagcagtgcctgccctgactgatgcgcgaaatgcttctgcctcagctgcacgtacgggtagcagaggctggacaggatgtgtgctggcttcgagaaggacattacctcgtaccacacctgaacgtcttcgtccagctgcaccgagaacc

SEQ ID NO: 25512 - DNA, 449 bp, Oryza sativa
  Clone ID: uC-osflM2020114g12a1
ttaaataaatttacccataccatatttatttttttgttgtttttttttaaaatttttgaaaggcacaaaccaccaaaaccattgatgtataaactcaaattatttacttatgaacaacaagcattaaaaaaacgatcgaggccggctaaacctgaaaccaaaaaaacattaaacggatggttttggcctgaactttttccccctgtaatgcaatcgaggaaaaaaagggaaaaaaaccttgaaaaggccaggggaaatcaacacatacatatacaagtaagaccaaacaaatcatgttggaaagcaaatagcaccaaactttatttatttatgaaatgcaacactttcacagggcatccggggaacgaatctatatcaaccaccacataattaacctgaccgaaatacaacctgaagccataaaaacagtagacccaatggagcaaaaa

SEQ ID NO: 25513 - DNA, 427 bp, Oryza sativa
  Clone ID: uC-osflM2020114h01a1
aacgactccgccattcttccctgacgtggttcttccacatatttacaggaattgtccatgacaagaacataaaatataatcctcactttatctgtactaatacaagctagaccaggttaccgtcacagacacgtccatatcttcaagattgtgtgacattttcttataggttccaaactgtggtatgaaattcaaaacgtcgtaataaacatcctcgcttgcggagaagaacccatcattgtcgtaatcactaacaacaccatctggagagcaatcgccatgtccaatctgactactggagtagccgtacacgaacagcttcagatgcatctctctgttgatgcacaccgcgaaaggcagtagcttgcctacgctaaccttgccatcgaaaaccaaaaacatacccttgattatcgataatgcgaca

SEQ ID NO: 25514 - DNA, 415 bp, Oryza sativa
  Clone ID: uC-osflM2020114h02a1
aaattatagaacagaatgaacaggttttcaaaggggtgtcccaactcgacgataatttacacgtacatttaacacattcttgcacccttctcaaactcctcccttcttcttcccgggtaagattaaaattaacttgaggccagccagcgtcgccggcggcgagatgtttacaggctgggcgtcctctcggcggcgccggagatgacggtgagcaggttgttgccgaaggggtcgctgaggtgcttggagaggttctcgacggggccctcgccggtgacgtaggcctggatgaagaaccccagcatggagaacatggccagccgcccgttcttgatctccttcaccttcagcagcgccgcctggtccgggtcgctcgccagccccagcgggtcgaatgggccacctgggtggagct

SEQ ID NO: 25515 - DNA, 424 bp, Oryza sativa
  Clone ID: uC-osflM2020114h03a1
aaataagacagcctcaaagccattttcatttgggtgggcctgttcaacgttggcaagggccatacggcagtttccaacgtgcttacactactgcaacttacaaccatatccatcacgctggtgcaaccacatcccctacacacaagctcacaaatcacaatgtttgtctgcggccttattctatcaactcattcatttggttttgggtaatctatcaattcattcatttggttttgggtaatcaatggtgtatgatcgggtcgccattttgggtagcaaatgatgtagcttatcacgaattcacgatagggcatggctgctatagtgccatctactccctggacatatagtactacgaatctggactagtcccatgtccaaattcataatactatatacgcagtatcatctacgacgggcgtac

SEQ ID NO: 25516 - DNA, 342 bp, Oryza sativa
  Clone ID: uC-osflM2020114h04a1
ggtggcggcggggaggagtcactgcgtgcacttctcggcgtcgagcttgatgcaggcgccgctctccgcgctgctcgagtactccgggatcctccgcgcggaccccggcggcgggccgcatcaggttgggggtgggggcggagcaagaataacccccattggcatgcctacagggccgggtgacactggaaaagaaacccacttctggagcgcccgagcattccaaactgttttgcgagatttatggcctacaggaagtatttcatgtcaactatcctgacagcagggaaatcctcccccttgaactcttcaccttttagcacacttctcattgttccacca

SEQ ID NO: 25517 - DNA, 416 bp, Oryza sativa
  unsure (1)..(416): unsure at all n locations
  Clone ID: uC-osflM2020114h06a1
tttttnaataagtactcctttggatcattcatcttataggagggtcgtataccatctacgtgcgttggaggatttcgacttacgtgcggccgaaacgggattacaacttgtatgcggcccatattttttgtgccgttatgggctttctctttcctgcggtccaagaacggggcgcaggggatctcagcttacatgaggcccactattgttgggccggaagggaagtggactcgcgtgcggctcatgttggttaggctcatgggctctccggtcatccagccgccgacgccgacgccgacgccgaagccgacgggcgcctcggcgacgttgaagacaagcctcgccatggccctcctccccgaggagccgtcgccgccgccattgacgcatgagtggccgtacgtggtcgtcccaaa

SEQ ID NO: 25518 - DNA, 379 bp, Oryza sativa
  unsure (1)..(379): unsure at all n locations
  Clone ID: uC-osflM2020114h07a1
ctaaatanattttccagccaacataatttgatagagagggactttataagtatgaataagaagctcccatatacttcggctagtagcattgcaacgcaaacagtatgacaaggtaccacgcattgtttaagagctaagacaaagacaaaactgatgcatccaacgtaccaaaaagaaagcgaacagcagcagtcagatagctatgagaagagaactaggagagggataactagaagggacagaatggcatccatgggtccatgacgtttagtcgacctcctccatcttgctctcgccggcgtcgtcctccagcggcggcatgtcggcgccagccttggcggactcgtccttgtcgatgcctaggccgagcttgagcatg

SEQ ID NO: 25519 - DNA, 533 bp, Oryza sativa
  unsure (1)..(533): unsure at all n locations
  Clone ID: uC-osflM2020114h08a1
ttaaaagatatataattattctgtttttatttggagacgcataaacgatcaaactgtgaaacggtacaggatctgagataattaggaaactacagagcagcagctacaatattaaccatagcagctgcaggataaacacggtgctaaataggcaggctttgttcttctttcacagcctggatatctggaaggggaccatgacttcagtcatctcctccctcatgataatcttcccaacctggaaaaggtcggagatgcctagctgcgtcgacagatgccttcggcaatcctctgcagcaacaatgcctgaagaataagctccatgcacggacccagagtgatcgatgcaggcggcctccccagcgaaaaacaggttgcccaccggagcacagaatctttcatacaagtcagctggcttcccaacaaggtcgcaggaataagaaccaagcgaattgngtcggttcccaccttgaaaccaaatactggaccggttcagtagcttctgttagcattttcttgagctgagacatgac

SEQ ID NO: 25520 - DNA, 99 bp, Oryza sativa
  unsure (1)..(99): unsure at all n locations
  Clone ID: uC-osflM2020114h09a1
ctaaaataaatcaccacccaacccacctccaccgngggtgatttattgaaataaattgacgggaccccccaacaaaacaaaaagctcacttgcttatta

SEQ ID NO: 25521 - DNA, 352 bp, Oryza sativa
  Clone ID: uC-osflM2020114h10a1
ctaaaataattcccccggcgaagcgacataaattgggggggagtacttatacacaaaagctgatgtcatcacgcctaactcctctaactgatgactctctctagaaatccaaagtaaaagaagaaaaaaaaaattagttattgaacaccagagaagaaaagaagaaagcccacgctaaaaaagagatatgaatgcagcaattaattattaactgcaattagatgagcatctgaggcaagaaagaagatggcggctacgctccactgctcgatcggatccagaaatccaacacggatcttgggttcagcagtcgggcatgaggggggagaacttgccctcctcgccggccatg

SEQ ID NO: 25522 - DNA, 371 bp, Oryza sativa
  Clone ID: uC-osflM2020114h11a1
tttaaatagaccattctgaaatgatgaaacaggtgggtgggaattatagtacaaatagagggaggggaagcccagcttttatgaaatagtgggatagagtctacagataatgtgaaatagaatggtgtgtcccagaaacacacaacatgatagcatgtggcttcagaaggcttgcatactttttatttgagggttcccatgatgaacaactaagtgcaattcaaatgggaggcaatttaaaggctaactgatagtagtagccaagcgaagcaatagtagaattctaacagtagaacatgacattcttgacgctgtccttgagtgcaagaaggggcctgaccggttcaccacctttaaaacgagtgctgcgc

SEQ ID NO: 25523 - DNA, 756 bp, Oryza sativa
  Clone ID: uC-osflM2020114h12a1
ttaaataaaattatcttttttttttttttttttttggtggtttttttttaaattttttgttggtttttaaaattttttgggggaaggggtaaaaaaaaattatttaaaaaaaaaccctttttaaaaatcaaaaaaaccccttctgatggattggttccaaaaaagaataaaaagaggattttatttgcccaaaaaagggccccaaaaaaataaaaaatggaaaaagttcaaaaaaaaaaacaaacgccgaacaaaaaaaaaaaaatttacattggagaaatagggaaaaaagaacataaaatggtcgacgggcccctaaactaaagaaaagaaaaaggaaactctacaaaaattttccttggtttttactggattttaaaatacaaaaaattaaccttggtaaataaaaattaaaagaaaaaacactttaataaaataaataaaagaaaacaatatgaaaaaaaaaaaacaaaataaaattaacaaatttttacaataagaaaaatccaatatcaactaaaaaattttacaaaaaaataaataaaaagaaaataaaaaaattaaatcaatatttaaaaaattgaaaaaaatttttaaaaaaaaacgccaaataaaaaagaaatatttgaagcaataaattatggaaaaaaaaaaataaaaaattgacaaaattaaatttaacccacataattgaaaaaatttatataaaaaaaaaaaaaaacgttaaaattaaattattaaattaaaaaatcaata

SEQ ID NO: 25524 - DNA, 339 bp, Oryza sativa
  Clone ID: uC-osflM2020116a05a1
gaacgaacgctcatattataagtgacgaagcggtctcacataaaacagggcacacaggttacaacaacgagggttgtaagcccattaagccccaaacatcagatcaccacaagcaaatgtttggaagacacacgcacacgggaacaggataactccacactggcagatcatgggatagcagcagttatcaatcaggccttgacacacagaacatcaagcccccagacgacgacgactcctctagtactcgtgaccatcatcgccatcctcattctcgtcggactcagcgccaacctcctcgtagtccttctccaacgcggcgagatcctcacgggcctc

SEQ ID NO: 25525 - DNA, 328 bp, Oryza sativa
  Clone ID: uC-osflM2020116b02a1
gtgtgaaccaatatgcatcaccattctaaaacagacagacagatgctaattcactcgatcagcatatgtgtatgcatcaaaaccggtttcacaaaccctatctacatcaatattagatggtgctatgtatgctagcacaaatttgacctgaaactgtctctgctctgtagagctctttctaggactagacgcatggcacatcgtgcagcgggtggcccttgatgttcctctccatcaccctcctggcgagggacacctgcttccccaccgcgaacacgaacgccttgccgttgcccgacgcgccgcgggccgtcctgccgacgcgccg

SEQ ID NO: 25526 - DNA, 323 bp, Oryza sativa
  Clone ID: uC-osflM2020116b11a1
agaaagaaaaaacgctttgcttccatgccattgataagcacagcacaggggaccgggagtccatgaccacattgtacttgcatgaggcgaaaatcattggcaagcagtacaaaatttcatttatacaagttgcccagaagggaccagttaggcactagcattagcatgagtttgtcctttatttttctagcaaattacacaaaataccgagggaaaaaggaggatggaattcaggaagaacttttagctaggaatgcccagcccctgaattattaacaccacacagaattacggcgctgcgggaatcccgaactaataaacac

SEQ ID NO: 25527 - DNA, 328 bp, Oryza sativa
  Clone ID: uC-osflM2020116c08a1
gggtagaaccaatcaccatgcctgttgccaaactttgaattattacagttcatggataatacagttgcagcaacattattcgagcagtacagaacctcaaacaatttcattttcgtgctgcctaatcgcttctagcagaaaaatgaagtcgaaacatccattataaggtacaaactacacaaactatgatcctgcaatcatctctcctatcagcgagctaacaagaaaaatcacgatttggcggcatcgttgactcatctgtgtcagggttggatacagcaaactcaaaaggttgaaaccaatcagcccgaatctaatcctgcataca

SEQ ID NO: 25528 - DNA, 324 bp, Oryza sativa
  Clone ID: uC-osflM2020116d05a1
aatatataaattttcatttatagaatgaaaagtatatataatttcacaaaaattgctcgaacttttttttatcgatgtggaaatgaaaataaaatttcgaaatttttggatgaactaaccgaagatgaagtcccatctcccgccataatgcgggtcctcttctcccggaggatactgcgaggtgacgtcactgtcgctggcgcctccgccgccgccgccgccatggagcacgtggcttgagctaggctcgcggtacatcagctcgggcatggagcccaccctgagcatggcggggttgggccgcggcaggagggtggtcgtcgc

SEQ ID NO: 25529 - DNA, 332 bp, Oryza sativa
  Clone ID: uC-osflM2020116e02a1
aatcaatactcagatgggcatcaggagagttacattgatcaatcgcaaattcacattccatcaaatacatctgttactctgttaaggcgagaactacttcgaccaaattagaaaagaaaatggtcaatagtacaacaataataagaagataataacacaattccgcgacaagcagtgaaccggaagaggagcactcactcaaatagtacagaaaccagaaaataggaaccgaaagaggaaggccaggcttgcgccgaacaagccgaacactacaaatgccttcctcctccttaagcacctagttgtagtacataagctgttgcgctgatgac

SEQ ID NO: 25530 - DNA, 327 bp, Oryza sativa
  Clone ID: uC-osflM2020116e11a1
ggggaaaaagacaatctgacatatcattctcaatgccaaaagaatccagggccattaattaaaaaaagaaccgagacatgatatagtaacagcacatttgctaaaagaacaaaattgtacggcagtactaatgttttgccagagctagtttagtcatagcagtttatcagctacataattatagccgcaaaatgcgaaatccaatacgcagaacgattgattgctgaaaacacatctgtacataaaagggttctctggacaaagtttcacgttatgaagctcagaagtaaaaaattatctgaaaagatccggttgatgggcagtgaa

SEQ ID NO: 25531 - DNA, 334 bp, Oryza sativa
  Clone ID: uC-osflM2020116f08a1
agatgaaaaagaaaagaaggaaacatgtatgatgcgcatgtttcgaattagataatgctttcaactctaataacaaagttcattctgcatatctatctatatcttgcaatccgcatcctttccaggtaacatggtaaacgataagacttacaaaaggtagatgagtggttactgatcaattatactgcttgtcatctatatgtgtatatcagatgtatcaacgttgcaggcctacgaccatccaaacttgtagtcaaggatgtagaccatgatcagcgacaacgggtagagaaggaaggcgacgaatcatgtccagagtgggaaatcagtccgt

SEQ ID NO: 25532 - DNA, 316 bp, Oryza sativa
  Clone ID: uC-osflM2020116g05a1
ctaaaagaaactcaaaaagatcagaggactgcatatctacatatgatgttcattctgaacttcgtggtataacgatccaagaacagatgagcttccctttcaacctttaggtgctaaaatctgtgccacgcctcgagttggtttgtagcatactagcaattttggtcatacaactcaactactcaagcatcacatctttagaacaatcagcatgacatattttgggtacttggctgggcaccatacacttcacgtatgggtgaaatcttgcgacaaaactgctcaggggcaaatgttgctcaaatcatgaaatttt

SEQ ID NO: 25533 - DNA, 253 bp, Oryza sativa
  Clone ID: uC-osflM2020116h02a1
atgaaaggtatttaggagaataaattttgggtgagagaagggcaacaaagggacataatatgaccgaactccccaaaaaagaaaaatggggggccaaaacccaaaaaaaaaactccggagcttaatccaaggggggaaaacttgatcaaaaataaagggaggtgctcccacaaaaaaacgggggggaaaaaggaaaatgtgtgttgcccccccaggaaaacaagggttcgcacaatgcctttccagcacactt

SEQ ID NO: 25534 - DNA, 215 bp, Oryza sativa
  Clone ID: uC-osflM2020116h11a1
aagccaaaaaaaaaaaggtaaaaaaggccccgggaaaaaaaagggaagggtttaaaaaaacaaaagggcaagggagggaaaggccccccccccgaaaattgggggggaacaaaatttttaaaaaaaatttgaaaaacttgaaaaaaggtaaagggaaaaaaaagggttggactaaaacaatgaaaaacaaaatccaaaacttggaaaaataaggg

SEQ ID NO: 25535 - DNA, 529 bp, Oryza sativa
  unsure (1)..(529): unsure at all n locations
  Clone ID: uC-osflM2020117a02a1
caaaaggaaaacactgtgtaaaattcactgtagttttgaagatgcgtacactgataaaagacccaaacgaaatgggaagaaaatacaactgttacacgtacgtgcaacatctaagtagccggccgattgattaatccggcccaaattgacacaaagaatgaacaattaaacgggcttccaaaacagaattggttggccccaatgaacgcgattcatcgcgtcggcgccgtcgtcgccgctgcacttgtattaactacttgccttttgccggtggacttgaactcgagtaattagtcgccttcgctgacgcagtggaattactcgtcgtcgtaacgcagttgagttgctagtcgccgtcggcgcttctgcagttgaattgctttcctttttattagccgatgcagttgagttactattcgcgntcggtgctccgcggtntgagttgtcgaacgttgaagctgagctgatgacgttgatgtcccgtctggtgggatgagcaggagtcgccgtagatgtagtgcggccgatg

SEQ ID NO: 25536 - DNA, 371 bp, Oryza sativa
  unsure (1)..(371): unsure at all n locations
  Clone ID: uC-osflM2020117a03a1
ttttntttttttttttttttttttttttttttttttgggggttttttatattttttttggggttttacacccaatcttattttttttggaaaaaaaaaacccagagggaaaaaagggggcgtcccaacaaacaatagaaaaaacctcaaaggtttttttagacagcccggcctgaaccaggccaaaaaaaaaaaaccaaacccccgagaagaacccctggaaaagaatgctgttcaaaccaaacccggaaatataaataaccccaaaaccaaggaaaatgcacaaaaaaaacctttaaaaaaaaacttaaccgattccccaaccaaaaacggggaaacccggggccggggggggggttcctttcaaaccga

SEQ ID NO: 25537 - DNA, 57 bp, Oryza sativa
  unsure (1)..(57): unsure at all n locations
  Clone ID: uC-osflM2020117a05a1
tttttnttttttttttttttttttttttttttttttttgtgttttttttttttttag

SEQ ID NO: 25538 - DNA, 289 bp, Oryza sativa
  unsure (1)..(289): unsure at all n locations
  Clone ID: uC-osflM2020117a06a1
cttttnntttttttttttttttttttttttttattttatgggtaaattttaaaaaaaaaaattggcgggttaaacaaaatattatataattttaatgctttataaaaaacttaaaaaaatttagcttnccgaaaaaaattcttgtaaaaaaaaaataatcaacctttttttataggaaaaaaaaacccttttttgccaaaaaaaaataccaaaacaaatataattcgttttaaaaaggaaaaaaaatccaattttttccccaaaaaaagacataaaaaaaaaaaattag

SEQ ID NO: 25539 - DNA, 491 bp, Oryza sativa
  Clone ID: uC-osflM2020117a07a1
caacaattgatcatcttgattcatgtagaacggagatgagcacaaaaacaataaaacataaacttcttaagggtcaaccctctagaaaatgaagaggtccaacacaagcaaattcagttggaactgcagcacggacgacatggtagaatcagtttgggagtttaaacaggccccatccacatggtatggaaaccaccattgttgcgatagtggattcccctatacatacactctgggacacaagacaaaattattaactcttccaagaaagggaaacaaagagttcctccactcttcagtagccccagttgtcgttacggatttcatcatcgaacttctgcttgacctcaggatgctttgcaaagaattcatctgctgtcattgtgctgatatttttcttcatctcctgcaattcagcaagctccttctctatcctctctgactccttcagagactccttttctgcttttttcagctcaacaagcagcgca

SEQ ID NO: 25540 - DNA, 486 bp, Oryza sativa
  unsure (1)..(486): unsure at all n locations
  Clone ID: uC-osflM2020117a08a1
ttntttatttttttttttttttttttttatttatttgtgttttttatatttttctgggttaaaccacccaaccaaatgggtagaaaatacaactgttacacgtacgtgcaacatttaagtagccggccgattgattaaaccggcccaaattgccacaaagaatgaacaattaaacgggcttccaaaacagaaatggttggccccaatgaaccccattcatcgcgtcggcgccgtcgtcgccgatgcacttgtattaactacttgccttttgccggtggacttgaactcgagaaaatagtcgccttcgctgacgcagtggaattacttgtcgtcgctgacgcagttgagttgctagtcgccgccggtgcttctgcagatgaattgctttcctttttattagccgatgcagttgagttactactcgccgttggtgctctcgcggttgagttgttcgacgttgaagctgaactagatgaacgttgatgt

SEQ ID NO: 25541 - DNA, 362 bp, Oryza sativa
  Clone ID: uC-osflM2020117a09a1
cttcaaaaaatgggccatatgaaaatgggacgaaaaaactagggcatcgccaaaggggggggggaaaaggaaagaaccccccccaggaaattccgggaaaaaagggggggaacaaaccccaaaaaggaagaaacattacgatcctgacggcaaaagaaaggggccctgtcgaacttggcacaaaaagggagttaagagggaaaaaaaaaacttaaaaaaggccactggtcccctgggaaagggggaatgtaccctaggccagaaagggcacaggggggggtcacacacaagattgggaataggacccgaggaacttgaagggggactttttcccaagggaccggggggggggaacaacaaaa

SEQ ID NO: 25542 - DNA, 455 bp, Oryza sativa
  unsure (1)..(455): unsure at all n locations
  Clone ID: uC-osflM2020117a10a1
ttnttttttttttttttttttttttttttttttttggggtttttttttttttttttttggttttttcaaaaaacagagctggggggggttccggttttcacacagcccacaaacggtttatttaaattggtatggaaatggttgggtataaggggcttgctccccaccccactttttgtttttccaggcagaaaatttttggggtaaaaagaattcgggattttaacatacagggggggattttttcctgtcctaaacccgattggttggtaccttaacaacccagttttttccaggccgtttttagagggcgggcattctgcaaagtttggttggttttgcccacatggaaaagaaccccccagggggaagatttgtcccagttaggggttttttggccgtgcctttttccagggtttttttaggaagctaaaaggccccagcacaggcttttt

SEQ ID NO: 25543 - DNA, 528 bp, Oryza sativa
  unsure (1)..(528): unsure at all n locations
  Clone ID: uC-osflM2020117a11a1
gcggagtgcctcggcgctcaatttgggctctgcctcttccataagtttgttcttctcagccttcttcctttgaagggcttcctgccttagaccctgttgctccctgaaagcctcctgggaagcttttgttcttgcagcttcagttttggaacgagcatggttgctgagcttgtaacgccccaccaaatcaatgtagtatggcacgagagcaactaatcttgtcatctcagccatgttgcttgcatctggcagtacaaacttgaaagaaaggactttcttgtaagagcctgccagttgatctgaaaaatgaagtgagatgaaccatttcccaaatttctcaaaagctttgtcaccaaggacctgcagagaaacaggttgtaaaacattatatatgtatgcccactgtatagcatgctcagtcttactaaagacatgcggatcatatngagccagcccatgacaaaattctgagcaaagctatgtcaatccttaattactaaaccttccatctaattttcttatcatagc

SEQ ID NO: 25544 - DNA, 580 bp, Oryza sativa
  unsure (1)..(580): unsure at all n locations
  Clone ID: uC-osflM2020117b02a1
gctctactggaaggttaccaacccgactctggcgcccgcgcacctgcaggatttacctggcttcacacgtagtgtttacaaaagggatcatgctttgattacaccagagagccatgtattcagccctttgcctgactggatcaacacattaggagcatatttaattagtccagctatcggggcacatttcacaatgtacctggcaaaaatgcatgatggatcaaaatcagccctaccaccaaaaggtgttgaaaggcttatctttgtactccaaggaagcattctattgtctgaggagaggtgggaatacccatactctgctggtggactcttatgcctatcttcctgcaaacatgaaacactcntgtgatctcagatgaagtaactacccttgtaatctttgaggggaggtacacaaccatggagggttaccatnctgatctcatggntggatcaactgataagcaaccccttcttgaaaccccagagaggtantngagttgaggaagctgctacccacttctctgccttatgactntaatatncatataatggattttcagcctggggaatatttaat

SEQ ID NO: 25545 - DNA, 425 bp, Oryza sativa
  Clone ID: uC-osflM2020117b03a1
aaacaagagggcgctatattagtatatttcacttgcaaaatacaacaacggaatcagaaagctgccagccaaggccatgaacgctgcaggcgccacggcattgcagcagcaatctcacacgattacaacacggataaatacagcaagctcaaaaaggaaaaaaaaaacacggacggagaaacaacgtaatctgctgatgagcgtacgagaagccttcaggatcctgaattcctccctttcttatttcggtgcacgtatcggctcttcctggatctggacgcgttcgcgggtggactggttcgatcagcagatgggcaggggctcgccgttccactccttgaggcactcgagcatcgggtcgatgagcttgcgctcgctgatggccaggaacaccttgttgcactcctcgccgggggacttgagct

SEQ ID NO: 25546 - DNA, 446 bp, Oryza sativa
  Clone ID: uC-osflM2020117b04a1
ttttacctatttttttttctttgggggttttataattattgggccattcatatctttcacaacatacgtacacaatccgccccacaaggccaaaaaaaaaaagaggggcgaaaaattcaccccccggcgggggaaaaatgggccccaaggaacaagaaataacaaaaaaaagccgcccaaacaaaattccacaaaaaaaaaaaaagcgtgctaaaaaaaaaaaaaggaccaggggggaagaaaaaaacaggaaaaaaacaccggggggcacccaaagaccccccccaagacaaagctcccccaaaaaaaccgccagcttcggggtttgggcaaaaaaaaaacgggaaaatgcggcccaaaaaaatttccccccccatccaacacaaatgggcaagggccgggcaaaaaaaaatatgcccccaaaaaggaacccttttttcctctgc

SEQ ID NO: 25547 - DNA, 457 bp, Oryza sativa
  unsure (1)..(457): unsure at all n locations
  Clone ID: uC-osflM2020117b05a1
gcgccaccatcatggtcggcgccgtcagcttcttcctcggcggcgccgtcaacgccgccgccgccaacgtcgccatgctcatcgccggccgcctcctcctcggcgtcggcatcggcttcggcaaccaggccgtccccctctacctctccgagatcgccccctacaacatccgcggcgccgtcaaccagctcttccagctcaccacctgcctcggcatcctcgtcgccgacgtcatcaactacttcaccgacaagatccacccggggggggaggctgtcgctggggctcgccatgggccccgccaccgcgatcttcgtcggcgcgctgttcttgccggagacgcccaacagcctcgtcgagatggggcggctggaggaggcgaggcggatgctggagaagtgaggtggacggngaaggtggacgcccagttcgaggatttgagggaggcgagcgaggc

SEQ ID NO: 25548 - DNA, 448 bp, Oryza sativa
  Clone ID: uC-osflM2020117b06a1
atgcttcacacgtaaagtacatacagacgttgtaattagatttgaagatgtgtttattgacaaggtattggcaaaacggccgcagaacaccaatgtctaggtcggcttgaccaactatgaacaatgttgaaaataaccaatcatggcaccctacgccagggcaagaaccatagccacactcatcaatcttcaactcgcaattgcagcatagggcagctagtagttcggaatgagaatggacaattgccgaatggccacgagaagttagaatccggcccaccctgatggttgctccactttcttcgctgctcctgagctgaatctctgggaggaactcccctgagcagtgggcctgttgatctgagcggcagtactccctggtgatgtcctgaaactatctggcccgaaaccccaaccatctggtgattgcttgagtttgcgttccttg

SEQ ID NO: 25549 - DNA, 507 bp, Oryza sativa
  Clone ID: uC-osflM2020117b07a1
tttgttatttttttttttttttttttaggtcaagcagactggtacgagtgaggattaccatgaaacgaatccataaaacagcattgaccacaatcccgaatgcaaaaacatataaaaacaccaaaattaaacatctccagacatatctttaattcgagctacctaacatggtgccaaaaagtgctaacataaaccaacatctgaaggccaacctgcttgaattttgaaatccagataggcaagctacagaatttgggcccagttactcagcacagaaagttttatgatcattaaggaaacaactagttgcaaacttgttttctcattcctcatgtttctactgacgcgaaacgacaccgccgcttgccttcttctggttcttcctcttcaccctaccaggggggcctccaccgaatgggcttgtcagtgagaagtcaatgtgctttttagactcaaccctcaccatgaacgacgggatgttgacaatttgcctgccgaccctgatgt

SEQ ID NO: 25550 - DNA, 497 bp, Oryza sativa
  Clone ID: uC-osflM2020117b08a1
tttgttcttacttttttttttttttttttttatcgggggatttacctggtttacacgcagtgaaacaaaagggtatcatgactatgaatacaccagagagccatgtaatcagcccttagcctgactggaacaacacattaggagcatattcaattagtccagctatcggggcacatttcacaatgtacctggcaaaaatgcatgatggatcaaaatcagccctaccaccaaaaggtgttgaaaggcttatctttgaactccaaggaagcattctattgtctgaggagagagggaaaacccatactctgctggaggactcttatgcctatcatcctgcaaacatgaaacactccgcggtctcagaagaagtaactaccccttgaatctttgagaggaggaacacaaccattgagggttaccatcctgatctcatgttggatcaactgataagcaaccccctcctgaaacccaagaaaggaatttgagtcgaggaagct

SEQ ID NO: 25551 - DNA, 380 bp, Oryza sativa
  unsure (1)..(380): unsure at all n locations
  Clone ID: uC-osflM2020117b09a1
ccaataacaaatagaagtacatagatcaaagcacaagccttgaaacaaatttccaaatgagtaatgccgaaatacagactaatacatctctggggggggggggggggcaangatttgntgacattcataacccttattactaggatttgcattagaccttaacagccttgaatagcgaccaaaggattgagctcacgggaagaattcgtaaatcaaaaaattggaatacgctctaccgcttcaagctttgcagaatgtactgggcgtacagattcatagagcactggattgcttcacgagctttcggagcaggcaagaagttattgacagcaaccttcttgttctcaattttcttggagccttcaaagaagcggctgttt

SEQ ID NO: 25552 - DNA, 506 bp, Oryza sativa
  unsure (1)..(506): unsure at all n locations
  Clone ID: uC-osflM2020117b10a1
aaatacttaatagtaatagactctttgatggagtattacaacatgcagcagtggcattaatacgccagtacattaattaagttacacatatgcaggctccattttggtttcttttaatttatcgtattacagaatttctgtagccttgctgatgatcacttggatatcatgtactagtaattaacaataggatgcatacaaaagatggcccaacgacaacagaagatgcgtgcatctgacattgtctggccttatttggttggtagtactccaattaattaacaagagatgatgcattcttgtgccttagtttcttcacatgcttggcttcacgttgagcctattcgcaatcttcacccccaacgactcatcacactgggagaggtnagttgacccagatggcgcggagctcaggggagacttgggggtgcgcgagctcgccggcgaagcggcggatgaacctctcctgtctatccggcgcccacgacctgtacctctncccgggc

SEQ ID NO: 25553 - DNA, 541 bp, Oryza sativa
  unsure (1)..(541): unsure at all n locations
  Clone ID: uC-osflM2020117b11a1
tttnttttcaaagcgggaaaagaggtgtaagctaacagcacgagttgagatccacaaaacattgttctagagctagctagtacacgaatcgtctgctaccaattactaatacaactttcagagagacaacatcagcagttcagtacataataatagtgcgtccattgatctgaagcaggaaggtgcagcgcaggcatcatgtggagcaacttcattctctctcgtacctcgcaggtgagcgactgcggggcctatcatagccagggctggcttcacggcgttcacggtcgtagttgtagngggnggctgcccctctcatcacctttgttgcccccttgcggacttgcaccacggtgataatcagggctacctctgtcaccacccctgccatagtccgggctgcccctctccctgcctcttccatagtcagggctgcccctctcacgccctctgccataaggacttgcagaccgcccgcgatagtccctcctgtctggagatcgatcacggcctcttctttctgggctggatccattccttt

SEQ ID NO: 25554 - DNA, 424 bp, Oryza sativa
  unsure (1)..(424): unsure at all n locations
  Clone ID: uC-osflM2020117b12a1
ttntttgttttttttttttttttttttttgtttttggggttttttttttttttttttggggtttttcctttttttttgggggcgtaaacagaacaagaaataaaaaaacggccccccaaaatgtaaaaaacccgcggcattccgtagcaaattacctgggtccccgaacagggacaatttttctgtaaagcggaaactttacggggccccaaaccagcaacgaaatgtagagttgaaaaaggcccctcatgggtagcagcaaaattaacgccgaaacctaattgatttggtgcatcaaccaaaatttgcccaacaacttaatatttctcaacaggggtaaggaaccgctcaagggggtgcagttcccatgaaagaatcttctttcccgggccccaaaggggtgcaaccatacccaatggattcc

SEQ ID NO: 25555 - DNA, 397 bp, Oryza sativa
  unsure (1)..(397): unsure at all n locations
  Clone ID: uC-osflM2020117c01a1
aggagaagattaatagcaagtaaatagtaggccaaaccatgcaaacttacataaggtttaagtgcagtcataacacaatatacactagtttgataaacaaactttattcagcagcaagtaaataaggtaacacaaagcgaatatctgatcctcagtagcgcgccaggctagacaagttcggatcatagagcatcgccatcgagaactaggccaaaccttcaaaacaatgtacattgttggcctcacaatgcttgcagtgaccaccagttcgagcactggtaaatccagcaacagtccacgagaaagattangcgaggtttggcttagctcggagcggaggcaggtgggcatgaagacacatcttgggcgcagtactgccagcatatggaatccacta

SEQ ID NO: 25556 - DNA, 460 bp, Oryza sativa
  unsure (1)..(460): unsure at all n locations
  Clone ID: uC-osflM2020117c02a1
tttntattttaccccaangncaaaagggttcaatgtggggagcattatgactgcgaatcaccaggcacaaaaaagggagctagtacaaagcctcaatacacactggagtaaaaccagcaacggcatctgcgctccacatatcgcgatgtgcagtggtctgagataaacagtttctatgtgatggaacttaaaagtctcttttattcaaaaacacgggagcgggcaatcgctcactatctgtccctctgggtattgcttagttttagttgaggcatgagtaagcgagcgttttattctccgacagctcctgggcagtagcgtccatcttctttcttgagaactcgtcgatcgggagaccctgaacaatcgatcattcgccaccactggatgttactgtgaacgagttgaataaatcagcatgcacaccatactgaccatcagagtacacacccattgagac

SEQ ID NO: 25557 - DNA, 382 bp, Oryza sativa
  Clone ID: uC-osflM2020117c03a1
gggggattaatacaaaaaagttttgacgtattcattcatgggcagcaggaaccaacgcgcaagggcacaagaatgaaacataacaatatcaaacaaaaaccggactacactgcctcccacaaaaaaaaaacaaacccaagttaggacgatgccctacacaactaacggagagtaacacatatccccgggcttttcttgtgataagaaaatccgggaatgcaggaaacttggaaaacaaaaccagagactataattccactattcaaaaacttgggtcccctctttgcaagaaaaatcaacggaatcatacattaaaacacggctggagtataacaaaaggggcacacaaacgaaatgctacgctaaaagcaaaatcctttgc

SEQ ID NO: 25558 - DNA, 486 bp, Oryza sativa
  Clone ID: uC-osflM2020117c04a1
aaagttggcattcttcaaaccagaacatgccatgacaagtggatgcgatagttagcacctagagtactttttagcgaggatttaactcatgtcaacaatgtatcaaaaaaggatggcacaaaaatttatcattactatccatcaccaacagcgcgtcccactgtaactcaaaggagagcttcagccctgatgatagcaggttcagtcaaattgtactttatccagctgcgtaatcatctcctcaaacttcaaaatctgtctcaaaaagtaatcaccatggttcttggttaacttggattcaacaacatgaataatgtcctcatcatttagaagtcaaagtctgcactggatatgaacttttcgtcactgtcgattgaatgcattttgtgcttgtatgtcataagaattgtccttagtgtaacctcatccaattcatgtatttggcaagtttaccaattgttatcgttgaatacaacttgagatagc

SEQ ID NO: 25559 - DNA, 487 bp, Oryza sativa
  Clone ID: uC-osflM2020117c05a1
cgaaaaaaccaggacgttaacctgagcgaccaccatttccaatcacaaaaacactttccagtgatgaaattttctgaagcaaccatcatacagaaaaggaagttaaataagttaccgtcaaggaactaaaacacatacgagttgttcttcaaattcacaatcctaagttgtccaaaaaccaaaaccaaactaatcagggctgacttagctgctccaaactccaaagtcgtccaaattgtgtagagcttgactggcatgaacaataccttcagagtggctcaaatcttaatcaggaagaggaattggccttacgggtaaggcgaacacaatctggataaaccagctcacaaaccgagagcgtttcgacctcctcgcgacgaatttcagaaacatcgacaacttgttggtggtcttctctgcagagatattcaatggcgacctcatacccatcaagatactgaaacccttcaagggtgacagcatcgat

SEQ ID NO: 25560 - DNA, 413 bp, Oryza sativa
  Clone ID: uC-osflM2020117c06a1
gggttagctccttcaaaaagactttttattcaaaaaagaatcacaaatttcagatgtgcatattcatattggccactaaattttttgcttacaactatgattcttccgtcaccatcgcattggagcagaaaagaaagggcagcatatgcctaaaaccttgttgtactacttcatcaaaagttattggtggggacttcgataattcaaaggtcccatcttctccccttcttggattgcattgcataatctcgcatatactataggaaatatgttccgtcttcttccattcttgggccaactcctaaattttcaacaaaccttggtgtaacactttgccttagaagtccttttaaagactcatcttttttggcactgggaacccacaacagctttttgattggcacacttttata

SEQ ID NO: 25561 - DNA, 397 bp, Oryza sativa
  Clone ID: uC-osflM2020117c07a1
aacaaatgcaacagggtaacacaatcagcctattacttacgattatctcaaatacagcctacgatacatgcccacgcgaatgcgcgggctaccttcctagttccttgtaattggcaaatattacacacgaggaccaacgcggaaaggtaaaattcatccgaaatatcaacaatcgcagaccagcatcaagtaatacagtacccaaaaaggttcccatagcacagacgaaaaaacaaagcgaagacataggaacgtggcggtggcgtacgaggcggtaatacggtgataatgtaagacggaaacaccaagcacacaaaaccctgccctagaaccaccaagcaaaagccaccttacatggtcgtcagcctcctgctgctactcggcctcgtactcgccc

SEQ ID NO: 25562 - DNA, 451 bp, Oryza sativa
  unsure (1)..(451): unsure at all n locations
  Clone ID: uC-osflM2020117c08a1
gttcgctctgcctgttaataataatcgagggaaacttcacatctatttctacatcgtcatttctttttatcaaaaagactaacactccaataacagggacaggaggcaaatccggattgaactaaaccttgtcgtccttcaatagctctggagcattatccaactgggaacatcatcccggttctctttcctttctttgatcttttgtacaaaaaagaactttactcaacaattcaatcccactaaagcgtggaatttactaaaaatgatgatacaaccgtgacagagtatnggcagttaactgcctcccttctgcttgagggtaatcttgtctcctaagctgagtgcgattccctgggtcttgctccttattctgatgtaaccactgagcttgccatcaaactgcttctcgatgctgatatttaccaaagcatcttcaccgaaaacactc

SEQ ID NO: 25563 - DNA, 422 bp, Oryza sativa
  unsure (1)..(422): unsure at all n locations
  Clone ID: uC-osflM2020117c09a1
acagtagaagaggataaatacgatgctgcttaatttcaaatacgcacgcacgcatggttggaacgataattaaacagatgcatgcatgcatgcttattgagatagatgctatatactactccctccatattttaatatatcacgccgttgactttttatccaacgtttgaccattcgtcttattcaaaaaatttatgtaattatcatttattttattataacttgattcgtcatcaaatgttctttaagcatgacataaatattttcatatttgcaaaaaaaaattgaataaaacgaatggtcaaacgttggtcgaaaaatcaacggtgtcatacattaaaaacggaaggagtataacataggggtacacaaacataatgatacgatatatattantatattttgcagcaagcagatgatgg

SEQ ID NO: 25564 - DNA, 383 bp, Oryza sativa
  Clone ID: uC-osflM2020117c10a1
ggtgaacaacctaaaggggctgtcaatcaattgggggcacttaatgcattttagggggtatcacaatccccataaacggcccttttttattatgtatcgggctactaaatactaaacacatttaagaaatgagagaatttagaatagctaccataaagaccagtccaatccatagtgatttaccggaaaatacaacgcttttattgtttgaccaaccatcaggagaagcatatacaaggggtacactaatgactaagactgaggaagtcacaattaatgcaaaaacagctgattggaaagcaactgtcatatttctaatcctacaaggtaccattaaataaagtagactacatattatatttgatccctcacttaatcaaaat

SEQ ID NO: 25565 - DNA, 484 bp, Oryza sativa
  Clone ID: uC-osflM2020117c11a1
aacggacgattgctgattactattactggttgcaatgtaacacttcggatacaatagtacattacagagctagctaaatgcgaagccacaataccgtcagcgcaagacgatcataaataaagcttacacaacatagccaacatgcaaaccattcggactgaccagagatgagggttcttgaagctgccgtggtgtgccatgcatcacaaatgccgaacaactagattgtagcagccaacatgaaaggaaaaggcatggataatgcagcaaagatggatgatgaagaccgcagattgtgacgcttcgttcaccaaccatatgaaacccctaaattttgtcaagtttctccgccttcaccaccggattagccttggcaatagcatccctagcagcggtccgatagtcaaactggcagtcatgcttatcggaatagcggtgcattgcgcagtacaagttgccacatcggcagttgaatccggtaaga

SEQ ID NO: 25566 - DNA, 418 bp, Oryza sativa
  unsure (1)..(418): unsure at all n locations
  Clone ID: uC-osflM2020117c12a1
aacaggagaggggggtagtatatatactcaaccaacgttagtacgttacacaaccaacctcttgttcagctaggtatatggaaccaaccccattttattattgttggcctagacagttaagtcaaccatcaccacagaaaaaattcaaggtacaagagaaaaggggaaagaggcaactcatgcgctaagttacagaatgacacaaggacaggcaaaaaacatcaggaagtccagcatcaatgtgattctttggcggcctcaatctctgatgtgctttcgaccatcacaatcacagggctacagctgaaatactgagagctacgagtttagagcaaccgcgctctgcgactttacagtcttcaggacttcctctcccattcgcttgcatccgaccagngtcgttccaggagaatatatg

SEQ ID NO: 25567 - DNA, 392 bp, Oryza sativa
  unsure (1)..(392): unsure at all n locations
  Clone ID: uC-osflM2020117d01a1
aaaattgtatagggacagttcttgacgtgatatcgataaggttccgtaaaccagcacaatactcaactggtcccaacacagtaggaaaataggactggagagacgtacacagccaaaactcaaagatgatacgtgcataaccagcactaatccacagcatacatcctcccagaggggcatcatccatctacctatacctaccaatgcagagccaatcagccaagcagatccagaaacatcagtacaaatcacaacagcctgntaggtcggtgtcatgtatcaatgtagtaggatcacatctccttctagctggaaggctccacatggcttttgtagttttacaaatcctctccctatcgccatgtgccacattgcatctaagatttgccgac

SEQ ID NO: 25568 - DNA, 425 bp, Oryza sativa
  unsure (1)..(425): unsure at all n locations
  Clone ID: uC-osflM2020117d02a1
aagncataaatttctcaccagcaacatgtttaaatacgacagctactcttgtctgcgaatacaactgtagatggagtaggaattataattacggccaagagaagattttcaagtctaaaatcatgaacatctttcaggtagtcatctacttctcgtgatgctactgtaaggttcacaagattaatccccgcttgataaaacagacaaaaaaataggataggtgacaaacgagtataacgctctcggtgaaaaaccggagcagagtagtagtagtaatacagcagccgtgattttatttagaagactaagtatatcaattaagaggggtagttaaccttaaaccccgcaagaaacccgcgccaccctcacttgctgttgccgttgacggcggtctttggccgttggccgctgctgcggcggcgggg

SEQ ID NO: 25569 - DNA, 456 bp, Oryza sativa
  unsure (1)..(456): unsure at all n locations
  Clone ID: uC-osflM2020117d03a1
aggttcaaatccaacttattcatagagcatactgctgtcccacaggaaactgtttcataaaactaacatatcatacggactcgatggtccattaaaccagacacaagtagacatcagcaccacaaatacttgacgaacagaggctcgggacgaccaggcacatcggcagctccaccaaactggctgattactgaccaccacggaggcggagcaccaggtggagggtggactccttctggatgttgtagtcggcgagggtgcgtccatcctccagctgcttgccagcgaagatcagacgctgctggtctggngggaatcccctccttgtcctggatcttggccttcacattatcaatggtgtcggagctctcaacctccaaagtgatggtctttccagtcaaggtcttacgaagatctgcatacaccacggagacgaagcacaggtgggggtagact

SEQ ID NO: 25570 - DNA, 483 bp, Oryza sativa
  Clone ID: uC-osflM2020117d06a1
ttttgttattttccttttttttttttttttttttttgttttttttttttttaaaaaagaagaaagcatccatagctccattggaccatgcatagagggcatacagttttgcaattcagctcaaaatggcatatgtaccaagcttgggggggagtagcaagcaatgcacagcaaaatgggaagatatgaacaattatggccaacggggggctaacaacagtttagcacagtccaaaagggaaacacacataacaggaatttgcaatgcaacggaaccggagtatactgtcaaaccaatcattaaccagggaacttcttattaaccagctactaatagtcttttccattgacggtcttgtcggttggacccttggggccgacttcctcaaaggccttttaaagggcagccaagtcctaacgggtttttgagaattaaacttttttcattccctcaccaacgtaccagtgcacaaacgcacgctta

SEQ ID NO: 25571 - DNA, 202 bp, Oryza sativa
  Clone ID: uC-osflM2020117d07a1
aattgattcctaacaaagtatggaaaaaaaaaaagggacagaccgtaaacaaacaaaacccaaagaaaaaacgcgcataaacaaaactaatccacaacatacaggctaccaaaggggggagaacaaaaaaaaaatgcgggccaatgcaaagccaattatacaaggggggccacaaacaacatttctaagggcaaacaaacaa

SEQ ID NO: 25572 - DNA, 453 bp, Oryza sativa
  Clone ID: uC-osflM2020117d08a1
gggcaggccaaggtgatcggcacggtggtctgcgtcggcggctggatgatcatgccgatctacaagggcccgctcctcaggctctgggcgtcgcccatccactggcggttcgcggagagcgccgcgtagggcgcggaagtctaagaccatgaacatgtttcagggagtcatctacttctcgtgatgctactgtaagggtcacaagaataaaccccgcttggtaaaacagacaaaaaaataggataggtgacacacgagtataacgctctcggtgaaaaaccggagcacagtagtagtagtaatacagcaagcgtgattttatttagaagactaagtatatcaattaagagggtagttaaccttaaaccccgcaagaaacccgcgccaccctcactttggcttgccgatgacggcggtcttcttgacgttggccgctgctgcggcggaggggac

SEQ ID NO: 25573 - DNA, 410 bp, Oryza sativa
  unsure (1)..(410): unsure at all n locations
  Clone ID: uC-osflM2020117d09a1
gggagaaggttttgatcttataggatctaaagatagcattgcagaccatagtaacatactaattataattacaatcaggatcctagctagatcatccaattcatcatcagaaatactgctagactgagacaatatttgaataatggataatgactcaagagatacaagcagatatgcttcagctaatctaaaatctccaccatgtctggttaagtgcgaaatatagaaattagttggaggacttgggtntttggcgcttctacttcttccgagagctcaagtgaaacgtggcagggatcactttcataaaagacttgtagctctattccacgaccacgaatgtcacatgaaactattgggtcgcttagtttttctgaaacacggaaatagtcaattcgcattctattgcc

SEQ ID NO: 25574 - DNA, 485 bp, Oryza sativa
  unsure (1)..(485): unsure at all n locations
  Clone ID: uC-osflM2020117d10a1
ttnttttttttttttttttttttttttttttttttgggtttttttttttttttttttggggggaagaactttgcttaggggatagttaaattgggaaagagaggccaaaatataccggtggacacaaccatcaatgggtaagctgcctaaatcagatgaaaaccatcatgaaccaagttcgaagctcttggtatatggccttttgcctcttaccaggaaccagacagacaaccaggcacaaacaactaaacaagacaccagagccagctaaacactatttacaggaaactttcagccgattactggtcgtttgactacccagggtctttgccactagtaactgagggcatggattccaaaacggacatttggcgatcttaagttatatcttccaatcagggattaaaagggtatctaggcactacagaggctccaccatgttgtggacatccaatattttctcgaacacttgccaaaggtttttc

SEQ ID NO: 25575 - DNA, 473 bp, Oryza sativa
  Clone ID: uC-osflM2020117d11a1
ttttatattttttttttttttttttttttttttttgggttttttttttttttttccacccccaaatttggaaaaccaaggggccaattttaggccaaattccgcccatataaaaaaggaaggggcctaataaaggatgagccaaccgttggtttccagagaaaaccccagtgggggttccaggcctatgggaaaatcacttacccctgcagccggcccataaggggcccatgctctccaatcttaaacaagggaaaggttaaaggatcttatccatccctgcggccctgaaaagggcccaatgggggtcggggcccccgctgcccccccataagtttttttttttttcccagacctttaagcgtaggcgaccgggaggattcaaaccatttttgaaataaaaaaggcccctgctgaaaatttggatattgctaatggaccctgcccccaagaccccggaaccccctggggggg

SEQ ID NO: 25576 - DNA, 406 bp, Oryza sativa
  Clone ID: uC-osflM2020117d12a1
gataacaaacaagaaaaacttatttgcaacacaactacattcaactgacacagctgggcctgaagttcatttccgcctgaacagcataggatacagatcatacacacacccaaacactgaaaagtgctaaccatgctggcagcactagtctttacggaagatgatgatacagatcagatgcatgccttgcgactatgttacaccaccatttacagactacagagttttcctttcccaacaacagctggagatccaaaaatctcctaatgcagcgctgtgaggattgtagatccttccaccttgaaggttgcaccgcaaatttcttcttctttggcaggaactgcggtcaccttgggctttgggttctcatagcacttcaagcctccaactccaagagcattggaat

SEQ ID NO: 25577 - DNA, 349 bp, Oryza sativa
  unsure (1)..(349): unsure at all n locations
  Clone ID: uC-osflM2020117e01a1
atcaaaacgcttgcaaatgatatcagataagtagagtcaacaagacaaaactgtatctgccaaagcacacctccccaactccacccaattacgccattatttctgggcaaaagcaaacggcttcccattcctccccttcaccagtctcaaaccataaaccccacaacaaatcctcctaagtgacggcatataagatgatgaaaacaaagcaggatactccagagtcgtcatggcgaacttcaagttgacacttctcatgccacagccgctagatcgtgctgggcagcctagaccgggtagggcgcgggncttgtagggaccctcaactggaacgctgatgtagtcagcc

SEQ ID NO: 25578 - DNA, 411 bp, Oryza sativa
  Clone ID: uC-osflM2020117e03a1
gggagctgagggtgattcattatactggacgtgtgtttccatcaagagataattagccatccaatgcagatgcaatcatgcaaccagaggatgtgaagggtgaagcaacttaaatcaaccgaacaaactgtgacagacaagtatgatagatcgtatgcaaataaacaagcgatccaaatcctggcgaatgtgaaatcttctacggggatgaatacagatatcgttcggcactatgaaacagcaaacatcttctgattccacgaggaactggccagaacggtatttaaaagctgattagggcatctttcttcggatcctgctttttgggcccttcttgggaactgcttcctcccttcttgccaaatatcatctcatcgagatcatcaaggatatcatcatctccacctgacc

SEQ ID NO: 25579 - DNA, 380 bp, Oryza sativa
  Clone ID: uC-osflM2020117e04a1
agaggaaacactggtgatttccactcagtttacaatacaaatacaccgacagactggcttaaaaaccaccaaattcattcaaaggaaaatgggtttgagggatcttggccccaagagactgtctaaacctaaccacagacaggggatccactggacccagattattcaaaaacaagagggctttgatggcattcctcctcaaaatcgaagggaacttggtgcaaaggcgatcctcacttctcgctagcgagctgggtgcggatgagcttggcggccaaaaccatgttggggagggcaggcttacctcggggtacttgcgggatttgggaccgagcagggatcacccgagaatgttagtgttgagcaccgcaggattttgt

SEQ ID NO: 25580 - DNA, 502 bp, Oryza sativa
  unsure (1)..(502): unsure at all n locations
  Clone ID: uC-osflM2020117e05a1
ggccctaaaaaccgtaaaataggattaaattgacctacagaatcctttacaagctacaaattcttcagatattagaatacaccaaaaaatgtggcaacagcaaacagcaaaaaaagtactcctcctatcaggccaaccagcttctcagataggtagttggcaaggaatgctcccccaacaattgcaaggaaagttgcaaccaagtgtccagctatggctccgcttgcgacaccaaaaggagactgagcagcacctaacgcaattgtagccagcatagagcgatctccccattctgcaaagaaaacaaggctgaaagacttccaaaggacctcaagaggactagtcaactttttagccaccttctccttgacaagctcctcagcctcagccagctccccagattcagagtttcctgaaggtttccatttgcattattgganagttgccatgcatcttttattgacttgaaaccaaaaaatgcaggagagcaatcgcagcatac

SEQ ID NO: 25581 - DNA, 466 bp, Oryza sativa
  unsure (1)..(466): unsure at all n locations
  Clone ID: uC-osflM2020117e06a1
ttttnttaattttttttttttttttttcttttttttgggggttttttaaatttttgatgggggtttcctcaatttatttacatgataagcaccaaattcaggaaggaaggaaaaagagagccgggggaaacaaaaattgggggcggccaaaaatggaaaaacgggcccaaagaccacaaaaaattgggtcttaaggtggaaaaacaaaggccgaaccgaagatcaaaccaaaatgggaattgccaaagggggagggggggcaagcacaaaaaaacgcgcaggggggcttgcgcaaacccggccggacttgcgggacacccaaaaacgccggggaaggagaagcggatgtaccgcggcgaaacgacgacagggaagagggggaagacgaggaggaatggactttcgccccgactggtctcacacccaaggcgacgttgcagaacgccgacacggacacccgcgccgc

SEQ ID NO: 25582 - DNA, 363 bp, Oryza sativa
  unsure (1)..(363): unsure at all n locations
  Clone ID: uC-osflM2020117e07a1
agaacacaacgcatttctgcgttttgttttggctggaaatggatatattccccaagcgtgacaacaacttttgagtgccagtgtgtgtgtgttcccctcccctccctgcttaattacatcatctctaacgtaaatgattcgtgatcttcaacgggaggaaaatgacgctctcttcgacctccagagcggttttcctcccgagacaaaaagcacaaatccaaagctccccaaaaggctgtacaaaatggcaaaaagaagaaaaaaaaaagggagatcgaatgatcccacatcggaatccgacctcgagggacggtgtattgagcgtctgaccgtgctagttncggagcgcgaccgcggcctcgt

SEQ ID NO: 25583 - DNA, 479 bp, Oryza sativa
  unsure (1)..(479): unsure at all n locations
  Clone ID: uC-osflM2020117e08a1
aaagctaatgaatctgtccacattgcacaggagattagcagtggctgcagagatacacagctctcggtaaagcttctggtcatatgatcatacatgtaaagctttccttccaactatcatgtgcttgtgcttcagcattgttacaaaaaaggattatagtagctattaaacctacacatttgcataatggaagaccataaaaagggtcgcaaaagaaatatgtccacctcggcaatgcaaaatatcagctttgctagtattttcttgatcattactccaagaaaattgaacaagaaaagaagcaatggtagattagtgtttgagcgaaggttgtcatttgttaacggacaactcgtgaaggtgagccatgtagtgcggaggtcttgggtttgcgccccacatcttctccaaaggacctttacagcgcctctggagctccaggtacctatccagtttgaagntctgcctctgaatcagct

SEQ ID NO: 25584 - DNA, 318 bp, Oryza sativa
  Clone ID: uC-osflM2020117e09a1
ccaaaaaaaggggggcttttttatgcccccaacgtcacaaacagaacccaaacaaaaggggaaaaaaccccgggggaacccagggctaaaaccccccggaccaactaaaaataataagccctaccccccccagctcaaggccctatggggggggggccagggcccacccaacaccccaaaatattggtgaaagggggatacggggggggtaaaactatcttgggccccttaaacagggggggcagcggaaacaggagccccctttcaattaacttcccccaggccaacccccctcgggtttctaagggtgggggcccc

SEQ ID NO: 25585 - DNA, 565 bp, Oryza sativa
  Clone ID: uC-osflM2020117e10a1
aattcattagcaagtcaaaatttcttggaagaataccatcgactcacttgtgtctacaagccttgagttatacttcttgcaacacagacaacactacagataccatacattcattttacctgtttcactcgcttttaggacgttctataacctcacatctggcgctaccatgctgaccggaccaaaaccttgttttccattggagggaatggaatgaagctctctctctctctctcttctctagctcactagctgctgactgccatagacagggtaggctccatatgcagcagcatacatgttagggtgcgggacgggggaggcataaccgtatccaccgtagaatggcgtcccatagtacatattgtttcttcggctgccagaatcagccctagactgtttatgtgatgggctgcggccccatgaaaggcgaactgcctgctttccaatgactgatccattcaatcgttgcagtgcttcttcgcaatagttctgctgacgaattgaacaagccacattgcttcctagaggaattttacagaggcaacataccatatttgcaaat

SEQ ID NO: 25586 - DNA, 464 bp, Oryza sativa
  unsure (1)..(464): unsure at all n locations
  Clone ID: uC-osflM2020117e11a1
aaacttnttnttttttttcctnttctttatttttttatttttgggtggtttttttatagctgaaagggctatattacatacttccatacaaccatagcttatatacaatgctagcaatattacacatccgtcaactaacttatttcatataagagagaacatggatagttagctgaaaaggcgacagtacattacttccgtacaaccatagcttttggagactggtaacgatattacacacccgtcaacttaggcactacaccattataatagggagatatctgacgatagtagccagactgccagagagccaaaattttggggacagtttcagcttcctaatccccactggtccataggcatcggctgcaattaaaccagcaattcctatgcttttccctcactggcattggcgctgccatcatcgccaattttgaagagttttagggggttgtggctcaagc

SEQ ID NO: 25587 - DNA, 570 bp, Oryza sativa
  unsure (1)..(570): unsure at all n locations
  Clone ID: uC-osflM2020117e12a1
ttntttgagggagaaatatatagcctcgttcaaggtgctggaacaaaattttagaagtttcggtcctatcagaccctcccaatataacattatttcggccagaatttcttaaaaaaaatttcattttattatatgaattcgataatatttttatttaaatttggccaaatttcagtatatcggcatccctccgatacaaacgccaattaaaaaacagaagattaaaccctgatatagctaatctagactagcggcggcaggtagacggaagtggtggagggcggggcggccgtcgaggcccttgccgtcgtagtgcgcgaggaactcggcgacggtggtgctcctgtaccgcggcgggtcgccgccggcggtgagctcggcgatggggccgtacagcctgccgctccggctgctctcgcggcccaggtcgacgttgcagaacgccgtcacggacacccgcgccgcgtncctgctccggttggccaccacccggtgctccacgctcctcatcctnccgttgctgacgagctcgagcaggtcaccgacgttgacgacgagcgcgccggtgac

SEQ ID NO: 25588 - DNA, 494 bp, Oryza sativa
  Clone ID: uC-osflM2020117f01a1
aagcatcactgcatcaaacagcaatatattgacttctaatgtagcagtacttgtacaacttttgagcagcaactgtaatgctgtaatcggatcaagaaatgtgcaagcgaacagcaatatattgacactaatgaacgacaagaacatatctcatgttctcaagttctacatgtatctgaaatataaatcgctaaaaaaaattaaatatactataaatacacttgaccataaggagacgtggttgaaaatccattcaagtacccatctccctagaaatcacttccgaggatgaatgctacaaaccaattttggaaggcggccggccgtcatctttcaaatggtaagcaacctgaaatatacgatcaggtagatggaaagagatagcaccgacaaatgtgctgccagaatagagtgccgatgcttcttgacagataacctctgaggctcgcaatcgctccagcaggatggcactagggtggagtactgtagcgaca

SEQ ID NO: 25589 - DNA, 425 bp, Oryza sativa
  unsure (1)..(425): unsure at all n locations
  Clone ID: uC-osflM2020117f02a1
tttnttttttttctttttttttttttttttttttttgggtttttttttgtttttttttgttttttttttttttttttttttttttttttttaaaaaaaaagggctggggacccggaaataaaaatagggtcctttaaacacaacccgggttgttaaaggtcccaaaaacatattttccaaaacttttaaccgggggttttaaaggcccaaatattttcccaagggaacccgggggaattttggggggcccgggaaaaaaaaggccaaaaaaaaccccctttggggccagaaaaaaggccggggtccccccaaaagggtcattttttggggggtaaaaacacaaggaccaataaagggggggaaaaaaaaaaagaaaaagtggcgcgttccaaaaaaaaataacccccccccccccctgtgggttt

SEQ ID NO: 25590 - DNA, 435 bp, Oryza sativa
  Clone ID: uC-osflM2020117f03a1
agttatatcatatatattagatgaagtttagtctcccttgtatcacatcttacagtttcccaatcccaatacattgcagcttacgcctgtacgcgtgtatccaactatccatattgtaccaaaccagcgttgataacaaaactgaaaccgtctccgcttgctcctgcccaccggccatggcggcccggccggtcagccgctcgcgtcgcgcagcaagcaatccgtccgctgtccggaaaggacggcggcgagctcagacgctgacgagcttcttgccgaggatcatgtcgtcgggttgaaagtcggccgccttcctgaacgtgccgcggccgaagtcgaggttgtacgagtcggtgaggccctccaccaggtcgtactccggcttccacccgagctccaaggtcgccttctcgattgacgcgaagaaatgctggt

SEQ ID NO: 25591 - DNA, 406 bp, Oryza sativa
  Clone ID: uC-osflM2020117f04a1
gtagctggagtgaagtatgcatagagcaatgcatgaacaatacactgaataagtacaagccaaccccaaatgaatagtttgagggctgggattaaaggttagtacactacactactatatactgtattgtacattttacacagaataaagcatgtgtgctttattccagtagcatcttctataagtaatctcccatcaagaactggagaaatatatacatccaggaagatgggcctactgcactctgcagcagattgttcctatgctatttgtttatcagtggtccttccttgatgacctagaacctggtctagatgatttgagggcctctgcaaatttgtgaatcttcttggcatcttcaggaaccgtggcttcaccattgccaaggtgagaactatgcccaaaa

SEQ ID NO: 25592 - DNA, 449 bp, Oryza sativa
  unsure (1)..(449): unsure at all n locations
  Clone ID: uC-osflM2020117f05a1
ctgccttaactccaaatccgatgtaaatttgccaaatttggtcgttaacagttgtaacataacatatgtttcatatcatgactgtcgtccagttacacaaggtaagcattcctcagaatgccattcacttggctggctacaaacattgttgcatacatcaagagatatgtcgacaagctacagtggtatctccagattagccacgattcaaaatacagaaaaaaagagcttctgagattgtattttagcaagtcgtaaacatatatacaatatacatggcaggcacttagactatgctactaactgtagtctgtatgtctggtcagatgttcttaaagggacatcagaatttttcctgtactcatgactaaccgtctggatgcaccccgaaccagccgncgacgttatccacaacatcatccgtctcactgggtcttcgtcatcatttc

SEQ ID NO: 25593 - DNA, 407 bp, Oryza sativa
  Clone ID: uC-osflM2020117f06a1
ggggttgggggagaaacctcatgaaaggggaggcagttatcatagaatcatacccactaacccataacttaatcactactgaacacccagagtatccaactctctcatagaggctcaccatgacactacgaccacagcagttagcctgcctgcctgctaaatacaatagctactcaccatgtcgctgcacaacacaatgactgaaactatatacaacaaccggcctgcacagctttattatttatccaccgcagcaggttgcgggtgaagccggtcctccgactcttgaccaattgctaacgattctaaaacatgtcaaccgggagcctcccggggtcaatcttggatcacattgctgtaaacaacagggcacttgtactggttgatgtgctctgccttccaggggt

SEQ ID NO: 25594 - DNA, 338 bp, Oryza sativa
  unsure (1)..(338): unsure at all n locations
  Clone ID: uC-osflM2020117f07a1
ttntttatttttttttttttttttttagatgcacaggcatatatattattatttatatgcactactaagtagaaaagaatgccacagacacggtaataaaaatggcagtcgatacataagaaataatttaattacactagctagcaggggcacatctgaaaaaacaacgtgaaataaaagggaaaaaaagcaagcagaaagctagctcatcactttattccagaaacggtacagtgtagtgactcgctcgctcctccctttggcgaaataatgtcgtcaatgcctcaatcgtgcagcagcaagtgctcggtcttcggtgatcgccgtcactggtcggt

SEQ ID NO: 25595 - DNA, 468 bp, Oryza sativa
  Clone ID: uC-osflM2020117f08a1
tttttgtttttttttttttatatattatattaaggggagttttggctagaaaccatatgaaaggggcggcagttatcatagaatcatacacactaacccataacttaatcactactgaacaccgagagtatccaactttttcatagaggttcacatcacactacgaccacagcagttagcctgcctgcctgctaaatacaatagctacttaccatgtcgggtacaacacaatgactgaaactaatacaacaaccggcctgcacgccgggtctgctgctgcacggcagcaggttgcgggtgaagcggttctccgcctcttcaccaattcctaacgattttaaaacatgttaaccgggagcccctccgtggacattctcggcttctcttgctgctgcagccagggcacttgaactggttgatgtgctctgccttccaggggttgatcccacgcacttgccatggaaccac

SEQ ID NO: 25596 - DNA, 329 bp, Oryza sativa
  Clone ID: uC-osflM2020117f09a1
ccagggagatccttctgggaaacaatatgtaatttaccaactttttgaaaaacaacaataaatcgtaaacaatggatagaagccatgagtgacactagtcggttgggcgaatacggagtactccgatcgataggaggctgggactcgctagttcttttccttctccttgttctgggaagggacgcggccgtcggtcccggcgagtatgctgtacttctccttgcgcgttagggcggtgcactcgaagccgagctggccgttaagcgttttttggatgtagttggccacctcgatgggcgacttgccgccgttgcaagtgagctccttgg

SEQ ID NO: 25597 - DNA, 407 bp, Oryza sativa
  Clone ID: uC-osflM2020117f10a1
tgtatatttttattttactttttttttttttgttcgggcaagttttgaagcgcttgccatgagggtcggtatagcgactgtacaatatcaatatggcagggtcttaatctcacccacatgatatgatggcatcgctctcacatgaagtagctcagtgcttaaaaattcctccaaccgaacttgtcatataggggggggccattgaagaagtttaaacaagcccacagggggagaggaaacgctaagcgcaaacctgctcatgggggggggagaaaaaatataatgtcagaggacgaatgtactcactaccatacaatgcagggttgaggcctgcctcccggctaagccacaggtctctcctgcgtttcctcctcaaggatttctcgaatggggtaatgagctgcggt

SEQ ID NO: 25598 - DNA, 443 bp, Oryza sativa
  Clone ID: uC-osflM2020117f11a1
cagaacagtcgaaggaattggatatcattaatcaattcagtccccataggaatcgaaaaaaaattcaaacgggatacaatatactacagtacttgtcagatccatacacccctctctagtcctgatctaccgactcaaggccattgcgcttcagtgaccgtgcttaattatacgccgcgataactagggtaactgctaatcacgaaatcttcatacttccatggtaatcaactcaaggtcaggctcggcgaaatcaactcaaggccgttaatgcgacgagaaccatcttccaactcgaccggccttgcagcatcggctaccgggtgaccacatggcgatcaatcgatcgagctctcaattctcaaatcgcagacgtgacgtcgtggcgatgatcatcagcgcgagtgcatgtgtccaaggcttcccagcgcgagccaatcctc

SEQ ID NO: 25599 - DNA, 437 bp, Oryza sativa
  unsure (1)..(437): unsure at all n locations
  Clone ID: uC-osflM2020117f12a1
agaaaaaacatcttggttgagaatggtattatagcgaagcccattttaataatggtatttgagcgaatcctatcttatgcgatagtagatatgtaattttctccatcgtgaccaccatcttcaccatctagctctaaagacgaacaaggaaaaaaaaacaaactcagaactagaccctgaactagaatttgaaaaataaacatgacgcgctccagaacctatggccgaaaacattcaggaaaacaaaagtttacagatttattatctatcactaaactgctaatagcgggatccgagaccaaaaaaaaaatgtagaagaagcggtgggctcatttcagcactatggnagcagagagcgcatttaattttgtacagaattctctaaacgattttaacgctttctcatttgctgcccgtccgcagttttatcacgagct

SEQ ID NO: 25600 - DNA, 449 bp, Oryza sativa
  Clone ID: uC-osflM2020117g01a1
ggaaattatttttgggaagggaccagttaggcactagcattagcatgagtttgtcctttatttttctagcaaattacacaaaataccgagggaaaaaggaggatggaattcaggtcgcactttcagctaggaatgcccagcccctgaattattaacaccacacagaattacggcgctgcgtgaatcccgaactaataaacacgcgccttgggtgggaacgactcaacttcactgtccaatgtgttcatgtggactggcctgtatgccaagcgaaccttctcattctcccagtaccccagcgagtgcttcatccattgctcatcatctcttttcgtgaaatcttcacgagcatgagctcctctgctttccttccgagcctctgctgagtgcatgggtatgcatgcatttatcaagagattttccaactcaatggtctctatcaaatctga

SEQ ID NO: 25601 - DNA, 440 bp, Oryza sativa
  unsure (1)..(440): unsure at all n locations
  Clone ID: uC-osflM2020117g02a1
ttttntttttttcttttttttttttttttttttttggggggtgaaaaacctccacagaggggattttatacagggttgatagaattcaatcaagacaacattatcatcatcacaacatactatcttacatacagattatttgccactaacatatgttacaaatacatgctacaagatcttaatattctaacttaaactaccctcatccagtacctgatgccgcgcttcagatgtgaggcacttttctcggactacaagttgtactccggacgctcataatcagcagccagcttttaggatggacctaaagcaagaggcgatgcacggttgaatgccctctcggaactgttcattgatgaaccgctgcttgcgtctccaatgagtgatggaaatgagggttgggattttcaagatcagcttccggccaccttttcggcttg

SEQ ID NO: 25602 - DNA, 473 bp, Oryza sativa
  unsure (1)..(473): unsure at all n locations
  Clone ID: uC-osflM2020117g03a1
gcaaaagtctccaattttgtgtgtatttggtgaatatacgtcagcaccgccacgtacggtctacacaagtacacatcagcgcgcgcgaaggtaaaatttctagcccccctctcaatcattttaatcctttaccaagacattggcacaagggggtgaccaaactaatcctctcaaaagaaacaccaaagcaattgttggtggatttccaacacaaccatgaatgcacagtgtatgatgttgttgcttgtaagggagctatccagaccaatttcgatcacatctactgcttttttgttttgcatcatactctattttgtacaccgcctgaattcttgtaccgactcagaaatgcagagttgaagcctcacatcaaattgatttggcgtcatgctcagcactagaaccccntagagttcttgaaaagagtccccagtccttttggccaaactcaactgttgcaataacacaaacgt

SEQ ID NO: 25603 - DNA, 441 bp, Oryza sativa
  unsure (1)..(441): unsure at all n locations
  Clone ID: uC-osflM2020117g04a1
ttttnttttttttttttttttttttttttttttttttgggggtttttttttttttttttttgtttttttttttttttttttttttttttggggaaaaaaaaggaaaggggggcccttaaaaaggaaacagtggttccaattaacaaattattttgggggaatcgccccccgaaaaatttggaaggggaaataagaaaaaacggttaaaaaggggggggggaaaaattttagggaaagaaaaaaaaaaggctggggggggggaaaaaaaaaagggccggggggggcaaaataggaaacaaaaactgcccgggaacgggggtttcccgggttggaaactaaaagaattttaagttggaatggggaaacaaaactggggtaggaaaaaatcctcccaaaccggaaaaagggggggggcttttggaaaaaaagccccctttgggg

SEQ ID NO: 25604 - DNA, 367 bp, Oryza sativa
  unsure (1)..(367): unsure at all n locations
  Clone ID: uC-osflM2020117g05a1
ttttntttttttcttttttttttttttttttttttttggtttttttttttttttttttttgtttttttaagcatcacagcctgaaaggttattccaccattcttcacatgcccattcatttgacatagttgcagagggcttaaaagggcccgaaaaccccacccaacgataaactgggggcttggctgcaaactggaaaaagctccattgcagcccaaagcaaacatttgtccatttttgacacaggagacgacaacctttcttcacaaaccatacacgatttaacatagttaacggggagcaacaacaggcgtacttaattactaggagcatctaccttatatcacaatagtagaggtaagatagg

SEQ ID NO: 25605 - DNA, 414 bp, Oryza sativa
  unsure (1)..(414): unsure at all n locations
  Clone ID: uC-osflM2020117g06a1
ccgccaagtgccaaggatcgacattttgaactagaaatgttagatggcaccggattattttttttccacctggtgctcttacaaatggagagaatggaatgagtagaattgattgcacgacatttattacataaataaccgttgatactcggtacgtgtccggtcgtctaccaatgtcggcggtgtagcagtagacctttattgaaggttggcgtgtggctcatgatgcgattacctccatagcagccactttgaaggattcatccatcaacttaaacttgtcagctggggcggcatcgaggacagctttagctgctttcttgagggcagtgaagttgcagcaactttcttctcatctccttgggccatcccgagagcagcaaaggcgaacattctccgcttncacgtggcagc

SEQ ID NO: 25606 - DNA, 443 bp, Oryza sativa
  unsure (1)..(443): unsure at all n locations
  Clone ID: uC-osflM2020117g07a1
agaataaacttgctactaaattaaagcggatcgtactacactactaatgagaccaaaaaccctgtccagtcttgagcacatgccaacaacaaaaaacaatgccttgcatgtggagatgtagatacacctatcctgcaaacataacactaacaactttcagagaaactgagcttggatggatcacatatgtaggcacctctggttcctagtacacaaaagggtcacggatagaataatctgatcctctctgaaagctccaaatcagaccaccttctgagtcatcgctcctatagacctgcattgaaagagatcttactggcccatctcacagatttgagggactntcgctgtccagagcgtatcaatggagtatgaagtgaatttgtggattggccaacaccacagccacattcttcaccatctgcgcattctgancgaagtac

SEQ ID NO: 25607 - DNA, 299 bp, Oryza sativa
  Clone ID: uC-osflM2020117g08a1
aaaaatattaaggggggacatggctacaactgttgaaaaccaccgccctgctaaggtgctttttatgggatggtaactttgaaggggctaattaacaaatacaatcacttgtttgaagcaaatgatctgcaaactgaatcatgtcctcctgaaaaaataaaagggataaaaatgtccagttggtttcgaccctttttttatttattccaccctgtaatttaaacgggaaacacatttctccaaatccaaatttggaattaaggtaccgaacaatgaactgagaaaagtaaaatcgatca

SEQ ID NO: 25608 - DNA, 471 bp, Oryza sativa
  Clone ID: uC-osflM2020117g09a1
gaagtgataatttaaatacttaatagtaatagactctttgatggagtattacaacatgcagcagtggcattaatacgccagtacattaattaagttacacatatgcaggctccattttggtttcttttaatttatcgtattacagaatttctgtagccttgctgatgatcacttggatatcatgtactagtaattaacaataggatgcatacaaaagatggcccaacgacaacagaagatgcgtgcatctgacattgtctggccttatttggttggtagtactccaattaattaacaagagatgatgcattcttgtgccttagtttcttcacatgcttggcttcacgttgagcctattcgcaatcttcacccccaacgactcatcacactgggagaggttagttgacccagtggccgcggagctcacgggagacgttggggtgcgcgagctcgccggcgaagcggcggatg

SEQ ID NO: 25609 - DNA, 304 bp, Oryza sativa
  Clone ID: uC-osflM2020117g10a1
actcacaaaagctgacaatttattaatagacaggaattcttggtagagtttatttacgtatatacaaaacatgtggaacaacaactgaataacacatttaaagaaactcagcttggtgtgatacatatcatgcattgttgcttctcagctttttcttaatcagtcttgcacctagcaatagtatatatgaactctgaagttcttaagccacagaatgtactggtgactttattctatgtctgaatgatatagctgccatcagagttcactgaaggacatcactgccccatctgttggccttggg

SEQ ID NO: 25610 - DNA, 524 bp, Oryza sativa
  Clone ID: uC-osflM2020117g11a1
accgaaccaaagagtagacatatatgcaggtcaatatatacaccaaatgaacatccccaaccttattcgtctagttacatatccgacgcacccagccccggactaacaggagtagtgcgttttgtgaattgtcctctttagcttgtcaaggataccagcagccttcctccgcgccctcgaagtgccattctgtgcgagccaggccagagagccattcaggttctcatcctcgacgacctccctaagtttcgtgcggtcgtacatacagatagagaagagcactgccaccgcattctctttgttacgtttgcattggtcatcctttatgatgtggagcatgcaaggcacgccaccagtctcgccgatctcctccaccgtctcatggtcgcttgatagcagagcaaggatagtcagcgactcatcagtgagtgattatcgctgatcgccttagcaccacgtcaataactccgtttttggggctcttgattattctatgcaactgcaagactaaaaagctgagctga

SEQ ID NO: 25611 - DNA, 381 bp, Oryza sativa
  Clone ID: uC-osflM2020117g12a1
ggagataaatattcttccttgaagtatattggatcaaacaacaaagtttatgattgacaatcccataaataaacttacatggtgttctgaaatctactctaatcagagtaaatttcacaaaaaaccacattttgcggtcaaagttgcataaacctccggatattatgactcgaggcacataaccctatgctctataacctagaagtatcataaaatccatcctagttcaaatttcagctaattttaccatccttgacataataatgttcaaaacgttgactgattaaactggtcatcctgatcaagtaaccaacatttgaacaatcactagtggttatggcatgaaaaatgaagtgaatatgtgtaacaggttggtttttt

SEQ ID NO: 25612 - DNA, 339 bp, Oryza sativa
  Clone ID: uC-osflM2020117h01a1
tttttttgcaggcaaaattgatctgatatacaatggagatggttgttttctatacaagggagcagatacaaaggggaggggattttttcctaaacaaggagataattacattgaacctccccggttgaaggttaacctcaacaacctaatatgctcaactcaggtgatcatcatgataactattccaacaccatctataatctgttacagccttacaggcaacttcagttcagaacaaactgcaggcagcaactcatagccatagcctcagcctataaggagtttctggggttaacaccagagagcagtgtaggcaaatgctctattaaagtctgtctg

SEQ ID NO: 25613 - DNA, 466 bp, Oryza sativa
  unsure (1)..(466): unsure at all n locations
  Clone ID: uC-osflM2020117h02a1
tttntatantttcataatttattttatatatattttgggttttttttttttttttattgttgtttaatcaatgtgaaggggatttttttttaaaaaaaaaaataaaggacattgaaaaaaacgggataaggcaaaaaaaaaaaaaccaaataggcacaactaagaagaaaataataaaatctaaaagaacacaaaaaataaattgttaaaggaaaaaacgaaaattaaaaaaaaaacaaactaaaagaaccaacatgtaaccatagcctaacacaaataggaaataatgccttaacaccatatagcagagatgacaaatgatctaaataaggctttgctaaaaaaaacgggaacttacaagtgtatataccaagttgtaaaatgacaaaaaaaataggcaatacttaaaaaaatgaaaaaagtaaagataacaatttttttggtaagaaaaaaaaaaagataatta

SEQ ID NO: 25614 - DNA, 379 bp, Oryza sativa
  Clone ID: uC-osflM2020117h03a1
caggcaatgatcattagctcgatttctcagttatttatcaccattcaataatcggcaataagcgggtaaccctgaaatcacaagcttacaggtaggtgcaaacctgccatcggaccaaaaactcatatatgaatagccacaacactctcatatctgagcagctcctctcgaacaccaacagctggggagtcaggggactagcagctcgttcgtcagaagtccaccaggaccaccgctgtggacgtcgccgccacctccgcctccacaggcggcggcgccggggcattggcgacacggcagttgcgtcgtatctctcccttctggggttctgcagctccccatcttgatcatcccttcgacgaaggccctgaagaaggcg

SEQ ID NO: 25615 - DNA, 529 bp, Oryza sativa
  unsure (1)..(529): unsure at all n locations
  Clone ID: uC-osflM2020117h04a1
aatgccaaaagaatccagggccattaatggaaaaaagaaccgagacatgatatagtaacagcacatttgctaaaagaacaaaattgtacggcagtactaatgttttgccagagctagtttagtcatagcagtttatcagctacataattatagccgcaaaatgcgaaatccaatacgcagaacgattgattgctgaaaacacatctgtacataaaagggttctctggacaaagtttcacgttatgaagctcagaagtaaaaaattatctgaaaagatccggttgatgggcagtgaaaggaggaaagcactttatttcagcactgtccaggagagcttaaagacgatgtgttcttcctagctgcatagactcggtaagcagctattgccacaactgcaacggcagctccaactgagacaaccataagggaacggctcagaagttgacggtattgactgcgtgttttcccagctcagtctctgaatgctcanagaggctgctgtgagcatggactattctacagaaatatt

SEQ ID NO: 25616 - DNA, 473 bp, Oryza sativa
  Clone ID: uC-osflM2020117h05a1
acccatagactcacccttggcaggtgatgcatcacagttttctttatgttacaccatatggaatgaggggatatacccaacttacatagtgatatgcacactgtaataatataatggtagagaaattttcccacgaacactgacaccacctgaaggtcgtcatttacaagcaggtgaagggtaagggaatagagagaaaaataatacaaaggataaatagccagagagatcccagagatctctgttattaactgtcaagtatctcaaactctgaatcctcaatgacatcccatgattccttcttggatagtgaagcaggtggagttggttgtggaggccggaggctatagtcagtagaagatgcaggtcttcttattactgaatcccgccggactgaggagctagcatagtggaggctccttcgatctgacagaagagaatccatgtatttgtccatgacaacaatatgggca

SEQ ID NO: 25617 - DNA, 285 bp, Oryza sativa
  Clone ID: uC-osflM2020117h06a1
acaaaaagaattgcttctatttcctcctgccattggcattgatgttggtaagagtgggcaatacatagttcaaaaagaaaaaaaaaagaaagaatggataatacatcggtgatctacgagactacatacaacaacaaagggctcttctatattgttctacgatgggcccaagctttgcttcctaccaggggaaagctttcaacactaaattgatttgagggcatgtataaacaaaaacctatgctcccgtgagatcatgcctgcaggactgcaacaatcgccatt

SEQ ID NO: 25618 - DNA, 395 bp, Oryza sativa
  unsure (1)..(395): unsure at all n locations
  Clone ID: uC-osflM2020117h07a1
ttntttattttttttttttttttttttttttttacgggggggattgatcgatcgattacaatagctgtgtttgacaacgttagattcaatcaaaaacatgggtgggtcaaaaaacagaggggcctataccaacagcaacaaatgatttgatgatgagttaatagaataatatccatccttctacgaccgagagagagagagggcactaagtaaacaattaatattggtaaacctggaccttactgaacaaacaacattaattgtgctaatacatatgtacaacaaacacttttttcagcacatcggagctgactgcggtgctaactcatgctttgctttgatttggtttactttcctagtggatttaccctgttatataggattctgaaacattg

SEQ ID NO: 25619 - DNA, 413 bp, Oryza sativa
  unsure (1)..(413): unsure at all n locations
  Clone ID: uC-osflM2020117h08a1
ttnatanttttctttttttttttttttttttttttggggttttttttttttttttgggcggaaaacctccattttgtttttatcttttttgccccccaatgaaaaaaaaagggggccggggcaataggccaaaaacccggccaaaaaaaacaccacgcggggggggcacaaaaaaccggccctaaagggaaccaaaccccaccggggggcacaaaaaatggggggaaaaaaggccccaaaaaccggggctggggacaatccccccaaattctggctaaaaaaaaccagggtaaaaaaaaggggggggggggcaaaacaccccaagaaaccctttggggacccgaggaagatggggggtaaaaccccggaacaaacctccccaaccaaggggccaaaacaaagaacaaaagggg

SEQ ID NO: 25620 - DNA, 377 bp, Oryza sativa
  Clone ID: uC-osflM2020117h09a1
gggggtgcaacttgtcaagggaacagctgaaatactgagttgccttacattatatgctacgaatataattaaaatgttcaccgcaaaagaatgtaattggaatatatccgtataaataacatcccatagtatgtgtaacaacgacccctcaaacaaatgactaaaataacgggtgtcacaaaagaagaaaaaaattcacaatttacgctgctgggctggcttcttcgcaggcaaaataaggcttcacagttccatcgtatcagcagctagcgccagcactgaagtagctaataaacagtggcataacttagataaaaaaggtcttcatctacacaaaaaggaagatcccattctagccccctcaggtatttacacag

SEQ ID NO: 25621 - DNA, 339 bp, Oryza sativa
  Clone ID: uC-osflM2020117h10a1
acggccagaaactgaaacaattcattggatcacacatatgtaccaaaatgtagtagctaggggcggcagcccacaatagtgccaggcgtcaaggtatcaagctgaacatccatccccaagaatacagcaaaagaaaaaaaaagaagagaaaagaatggctacgtaggagtggtaaaataaaaagaataactatccgtagctcaacacaaattctcaaaagctctagccccgccatgcttctgctacacaggagaggtgaagactacacttagatcatatgatcagagaagcgcatagcaccagcagcgcgacgatgatcgaggcgtcggtccgcatttt

SEQ ID NO: 25622 - DNA, 392 bp, Oryza sativa
  unsure (1)..(392): unsure at all n locations
  Clone ID: uC-osflM2020117h11a1
ttnttttttacacaaagtttcttttttaattttttggggtttttttattttttttttgggggtaacccaaaaacaaaattacaacactagtacaaaacaaaaagcncccccgcggcaaaggggcaagcacacaagaatccaccaacacgcaaaccaggggggggagcaaagatcagggggggggggggggggaaccaccacgaaaaggggtagacggcgggggcagggaaacaaaagacggagcccccccgggaccgaaaccagcgggacagggggagccaaaggcgggaccccccccaacaggagagcacaccgcccgccaaaacaaaaacaaaggggggcaggaacggcagccgccccacaaggaaacacaagggacgaccccaaggccc

SEQ ID NO: 25623 - DNA, 418 bp, Oryza sativa
  Clone ID: uC-osflM2020117h12a1
aacctgaaatcattcttaattccattggtcttgggaaggttttcccccctgtaatgctataccattatcaccctcttgtatatatataaaagcggtttaccctcgtttacaacacaaagaagtgaaaattgcagactagtaaactttgatctttcaggaagtgaagtccaaaacagaatcaagaaattgtatagatggtggtggctggcaaccatcatatggcatctgaaaaattctgaaaccagtagcactatatcatgatgatgcctgtttcctgcccagggtgagagctcactcctttccatcagcagcacggagggagccaagctgcaccggcgcctgagtctgcactactttggatgacccgtaggccgacaagtcgacgccctcggccttctccttctcgagctgctccttg

SEQ ID NO: 25624 - DNA, 491 bp, Oryza sativa
  Clone ID: uC-osflM2020118a01a1
caacaaacattagaattttacaattgcgcaggaatataaattacactactttccccttttatttatgacacaagatggctacaaacgaagcactagaagccccctattaacacagcaccactaaatcatcaggatccacagttcctaaatacacagcacggtaggaacatataagttacttgccagttgaaatgaaacagggcccagcgaagggaatggttggcgtttttaatgcatgaactgtattacagccagttgcgatcagaggtgctagccccggtgctaaagttcaattgcttctgataatccatactgttagcaagcatagccgcaatgttgccaccatgcaccctgccttctggaacagggtgattgaacatgatgaagagcctgcttggtgttagcggcaaatgtctaccaaagttgaaagaatttccaggaagggtcccatgactaacatcagaatcagcaccagtagaaccaggcagggc

SEQ ID NO: 25625 - DNA, 528 bp, Oryza sativa
  unsure (1)..(528): unsure at all n locations
  Clone ID: uC-osflM2020118a03a1
agnncagatccacaaggttcacagccactgtagcaagtacagataaggtagaagctaagtaacttgttccagcctcatatagcagttacagatagatagtttcactgccaaatagtacttgagacttcagcatctaagctagacacagcacatactaacatactaacatagctatatagcgcaactagaagcgcccgacagacacatgccgcttcttggatgtccagaatgtttattccatttgtccttatatatacaggcaccagttgctacaccccaaacccctcagtagaactcggccgacacgggcatgtcatcgaagctccaaaggtccatgctactggccacatcttgagatccatcagagctcaaaggggtggtaatcgactcatccgaaccaccttcgatcagaaatttcatgtacggctccaggtcagcaagatcaatgctagcattccccatcacaggaggtaccattgcatcactggcattgttctggaggaatgcggagtcatcaacacctgtcat

SEQ ID NO: 25626 - DNA, 323 bp, Oryza sativa
  unsure (1)..(323): unsure at all n locations
  Clone ID: uC-osflM2020118a04a1
cttgaaangggggcatgtaactggcttgacggccattatttttctattgtgcagtacacagccagagagatgaaagattacaagataatatgattcataggactaatagtcttcataaatagatggataaattatgcaacagtacacaaagaggtacatagttcacatcccgaattgatagaatggtaagttgtcagcaaccagattagcatagagttgttcagctgacagaagccatgtagcatagagttcataacttcttaagaggctgcagcagcagcctcctccaggagctgcttcaccttgtgatgtagtcgctcatt

SEQ ID NO: 25627 - DNA, 460 bp, Oryza sativa
  Clone ID: uC-osflM2020118a05a1
attatccttattttttttatttatttctggggtttttttaaattactgtggggggccaaaccaatttgacgcgagaaaacttacctactggcaacaacagaagctccattttggttcctccaaacaaaatggaccccaaaaacaaactagccttgctaaaaaaaaattcaaaaaaggggactgcccccggaaaatccgaaaaacaaacagatgggtttttttggaagtgaggtcaaaactgattcccccctgtttaaaccccgcaaaaaaagctcgcccaatttataggaaaggatgcttcccagttaaagaaagatcccccaccccccccccaaacaattaatgttatgtatggaccacctttaaattataaccataaggggatgtcttgcattcgccttcaagagcttttttccatattaccccagcaaaaaaaaaaaattgaggcccactggataaa

SEQ ID NO: 25628 - DNA, 531 bp, Oryza sativa
  Clone ID: uC-osflM2020118a06a1
gccgcccttttttttttttttgtgaggaagcgcggcaataaaacattgcattgagttctgaacgataaacaccaggaaccggcgtttatttgaggcaagcactgcccaaaatctcgcaaaagtactgaaaccttagacatagtacacatccatggcaaacatggatgccaaatgacaactacagaaaattatcaaattcgaatgcagctgacggcttctcctgctgaagatgcatattttcccctccattacttggatgtgctctctccatcgacagccaatgggacggcgctggccaggctgcggtattttcagagcatagaacatctcaatgtaacggcgagtctcgcgcctctcaaggttgcttacgtacttccagaatccgtatacaccagtcaaggtcatcagcctctcagagtacagcttccaggtgtacttctcgtaaatcctctgcagacctccctgtgaaatattgtcccagtaggttgaatcctgcttgcacttctcaagaagttgaccaagatatcagca

SEQ ID NO: 25629 - DNA, 507 bp, Oryza sativa
  Clone ID: uC-osflM2020118a07a1
atagattcatctctatttatggatcaaaattaaagaaaagaattatacatagtattaacctgcacgtatcaaccccctaggatatacacacacaccccaagtgtacaaaaaaaataaaattttgaaattcttcatattctgttcttcctcaatgaccgaaaagggcctgaaatcaaatgaattcccttctgttggccagatctgttagtgattcaccttcaccatttcctttgggaaaccaaaataatcttaatttttcataaccgcgaatttttagcctttttgggcctgacaacgctggcggtcagcttgatcctaggaatggaaaattcgccacttatcactttagaagcaacgatctcgtttgcagcatcgctgaagtggaccccatcccagctgatgaacttctcaccaagcttacacaggtccttgtcattggccgtgcagcttttctcggatcatagttgtaagggggccctccatgtccacaacatgtcatcaatggct

SEQ ID NO: 25630 - DNA, 441 bp, Oryza sativa
  Clone ID: uC-osflM2020118a08a1
ggcggcggcggcagagttaggtggcggcgaggacgagcggcgggcgcgggcgctgtcgtcgtcgtcgtcgtcgctgcggcagcgcgcgatgagcgcgtcgtcgaagctgctccggacgtcgctgagcaggagcagcaagggggcggcggcgcggcagcggagcagcaaggtgatgtcggtgtcgatcgaggacgtgcgcgacgcggaggagatgaagtcggtggacgcgttccggcagacgctggtgctggaggagctcctcccggcgcgccacgacgactaccacatgatgctccgcttcctccgcgcccgcaagttcgacatcgacaagagcaagcagatgtggagcgacatgctgcaatggcgcatggagttacggatctgacaccatactcgacgacttccagctcgaggagacggaccaggtgctcgagcactacc

SEQ ID NO: 25631 - DNA, 478 bp, Oryza sativa
  Clone ID: uC-osflM2020118a09a1
tttttcttctttttttttttttttgtattttttcctgtgtttatttttttttactgtaagggtacataccattacggagagttaatactcactcacgggggacaggaggagccacactctaaaaacaggggacaaaattgctccgcagaacaaactcagggtacaaaaaaaacatccaacacacaagcacggacgaacgcatgtggattctacaaacgccgtagaggctcggaagggaggtgcaaaacttatctctcaactgccttatgggctgagattaacagaatgccacgaacaaccagcgggtgcagcacaactattgctagaccccttaccttggaattgcgcgattcaaggaatgctgcgaccacctagcaactgagcccatcagcccatgtcttgcattggccttcaagagctaaattccatccgctggcaccaaatgctggaaacccaaggataagtctcctgaccagac

SEQ ID NO: 25632 - DNA, 489 bp, Oryza sativa
  unsure (1)..(489): unsure at all n locations
  Clone ID: uC-osflM2020118a10a1
ggcagncataccaaggtaaatgcaattttactgtaaaggtacataacattacggagagttaatactcactcactggtgacagcagtagctacactcttttaacaggtgacaaaattgctccgcagaacatactcatgttacaaaaaaaacatccaacacagaagcacggatgttcgtctgtcgatttctcgtattgctgtagatgcttggaagtcaggtgcaaaactcatttttcgactgctttatggtctgagattttcagaatgccacgatcaaccagcggctgcagctcagcttttgcaagatcccttaccttggaatcgggcgattcaaggaatgctgcgaccaccttggaactgtgcccatcagcccatgtcttgcatttgccttcaagagcttttttccataggatggcagcaaatgctggagattcaagtataagtcttctgattagacggctggaatgatagttatcaaaggcatgttcag

SEQ ID NO: 25633 - DNA, 450 bp, Oryza sativa
  Clone ID: uC-osflM2020118a11a1
aaatacttaatagtaatagactgggtgatggagtattacaacatgcagcagtggcattaatacgccagtacattaattaagttacacatatgcaggctccattttggtttcttttaatttatcgtattacagaatttctgtagccttgctgatgatcacttggatatcatgtactagtaattaacaataggatgcatacaaaagatggcccaacgacaacagaagatgcgtgcatctgacattgtctggccttatttggttggtagtactccaattaattaacaagagatgatgcattcttgtgccttagtttcttcacatgcttggcttcacgttgagcctattcgcaatcttcacccccaacgactcatcacactgggagaaggtagttgacccagatggcgcggagctcaggggagacctgggggtgcgcgagctcgtccgcgaagc

SEQ ID NO: 25634 - DNA, 698 bp, Oryza sativa
  Clone ID: uC-osflM2020118a12a1
aaccaaacactatccaaaaacccccaaaaaaacacaaaccacaaacacaacacacaacccaaccaaacacagaccccaaaagacaaccacaaaaaaccaccaaaccccaacacaactaacgacacccccccctgcaaacaccaaaaatccccaccatcaccaaaaagtactcccccccaccaacagcccaaataaacccccaccccaattcccccccactccacacacaaaaaacaccccaacctaaccccaaaccctccccccccccaaaaactcccaacatccccccaaaaaaccccacacaccaaacaaagccaaaacccccccaaaaaacacctcccaagaaaacacccccaaaaaaccccaccaacccccccaaaaaaaaccaccccaacaaacctaaaacccccttacccctaacaaaaaaccaacccaaaaacccaacacccctaccacccaaaaaaaaaccaaaaacccacccaacaccccaacaacaaaaccccaacaggccccccaacaaaccccaactaaaccaaacccaccccaaaccccaaaacacacaccaacccccacaaaacaaaccaaacaaaccccccaataccaaaaacccaacccccccccaccaccccgacacacaaacaaccaacaaaacccacacacctcgtccacaaccccacccttaacaaaccccccccccc

SEQ ID NO: 25635 - DNA, 347 bp, Oryza sativa
  Clone ID: uC-osflM2020118b02a1
ccccggccctaaacaaaccataacgagggggttatataatataaaccctttccttccaactatcacaaaaacaagctcactttggtttttaattaaacaaatacaaaatgtgaaccaaaacagcaaaaccaataaattaaagaaccaaaaccaaaaggtttctcttccatcagggaatgagttcagctgccattgtggtgaatctggtgatcaggcagctgcaacctcaaacggactcactggtgctcttgaccttggatctgtagaggagcttcttcttctttggagcagggtgggtgatcggtaggacaatctttcctggctcggcaaccctggaggtggccttc

SEQ ID NO: 25636 - DNA, 393 bp, Oryza sativa
  unsure (1)..(393): unsure at all n locations
  Clone ID: uC-osflM2020118b03a1
aaacngaaatgaagctgaaatcatataggacagatgttatttcatatttcctgcaagacgcatctcccattggcaaaatgcttcttgcagcaacgccactctgtcacgtacaaaatgcatggggattccagcgaacgcaagaacaacgagagggcctacatgtccttactacacagagcacgcggccaccgggtcaaaccatcgccgtcaccggctgcgccggcggatggtttcgaggagcctgcttgaacgcctctgttgtgccaatacaggagcccctgctgccatgctcgtggaccagctcggcgggaatgagtccatcctcatccgggtagggtgctcgccgacacgccttcgttggaacagcacctactccacgttacggtgcttcag

SEQ ID NO: 25637 - DNA, 472 bp, Oryza sativa
  Clone ID: uC-osflM2020118b04a1
cttatccctttttttttttttttttttttggggttttttttaatttttttttggttttttccccttttttttttttttttttttttttttttttttttttctcttttttttttggggggtgggggggaaaaccctttttttttttttagggcccccctaaaaccccctttttccagggcccggccccccggaccatttaaaaaaacccttggggaaaaaaaatttgacctggggaaaaaggggctttaaaaaaaaaattcccccttttggggggaaaccccttcaccctttttttttacccccctccccggggggggtaaaaaccccccccccctaaaattttccccggggggggccccccgggggggaaccccccttttaaacacgcccccctttttggggaaaaaacccaccccccccggggcctaaaaaaaaggggggtttttcggggaattcccccctcccaaaaggg

SEQ ID NO: 25638 - DNA, 474 bp, Oryza sativa
  Clone ID: uC-osflM2020118b05a1
cacaacaggagtatctaaattcagaattggctaataaatttacaattatcttagtttacaactacattttcccacagatgtaagatccagaagctaaaatgctggagttatattgacaccaagggacacagcaatgaagatgtttcatgctgctgcatctgcacaaaattgttgccctcttttcaggagcgacaagacatttctgaactgcggatcagcggatattcatgagcaccttgctaccttcatctcctatgtattcaccacaaaaaatactggatctaatagatctgaattttcacacagctagcaccccaacaatattaacgtaagctagcgaacctatgtggtatgtcacaagcagctaaataaataatggagcctcagcatgaacacatacaatctacagagagcacacacatgatctgcatataacaaatcacaatgggagaagagaccggacatactgccggg

SEQ ID NO: 25639 - DNA, 360 bp, Oryza sativa
  Clone ID: uC-osflM2020118b06a1
ctagccataacggacgcaccacaccaatggctacgtcggttcgaccaactatgcacaatgtcaaaaacaaccaatcatggcaccctacgccagggcaagaaccatagccacactcatcaaccttcaactcacaattgcatcatagggcacctagcaggccggaatgagaagggtcatttgccaaatggccaccacaagtgagaatccggcccaccctgatggttgccccactttcttcgctgctacagacctgaacctctgggcggaactcccctgagcagtgggcctgtcgatctgcgcggcaaaactccctggagatgtcctgaaaccatctggccccaaaccccaaccatctggtga

SEQ ID NO: 25640 - DNA, 491 bp, Oryza sativa
  Clone ID: uC-osflM2020118b07a1
agagtgaaaaaaaattctaatgctaatttaggaaggggtacaccaggagcaaattaagtggagtaatccaacaaaatgaaaaagaagcctagagacacacacacacacacagaactaatagtacaattttgtaactacagaactctccaatctccaataagaccgacatggtgttacaaggaagcagggtagcctgatgcttaaacagtgactaatatcgggacagctacagcaattgcagttagactcttctgcctgaagatggaaaacctactggaactcagatacatcttttacaagtcagaaagaaatgaagccatctttggccgccaccggcgatcatggtgtgcggctgcagcagtgacagaccaggaatttcatggatcctggtcagttcatctcagtttcaggctccagaggcggtgaccttcacatcgcccgatggtgttctcgcgctgtcaggtatcgactgagcaggagatgcccagctc

SEQ ID NO: 25641 - DNA, 391 bp, Oryza sativa
  Clone ID: uC-osflM2020118b08a1
ggggccccccaaaaaaaaaattaaaccttggggggggaaaatttcccccggggaaaaaaaaatttccctaagggggggcccccctagggaacaaccgggggtccccccaagggggggggggttttcccgggtaatttaataaactggggggtccaccaaagcccgccccccttttaagttaacgggagcccctccctagggaaaaaagggggggaatggtccaaaaaaaccggttgggggggtttttgttaacagcaaaacacaccttgccctaaaaaagggggcccaataaaaaaaaaacccgggccggggaaacccccgtaggattcccctgaacttgggttttttggggggcccccccttaaagctctcgccccccggggggggcggg

SEQ ID NO: 25642 - DNA, 425 bp, Oryza sativa
  Clone ID: uC-osflM2020118b09a1
aggaccaagcgccaagcactatgaacaagtcatatgcctggcaacaagcaggaaacaataataagaatggcagtaatacagccgataataaaggagatgctttctcatgggacaccatagttctcaaactacatgaacacaaagttccagacacaaggaaacacagctcacaatagtagatagacttccatacctggatggaacatacttcttagagatttgataggccatcaatagggaccagaccggtcacgactgtaacggtcacccccaccttcaccgtagccaccaccattttgactacgaccagaataacggtcaccaccacggtcagatccataaggggcggcaccggcaccaccaccaccgtacctatcatttggggcaccatatttattacctttaccaccaccattttcagatgg

SEQ ID NO: 25643 - DNA, 207 bp, Oryza sativa
  Clone ID: uC-osflM2020118b10a1
tttttctccttacccattttttttttttttttttttgggttttttttttattttttttttgggttttccaaagggggaaaggggggggcaaaccaaacggaggagggacagcggggccaacaggcccggcaaccacaaattcatagacatgcgccctcaaaccaccaaaacaaaaagggcgggcccggaaacaggagcgacaagaca

SEQ ID NO: 25644 - DNA, 411 bp, Oryza sativa
  Clone ID: uC-osflM2020118b11a1
agaacaaactgtgtttatggactgaactgaaacttgattatacagtttgccacgactcctaactcaagcccctatgacgtggatacatatgtacaaaagttttgacacctgagaaaatgatctagtttccctacatggatagctagctagtagctatctcatgtcatggagtgttgccaagaaggcgtccaacttgacattgtcacctcgagacaagaacttgatgcagatgggcgccctggcacccatgagtgtcagcatggacagcaagatcgagccgacgccgtcgccgcagatgagccccgacgccagcgccggcgagagcatccgcccgcggccggcgtccatcttctccacaggtacgccaccaggctgccgatgcacatgccgactggcacgcgcggcggcatg

SEQ ID NO: 25645 - DNA, 214 bp, Oryza sativa
  Clone ID: uC-osflM2020118c01a1
tacatacctaaattctgttcatggattaacgaaaatgtgcaagaactctatttgcctctgccattctatgaaacgctaactcattgcaaatggcacccccaccccctaagacagaatctactaaaacggaactaaattcgaaagccaaatttcaacccggacgctcaagcaatgctttaaataaccaaagaacggcaagtgctctaccttgatt

SEQ ID NO: 25646 - DNA, 369 bp, Oryza sativa
  unsure (1)..(369): unsure at all n locations
  Clone ID: uC-osflM2020118c02a1
ccatttcctcntaaccccggcaaacaaaaaccanagagtgtggacttttaaagaaaacgacggggaaccccccacaccacccaaaaaaaagccaccaacaaacgacaggaaaacaccaacaacaaaacgaaacacaagcaacaaaaaaaccacccgccggggaaagagaaaaccaagaacaccagacccccaaccacaagaattttttagagttttaaaaaaaacatttaaaaaatccctttttttttgataatggggaaacaactttccttaattgattacccaacctttacccaccgcaaatttttttaaaacattccaactctttatctaacccctgatacatccctcttatacaccaaactccac

SEQ ID NO: 25647 - DNA, 498 bp, Oryza sativa
  Clone ID: uC-osflM2020118c03a1
aaaccacgatttataaagtgccggagatgaagtacacaaattaacattacatcgagttttaataaaacatcatgcgaaaagccagcaaaaacaaaaggcagcatacagctaatgaagctctactggagtagctcgcaaaaggtccgacttattttcagtagcactctactccatttcttccgaaagagtgaccatcttctactgggtgttgtacatgtgacggatcaggtcaacaacgcgagagctgtatccccattcgttgtcataccaagacacaagcttaacaaagttgtcattgagagcaataccggcctttgcatcaaagatgcttgacctgttgtcacctgggaagtctgtggaaacaaggtcctcctcaacgtaacccagaatacccttgagtttcccctcagactcctccttgatagctgccttaatctgatcataggatgctggcttctcaagcctgacagtcaaatcaacgacagagacatccacggt

SEQ ID NO: 25648 - DNA, 488 bp, Oryza sativa
  unsure (1)..(488): unsure at all n locations
  Clone ID: uC-osflM2020118c04a1
anncnnnnnnnatcagagatgttctgagcaaacatgttcataatttggcagtatatcagagatgttcgtgctttctttataactttatacagtgacacaatggttttccgtttatacatacatacatacataattacatcactaagtagactataaacaatcccaattcaagccacacacacaacacaaattcttcattcttcacacgcaccgtgtgatcgggccacgaggctcacatgacggggtagctcggcagcagcgcgatgccgcacagcccggacgccaagccggcgacgtcgcgctgcatgaggatgtagccggcgtngccccactccgccccccacgagttcttcacgatccagtacttctcgccgcctttcgccgcgccgccgccgtccgttttcggctcggactcgccgtagccaccacggtgacccgttgttgacgtcgcggtgcacggcccgtgagaccccgtgccgtaagctgga

SEQ ID NO: 25649 - DNA, 490 bp, Oryza sativa
  unsure (1)..(490): unsure at all n locations
  Clone ID: uC-osflM2020118c05a1
aagcnccntaaagttaaatttcttcctgatagatagcattgtacatactgtacgtaatatcatttacatattgagagtatacagagtggcaacacaaagcaaatggaaactcgagcgacagaagctggcaagctgcccttgtccctgcggaggaagagcgcctcataaaccggagaattgatggctactatcagtacacacagaacagcctggagaaacaaagtttccaaaccccctgggccttcttgtaacaaaactctactaattcctaacaccatgcatgccaagttgagcagcgcaactgtcgtaaggattacaaacatcgccgagaaggatccgaattccatcatccccttcttgtacctctccaaggcctgcaagatcagtgaccttcactgtcaggttgaatccagactcagagatgcccaatattcttgcgaatgtgtcgatggttgccaggaggtatgaggtggatccttctaatgagcca
